United States Patent Application Publication US 2024/0390523 A1 - sequence listing, part 2

SEQ ID NO: 2010 - RNA, 100 nt, synthetic construct; identical to SEQ ID NO: 1903
  source 1..100: mol_type = other RNA
  modified_base 1: mod_base = OTHER; note = 2'-O-methyl ribonucleotide
  modified_base 2: mod_base = OTHER; note = 2'-O-methyl ribonucleotide
  modified_base 3: mod_base = OTHER; note = 2'-O-methyl ribonucleotide
  modified_base 21: mod_base = OTHER; note = 2'-O-methyl ribonucleotide
  modified_base 28: mod_base = OTHER; note = 2'-O-methyl ribonucleotide
  modified_base 29: mod_base = OTHER; note = 2'-O-methyl ribonucleotide
  modified_base 30: mod_base = OTHER; note = 2'-O-methyl ribonucleotide
  modified_base 31: mod_base = OTHER; note = 2'-O-methyl ribonucleotide
  modified_base 32: mod_base = OTHER; note = 2'-O-methyl ribonucleotide
  modified_base 33: mod_base = OTHER; note = 2'-O-methyl ribonucleotide
  modified_base 35: mod_base = OTHER; note = 2'-O-methyl ribonucleotide
  modified_base 36: mod_base = OTHER; note = 2'-O-methyl ribonucleotide
  modified_base 37: mod_base = OTHER; note = 2'-O-methyl ribonucleotide
  modified_base 38: mod_base = OTHER; note = 2'-O-methyl ribonucleotide
  modified_base 39: mod_base = OTHER; note = 2'-O-methyl ribonucleotide
  modified_base 40: mod_base = OTHER; note = 2'-O-methyl ribonucleotide
  modified_base 41: mod_base = OTHER; note = 2'-O-methyl ribonucleotide
  modified_base 42: mod_base = OTHER; note = 2'-O-methyl ribonucleotide
  modified_base 46: mod_base = OTHER; note = 2'-O-methyl ribonucleotide
  modified_base 48: mod_base = OTHER; note = 2'-O-methyl ribonucleotide
  modified_base 50: mod_base = OTHER; note = 2'-O-methyl ribonucleotide
  modified_base 52: mod_base = OTHER; note = 2'-O-methyl ribonucleotide
  modified_base 53: mod_base = OTHER; note = 2'-O-methyl ribonucleotide
  modified_base 54: mod_base = OTHER; note = 2'-O-methyl ribonucleotide
  modified_base 55: mod_base = OTHER; note = 2'-O-methyl ribonucleotide
  modified_base 56: mod_base = OTHER; note = 2'-O-methyl ribonucleotide
  modified_base 60: mod_base = OTHER; note = 2'-O-methyl ribonucleotide
  modified_base 61: mod_base = OTHER; note = 2'-O-methyl ribonucleotide
  modified_base 66: mod_base = OTHER; note = 2'-O-methyl ribonucleotide
  modified_base 67: mod_base = OTHER; note = 2'-O-methyl ribonucleotide
  modified_base 70: mod_base = OTHER; note = 2'-O-methyl ribonucleotide
  modified_base 71: mod_base = OTHER; note = 2'-O-methyl ribonucleotide
  modified_base 72: mod_base = OTHER; note = 2'-O-methyl ribonucleotide
  modified_base 73: mod_base = OTHER; note = 2'-O-methyl ribonucleotide
  modified_base 74: mod_base = OTHER; note = 2'-O-methyl ribonucleotide
  modified_base 75: mod_base = OTHER; note = 2'-O-methyl ribonucleotide
  modified_base 76: mod_base = OTHER; note = 2'-O-methyl ribonucleotide
  modified_base 77: mod_base = OTHER; note = 2'-O-methyl ribonucleotide
  modified_base 78: mod_base = OTHER; note = 2'-O-methyl ribonucleotide
  modified_base 79: mod_base = OTHER; note = 2'-O-methyl ribonucleotide
  modified_base 80: mod_base = OTHER; note = 2'-O-methyl ribonucleotide
  modified_base 81: mod_base = OTHER; note = 2'-O-methyl ribonucleotide
  modified_base 83: mod_base = OTHER; note = 2'-O-methyl ribonucleotide
  modified_base 84: mod_base = OTHER; note = 2'-O-methyl ribonucleotide
  modified_base 85: mod_base = OTHER; note = 2'-O-methyl ribonucleotide
  modified_base 86: mod_base = OTHER; note = 2'-O-methyl ribonucleotide
  modified_base 87: mod_base = OTHER; note = 2'-O-methyl ribonucleotide
  modified_base 88: mod_base = OTHER; note = 2'-O-methyl ribonucleotide
  modified_base 89: mod_base = OTHER; note = 2'-O-methyl ribonucleotide
  modified_base 90: mod_base = OTHER; note = 2'-O-methyl ribonucleotide
  modified_base 91: mod_base = OTHER; note = 2'-O-methyl ribonucleotide
  modified_base 92: mod_base = OTHER; note = 2'-O-methyl ribonucleotide
  modified_base 93: mod_base = OTHER; note = 2'-O-methyl ribonucleotide
  modified_base 94: mod_base = OTHER; note = 2'-O-methyl ribonucleotide
  modified_base 95: mod_base = OTHER; note = 2'-O-methyl ribonucleotide
  modified_base 96: mod_base = OTHER; note = 2'-O-methyl ribonucleotide
  modified_base 97: mod_base = OTHER; note = 2'-O-methyl ribonucleotide
  modified_base 98: mod_base = OTHER; note = 2'-O-methyl ribonucleotide
  modified_base 99: mod_base = OTHER; note = 2'-O-methyl ribonucleotide
  modified_base 100: mod_base = OTHER; note = 2'-O-methyl ribonucleotide
  modified_base 34: mod_base = OTHER; note = nebularine
  modified_base 57: mod_base = OTHER; note = nebularine
  modified_base 65: mod_base = OTHER; note = nebularine
  modified_base 1..4: mod_base = OTHER; note = phosphorothioate linkage
  modified_base 98..100: mod_base = OTHER; note = phosphorothioate linkage

SEQ ID NO: 2011 - RNA, 100 nt, synthetic construct; identical to SEQ ID NO: 1904
  source 1..100: mol_type = other RNA
  modified_base 1: mod_base = OTHER; note = 2'-O-methyl ribonucleotide
  modified_base 2: mod_base = OTHER; note = 2'-O-methyl ribonucleotide
  modified_base 3: mod_base = OTHER; note = 2'-O-methyl ribonucleotide
  modified_base 21: mod_base = OTHER; note = 2'-O-methyl ribonucleotide
  modified_base 29: mod_base = OTHER; note = 2'-O-methyl ribonucleotide
  modified_base 30: mod_base = OTHER; note = 2'-O-methyl ribonucleotide
  modified_base 31: mod_base = OTHER; note = 2'-O-methyl ribonucleotide
  modified_base 32: mod_base = OTHER; note = 2'-O-methyl ribonucleotide
  modified_base 33: mod_base = OTHER; note = 2'-O-methyl ribonucleotide
  modified_base 35: mod_base = OTHER; note = 2'-O-methyl ribonucleotide
  modified_base 36: mod_base = OTHER; note = 2'-O-methyl ribonucleotide
  modified_base 37: mod_base = OTHER; note = 2'-O-methyl ribonucleotide
  modified_base 38: mod_base = OTHER; note = 2'-O-methyl ribonucleotide
  modified_base 39: mod_base = OTHER; note = 2'-O-methyl ribonucleotide
  modified_base 40: mod_base = OTHER; note = 2'-O-methyl ribonucleotide
  modified_base 41: mod_base = OTHER; note = 2'-O-methyl ribonucleotide
  modified_base 46: mod_base = OTHER; note = 2'-O-methyl ribonucleotide
  modified_base 48: mod_base = OTHER; note = 2'-O-methyl ribonucleotide
  modified_base 50: mod_base = OTHER; note = 2'-O-methyl ribonucleotide
  modified_base 52: mod_base = OTHER; note = 2'-O-methyl ribonucleotide
  modified_base 53: mod_base = OTHER; note = 2'-O-methyl ribonucleotide
  modified_base 54: mod_base = OTHER; note = 2'-O-methyl ribonucleotide
  modified_base 55: mod_base = OTHER; note = 2'-O-methyl ribonucleotide
  modified_base 56: mod_base = OTHER; note = 2'-O-methyl ribonucleotide
  modified_base 60: mod_base = OTHER; note = 2'-O-methyl ribonucleotide
  modified_base 61: mod_base = OTHER; note = 2'-O-methyl ribonucleotide
  modified_base 66: mod_base = OTHER; note = 2'-O-methyl ribonucleotide
  modified_base 67: mod_base = OTHER; note = 2'-O-methyl ribonucleotide
  modified_base 70: mod_base = OTHER; note = 2'-O-methyl ribonucleotide
  modified_base 71: mod_base = OTHER; note = 2'-O-methyl ribonucleotide
  modified_base 72: mod_base = OTHER; note = 2'-O-methyl ribonucleotide
  modified_base 73: mod_base = OTHER; note = 2'-O-methyl ribonucleotide
  modified_base 74: mod_base = OTHER; note = 2'-O-methyl ribonucleotide
  modified_base 75: mod_base = OTHER; note = 2'-O-methyl ribonucleotide
  modified_base 76: mod_base = OTHER; note = 2'-O-methyl ribonucleotide
  modified_base 77: mod_base = OTHER; note = 2'-O-methyl ribonucleotide
  modified_base 78: mod_base = OTHER; note = 2'-O-methyl ribonucleotide
  modified_base 79: mod_base = OTHER; note = 2'-O-methyl ribonucleotide
  modified_base 80: mod_base = OTHER; note = 2'-O-methyl ribonucleotide
  modified_base 81: mod_base = OTHER; note = 2'-O-methyl ribonucleotide
  modified_base 83: mod_base = OTHER; note = 2'-O-methyl ribonucleotide
  modified_base 84: mod_base = OTHER; note = 2'-O-methyl ribonucleotide
  modified_base 85: mod_base = OTHER; note = 2'-O-methyl ribonucleotide
  modified_base 86: mod_base = OTHER; note = 2'-O-methyl ribonucleotide
  modified_base 87: mod_base = OTHER; note = 2'-O-methyl ribonucleotide
  modified_base 88: mod_base = OTHER; note = 2'-O-methyl ribonucleotide
  modified_base 89: mod_base = OTHER; note = 2'-O-methyl ribonucleotide
  modified_base 90: mod_base = OTHER; note = 2'-O-methyl ribonucleotide
  modified_base 91: mod_base = OTHER; note = 2'-O-methyl ribonucleotide
  modified_base 92: mod_base = OTHER; note = 2'-O-methyl ribonucleotide
  modified_base 93: mod_base = OTHER; note = 2'-O-methyl ribonucleotide
  modified_base 94: mod_base = OTHER; note = 2'-O-methyl ribonucleotide
  modified_base 95: mod_base = OTHER; note = 2'-O-methyl ribonucleotide
  modified_base 96: mod_base = OTHER; note = 2'-O-methyl ribonucleotide
  modified_base 97: mod_base = OTHER; note = 2'-O-methyl ribonucleotide
  modified_base 98: mod_base = OTHER; note = 2'-O-methyl ribonucleotide
  modified_base 99: mod_base = OTHER; note = 2'-O-methyl ribonucleotide
  modified_base 100: mod_base = OTHER; note = 2'-O-methyl ribonucleotide
  modified_base 28: mod_base = OTHER; note = nebularine
  modified_base 34: mod_base = OTHER; note = nebularine
  modified_base 42: mod_base = OTHER; note = nebularine
  modified_base 57: mod_base = OTHER; note = nebularine
  modified_base 65: mod_base = OTHER; note = nebularine
  modified_base 1..4: mod_base = OTHER; note = phosphorothioate linkage
  modified_base 98..100: mod_base = OTHER; note = phosphorothioate linkage

SEQ ID NO: 2012 - RNA, 100 nt, synthetic construct; identical to SEQ ID NO: 1905
  source 1..100: mol_type = other RNA
  modified_base 1: mod_base = OTHER; note = 2'-O-methyl ribonucleotide
  modified_base 2: mod_base = OTHER; note = 2'-O-methyl ribonucleotide
  modified_base 3: mod_base = OTHER; note = 2'-O-methyl ribonucleotide
  modified_base 21: mod_base = OTHER; note = 2'-O-methyl ribonucleotide
  modified_base 28: mod_base = OTHER; note = 2'-O-methyl ribonucleotide
  modified_base 29: mod_base = OTHER; note = 2'-O-methyl ribonucleotide
  modified_base 30: mod_base = OTHER; note = 2'-O-methyl ribonucleotide
  modified_base 31: mod_base = OTHER; note = 2'-O-methyl ribonucleotide
  modified_base 32: mod_base = OTHER; note = 2'-O-methyl ribonucleotide
  modified_base 33: mod_base = OTHER; note = 2'-O-methyl ribonucleotide
  modified_base 35: mod_base = OTHER; note = 2'-O-methyl ribonucleotide
  modified_base 36: mod_base = OTHER; note = 2'-O-methyl ribonucleotide
  modified_base 37: mod_base = OTHER; note = 2'-O-methyl ribonucleotide
  modified_base 38: mod_base = OTHER; note = 2'-O-methyl ribonucleotide
  modified_base 39: mod_base = OTHER; note = 2'-O-methyl ribonucleotide
  modified_base 40: mod_base = OTHER; note = 2'-O-methyl ribonucleotide
  modified_base 41: mod_base = OTHER; note = 2'-O-methyl ribonucleotide
  modified_base 42: mod_base = OTHER; note = 2'-O-methyl ribonucleotide
  modified_base 46: mod_base = OTHER; note = 2'-O-methyl ribonucleotide
  modified_base 48: mod_base = OTHER; note = 2'-O-methyl ribonucleotide
  modified_base 50: mod_base = OTHER; note = 2'-O-methyl ribonucleotide
  modified_base 52: mod_base = OTHER; note = 2'-O-methyl ribonucleotide
  modified_base 53: mod_base = OTHER; note = 2'-O-methyl ribonucleotide
  modified_base 54: mod_base = OTHER; note = 2'-O-methyl ribonucleotide
  modified_base 55: mod_base = OTHER; note = 2'-O-methyl ribonucleotide
  modified_base 56: mod_base = OTHER; note = 2'-O-methyl ribonucleotide
  modified_base 57: mod_base = OTHER; note = 2'-O-methyl ribonucleotide
  modified_base 60: mod_base = OTHER; note = 2'-O-methyl ribonucleotide
  modified_base 61: mod_base = OTHER; note = 2'-O-methyl ribonucleotide
  modified_base 66: mod_base = OTHER; note = 2'-O-methyl ribonucleotide
  modified_base 67: mod_base = OTHER; note = 2'-O-methyl ribonucleotide
  modified_base 70: mod_base = OTHER; note = 2'-O-methyl ribonucleotide
  modified_base 71: mod_base = OTHER; note = 2'-O-methyl ribonucleotide
  modified_base 72: mod_base = OTHER; note = 2'-O-methyl ribonucleotide
  modified_base 73: mod_base = OTHER; note = 2'-O-methyl ribonucleotide
  modified_base 74: mod_base = OTHER; note = 2'-O-methyl ribonucleotide
  modified_base 75: mod_base = OTHER; note = 2'-O-methyl ribonucleotide
  modified_base 76: mod_base = OTHER; note = 2'-O-methyl ribonucleotide
  modified_base 77: mod_base = OTHER; note = 2'-O-methyl ribonucleotide
  modified_base 78: mod_base = OTHER; note = 2'-O-methyl ribonucleotide
  modified_base 79: mod_base = OTHER; note = 2'-O-methyl ribonucleotide
  modified_base 80: mod_base = OTHER; note = 2'-O-methyl ribonucleotide
  modified_base 81: mod_base = OTHER; note = 2'-O-methyl ribonucleotide
  modified_base 83: mod_base = OTHER; note = 2'-O-methyl ribonucleotide
  modified_base 84: mod_base = OTHER; note = 2'-O-methyl ribonucleotide
  modified_base 85: mod_base = OTHER; note = 2'-O-methyl ribonucleotide
  modified_base 86: mod_base = OTHER; note = 2'-O-methyl ribonucleotide
  modified_base 87: mod_base = OTHER; note = 2'-O-methyl ribonucleotide
  modified_base 88: mod_base = OTHER; note = 2'-O-methyl ribonucleotide
  modified_base 89: mod_base = OTHER; note = 2'-O-methyl ribonucleotide
  modified_base 90: mod_base = OTHER; note = 2'-O-methyl ribonucleotide
  modified_base 91: mod_base = OTHER; note = 2'-O-methyl ribonucleotide
  modified_base 92: mod_base = OTHER; note = 2'-O-methyl ribonucleotide
  modified_base 93: mod_base = OTHER; note = 2'-O-methyl ribonucleotide
  modified_base 94: mod_base = OTHER; note = 2'-O-methyl ribonucleotide
  modified_base 95: mod_base = OTHER; note = 2'-O-methyl ribonucleotide
  modified_base 96: mod_base = OTHER; note = 2'-O-methyl ribonucleotide
  modified_base 97: mod_base = OTHER; note = 2'-O-methyl ribonucleotide
  modified_base 98: mod_base = OTHER; note = 2'-O-methyl ribonucleotide
  modified_base 99: mod_base = OTHER; note = 2'-O-methyl ribonucleotide
  modified_base 100: mod_base = OTHER; note = 2'-O-methyl ribonucleotide
  modified_base 9: mod_base = OTHER; note = nebularine
  modified_base 14: mod_base = OTHER; note = nebularine
  modified_base 34: mod_base = OTHER; note = nebularine
  modified_base 1..4: mod_base = OTHER; note = phosphorothioate linkage
  modified_base 98..100: mod_base = OTHER; note = phosphorothioate linkage

SEQ ID NO: 2013 - RNA, 100 nt, synthetic construct; identical to SEQ ID NO: 1906
  source 1..100: mol_type = other RNA
  modified_base 1: mod_base = OTHER; note = 2'-O-methyl ribonucleotide
  modified_base 2: mod_base = OTHER; note = 2'-O-methyl ribonucleotide
  modified_base 3: mod_base = OTHER; note = 2'-O-methyl ribonucleotide
  modified_base 21: mod_base = OTHER; note = 2'-O-methyl ribonucleotide
  modified_base 28: mod_base = OTHER; note = 2'-O-methyl ribonucleotide
  modified_base 29: mod_base = OTHER; note = 2'-O-methyl ribonucleotide
  modified_base 30: mod_base = OTHER; note = 2'-O-methyl ribonucleotide
  modified_base 31: mod_base = OTHER; note = 2'-O-methyl ribonucleotide
  modified_base 32: mod_base = OTHER; note = 2'-O-methyl ribonucleotide
  modified_base 33: mod_base = OTHER; note = 2'-O-methyl ribonucleotide
  modified_base 35: mod_base = OTHER; note = 2'-O-methyl ribonucleotide
  modified_base 36: mod_base = OTHER; note = 2'-O-methyl ribonucleotide
  modified_base 37: mod_base = OTHER; note = 2'-O-methyl ribonucleotide
  modified_base 38: mod_base = OTHER; note = 2'-O-methyl ribonucleotide
  modified_base 39: mod_base = OTHER; note = 2'-O-methyl ribonucleotide
  modified_base 40: mod_base = OTHER; note = 2'-O-methyl ribonucleotide
  modified_base 41: mod_base = OTHER; note = 2'-O-methyl ribonucleotide
  modified_base 42: mod_base = OTHER; note = 2'-O-methyl ribonucleotide
  modified_base 46: mod_base = OTHER; note = 2'-O-methyl ribonucleotide
  modified_base 48: mod_base = OTHER; note = 2'-O-methyl ribonucleotide
  modified_base 50: mod_base = OTHER; note = 2'-O-methyl ribonucleotide
  modified_base 52: mod_base = OTHER; note = 2'-O-methyl ribonucleotide
  modified_base 53: mod_base = OTHER; note = 2'-O-methyl ribonucleotide
  modified_base 54: mod_base = OTHER; note = 2'-O-methyl ribonucleotide
  modified_base 55: mod_base = OTHER; note = 2'-O-methyl ribonucleotide
  modified_base 56: mod_base = OTHER; note = 2'-O-methyl ribonucleotide
  modified_base 60: mod_base = OTHER; note = 2'-O-methyl ribonucleotide
  modified_base 61: mod_base = OTHER; note = 2'-O-methyl ribonucleotide
  modified_base 66: mod_base = OTHER; note = 2'-O-methyl ribonucleotide
  modified_base 67: mod_base = OTHER; note = 2'-O-methyl ribonucleotide
  modified_base 70: mod_base = OTHER; note = 2'-O-methyl ribonucleotide
  modified_base 71: mod_base = OTHER; note = 2'-O-methyl ribonucleotide
  modified_base 72: mod_base = OTHER; note = 2'-O-methyl ribonucleotide
  modified_base 73: mod_base = OTHER; note = 2'-O-methyl ribonucleotide
  modified_base 74: mod_base = OTHER; note = 2'-O-methyl ribonucleotide
  modified_base 75: mod_base = OTHER; note = 2'-O-methyl ribonucleotide
  modified_base 76: mod_base = OTHER; note = 2'-O-methyl ribonucleotide
  modified_base 77: mod_base = OTHER; note = 2'-O-methyl ribonucleotide
  modified_base 78: mod_base = OTHER; note = 2'-O-methyl ribonucleotide
  modified_base 79: mod_base = OTHER; note = 2'-O-methyl ribonucleotide
  modified_base 80: mod_base = OTHER; note = 2'-O-methyl ribonucleotide
  modified_base 81: mod_base = OTHER; note = 2'-O-methyl ribonucleotide
  modified_base 83: mod_base = OTHER; note = 2'-O-methyl ribonucleotide
  modified_base 84: mod_base = OTHER; note = 2'-O-methyl ribonucleotide
  modified_base 85: mod_base = OTHER; note = 2'-O-methyl ribonucleotide
  modified_base 86: mod_base = OTHER; note = 2'-O-methyl ribonucleotide
  modified_base 87: mod_base = OTHER; note = 2'-O-methyl ribonucleotide
  modified_base 88: mod_base = OTHER; note = 2'-O-methyl ribonucleotide
  modified_base 89: mod_base = OTHER; note = 2'-O-methyl ribonucleotide
  modified_base 90: mod_base = OTHER; note = 2'-O-methyl ribonucleotide
  modified_base 91: mod_base = OTHER; note = 2'-O-methyl ribonucleotide
  modified_base 92: mod_base = OTHER; note = 2'-O-methyl ribonucleotide
  modified_base 93: mod_base = OTHER; note = 2'-O-methyl ribonucleotide
  modified_base 94: mod_base = OTHER; note = 2'-O-methyl ribonucleotide
  modified_base 95: mod_base = OTHER; note = 2'-O-methyl ribonucleotide
  modified_base 96: mod_base = OTHER; note = 2'-O-methyl ribonucleotide
  modified_base 97: mod_base = OTHER; note = 2'-O-methyl ribonucleotide
  modified_base 98: mod_base = OTHER; note = 2'-O-methyl ribonucleotide
  modified_base 99: mod_base = OTHER; note = 2'-O-methyl ribonucleotide
  modified_base 100: mod_base = OTHER; note = 2'-O-methyl ribonucleotide
  modified_base 9: mod_base = OTHER; note = nebularine
  modified_base 14: mod_base = OTHER; note = nebularine
  modified_base 34: mod_base = OTHER; note = nebularine
  modified_base 57: mod_base = OTHER; note = nebularine
  modified_base 1..4: mod_base = OTHER; note = phosphorothioate linkage
  modified_base 98..100: mod_base = OTHER; note = phosphorothioate linkage

SEQ ID NO: 2014 - RNA, 100 nt, synthetic construct; identical to SEQ ID NO: 1907
  source 1..100: mol_type = other RNA
  modified_base 1: mod_base = OTHER; note = 2'-O-methyl ribonucleotide
  modified_base 2: mod_base = OTHER; note = 2'-O-methyl ribonucleotide
  modified_base 3: mod_base = OTHER; note = 2'-O-methyl ribonucleotide
  modified_base 21: mod_base = OTHER; note = 2'-O-methyl ribonucleotide
  modified_base 28: mod_base = OTHER; note = 2'-O-methyl ribonucleotide
  modified_base 29: mod_base = OTHER; note = 2'-O-methyl ribonucleotide
  modified_base 30: mod_base = OTHER; note = 2'-O-methyl ribonucleotide
  modified_base 31: mod_base = OTHER; note = 2'-O-methyl ribonucleotide
  modified_base 32: mod_base = OTHER; note = 2'-O-methyl ribonucleotide
  modified_base 33: mod_base = OTHER; note = 2'-O-methyl ribonucleotide
  modified_base 34: mod_base = OTHER; note = 2'-O-methyl ribonucleotide
  modified_base 35: mod_base = OTHER; note = 2'-O-methyl ribonucleotide
  modified_base 36: mod_base = OTHER; note = 2'-O-methyl ribonucleotide
  modified_base 37: mod_base = OTHER; note = 2'-O-methyl ribonucleotide
  modified_base 38: mod_base = OTHER; note = 2'-O-methyl ribonucleotide
  modified_base 39: mod_base = OTHER; note = 2'-O-methyl ribonucleotide
  modified_base 40: mod_base = OTHER; note = 2'-O-methyl ribonucleotide
  modified_base 41: mod_base = OTHER; note = 2'-O-methyl ribonucleotide
  modified_base 42: mod_base = OTHER; note = 2'-O-methyl ribonucleotide
  modified_base 46: mod_base = OTHER; note = 2'-O-methyl ribonucleotide
  modified_base 48: mod_base = OTHER; note = 2'-O-methyl ribonucleotide
  modified_base 50: mod_base = OTHER; note = 2'-O-methyl ribonucleotide
  modified_base 52: mod_base = OTHER; note = 2'-O-methyl ribonucleotide
  modified_base 53: mod_base = OTHER; note = 2'-O-methyl ribonucleotide
  modified_base 54: mod_base = OTHER; note = 2'-O-methyl ribonucleotide
  modified_base 55: mod_base = OTHER; note = 2'-O-methyl ribonucleotide
  modified_base 56: mod_base = OTHER; note = 2'-O-methyl ribonucleotide
  modified_base 57: mod_base = OTHER; note = 2'-O-methyl ribonucleotide
  modified_base 60: mod_base = OTHER; note = 2'-O-methyl ribonucleotide
  modified_base 61: mod_base = OTHER; note = 2'-O-methyl ribonucleotide
  modified_base 66: mod_base = OTHER; note = 2'-O-methyl ribonucleotide
  modified_base 67: mod_base = OTHER; note = 2'-O-methyl ribonucleotide
  modified_base 70: mod_base = OTHER; note = 2'-O-methyl ribonucleotide
  modified_base 71: mod_base = OTHER; note = 2'-O-methyl ribonucleotide
  modified_base 72: mod_base = OTHER; note = 2'-O-methyl ribonucleotide
  modified_base 73: mod_base = OTHER; note = 2'-O-methyl ribonucleotide
  modified_base 74: mod_base = OTHER; note = 2'-O-methyl ribonucleotide
  modified_base 75: mod_base = OTHER; note = 2'-O-methyl ribonucleotide
  modified_base 76: mod_base = OTHER; note = 2'-O-methyl ribonucleotide
  modified_base 77: mod_base = OTHER; note = 2'-O-methyl ribonucleotide
  modified_base 78: mod_base = OTHER; note = 2'-O-methyl ribonucleotide
  modified_base 79: mod_base = OTHER; note = 2'-O-methyl ribonucleotide
  modified_base 80: mod_base = OTHER; note = 2'-O-methyl ribonucleotide
  modified_base 81: mod_base = OTHER; note = 2'-O-methyl ribonucleotide
  modified_base 83: mod_base = OTHER; note = 2'-O-methyl ribonucleotide
  modified_base 84: mod_base = OTHER; note = 2'-O-methyl ribonucleotide
  modified_base 85: mod_base = OTHER; note = 2'-O-methyl ribonucleotide
  modified_base 86: mod_base = OTHER; note = 2'-O-methyl ribonucleotide
  modified_base 87: mod_base = OTHER; note = 2'-O-methyl ribonucleotide
  modified_base 88: mod_base = OTHER; note = 2'-O-methyl ribonucleotide
  modified_base 89: mod_base = OTHER; note = 2'-O-methyl ribonucleotide
  modified_base 90: mod_base = OTHER; note = 2'-O-methyl ribonucleotide
  modified_base 91: mod_base = OTHER; note = 2'-O-methyl ribonucleotide
  modified_base 92: mod_base = OTHER; note = 2'-O-methyl ribonucleotide
  modified_base 93: mod_base = OTHER; note = 2'-O-methyl ribonucleotide
  modified_base 94: mod_base = OTHER; note = 2'-O-methyl ribonucleotide
  modified_base 95: mod_base = OTHER; note = 2'-O-methyl ribonucleotide
  modified_base 96: mod_base = OTHER; note = 2'-O-methyl ribonucleotide
  modified_base 97: mod_base = OTHER; note = 2'-O-methyl ribonucleotide
  modified_base 98: mod_base = OTHER; note = 2'-O-methyl ribonucleotide
  modified_base 99: mod_base = OTHER; note = 2'-O-methyl ribonucleotide
  modified_base 100: mod_base = OTHER; note = 2'-O-methyl ribonucleotide
  modified_base 9: mod_base = OTHER; note = nebularine
  modified_base 14: mod_base = OTHER; note = nebularine
  modified_base 65: mod_base = OTHER; note = nebularine
  modified_base 1..4: mod_base = OTHER; note = phosphorothioate linkage
  modified_base 98..100: mod_base = OTHER; note = phosphorothioate linkage

SEQ ID NO: 2015 - RNA, 100 nt, synthetic construct; identical to SEQ ID NO: 1908
  source 1..100: mol_type = other RNA
  modified_base 1: mod_base = OTHER; note = 2'-O-methyl ribonucleotide
  modified_base 2: mod_base = OTHER; note = 2'-O-methyl ribonucleotide
  modified_base 3: mod_base = OTHER; note = 2'-O-methyl ribonucleotide
  modified_base 21: mod_base = OTHER; note = 2'-O-methyl ribonucleotide
  modified_base 28: mod_base = OTHER; note = 2'-O-methyl ribonucleotide
  modified_base 29: mod_base = OTHER; note = 2'-O-methyl ribonucleotide
  modified_base 30: mod_base = OTHER; note = 2'-O-methyl ribonucleotide
  modified_base 31: mod_base = OTHER; note = 2'-O-methyl ribonucleotide
  modified_base 32: mod_base = OTHER; note = 2'-O-methyl ribonucleotide
  modified_base 33: mod_base = OTHER; note = 2'-O-methyl ribonucleotide
  modified_base 35: mod_base = OTHER; note = 2'-O-methyl ribonucleotide
  modified_base 36: mod_base = OTHER; note = 2'-O-methyl ribonucleotide
  modified_base 37: mod_base = OTHER; note = 2'-O-methyl ribonucleotide
  modified_base 38: mod_base = OTHER; note = 2'-O-methyl ribonucleotide
  modified_base 39: mod_base = OTHER; note = 2'-O-methyl ribonucleotide
  modified_base 40: mod_base = OTHER; note = 2'-O-methyl ribonucleotide
  modified_base 41: mod_base = OTHER; note = 2'-O-methyl ribonucleotide
  modified_base 42: mod_base = OTHER; note = 2'-O-methyl ribonucleotide
  modified_base 46: mod_base = OTHER; note = 2'-O-methyl ribonucleotide
  modified_base 48: mod_base = OTHER; note = 2'-O-methyl ribonucleotide
  modified_base 50: mod_base = OTHER; note = 2'-O-methyl ribonucleotide
  modified_base 52: mod_base = OTHER; note = 2'-O-methyl ribonucleotide
  modified_base 53: mod_base = OTHER; note = 2'-O-methyl ribonucleotide
  modified_base 54: mod_base = OTHER; note = 2'-O-methyl ribonucleotide
  modified_base 55: mod_base = OTHER; note = 2'-O-methyl ribonucleotide
  modified_base 56: mod_base = OTHER; note = 2'-O-methyl ribonucleotide
  modified_base 60: mod_base = OTHER; note = 2'-O-methyl ribonucleotide
  modified_base 61: mod_base = OTHER; note = 2'-O-methyl ribonucleotide
  modified_base 66: mod_base = OTHER; note = 2'-O-methyl ribonucleotide
  modified_base 67: mod_base = OTHER; note = 2'-O-methyl ribonucleotide
  modified_base 70: mod_base = OTHER; note = 2'-O-methyl ribonucleotide
  modified_base 71: mod_base = OTHER; note = 2'-O-methyl ribonucleotide
  modified_base 72: mod_base = OTHER; note = 2'-O-methyl ribonucleotide
  modified_base 73: mod_base = OTHER; note = 2'-O-methyl ribonucleotide
  modified_base 74: mod_base = OTHER; note = 2'-O-methyl ribonucleotide
  modified_base 75: mod_base = OTHER; note = 2'-O-methyl ribonucleotide
  modified_base 76: mod_base = OTHER; note = 2'-O-methyl ribonucleotide
  modified_base 77: mod_base = OTHER; note = 2'-O-methyl ribonucleotide
  modified_base 78: mod_base = OTHER; note = 2'-O-methyl ribonucleotide
  modified_base 79: mod_base = OTHER; note = 2'-O-methyl ribonucleotide
  modified_base 80: mod_base = OTHER; note = 2'-O-methyl ribonucleotide
  modified_base 81: mod_base = OTHER; note = 2'-O-methyl ribonucleotide
  modified_base 83: mod_base = OTHER; note = 2'-O-methyl ribonucleotide
  modified_base 84: mod_base = OTHER; note = 2'-O-methyl ribonucleotide
  modified_base 85: mod_base = OTHER; note = 2'-O-methyl ribonucleotide
  modified_base 86: mod_base = OTHER; note = 2'-O-methyl ribonucleotide
  modified_base 87: mod_base = OTHER; note = 2'-O-methyl ribonucleotide
  modified_base 88: mod_base = OTHER; note = 2'-O-methyl ribonucleotide
  modified_base 89: mod_base = OTHER; note = 2'-O-methyl ribonucleotide
  modified_base 90: mod_base = OTHER; note = 2'-O-methyl ribonucleotide
  modified_base 91: mod_base = OTHER; note = 2'-O-methyl ribonucleotide
  modified_base 92: mod_base = OTHER; note = 2'-O-methyl ribonucleotide
  modified_base 93: mod_base = OTHER; note = 2'-O-methyl ribonucleotide
  modified_base 94: mod_base = OTHER; note = 2'-O-methyl ribonucleotide
  modified_base 95: mod_base = OTHER; note = 2'-O-methyl ribonucleotide
  modified_base 96: mod_base = OTHER; note = 2'-O-methyl ribonucleotide
  modified_base 97: mod_base = OTHER; note = 2'-O-methyl ribonucleotide
  modified_base 98: mod_base = OTHER; note = 2'-O-methyl ribonucleotide
  modified_base 99: mod_base = OTHER; note = 2'-O-methyl ribonucleotide
  modified_base 100: mod_base = OTHER; note = 2'-O-methyl ribonucleotide
  modified_base 9: mod_base = OTHER; note = nebularine
  modified_base 14: mod_base = OTHER; note = nebularine
  modified_base 34: mod_base = OTHER; note = nebularine
  modified_base 57: mod_base = OTHER; note = nebularine
  modified_base 65: mod_base = OTHER; note = nebularine
  modified_base 1..4: mod_base = OTHER; note = phosphorothioate linkage
  modified_base 98..100: mod_base = OTHER; note = phosphorothioate linkage

SEQ ID NO: 2016 - RNA, 100 nt, synthetic construct; identical to SEQ ID NO: 1909
  source 1..100: mol_type = other RNA
  modified_base 1: mod_base = OTHER; note = 2'-O-methyl ribonucleotide
  modified_base 2: mod_base = OTHER; note = 2'-O-methyl ribonucleotide
  modified_base 3: mod_base = OTHER; note = 2'-O-methyl ribonucleotide
  modified_base 21: mod_base = OTHER; note = 2'-O-methyl ribonucleotide
  modified_base 29: mod_base = OTHER; note = 2'-O-methyl ribonucleotide
  modified_base 30: mod_base = OTHER; note = 2'-O-methyl ribonucleotide
  modified_base 31: mod_base = OTHER; note = 2'-O-methyl ribonucleotide
  modified_base 32: mod_base = OTHER; note = 2'-O-methyl ribonucleotide
  modified_base 33: mod_base = OTHER; note = 2'-O-methyl ribonucleotide
  modified_base 35: mod_base = OTHER; note = 2'-O-methyl ribonucleotide
  modified_base 36: mod_base = OTHER; note = 2'-O-methyl ribonucleotide
  modified_base 37: mod_base = OTHER; note = 2'-O-methyl ribonucleotide
  modified_base 38: mod_base = OTHER; note = 2'-O-methyl ribonucleotide
  modified_base 39: mod_base = OTHER; note = 2'-O-methyl ribonucleotide
  modified_base 40: mod_base = OTHER; note = 2'-O-methyl ribonucleotide
  modified_base 41: mod_base = OTHER; note = 2'-O-methyl ribonucleotide
  modified_base 46: mod_base = OTHER; note = 2'-O-methyl ribonucleotide
  modified_base 48: mod_base = OTHER; note = 2'-O-methyl ribonucleotide
  modified_base 50: mod_base = OTHER; note = 2'-O-methyl ribonucleotide
  modified_base 52: mod_base = OTHER; note = 2'-O-methyl ribonucleotide
  modified_base 53: mod_base = OTHER; note = 2'-O-methyl ribonucleotide
  modified_base 54: mod_base = OTHER; note = 2'-O-methyl ribonucleotide
  modified_base 55: mod_base = OTHER; note = 2'-O-methyl ribonucleotide
  modified_base 56: mod_base = OTHER; note = 2'-O-methyl ribonucleotide
  modified_base 60: mod_base = OTHER; note = 2'-O-methyl ribonucleotide
  modified_base 61: mod_base = OTHER; note = 2'-O-methyl ribonucleotide
  modified_base 66: mod_base = OTHER; note = 2'-O-methyl ribonucleotide
  modified_base 67: mod_base = OTHER; note = 2'-O-methyl ribonucleotide
  modified_base 70: mod_base = OTHER; note = 2'-O-methyl ribonucleotide
  modified_base 71: mod_base = OTHER; note = 2'-O-methyl ribonucleotide
  modified_base 72: mod_base = OTHER; note = 2'-O-methyl ribonucleotide
  modified_base 73: mod_base = OTHER; note = 2'-O-methyl ribonucleotide
  modified_base 74: mod_base = OTHER; note = 2'-O-methyl ribonucleotide
  modified_base 75: mod_base = OTHER; note = 2'-O-methyl ribonucleotide
  modified_base 76: mod_base = OTHER; note = 2'-O-methyl ribonucleotide
  modified_base 77: mod_base = OTHER; note = 2'-O-methyl ribonucleotide
  modified_base 78: mod_base = OTHER; note = 2'-O-methyl ribonucleotide
  modified_base 79: mod_base = OTHER; note = 2'-O-methyl ribonucleotide
  modified_base 80: mod_base = OTHER; note = 2'-O-methyl ribonucleotide
  modified_base 81: mod_base = OTHER; note = 2'-O-methyl ribonucleotide
  modified_base 83: mod_base = OTHER; note = 2'-O-methyl ribonucleotide
  modified_base 84: mod_base = OTHER; note = 2'-O-methyl ribonucleotide
  modified_base 85: mod_base = OTHER; note = 2'-O-methyl ribonucleotide
  modified_base 86: mod_base = OTHER; note = 2'-O-methyl ribonucleotide
  modified_base 87: mod_base = OTHER; note = 2'-O-methyl ribonucleotide
  modified_base 88: mod_base = OTHER; note = 2'-O-methyl ribonucleotide
  modified_base 89: mod_base = OTHER; note = 2'-O-methyl ribonucleotide
  modified_base 90: mod_base = OTHER; note = 2'-O-methyl ribonucleotide
  modified_base 91: mod_base = OTHER; note = 2'-O-methyl ribonucleotide
  modified_base 92: mod_base = OTHER; note = 2'-O-methyl ribonucleotide
  modified_base 93: mod_base = OTHER; note = 2'-O-methyl ribonucleotide
  modified_base 94: mod_base = OTHER; note = 2'-O-methyl ribonucleotide
  modified_base 95: mod_base = OTHER; note = 2'-O-methyl ribonucleotide
  modified_base 96: mod_base = OTHER; note = 2'-O-methyl ribonucleotide
  modified_base 97: mod_base = OTHER; note = 2'-O-methyl ribonucleotide
  modified_base 98: mod_base = OTHER; note = 2'-O-methyl ribonucleotide
  modified_base 99: mod_base = OTHER; note = 2'-O-methyl ribonucleotide
  modified_base 100: mod_base = OTHER; note = 2'-O-methyl ribonucleotide
  modified_base 9: mod_base = OTHER; note = nebularine
  modified_base 14: mod_base = OTHER; note = nebularine
  modified_base 28: mod_base = OTHER; note = nebularine
  modified_base 34: mod_base = OTHER; note = nebularine
  modified_base 42: mod_base = OTHER; note = nebularine
  modified_base 57: mod_base = OTHER; note = nebularine
  modified_base 65: mod_base = OTHER; note = nebularine
  modified_base 1..4: mod_base = OTHER; note = phosphorothioate linkage
  modified_base 98..100: mod_base = OTHER; note = phosphorothioate linkage

SEQ ID NO: 2017 - RNA, 100 nt, synthetic construct; identical to SEQ ID NO: 1910
  source 1..100: mol_type = other RNA
  modified_base 1: mod_base = OTHER; note = 2'-O-methyl ribonucleotide
  modified_base 2: mod_base = OTHER; note = 2'-O-methyl ribonucleotide
  modified_base 3: mod_base = OTHER; note = 2'-O-methyl ribonucleotide
  modified_base 21: mod_base = OTHER; note = 2'-O-methyl ribonucleotide
  modified_base 28: mod_base = OTHER; note = 2'-O-methyl ribonucleotide
  modified_base 29: mod_base = OTHER; note = 2'-O-methyl ribonucleotide
  modified_base 30: mod_base = OTHER; note = 2'-O-methyl ribonucleotide
  modified_base 31: mod_base = OTHER; note = 2'-O-methyl ribonucleotide
  modified_base 32: mod_base = OTHER; note = 2'-O-methyl ribonucleotide
  modified_base 33: mod_base = OTHER; note = 2'-O-methyl ribonucleotide
  modified_base 35: mod_base = OTHER; note = 2'-O-methyl ribonucleotide
  modified_base 36: mod_base = OTHER; note = 2'-O-methyl ribonucleotide
  modified_base 37: mod_base = OTHER; note = 2'-O-methyl ribonucleotide
  modified_base 38: mod_base = OTHER; note = 2'-O-methyl ribonucleotide
  modified_base 39: mod_base = OTHER; note = 2'-O-methyl ribonucleotide
  modified_base 40: mod_base = OTHER; note = 2'-O-methyl ribonucleotide
  modified_base 41: mod_base = OTHER; note = 2'-O-methyl ribonucleotide
  modified_base 42: mod_base = OTHER; note = 2'-O-methyl ribonucleotide
  modified_base 46: mod_base = OTHER; note = 2'-O-methyl ribonucleotide
  modified_base 48: mod_base = OTHER; note = 2'-O-methyl ribonucleotide
  modified_base 50: mod_base = OTHER; note = 2'-O-methyl ribonucleotide
  modified_base 52: mod_base = OTHER; note = 2'-O-methyl ribonucleotide
  modified_base 53: mod_base = OTHER; note = 2'-O-methyl ribonucleotide
  modified_base 54: mod_base = OTHER; note = 2'-O-methyl ribonucleotide
  modified_base 55: mod_base = OTHER; note = 2'-O-methyl ribonucleotide
  modified_base 56: mod_base = OTHER; note = 2'-O-methyl ribonucleotide
  modified_base 60: mod_base = OTHER; note = 2'-O-methyl ribonucleotide
  modified_base 61: mod_base = OTHER; note = 2'-O-methyl ribonucleotide
  modified_base 66: mod_base = OTHER; note = 2'-O-methyl ribonucleotide
  modified_base 67: mod_base = OTHER; note = 2'-O-methyl ribonucleotide
  modified_base 70: mod_base = OTHER; note = 2'-O-methyl ribonucleotide
  modified_base 71: mod_base = OTHER; note = 2'-O-methyl ribonucleotide
  modified_base 72: mod_base = OTHER; note = 2'-O-methyl ribonucleotide
  modified_base 73: mod_base = OTHER; note = 2'-O-methyl ribonucleotide
  modified_base 74: mod_base = OTHER; note = 2'-O-methyl ribonucleotide
  modified_base 75: mod_base = OTHER; note = 2'-O-methyl ribonucleotide
  modified_base 76: mod_base = OTHER; note = 2'-O-methyl ribonucleotide
  modified_base 77: mod_base = OTHER; note = 2'-O-methyl ribonucleotide
  modified_base 78: mod_base = OTHER; note = 2'-O-methyl ribonucleotide
  modified_base 79: mod_base = OTHER; note = 2'-O-methyl ribonucleotide
  modified_base 80: mod_base = OTHER; note = 2'-O-methyl ribonucleotide
  modified_base 81: mod_base = OTHER; note = 2'-O-methyl ribonucleotide
  modified_base 83: mod_base = OTHER; note = 2'-O-methyl ribonucleotide
  modified_base 84: mod_base = OTHER; note = 2'-O-methyl ribonucleotide
  modified_base 85: mod_base = OTHER; note = 2'-O-methyl ribonucleotide
  modified_base 86: mod_base = OTHER; note = 2'-O-methyl ribonucleotide
  modified_base 87: mod_base = OTHER; note = 2'-O-methyl ribonucleotide
  modified_base 88: mod_base = OTHER; note = 2'-O-methyl ribonucleotide
  modified_base 89: mod_base = OTHER; note = 2'-O-methyl ribonucleotide
  modified_base 90: mod_base = OTHER; note = 2'-O-methyl ribonucleotide
  modified_base 91: mod_base = OTHER; note = 2'-O-methyl ribonucleotide
  modified_base 92: mod_base = OTHER; note = 2'-O-methyl ribonucleotide
  modified_base 93: mod_base = OTHER; note = 2'-O-methyl ribonucleotide
  modified_base 94: mod_base = OTHER; note = 2'-O-methyl ribonucleotide
  modified_base 95: mod_base = OTHER; note = 2'-O-methyl ribonucleotide
  modified_base 96: mod_base = OTHER; note = 2'-O-methyl ribonucleotide
  modified_base 97: mod_base = OTHER; note = 2'-O-methyl ribonucleotide
  modified_base 98: mod_base = OTHER; note = 2'-O-methyl ribonucleotide
  modified_base 99: mod_base = OTHER; note = 2'-O-methyl ribonucleotide
  modified_base 100: mod_base = OTHER; note = 2'-O-methyl ribonucleotide
  modified_base 9: mod_base = OTHER; note = nebularine
  modified_base 34: mod_base = OTHER; note = nebularine
  modified_base 57: mod_base = OTHER; note = nebularine
  modified_base 1..4: mod_base = OTHER; note = phosphorothioate linkage
  modified_base 98..100: mod_base = OTHER; note = phosphorothioate linkage

SEQ ID NO: 2018 - RNA, 100 nt, synthetic construct; identical to SEQ ID NO: 1911
  source 1..100: mol_type = other RNA
  modified_base 1: mod_base = OTHER; note = 2'-O-methyl ribonucleotide
  modified_base 2: mod_base = OTHER; note = 2'-O-methyl ribonucleotide
  modified_base 3: mod_base = OTHER; note = 2'-O-methyl ribonucleotide
  modified_base 21: mod_base = OTHER; note = 2'-O-methyl ribonucleotide
  modified_base 28: mod_base = OTHER; note = 2'-O-methyl ribonucleotide
  modified_base 29: mod_base = OTHER; note = 2'-O-methyl ribonucleotide
  modified_base 30: mod_base = OTHER; note = 2'-O-methyl ribonucleotide
  modified_base 31: mod_base = OTHER; note = 2'-O-methyl ribonucleotide
  modified_base 32: mod_base = OTHER; note = 2'-O-methyl ribonucleotide
  modified_base 33: mod_base = OTHER; note = 2'-O-methyl ribonucleotide
  modified_base 34: mod_base = OTHER; note = 2'-O-methyl ribonucleotide
  modified_base 35: mod_base = OTHER; note = 2'-O-methyl ribonucleotide
  modified_base 36: mod_base = OTHER; note = 2'-O-methyl ribonucleotide
  modified_base 37: mod_base = OTHER; note = 2'-O-methyl ribonucleotide
  modified_base 38: mod_base = OTHER; note = 2'-O-methyl ribonucleotide
  modified_base 39: mod_base = OTHER; note = 2'-O-methyl ribonucleotide
  modified_base 40: mod_base = OTHER; note = 2'-O-methyl ribonucleotide
  modified_base 41: mod_base = OTHER; note = 2'-O-methyl ribonucleotide
  modified_base 42: mod_base = OTHER; note = 2'-O-methyl ribonucleotide
  modified_base 46: mod_base = OTHER; note = 2'-O-methyl ribonucleotide
  modified_base 48: mod_base = OTHER; note = 2'-O-methyl ribonucleotide
  modified_base 50: mod_base = OTHER; note = 2'-O-methyl ribonucleotide
  modified_base 52: mod_base = OTHER; note = 2'-O-methyl ribonucleotide
  modified_base 53: mod_base = OTHER; note = 2'-O-methyl ribonucleotide
  modified_base 54: mod_base = OTHER; note = 2'-O-methyl ribonucleotide
  modified_base 55: mod_base = OTHER; note = 2'-O-methyl ribonucleotide
  modified_base 56: mod_base = OTHER; note = 2'-O-methyl ribonucleotide
  modified_base 60: mod_base = OTHER; note = 2'-O-methyl ribonucleotide
  modified_base 61: mod_base = OTHER; note = 2'-O-methyl ribonucleotide
  modified_base 66: mod_base = OTHER; note = 2'-O-methyl ribonucleotide
  modified_base 67: mod_base = OTHER; note = 2'-O-methyl ribonucleotide
  modified_base 70: mod_base = OTHER; note = 2'-O-methyl ribonucleotide
  modified_base 71: mod_base = OTHER; note = 2'-O-methyl ribonucleotide
  modified_base 72: mod_base = OTHER; note = 2'-O-methyl ribonucleotide
  modified_base 73: mod_base = OTHER; note = 2'-O-methyl ribonucleotide
  modified_base 74: mod_base = OTHER; note = 2'-O-methyl ribonucleotide
  modified_base 75: mod_base = OTHER; note = 2'-O-methyl ribonucleotide
  modified_base 76: mod_base = OTHER; note = 2'-O-methyl ribonucleotide
  modified_base 77: mod_base = OTHER; note = 2'-O-methyl ribonucleotide
  modified_base 78: mod_base = OTHER; note = 2'-O-methyl ribonucleotide
  modified_base 79: mod_base = OTHER; note = 2'-O-methyl ribonucleotide
  modified_base 80: mod_base = OTHER; note = 2'-O-methyl ribonucleotide
  modified_base 81: mod_base = OTHER; note = 2'-O-methyl ribonucleotide
  modified_base 83: mod_base = OTHER; note = 2'-O-methyl ribonucleotide
  modified_base 84: mod_base = OTHER; note = 2'-O-methyl ribonucleotide
  modified_base 85: mod_base = OTHER; note = 2'-O-methyl ribonucleotide
  modified_base 86: mod_base = OTHER; note = 2'-O-methyl ribonucleotide
  modified_base 87: mod_base = OTHER; note = 2'-O-methyl ribonucleotide
  modified_base 88: mod_base = OTHER; note = 2'-O-methyl ribonucleotide
  modified_base 89: mod_base = OTHER; note = 2'-O-methyl ribonucleotide
  modified_base 90: mod_base = OTHER; note = 2'-O-methyl ribonucleotide
  modified_base 91: mod_base = OTHER; note = 2'-O-methyl ribonucleotide
  modified_base 92: mod_base = OTHER; note = 2'-O-methyl ribonucleotide
  modified_base 93: mod_base = OTHER; note = 2'-O-methyl ribonucleotide
  modified_base 94: mod_base = OTHER; note = 2'-O-methyl ribonucleotide
  modified_base 95: mod_base = OTHER; note = 2'-O-methyl ribonucleotide
  modified_base 96: mod_base = OTHER; note = 2'-O-methyl ribonucleotide
  modified_base 97: mod_base = OTHER; note = 2'-O-methyl ribonucleotide
  modified_base 98: mod_base = OTHER; note = 2'-O-methyl ribonucleotide
  modified_base 99: mod_base = OTHER; note = 2'-O-methyl ribonucleotide
  modified_base 100: mod_base = OTHER; note = 2'-O-methyl ribonucleotide
  modified_base 9: mod_base = OTHER; note = nebularine
  modified_base 57: mod_base = OTHER; note = nebularine
  modified_base 1..4: mod_base = OTHER; note = phosphorothioate linkage
  modified_base 98..100: mod_base = OTHER; note = phosphorothioate linkage

SEQ ID NO: 2019 - RNA, 100 nt, synthetic construct; identical to SEQ ID NO: 1912
  source 1..100: mol_type = other RNA
  modified_base 1: mod_base = OTHER; note = 2'-O-methyl ribonucleotide
  modified_base 2: mod_base = OTHER; note = 2'-O-methyl ribonucleotide
  modified_base 3: mod_base = OTHER; note = 2'-O-methyl ribonucleotide
  modified_base 21: mod_base = OTHER; note = 2'-O-methyl ribonucleotide
  modified_base 28: mod_base = OTHER; note = 2'-O-methyl ribonucleotide
  modified_base 29: mod_base = OTHER; note = 2'-O-methyl ribonucleotide
  modified_base 30: mod_base = OTHER; note = 2'-O-methyl ribonucleotide
  modified_base 31: mod_base = OTHER; note = 2'-O-methyl ribonucleotide
  modified_base 32: mod_base = OTHER; note = 2'-O-methyl ribonucleotide
  modified_base 33: mod_base = OTHER; note = 2'-O-methyl ribonucleotide
  modified_base 34: mod_base = OTHER; note = 2'-O-methyl ribonucleotide
  modified_base 35: mod_base = OTHER; note = 2'-O-methyl ribonucleotide
  modified_base 36: mod_base = OTHER; note = 2'-O-methyl ribonucleotide
  modified_base 37: mod_base = OTHER; note = 2'-O-methyl ribonucleotide
  modified_base 38: mod_base = OTHER; note = 2'-O-methyl ribonucleotide
  modified_base 39: mod_base = OTHER; note = 2'-O-methyl ribonucleotide
  modified_base 40: mod_base = OTHER; note = 2'-O-methyl ribonucleotide
  modified_base 41: mod_base = OTHER; note = 2'-O-methyl ribonucleotide
  modified_base 42: mod_base = OTHER; note = 2'-O-methyl ribonucleotide
  modified_base 46: mod_base = OTHER; note = 2'-O-methyl ribonucleotide
  modified_base 48: mod_base = OTHER; note = 2'-O-methyl ribonucleotide
  modified_base 50: mod_base = OTHER; note = 2'-O-methyl ribonucleotide
  modified_base 52: mod_base = OTHER; note = 2'-O-methyl ribonucleotide
  modified_base 53: mod_base = OTHER; note = 2'-O-methyl ribonucleotide
  modified_base 54: mod_base = OTHER; note = 2'-O-methyl ribonucleotide
  modified_base 55: mod_base = OTHER; note = 2'-O-methyl ribonucleotide
  modified_base 56: mod_base = OTHER; note = 2'-O-methyl ribonucleotide
  modified_base 57: mod_base = OTHER; note = 2'-O-methyl ribonucleotide
  modified_base 60: mod_base = OTHER; note = 2'-O-methyl ribonucleotide
  modified_base 61: mod_base = OTHER; note = 2'-O-methyl ribonucleotide
  modified_base 66: mod_base = OTHER; note = 2'-O-methyl ribonucleotide
  modified_base 67: mod_base = OTHER; note = 2'-O-methyl ribonucleotide
  modified_base 70: mod_base = OTHER; note = 2'-O-methyl ribonucleotide
  modified_base 71: mod_base = OTHER; note = 2'-O-methyl ribonucleotide
  modified_base 72: mod_base = OTHER; note = 2'-O-methyl ribonucleotide
  modified_base 73: mod_base = OTHER; note = 2'-O-methyl ribonucleotide
  modified_base 74: mod_base = OTHER; note = 2'-O-methyl ribonucleotide
  modified_base 75: mod_base = OTHER; note = 2'-O-methyl ribonucleotide
  modified_base 76: mod_base = OTHER; note = 2'-O-methyl ribonucleotide
  modified_base 77: mod_base = OTHER; note = 2'-O-methyl ribonucleotide
  modified_base 78: mod_base = OTHER; note = 2'-O-methyl ribonucleotide
  modified_base 79: mod_base = OTHER; note = 2'-O-methyl ribonucleotide
  modified_base 80: mod_base = OTHER; note = 2'-O-methyl ribonucleotide
  modified_base 81: mod_base = OTHER; note = 2'-O-methyl ribonucleotide
  modified_base 83: mod_base = OTHER; note = 2'-O-methyl ribonucleotide
  modified_base 84: mod_base = OTHER; note = 2'-O-methyl ribonucleotide
  modified_base 85: mod_base = OTHER; note = 2'-O-methyl ribonucleotide
  modified_base 86: mod_base = OTHER; note = 2'-O-methyl ribonucleotide
  modified_base 87: mod_base = OTHER; note = 2'-O-methyl ribonucleotide
  modified_base 88: mod_base = OTHER; note = 2'-O-methyl ribonucleotide
  modified_base 89: mod_base = OTHER; note = 2'-O-methyl ribonucleotide
  modified_base 90: mod_base = OTHER; note = 2'-O-methyl ribonucleotide
  modified_base 91: mod_base = OTHER; note = 2'-O-methyl ribonucleotide
  modified_base 92: mod_base = OTHER; note = 2'-O-methyl ribonucleotide
  modified_base 93: mod_base = OTHER; note = 2'-O-methyl ribonucleotide
  modified_base 94: mod_base = OTHER; note = 2'-O-methyl ribonucleotide
  modified_base 95: mod_base = OTHER; note = 2'-O-methyl ribonucleotide
  modified_base 96: mod_base = OTHER; note = 2'-O-methyl ribonucleotide
  modified_base 97: mod_base = OTHER; note = 2'-O-methyl ribonucleotide
  modified_base 98: mod_base = OTHER; note = 2'-O-methyl ribonucleotide
  modified_base 99: mod_base = OTHER; note = 2'-O-methyl ribonucleotide
  modified_base 100: mod_base = OTHER; note = 2'-O-methyl ribonucleotide
  modified_base 9: mod_base = OTHER; note = nebularine
  modified_base 65: mod_base = OTHER; note = nebularine
  modified_base 1..4: mod_base = OTHER; note = phosphorothioate linkage
  modified_base 98..100: mod_base = OTHER; note = phosphorothioate linkage

SEQ ID NO: 2020 - RNA, 100 nt, synthetic construct; identical to SEQ ID NO: 1913
  source 1..100: mol_type = other RNA
  modified_base 1: mod_base = OTHER; note = 2'-O-methyl ribonucleotide
  modified_base 2: mod_base = OTHER; note = 2'-O-methyl ribonucleotide
  modified_base 3: mod_base = OTHER; note = 2'-O-methyl ribonucleotide
  modified_base 21: mod_base = OTHER; note = 2'-O-methyl ribonucleotide
  modified_base 28: mod_base = OTHER; note = 2'-O-methyl ribonucleotide
  modified_base 29: mod_base = OTHER; note = 2'-O-methyl ribonucleotide
  modified_base 30: mod_base = OTHER; note = 2'-O-methyl ribonucleotide
  modified_base 31: mod_base = OTHER; note = 2'-O-methyl ribonucleotide
  modified_base 32: mod_base = OTHER; note = 2'-O-methyl ribonucleotide
  modified_base 33: mod_base = OTHER; note = 2'-O-methyl ribonucleotide
  modified_base 35: mod_base = OTHER; note = 2'-O-methyl ribonucleotide
  modified_base 36: mod_base = OTHER; note = 2'-O-methyl ribonucleotide
  modified_base 37: mod_base = OTHER; note = 2'-O-methyl ribonucleotide
  modified_base 38: mod_base = OTHER; note = 2'-O-methyl ribonucleotide
  modified_base 39: mod_base = OTHER; note = 2'-O-methyl ribonucleotide
  modified_base 40: mod_base = OTHER; note = 2'-O-methyl ribonucleotide
  modified_base 41: mod_base = OTHER; note = 2'-O-methyl ribonucleotide
  modified_base 42: mod_base = OTHER; note = 2'-O-methyl ribonucleotide
  modified_base 46: mod_base = OTHER; note = 2'-O-methyl ribonucleotide
  modified_base 48: mod_base = OTHER; note = 2'-O-methyl ribonucleotide
  modified_base 50: mod_base = OTHER; note = 2'-O-methyl ribonucleotide
  modified_base 52: mod_base = OTHER; note = 2'-O-methyl ribonucleotide
  modified_base 53: mod_base = OTHER; note = 2'-O-methyl ribonucleotide
  modified_base 54: mod_base = OTHER; note = 2'-O-methyl ribonucleotide
  modified_base 55: mod_base = OTHER; note = 2'-O-methyl ribonucleotide
  modified_base 56: mod_base = OTHER; note = 2'-O-methyl ribonucleotide
  modified_base 60: mod_base = OTHER; note = 2'-O-methyl ribonucleotide
  modified_base 61: mod_base = OTHER; note = 2'-O-methyl ribonucleotide
  modified_base 66: mod_base = OTHER; note = 2'-O-methyl ribonucleotide
  modified_base 67: mod_base = OTHER; note = 2'-O-methyl ribonucleotide
  modified_base 70: mod_base = OTHER; note = 2'-O-methyl ribonucleotide
  modified_base 71: mod_base = OTHER; note = 2'-O-methyl ribonucleotide
  modified_base 72: mod_base = OTHER; note = 2'-O-methyl ribonucleotide
  modified_base 73: mod_base = OTHER; note = 2'-O-methyl ribonucleotide
  modified_base 74: mod_base = OTHER; note = 2'-O-methyl ribonucleotide
  modified_base 75: mod_base = OTHER; note = 2'-O-methyl ribonucleotide
  modified_base 76: mod_base = OTHER; note = 2'-O-methyl ribonucleotide
  modified_base 77: mod_base = OTHER; note = 2'-O-methyl ribonucleotide
  modified_base 78: mod_base = OTHER; note = 2'-O-methyl ribonucleotide
  modified_base 79: mod_base = OTHER; note = 2'-O-methyl ribonucleotide
  modified_base 80: mod_base = OTHER; note = 2'-O-methyl ribonucleotide
  modified_base 81: mod_base = OTHER; note = 2'-O-methyl ribonucleotide
  modified_base 83: mod_base = OTHER; note = 2'-O-methyl ribonucleotide
  modified_base 84: mod_base = OTHER; note = 2'-O-methyl ribonucleotide
  modified_base 85: mod_base = OTHER; note = 2'-O-methyl ribonucleotide
  modified_base 86: mod_base = OTHER; note = 2'-O-methyl ribonucleotide
  modified_base 87: mod_base = OTHER; note = 2'-O-methyl ribonucleotide
  modified_base 88: mod_base = OTHER; note = 2'-O-methyl ribonucleotide
  modified_base 89: mod_base = OTHER; note = 2'-O-methyl ribonucleotide
  modified_base 90: mod_base = OTHER; note = 2'-O-methyl ribonucleotide
  modified_base 91: mod_base = OTHER; note = 2'-O-methyl ribonucleotide
  modified_base 92: mod_base = OTHER; note = 2'-O-methyl ribonucleotide
  modified_base 93: mod_base = OTHER; note = 2'-O-methyl ribonucleotide
  modified_base 94: mod_base = OTHER; note = 2'-O-methyl ribonucleotide
  modified_base 95: mod_base = OTHER; note = 2'-O-methyl ribonucleotide
  modified_base 96: mod_base = OTHER; note = 2'-O-methyl ribonucleotide
  modified_base 97: mod_base = OTHER; note = 2'-O-methyl ribonucleotide
  modified_base 98: mod_base = OTHER; note = 2'-O-methyl ribonucleotide
  modified_base 99: mod_base = OTHER; note = 2'-O-methyl ribonucleotide
  modified_base 100: mod_base = OTHER; note = 2'-O-methyl ribonucleotide
  modified_base 9: mod_base = OTHER; note = nebularine
  modified_base 34: mod_base = OTHER; note = nebularine
  modified_base 57: mod_base = OTHER; note = nebularine
  modified_base 65: mod_base = OTHER; note = nebularine
  modified_base 1..4: mod_base = OTHER; note = phosphorothioate linkage
  modified_base 98..100: mod_base = OTHER; note = phosphorothioate linkage

SEQ ID NO: 2021 - RNA, 100 nt, synthetic construct; identical to SEQ ID NO: 1914
  source 1..100: mol_type = other RNA
  modified_base 1: mod_base = OTHER; note = 2'-O-methyl ribonucleotide
  modified_base 2: mod_base = OTHER; note = 2'-O-methyl ribonucleotide
  modified_base 3: mod_base = OTHER; note = 2'-O-methyl ribonucleotide
  modified_base 21: mod_base = OTHER; note = 2'-O-methyl ribonucleotide
  modified_base 29: mod_base = OTHER; note = 2'-O-methyl ribonucleotide
  modified_base 30: mod_base = OTHER; note = 2'-O-methyl ribonucleotide
  modified_base 31: mod_base = OTHER; note = 2'-O-methyl ribonucleotide
  modified_base 32: mod_base = OTHER; note = 2'-O-methyl ribonucleotide
  modified_base 33: mod_base = OTHER; note = 2'-O-methyl ribonucleotide
  modified_base 35: mod_base = OTHER; note = 2'-O-methyl ribonucleotide
  modified_base 36: mod_base = OTHER; note = 2'-O-methyl ribonucleotide
  modified_base 37: mod_base = OTHER; note = 2'-O-methyl ribonucleotide
  modified_base 38: mod_base = OTHER; note = 2'-O-methyl ribonucleotide
  modified_base 39: mod_base = OTHER; note = 2'-O-methyl ribonucleotide
  modified_base 40: mod_base = OTHER; note = 2'-O-methyl ribonucleotide
  modified_base 41: mod_base = OTHER; note = 2'-O-methyl ribonucleotide
  modified_base 46: mod_base = OTHER; note = 2'-O-methyl ribonucleotide
  modified_base 48: mod_base = OTHER; note = 2'-O-methyl ribonucleotide
  modified_base 50: mod_base = OTHER; note = 2'-O-methyl ribonucleotide
  modified_base 52: mod_base = OTHER; note = 2'-O-methyl ribonucleotide
  modified_base 53: mod_base = OTHER; note = 2'-O-methyl ribonucleotide
  modified_base 54: mod_base = OTHER; note = 2'-O-methyl ribonucleotide
  modified_base 55: mod_base = OTHER; note = 2'-O-methyl ribonucleotide
  modified_base 56: mod_base = OTHER; note = 2'-O-methyl ribonucleotide
  modified_base 60: mod_base = OTHER; note = 2'-O-methyl ribonucleotide
  modified_base 61: mod_base = OTHER; note = 2'-O-methyl ribonucleotide
  modified_base 66: mod_base = OTHER; note = 2'-O-methyl ribonucleotide
  modified_base 67: mod_base = OTHER; note = 2'-O-methyl ribonucleotide
  modified_base 70: mod_base = OTHER; note = 2'-O-methyl ribonucleotide
  modified_base 71: mod_base = OTHER; note = 2'-O-methyl ribonucleotide
  modified_base 72: mod_base = OTHER; note = 2'-O-methyl ribonucleotide
  modified_base 73: mod_base = OTHER; note = 2'-O-methyl ribonucleotide
  modified_base 74: mod_base = OTHER; note = 2'-O-methyl ribonucleotide
  modified_base 75: mod_base = OTHER; note = 2'-O-methyl ribonucleotide
  modified_base 76: mod_base = OTHER; note = 2'-O-methyl ribonucleotide
  modified_base 77: mod_base = OTHER; note = 2'-O-methyl ribonucleotide
  modified_base 78: mod_base = OTHER; note = 2'-O-methyl ribonucleotide
  modified_base 79: mod_base = OTHER; note = 2'-O-methyl ribonucleotide
  modified_base 80: mod_base = OTHER; note = 2'-O-methyl ribonucleotide
  modified_base 81: mod_base = OTHER; note = 2'-O-methyl ribonucleotide
  modified_base 83: mod_base = OTHER; note = 2'-O-methyl ribonucleotide
  modified_base 84: mod_base = OTHER; note = 2'-O-methyl ribonucleotide
  modified_base 85: mod_base = OTHER; note = 2'-O-methyl ribonucleotide
  modified_base 86: mod_base = OTHER; note = 2'-O-methyl ribonucleotide
  modified_base 87: mod_base = OTHER; note = 2'-O-methyl ribonucleotide
  modified_base 88: mod_base = OTHER; note = 2'-O-methyl ribonucleotide
  modified_base 89: mod_base = OTHER; note = 2'-O-methyl ribonucleotide
  modified_base 90: mod_base = OTHER; note = 2'-O-methyl ribonucleotide
  modified_base 91: mod_base = OTHER; note = 2'-O-methyl ribonucleotide
  modified_base 92: mod_base = OTHER; note = 2'-O-methyl ribonucleotide
  modified_base 93: mod_base = OTHER; note = 2'-O-methyl ribonucleotide
  modified_base 94: mod_base = OTHER; note = 2'-O-methyl ribonucleotide
  modified_base 95: mod_base = OTHER; note = 2'-O-methyl ribonucleotide
  modified_base 96: mod_base = OTHER; note = 2'-O-methyl ribonucleotide
  modified_base 97: mod_base = OTHER; note = 2'-O-methyl ribonucleotide
  modified_base 98: mod_base = OTHER; note = 2'-O-methyl ribonucleotide
  modified_base 99: mod_base = OTHER; note = 2'-O-methyl ribonucleotide
  modified_base 100: mod_base = OTHER; note = 2'-O-methyl ribonucleotide
  modified_base 9: mod_base = OTHER; note = nebularine
  modified_base 28: mod_base = OTHER; note = nebularine
  modified_base 34: mod_base = OTHER; note = nebularine
  modified_base 42: mod_base = OTHER; note = nebularine
  modified_base 57: mod_base = OTHER; note = nebularine
  modified_base 65: mod_base = OTHER; note = nebularine
  modified_base 1..4: mod_base = OTHER; note = phosphorothioate linkage
  modified_base 98..100: mod_base = OTHER; note = phosphorothioate linkage

SEQ ID NO: 2022 - RNA, 100 nt, synthetic construct; identical to SEQ ID NO: 1915
  source 1..100: mol_type = other RNA
  modified_base 1: mod_base = OTHER; note = 2'-O-methyl ribonucleotide
  modified_base 2: mod_base = OTHER; note = 2'-O-methyl ribonucleotide
  modified_base 3: mod_base = OTHER; note = 2'-O-methyl ribonucleotide
  modified_base 21: mod_base = OTHER; note = 2'-O-methyl ribonucleotide
  modified_base 28: mod_base = OTHER; note = 2'-O-methyl ribonucleotide
  modified_base 29: mod_base = OTHER; note = 2'-O-methyl ribonucleotide
  modified_base 30: mod_base = OTHER; note = 2'-O-methyl ribonucleotide
  modified_base 31: mod_base = OTHER; note = 2'-O-methyl ribonucleotide
  modified_base 32: mod_base = OTHER; note = 2'-O-methyl ribonucleotide
  modified_base 33: mod_base = OTHER; note = 2'-O-methyl ribonucleotide
  modified_base 35: mod_base = OTHER; note = 2'-O-methyl ribonucleotide
  modified_base 36: mod_base = OTHER; note = 2'-O-methyl ribonucleotide
  modified_base 37: mod_base = OTHER; note = 2'-O-methyl ribonucleotide
  modified_base 38: mod_base = OTHER; note = 2'-O-methyl ribonucleotide
  modified_base 39: mod_base = OTHER; note = 2'-O-methyl ribonucleotide
  modified_base 40: mod_base = OTHER; note = 2'-O-methyl ribonucleotide
  modified_base 41: mod_base = OTHER; note = 2'-O-methyl ribonucleotide
  modified_base 42: mod_base = OTHER; note = 2'-O-methyl ribonucleotide
  modified_base 46: mod_base = OTHER; note = 2'-O-methyl ribonucleotide
  modified_base 48: mod_base = OTHER; note = 2'-O-methyl ribonucleotide
  modified_base 50: mod_base = OTHER; note = 2'-O-methyl ribonucleotide
  modified_base 52: mod_base = OTHER; note = 2'-O-methyl ribonucleotide
  modified_base 53: mod_base = OTHER; note = 2'-O-methyl ribonucleotide
  modified_base 54: mod_base = OTHER; note = 2'-O-methyl ribonucleotide
  modified_base 55: mod_base = OTHER; note = 2'-O-methyl ribonucleotide
  modified_base 56: mod_base = OTHER; note = 2'-O-methyl ribonucleotide
  modified_base 57: mod_base = OTHER; note = 2'-O-methyl ribonucleotide
  modified_base 60: mod_base = OTHER; note = 2'-O-methyl ribonucleotide
  modified_base 61: mod_base = OTHER; note = 2'-O-methyl ribonucleotide
  modified_base 66: mod_base = OTHER; note = 2'-O-methyl ribonucleotide
  modified_base 67: mod_base = OTHER; note = 2'-O-methyl ribonucleotide
  modified_base 70: mod_base = OTHER; note = 2'-O-methyl ribonucleotide
  modified_base 71: mod_base = OTHER; note = 2'-O-methyl ribonucleotide
  modified_base 72: mod_base = OTHER; note = 2'-O-methyl ribonucleotide
  modified_base 73: mod_base = OTHER; note = 2'-O-methyl ribonucleotide
  modified_base 74: mod_base = OTHER; note = 2'-O-methyl ribonucleotide
  modified_base 75: mod_base = OTHER; note = 2'-O-methyl ribonucleotide
  modified_base 76: mod_base = OTHER; note = 2'-O-methyl ribonucleotide
  modified_base 77: mod_base = OTHER; note = 2'-O-methyl ribonucleotide
  modified_base 78: mod_base = OTHER; note = 2'-O-methyl ribonucleotide
  modified_base 79: mod_base = OTHER; note = 2'-O-methyl ribonucleotide
  modified_base 80: mod_base = OTHER; note = 2'-O-methyl ribonucleotide
  modified_base 81: mod_base = OTHER; note = 2'-O-methyl ribonucleotide
  modified_base 83: mod_base = OTHER; note = 2'-O-methyl ribonucleotide
  modified_base 84: mod_base = OTHER; note = 2'-O-methyl ribonucleotide
  modified_base 85: mod_base = OTHER; note = 2'-O-methyl ribonucleotide
  modified_base 86: mod_base = OTHER; note = 2'-O-methyl ribonucleotide
  modified_base 87: mod_base = OTHER; note = 2'-O-methyl ribonucleotide
  modified_base 88: mod_base = OTHER; note = 2'-O-methyl ribonucleotide
  modified_base 89: mod_base = OTHER; note = 2'-O-methyl ribonucleotide
  modified_base 90: mod_base = OTHER; note = 2'-O-methyl ribonucleotide
  modified_base 91: mod_base = OTHER; note = 2'-O-methyl ribonucleotide
  modified_base 92: mod_base = OTHER; note = 2'-O-methyl ribonucleotide
  modified_base 93: mod_base = OTHER; note = 2'-O-methyl ribonucleotide
  modified_base 94: mod_base = OTHER; note = 2'-O-methyl ribonucleotide
  modified_base 95: mod_base = OTHER; note = 2'-O-methyl ribonucleotide
  modified_base 96: mod_base = OTHER; note = 2'-O-methyl ribonucleotide
  modified_base 97: mod_base = OTHER; note = 2'-O-methyl ribonucleotide
  modified_base 98: mod_base = OTHER; note = 2'-O-methyl ribonucleotide
  modified_base 99: mod_base = OTHER; note = 2'-O-methyl ribonucleotide
  modified_base 100: mod_base = OTHER; note = 2'-O-methyl ribonucleotide
  modified_base 14: mod_base = OTHER; note = nebularine
  modified_base 34: mod_base = OTHER; note = nebularine
  modified_base 1..4: mod_base = OTHER; note = phosphorothioate linkage
  modified_base 98..100: mod_base = OTHER; note = phosphorothioate linkage

SEQ ID NO: 2023 - RNA, 100 nt, synthetic construct; identical to SEQ ID NO: 1916
  source 1..100: mol_type = other RNA
  modified_base 1: mod_base = OTHER; note = 2'-O-methyl ribonucleotide
  modified_base 2: mod_base = OTHER; note = 2'-O-methyl ribonucleotide
  modified_base 3: mod_base = OTHER; note = 2'-O-methyl ribonucleotide
  modified_base 21: mod_base = OTHER; note = 2'-O-methyl ribonucleotide
  modified_base 28: mod_base = OTHER; note = 2'-O-methyl ribonucleotide
  modified_base 29: mod_base = OTHER; note = 2'-O-methyl ribonucleotide
  modified_base 30: mod_base = OTHER; note = 2'-O-methyl ribonucleotide
  modified_base 31: mod_base = OTHER; note = 2'-O-methyl ribonucleotide
  modified_base 32: mod_base = OTHER; note = 2'-O-methyl ribonucleotide
  modified_base 33: mod_base = OTHER; note = 2'-O-methyl ribonucleotide
  modified_base 35: mod_base = OTHER; note = 2'-O-methyl ribonucleotide
  modified_base 36: mod_base = OTHER; note = 2'-O-methyl ribonucleotide
  modified_base 37: mod_base = OTHER; note = 2'-O-methyl ribonucleotide
  modified_base 38: mod_base = OTHER; note = 2'-O-methyl ribonucleotide
  modified_base 39: mod_base = OTHER; note = 2'-O-methyl ribonucleotide
  modified_base 40: mod_base = OTHER; note = 2'-O-methyl ribonucleotide
  modified_base 41: mod_base = OTHER; note = 2'-O-methyl ribonucleotide
  modified_base 42: mod_base = OTHER; note = 2'-O-methyl ribonucleotide
  modified_base 46: mod_base = OTHER; note = 2'-O-methyl ribonucleotide
  modified_base 48: mod_base = OTHER; note = 2'-O-methyl ribonucleotide
  modified_base 50: mod_base = OTHER; note = 2'-O-methyl ribonucleotide
  modified_base 52: mod_base = OTHER; note = 2'-O-methyl ribonucleotide
  modified_base 53: mod_base = OTHER; note = 2'-O-methyl ribonucleotide
  modified_base 54: mod_base = OTHER; note = 2'-O-methyl ribonucleotide
  modified_base 55: mod_base = OTHER; note = 2'-O-methyl ribonucleotide
  modified_base 56: mod_base = OTHER; note = 2'-O-methyl ribonucleotide
  modified_base 60: mod_base = OTHER; note = 2'-O-methyl ribonucleotide
  modified_base 61: mod_base = OTHER; note = 2'-O-methyl ribonucleotide
  modified_base 66: mod_base = OTHER; note = 2'-O-methyl ribonucleotide
  modified_base 67: mod_base = OTHER; note = 2'-O-methyl ribonucleotide
  modified_base 70: mod_base = OTHER; note = 2'-O-methyl ribonucleotide
  modified_base 71: mod_base = OTHER; note = 2'-O-methyl ribonucleotide
  modified_base 72: mod_base = OTHER; note = 2'-O-methyl ribonucleotide
  modified_base 73: mod_base = OTHER; note = 2'-O-methyl ribonucleotide
  modified_base 74: mod_base = OTHER; note = 2'-O-methyl ribonucleotide
  modified_base 75: mod_base = OTHER; note = 2'-O-methyl ribonucleotide
  modified_base 76: mod_base = OTHER; note = 2'-O-methyl ribonucleotide
  modified_base 77: mod_base = OTHER; note = 2'-O-methyl ribonucleotide
  modified_base 78: mod_base = OTHER; note = 2'-O-methyl ribonucleotide
  modified_base 79: mod_base = OTHER; note = 2'-O-methyl ribonucleotide
  modified_base 80: mod_base = OTHER; note = 2'-O-methyl ribonucleotide
  modified_base 81: mod_base = OTHER; note = 2'-O-methyl ribonucleotide
  modified_base 83: mod_base = OTHER; note = 2'-O-methyl ribonucleotide
  modified_base 84: mod_base = OTHER; note = 2'-O-methyl ribonucleotide
  modified_base 85: mod_base = OTHER; note = 2'-O-methyl ribonucleotide
  modified_base 86: mod_base = OTHER; note = 2'-O-methyl ribonucleotide
  modified_base 87: mod_base = OTHER; note = 2'-O-methyl ribonucleotide
  modified_base 88: mod_base = OTHER; note = 2'-O-methyl ribonucleotide
  modified_base 89: mod_base = OTHER; note = 2'-O-methyl ribonucleotide
  modified_base 90: mod_base = OTHER; note = 2'-O-methyl ribonucleotide
  modified_base 91: mod_base = OTHER; note = 2'-O-methyl ribonucleotide
  modified_base 92: mod_base = OTHER; note = 2'-O-methyl ribonucleotide
  modified_base 93: mod_base = OTHER; note = 2'-O-methyl ribonucleotide
  modified_base 94: mod_base = OTHER; note = 2'-O-methyl ribonucleotide
  modified_base 95: mod_base = OTHER; note = 2'-O-methyl ribonucleotide
  modified_base 96: mod_base = OTHER; note = 2'-O-methyl ribonucleotide
  modified_base 97: mod_base = OTHER; note = 2'-O-methyl ribonucleotide
  modified_base 98: mod_base = OTHER; note = 2'-O-methyl ribonucleotide
  modified_base 99: mod_base = OTHER; note = 2'-O-methyl ribonucleotide
  modified_base 100: mod_base = OTHER; note = 2'-O-methyl ribonucleotide
  modified_base 14: mod_base = OTHER; note = nebularine
  modified_base 34: mod_base = OTHER; note = nebularine
  modified_base 57: mod_base = OTHER; note = nebularine
  modified_base 1..4: mod_base = OTHER; note = phosphorothioate linkage
  modified_base 98..100: mod_base = OTHER; note = phosphorothioate linkage

SEQ ID NO: 2024 - RNA, 100 nt, synthetic construct; identical to SEQ ID NO: 1917
  source 1..100: mol_type = other RNA
  modified_base 1: mod_base = OTHER; note = 2'-O-methyl ribonucleotide
  modified_base 2: mod_base = OTHER; note = 2'-O-methyl ribonucleotide
  modified_base 3: mod_base = OTHER; note = 2'-O-methyl ribonucleotide
  modified_base 21: mod_base = OTHER; note = 2'-O-methyl ribonucleotide
  modified_base 28: mod_base = OTHER; note = 2'-O-methyl ribonucleotide
  modified_base 29: mod_base = OTHER; note = 2'-O-methyl ribonucleotide
  modified_base 30: mod_base = OTHER; note = 2'-O-methyl ribonucleotide
  modified_base 31: mod_base = OTHER; note = 2'-O-methyl ribonucleotide
  modified_base 32: mod_base = OTHER; note = 2'-O-methyl ribonucleotide
  modified_base 33: mod_base = OTHER; note = 2'-O-methyl ribonucleotide
  modified_base 34: mod_base = OTHER; note = 2'-O-methyl ribonucleotide
  modified_base 35: mod_base = OTHER; note = 2'-O-methyl ribonucleotide
  modified_base 36: mod_base = OTHER; note = 2'-O-methyl ribonucleotide
  modified_base 37: mod_base = OTHER; note = 2'-O-methyl ribonucleotide
  modified_base 38: mod_base = OTHER; note = 2'-O-methyl ribonucleotide
  modified_base 39: mod_base = OTHER; note = 2'-O-methyl ribonucleotide
  modified_base 40: mod_base = OTHER; note = 2'-O-methyl ribonucleotide
  modified_base 41: mod_base = OTHER; note = 2'-O-methyl ribonucleotide
  modified_base 42: mod_base = OTHER; note = 2'-O-methyl ribonucleotide
  modified_base 46: mod_base = OTHER; note = 2'-O-methyl ribonucleotide
  modified_base 48: mod_base = OTHER; note = 2'-O-methyl ribonucleotide
  modified_base 50: mod_base = OTHER; note = 2'-O-methyl ribonucleotide
  modified_base 52: mod_base = OTHER; note = 2'-O-methyl ribonucleotide
  modified_base 53: mod_base = OTHER; note = 2'-O-methyl ribonucleotide
  modified_base 54: mod_base = OTHER; note = 2'-O-methyl ribonucleotide
  modified_base 55: mod_base = OTHER; note = 2'-O-methyl ribonucleotide
  modified_base 56: mod_base = OTHER; note = 2'-O-methyl ribonucleotide
  modified_base 60: mod_base = OTHER; note = 2'-O-methyl ribonucleotide
  modified_base 61: mod_base = OTHER; note = 2'-O-methyl ribonucleotide
  modified_base 66: mod_base = OTHER; note = 2'-O-methyl ribonucleotide
  modified_base 67: mod_base = OTHER; note = 2'-O-methyl ribonucleotide
  modified_base 70: mod_base = OTHER; note = 2'-O-methyl ribonucleotide
  modified_base 71: mod_base = OTHER; note = 2'-O-methyl ribonucleotide
  modified_base 72: mod_base = OTHER; note = 2'-O-methyl ribonucleotide
  modified_base 73: mod_base = OTHER; note = 2'-O-methyl ribonucleotide
  modified_base 74: mod_base = OTHER; note = 2'-O-methyl ribonucleotide
  modified_base 75: mod_base = OTHER; note = 2'-O-methyl ribonucleotide
  modified_base 76: mod_base = OTHER; note = 2'-O-methyl ribonucleotide
  modified_base 77: mod_base = OTHER; note = 2'-O-methyl ribonucleotide
  modified_base 78: mod_base = OTHER; note = 2'-O-methyl ribonucleotide
  modified_base 79: mod_base = OTHER; note = 2'-O-methyl ribonucleotide
  modified_base 80: mod_base = OTHER; note = 2'-O-methyl ribonucleotide
  modified_base 81: mod_base = OTHER; note = 2'-O-methyl ribonucleotide
  modified_base 83: mod_base = OTHER; note = 2'-O-methyl ribonucleotide
  modified_base 84: mod_base = OTHER; note = 2'-O-methyl ribonucleotide
  modified_base 85: mod_base = OTHER; note = 2'-O-methyl ribonucleotide
  modified_base 86: mod_base = OTHER; note = 2'-O-methyl ribonucleotide
  modified_base 87: mod_base = OTHER; note = 2'-O-methyl ribonucleotide
  modified_base 88: mod_base = OTHER; note = 2'-O-methyl ribonucleotide
  modified_base 89: mod_base = OTHER; note = 2'-O-methyl ribonucleotide
  modified_base 90: mod_base = OTHER; note = 2'-O-methyl ribonucleotide
  modified_base 91: mod_base = OTHER; note = 2'-O-methyl ribonucleotide
  modified_base 92: mod_base = OTHER; note = 2'-O-methyl ribonucleotide
  modified_base 93: mod_base = OTHER; note = 2'-O-methyl ribonucleotide
  modified_base 94: mod_base = OTHER; note = 2'-O-methyl ribonucleotide
  modified_base 95: mod_base = OTHER; note = 2'-O-methyl ribonucleotide
  modified_base 96: mod_base = OTHER; note = 2'-O-methyl ribonucleotide
  modified_base 97: mod_base = OTHER; note = 2'-O-methyl ribonucleotide
  modified_base 98: mod_base = OTHER; note = 2'-O-methyl ribonucleotide
  modified_base 99: mod_base = OTHER; note = 2'-O-methyl ribonucleotide
  modified_base 100: mod_base = OTHER; note = 2'-O-methyl ribonucleotide
  modified_base 14: mod_base = OTHER; note = nebularine
  modified_base 57: mod_base = OTHER; note = nebularine
  modified_base 1..4: mod_base = OTHER; note = phosphorothioate linkage
  modified_base 98..100: mod_base = OTHER; note = phosphorothioate linkage

SEQ ID NO: 2025 - RNA, 100 nt, synthetic construct; identical to SEQ ID NO: 1918
  source 1..100: mol_type = other RNA
  modified_base 1: mod_base = OTHER; note = 2'-O-methyl ribonucleotide
  modified_base 2: mod_base = OTHER; note = 2'-O-methyl ribonucleotide
  modified_base 3: mod_base = OTHER; note = 2'-O-methyl ribonucleotide
  modified_base 21: mod_base = OTHER; note = 2'-O-methyl ribonucleotide
  modified_base 28: mod_base = OTHER; note = 2'-O-methyl ribonucleotide
  modified_base 29: mod_base = OTHER; note = 2'-O-methyl ribonucleotide
  modified_base 30: mod_base = OTHER; note = 2'-O-methyl ribonucleotide
  modified_base 31: mod_base = OTHER; note = 2'-O-methyl ribonucleotide
  modified_base 32: mod_base = OTHER; note = 2'-O-methyl ribonucleotide
  modified_base 33: mod_base = OTHER; note = 2'-O-methyl ribonucleotide
  modified_base 34: mod_base = OTHER; note = 2'-O-methyl ribonucleotide
  modified_base 35: mod_base = OTHER; note = 2'-O-methyl ribonucleotide
  modified_base 36: mod_base = OTHER; note = 2'-O-methyl ribonucleotide
  modified_base 37: mod_base = OTHER; note = 2'-O-methyl ribonucleotide
  modified_base 38: mod_base = OTHER; note = 2'-O-methyl ribonucleotide
  modified_base 39: mod_base = OTHER; note = 2'-O-methyl ribonucleotide
  modified_base 40: mod_base = OTHER; note = 2'-O-methyl ribonucleotide
  modified_base 41: mod_base = OTHER; note = 2'-O-methyl ribonucleotide
  modified_base 42: mod_base = OTHER; note = 2'-O-methyl ribonucleotide
  modified_base 46: mod_base = OTHER; note = 2'-O-methyl ribonucleotide
  modified_base 48: mod_base = OTHER; note = 2'-O-methyl ribonucleotide
  modified_base 50: mod_base = OTHER; note = 2'-O-methyl ribonucleotide
  modified_base 52: mod_base = OTHER; note = 2'-O-methyl ribonucleotide
  modified_base 53: mod_base = OTHER; note = 2'-O-methyl ribonucleotide
  modified_base 54: mod_base = OTHER; note = 2'-O-methyl ribonucleotide
  modified_base 55: mod_base = OTHER; note = 2'-O-methyl ribonucleotide
  modified_base 56: mod_base = OTHER; note = 2'-O-methyl ribonucleotide
  modified_base 57: mod_base = OTHER; note = 2'-O-methyl ribonucleotide
  modified_base 60: mod_base = OTHER; note = 2'-O-methyl ribonucleotide
  modified_base 61: mod_base = OTHER; note = 2'-O-methyl ribonucleotide
  modified_base 66: mod_base = OTHER; note = 2'-O-methyl ribonucleotide
  modified_base 67: mod_base = OTHER; note = 2'-O-methyl ribonucleotide
  modified_base 70: mod_base = OTHER; note = 2'-O-methyl ribonucleotide
  modified_base 71: mod_base = OTHER; note = 2'-O-methyl ribonucleotide
  modified_base 72: mod_base = OTHER; note = 2'-O-methyl ribonucleotide
  modified_base 73: mod_base = OTHER; note = 2'-O-methyl ribonucleotide
  modified_base 74: mod_base = OTHER; note = 2'-O-methyl ribonucleotide
  modified_base 75: mod_base = OTHER; note = 2'-O-methyl ribonucleotide
  modified_base 76: mod_base = OTHER; note = 2'-O-methyl ribonucleotide
  modified_base 77: mod_base = OTHER; note = 2'-O-methyl ribonucleotide
  modified_base 78: mod_base = OTHER; note = 2'-O-methyl ribonucleotide
  modified_base 79: mod_base = OTHER; note = 2'-O-methyl ribonucleotide
  modified_base 80: mod_base = OTHER; note = 2'-O-methyl ribonucleotide
  modified_base 81: mod_base = OTHER; note = 2'-O-methyl ribonucleotide
  modified_base 83: mod_base = OTHER; note = 2'-O-methyl ribonucleotide
  modified_base 84: mod_base = OTHER; note = 2'-O-methyl ribonucleotide
  modified_base 85: mod_base = OTHER; note = 2'-O-methyl ribonucleotide
  modified_base 86: mod_base = OTHER; note = 2'-O-methyl ribonucleotide
  modified_base 87: mod_base = OTHER; note = 2'-O-methyl ribonucleotide
  modified_base 88: mod_base = OTHER; note = 2'-O-methyl ribonucleotide
  modified_base 89: mod_base = OTHER; note = 2'-O-methyl ribonucleotide
  modified_base 90: mod_base = OTHER; note = 2'-O-methyl ribonucleotide
  modified_base 91: mod_base = OTHER; note = 2'-O-methyl ribonucleotide
  modified_base 92: mod_base = OTHER; note = 2'-O-methyl ribonucleotide
  modified_base 93: mod_base = OTHER; note = 2'-O-methyl ribonucleotide
  modified_base 94: mod_base = OTHER; note = 2'-O-methyl ribonucleotide
  modified_base 95: mod_base = OTHER; note = 2'-O-methyl ribonucleotide
  modified_base 96: mod_base = OTHER; note = 2'-O-methyl ribonucleotide
  modified_base 97: mod_base = OTHER; note = 2'-O-methyl ribonucleotide
  modified_base 98: mod_base = OTHER; note = 2'-O-methyl ribonucleotide
  modified_base 99: mod_base = OTHER; note = 2'-O-methyl ribonucleotide
  modified_base 100: mod_base = OTHER; note = 2'-O-methyl ribonucleotide
  modified_base 14: mod_base = OTHER; note = nebularine
  modified_base 65: mod_base = OTHER; note = nebularine
  modified_base 1..4: mod_base = OTHER; note = phosphorothioate linkage
  modified_base 98..100: mod_base = OTHER; note = phosphorothioate linkage

SEQ ID NO: 2026 - RNA, 100 nt, synthetic construct; identical to SEQ ID NO: 1919
  source 1..100: mol_type = other RNA
  modified_base 1: mod_base = OTHER; note = 2'-O-methyl ribonucleotide
  modified_base 2: mod_base = OTHER; note = 2'-O-methyl ribonucleotide
  modified_base 3: mod_base = OTHER; note = 2'-O-methyl ribonucleotide
  modified_base 21: mod_base = OTHER; note = 2'-O-methyl ribonucleotide
  modified_base 28: mod_base = OTHER; note = 2'-O-methyl ribonucleotide
  modified_base 29: mod_base = OTHER; note = 2'-O-methyl ribonucleotide
  modified_base 30: mod_base = OTHER; note = 2'-O-methyl ribonucleotide
  modified_base 31: mod_base = OTHER; note = 2'-O-methyl ribonucleotide
  modified_base 32: mod_base = OTHER; note = 2'-O-methyl ribonucleotide
  modified_base 33: mod_base = OTHER; note = 2'-O-methyl ribonucleotide
  modified_base 35: mod_base = OTHER; note = 2'-O-methyl ribonucleotide
  modified_base 36: mod_base = OTHER; note = 2'-O-methyl ribonucleotide
  modified_base 37: mod_base = OTHER; note = 2'-O-methyl ribonucleotide
  modified_base 38: mod_base = OTHER; note = 2'-O-methyl ribonucleotide
  modified_base 39: mod_base = OTHER; note = 2'-O-methyl ribonucleotide
  modified_base 40: mod_base = OTHER; note = 2'-O-methyl ribonucleotide
  modified_base 41: mod_base = OTHER; note = 2'-O-methyl ribonucleotide
  modified_base 42: mod_base = OTHER; note = 2'-O-methyl ribonucleotide
  modified_base 46: mod_base = OTHER; note = 2'-O-methyl ribonucleotide
  modified_base 48: mod_base = OTHER; note = 2'-O-methyl ribonucleotide
  modified_base 50: mod_base = OTHER; note = 2'-O-methyl ribonucleotide
  modified_base 52: mod_base = OTHER; note = 2'-O-methyl ribonucleotide
  modified_base 53: mod_base = OTHER; note = 2'-O-methyl ribonucleotide
  modified_base 54: mod_base = OTHER; note = 2'-O-methyl ribonucleotide
  modified_base 55: mod_base = OTHER; note = 2'-O-methyl ribonucleotide
  modified_base 56: mod_base = OTHER; note = 2'-O-methyl ribonucleotide
  modified_base 60: mod_base = OTHER; note = 2'-O-methyl ribonucleotide
  modified_base 61: mod_base = OTHER; note = 2'-O-methyl ribonucleotide
  modified_base 66: mod_base = OTHER; note = 2'-O-methyl ribonucleotide
  modified_base 67: mod_base = OTHER; note = 2'-O-methyl ribonucleotide
  modified_base 70: mod_base = OTHER; note = 2'-O-methyl ribonucleotide
  modified_base 71: mod_base = OTHER; note = 2'-O-methyl ribonucleotide
  modified_base 72: mod_base = OTHER; note = 2'-O-methyl ribonucleotide
  modified_base 73: mod_base = OTHER; note = 2'-O-methyl ribonucleotide
  modified_base 74: mod_base = OTHER; note = 2'-O-methyl ribonucleotide
  modified_base 75: mod_base = OTHER; note = 2'-O-methyl ribonucleotide
  modified_base 76: mod_base = OTHER; note = 2'-O-methyl ribonucleotide
  modified_base 77: mod_base = OTHER; note = 2'-O-methyl ribonucleotide
  modified_base 78: mod_base = OTHER; note = 2'-O-methyl ribonucleotide
  modified_base 79: mod_base = OTHER; note = 2'-O-methyl ribonucleotide
  modified_base 80: mod_base = OTHER; note = 2'-O-methyl ribonucleotide
  modified_base 81: mod_base = OTHER; note = 2'-O-methyl ribonucleotide
  modified_base 83: mod_base = OTHER; note = 2'-O-methyl ribonucleotide
  modified_base 84: mod_base = OTHER; note = 2'-O-methyl ribonucleotide
  modified_base 85: mod_base = OTHER; note = 2'-O-methyl ribonucleotide
  modified_base 86: mod_base = OTHER; note = 2'-O-methyl ribonucleotide
  modified_base 87: mod_base = OTHER; note = 2'-O-methyl ribonucleotide
  modified_base 88: mod_base = OTHER; note = 2'-O-methyl ribonucleotide
  modified_base 89: mod_base = OTHER; note = 2'-O-methyl ribonucleotide
  modified_base 90: mod_base = OTHER; note = 2'-O-methyl ribonucleotide
  modified_base 91: mod_base = OTHER; note = 2'-O-methyl ribonucleotide
  modified_base 92: mod_base = OTHER; note = 2'-O-methyl ribonucleotide
  modified_base 93: mod_base = OTHER; note = 2'-O-methyl ribonucleotide
  modified_base 94: mod_base = OTHER; note = 2'-O-methyl ribonucleotide
  modified_base 95: mod_base = OTHER; note = 2'-O-methyl ribonucleotide
  modified_base 96: mod_base = OTHER; note = 2'-O-methyl ribonucleotide
  modified_base 97: mod_base = OTHER; note = 2'-O-methyl ribonucleotide
  modified_base 98: mod_base = OTHER; note = 2'-O-methyl ribonucleotide
  modified_base 99: mod_base = OTHER; note = 2'-O-methyl ribonucleotide
  modified_base 100: mod_base = OTHER; note = 2'-O-methyl ribonucleotide
  modified_base 14: mod_base = OTHER; note = nebularine
  modified_base 34: mod_base = OTHER; note = nebularine
  modified_base 57: mod_base = OTHER; note = nebularine
  modified_base 65: mod_base = OTHER; note = nebularine
  modified_base 1..4: mod_base = OTHER; note = phosphorothioate linkage
  modified_base 98..100: mod_base = OTHER; note = phosphorothioate linkage

SEQ ID NO: 2027 - RNA, 100 nt, synthetic construct; identical to SEQ ID NO: 1920
  source 1..100: mol_type = other RNA
  modified_base 1: mod_base = OTHER; note = 2'-O-methyl ribonucleotide
  modified_base 2: mod_base = OTHER; note = 2'-O-methyl ribonucleotide
  modified_base 3: mod_base = OTHER; note = 2'-O-methyl ribonucleotide
  modified_base 21: mod_base = OTHER; note = 2'-O-methyl ribonucleotide
  modified_base 29: mod_base = OTHER; note = 2'-O-methyl ribonucleotide
  modified_base 30: mod_base = OTHER; note = 2'-O-methyl ribonucleotide
  modified_base 31: mod_base = OTHER; note = 2'-O-methyl ribonucleotide
  modified_base 32: mod_base = OTHER; note = 2'-O-methyl ribonucleotide
  modified_base 33: mod_base = OTHER; note = 2'-O-methyl ribonucleotide
  modified_base 35: mod_base = OTHER; note = 2'-O-methyl ribonucleotide
  modified_base 36: mod_base = OTHER; note = 2'-O-methyl ribonucleotide
  modified_base 37: mod_base = OTHER; note = 2'-O-methyl ribonucleotide
  modified_base 38: mod_base = OTHER; note = 2'-O-methyl ribonucleotide
  modified_base 39: mod_base = OTHER; note = 2'-O-methyl ribonucleotide
  modified_base 40: mod_base = OTHER; note = 2'-O-methyl ribonucleotide
  modified_base 41: mod_base = OTHER; note = 2'-O-methyl ribonucleotide
  modified_base 46: mod_base = OTHER; note = 2'-O-methyl ribonucleotide
  modified_base 48: mod_base = OTHER; note = 2'-O-methyl ribonucleotide
  modified_base 50: mod_base = OTHER; note = 2'-O-methyl ribonucleotide
  modified_base 52: mod_base = OTHER; note = 2'-O-methyl ribonucleotide
  modified_base 53: mod_base = OTHER; note = 2'-O-methyl ribonucleotide
  modified_base 54: mod_base = OTHER; note = 2'-O-methyl ribonucleotide
  modified_base 55: mod_base = OTHER; note = 2'-O-methyl ribonucleotide
  modified_base 56: mod_base = OTHER; note = 2'-O-methyl ribonucleotide
  modified_base 60: mod_base = OTHER; note = 2'-O-methyl ribonucleotide
  modified_base 61: mod_base = OTHER; note = 2'-O-methyl ribonucleotide
  modified_base 66: mod_base = OTHER; note = 2'-O-methyl ribonucleotide
  modified_base 67: mod_base = OTHER; note = 2'-O-methyl ribonucleotide
  modified_base 70: mod_base = OTHER; note = 2'-O-methyl ribonucleotide
  modified_base 71: mod_base = OTHER; note = 2'-O-methyl ribonucleotide
  modified_base 72: mod_base = OTHER; note = 2'-O-methyl ribonucleotide
  modified_base 73: mod_base = OTHER; note = 2'-O-methyl ribonucleotide
  modified_base 74: mod_base = OTHER; note = 2'-O-methyl ribonucleotide
  modified_base 75: mod_base = OTHER; note = 2'-O-methyl ribonucleotide
  modified_base 76: mod_base = OTHER; note = 2'-O-methyl ribonucleotide
  modified_base 77: mod_base = OTHER; note = 2'-O-methyl ribonucleotide
  modified_base 78: mod_base = OTHER; note = 2'-O-methyl ribonucleotide
  modified_base 79: mod_base = OTHER; note = 2'-O-methyl ribonucleotide
  modified_base 80: mod_base = OTHER; note = 2'-O-methyl ribonucleotide
  modified_base 81: mod_base = OTHER; note = 2'-O-methyl ribonucleotide
  modified_base 83: mod_base = OTHER; note = 2'-O-methyl ribonucleotide
  modified_base 84: mod_base = OTHER; note = 2'-O-methyl ribonucleotide
  modified_base 85: mod_base = OTHER; note = 2'-O-methyl ribonucleotide
  modified_base 86: mod_base = OTHER; note = 2'-O-methyl ribonucleotide
  modified_base 87: mod_base = OTHER; note = 2'-O-methyl ribonucleotide
  modified_base 88: mod_base = OTHER; note = 2'-O-methyl ribonucleotide
  modified_base 89: mod_base = OTHER; note = 2'-O-methyl ribonucleotide
  modified_base 90: mod_base = OTHER; note = 2'-O-methyl ribonucleotide
  modified_base 91: mod_base = OTHER; note = 2'-O-methyl ribonucleotide
  modified_base 92: mod_base = OTHER; note = 2'-O-methyl ribonucleotide
  modified_base 93: mod_base = OTHER; note = 2'-O-methyl ribonucleotide
  modified_base 94: mod_base = OTHER; note = 2'-O-methyl ribonucleotide
  modified_base 95: mod_base = OTHER; note = 2'-O-methyl ribonucleotide
  modified_base 96: mod_base = OTHER; note = 2'-O-methyl ribonucleotide
  modified_base 97: mod_base = OTHER; note = 2'-O-methyl ribonucleotide
  modified_base 98: mod_base = OTHER; note = 2'-O-methyl ribonucleotide
  modified_base 99: mod_base = OTHER; note = 2'-O-methyl ribonucleotide
  modified_base 100: mod_base = OTHER; note = 2'-O-methyl ribonucleotide
  modified_base 14: mod_base = OTHER; note = nebularine
  modified_base 28: mod_base = OTHER; note = nebularine
  modified_base 34: mod_base = OTHER; note = nebularine
  modified_base 42: mod_base = OTHER; note = nebularine
  modified_base 57: mod_base = OTHER; note = nebularine
  modified_base 65: mod_base = OTHER; note = nebularine
  modified_base 1..4: mod_base = OTHER; note = phosphorothioate linkage
  modified_base 98..100: mod_base = OTHER; note = phosphorothioate linkage

SEQ ID NO: 2028 - RNA, 100 nt, synthetic construct; identical to SEQ ID NO: 1921
  source 1..100: mol_type = other RNA
  modified_base 1: mod_base = OTHER; note = 2'-O-methyl ribonucleotide
  modified_base 2: mod_base = OTHER; note = 2'-O-methyl ribonucleotide
  modified_base 3: mod_base = OTHER; note = 2'-O-methyl ribonucleotide
  modified_base 21: mod_base = OTHER; note = 2'-O-methyl ribonucleotide
  modified_base 28: mod_base = OTHER; note = 2'-O-methyl ribonucleotide
  modified_base 29: mod_base = OTHER; note = 2'-O-methyl ribonucleotide
  modified_base 30: mod_base = OTHER; note = 2'-O-methyl ribonucleotide
  modified_base 31: mod_base = OTHER; note = 2'-O-methyl ribonucleotide
  modified_base 32: mod_base = OTHER; note = 2'-O-methyl ribonucleotide
  modified_base 33: mod_base = OTHER; note = 2'-O-methyl ribonucleotide
  modified_base 34: mod_base = OTHER; note = 2'-O-methyl ribonucleotide
  modified_base 35: mod_base = OTHER; note = 2'-O-methyl ribonucleotide
  modified_base 36: mod_base = OTHER; note = 2'-O-methyl ribonucleotide
  modified_base 37: mod_base = OTHER; note = 2'-O-methyl ribonucleotide
  modified_base 38: mod_base = OTHER; note = 2'-O-methyl ribonucleotide
  modified_base 39: mod_base = OTHER; note = 2'-O-methyl ribonucleotide
  modified_base 40: mod_base = OTHER; note = 2'-O-methyl ribonucleotide
  modified_base 41: mod_base = OTHER; note = 2'-O-methyl ribonucleotide
  modified_base 42: mod_base = OTHER; note = 2'-O-methyl ribonucleotide
  modified_base 46: mod_base = OTHER; note = 2'-O-methyl ribonucleotide
  modified_base 48: mod_base = OTHER; note = 2'-O-methyl ribonucleotide
  modified_base 50: mod_base = OTHER; note = 2'-O-methyl ribonucleotide
  modified_base 52: mod_base = OTHER; note = 2'-O-methyl ribonucleotide
  modified_base 53: mod_base = OTHER; note = 2'-O-methyl ribonucleotide
  modified_base 54: mod_base = OTHER; note = 2'-O-methyl ribonucleotide
  modified_base 55: mod_base = OTHER; note = 2'-O-methyl ribonucleotide
  modified_base 56: mod_base = OTHER; note = 2'-O-methyl ribonucleotide
  modified_base 57: mod_base = OTHER; note = 2'-O-methyl ribonucleotide
  modified_base 60: mod_base = OTHER; note = 2'-O-methyl ribonucleotide
  modified_base 61: mod_base = OTHER; note = 2'-O-methyl ribonucleotide
  modified_base 66: mod_base = OTHER; note = 2'-O-methyl ribonucleotide
  modified_base 67: mod_base = OTHER; note = 2'-O-methyl ribonucleotide
  modified_base 70: mod_base = OTHER; note = 2'-O-methyl ribonucleotide
  modified_base 71: mod_base = OTHER; note = 2'-O-methyl ribonucleotide
  modified_base 72: mod_base = OTHER; note = 2'-O-methyl ribonucleotide
  modified_base 73: mod_base = OTHER; note = 2'-O-methyl ribonucleotide
  modified_base 74: mod_base = OTHER; note = 2'-O-methyl ribonucleotide
  modified_base 75: mod_base = OTHER; note = 2'-O-methyl ribonucleotide
  modified_base 76: mod_base = OTHER; note = 2'-O-methyl ribonucleotide
  modified_base 77: mod_base = OTHER; note = 2'-O-methyl ribonucleotide
  modified_base 78: mod_base = OTHER; note = 2'-O-methyl ribonucleotide
  modified_base 79: mod_base = OTHER; note = 2'-O-methyl ribonucleotide
  modified_base 80: mod_base = OTHER; note = 2'-O-methyl ribonucleotide
  modified_base 81: mod_base = OTHER; note = 2'-O-methyl ribonucleotide
  modified_base 83: mod_base = OTHER; note = 2'-O-methyl ribonucleotide
  modified_base 84: mod_base = OTHER; note = 2'-O-methyl ribonucleotide
  modified_base 85: mod_base = OTHER; note = 2'-O-methyl ribonucleotide
  modified_base 86: mod_base = OTHER; note = 2'-O-methyl ribonucleotide
  modified_base 87: mod_base = OTHER; note = 2'-O-methyl ribonucleotide
  modified_base 88: mod_base = OTHER; note = 2'-O-methyl ribonucleotide
  modified_base 89: mod_base = OTHER; note = 2'-O-methyl ribonucleotide
  modified_base 90: mod_base = OTHER; note = 2'-O-methyl ribonucleotide
  modified_base 91: mod_base = OTHER; note = 2'-O-methyl ribonucleotide
  modified_base 92: mod_base = OTHER; note = 2'-O-methyl ribonucleotide
  modified_base 93: mod_base = OTHER; note = 2'-O-methyl ribonucleotide
  modified_base 94: mod_base = OTHER; note = 2'-O-methyl ribonucleotide
  modified_base 95: mod_base = OTHER; note = 2'-O-methyl ribonucleotide
  modified_base 96: mod_base = OTHER; note = 2'-O-methyl ribonucleotide
  modified_base 97: mod_base = OTHER; note = 2'-O-methyl ribonucleotide
  modified_base 98: mod_base = OTHER; note = 2'-O-methyl ribonucleotide
  modified_base 99: mod_base = OTHER; note = 2'-O-methyl ribonucleotide
  modified_base 100: mod_base = OTHER; note = 2'-O-methyl ribonucleotide
  modified_base 9: mod_base = OTHER; note = nebularine
  modified_base 14: mod_base = OTHER; note = nebularine
  modified_base 28: mod_base = OTHER; note = nebularine
  modified_base 34: mod_base = OTHER; note = nebularine
  modified_base 42: mod_base = OTHER; note = nebularine
  modified_base 57: mod_base = OTHER; note = nebularine
  modified_base 1..4: mod_base = OTHER; note = phosphorothioate linkage
  modified_base 98..100: mod_base = OTHER; note = phosphorothioate linkage

SEQ ID NO: 2029 - RNA, 100 nt, synthetic construct; identical to SEQ ID NO: 1922
  source 1..100: mol_type = other RNA
  modified_base 1: mod_base = OTHER; note = 2'-O-methyl ribonucleotide
  modified_base 2: mod_base = OTHER; note = 2'-O-methyl ribonucleotide
  modified_base 3: mod_base = OTHER; note = 2'-O-methyl ribonucleotide
  modified_base 21: mod_base = OTHER; note = 2'-O-methyl ribonucleotide
  modified_base 28: mod_base = OTHER; note = 2'-O-methyl ribonucleotide
  modified_base 29: mod_base = OTHER; note = 2'-O-methyl ribonucleotide
  modified_base 30: mod_base = OTHER; note = 2'-O-methyl ribonucleotide
  modified_base 31: mod_base = OTHER; note = 2'-O-methyl ribonucleotide
  modified_base 32: mod_base = OTHER; note = 2'-O-methyl ribonucleotide
  modified_base 33: mod_base = OTHER; note = 2'-O-methyl ribonucleotide
  modified_base 34: mod_base = OTHER; note = 2'-O-methyl ribonucleotide
  modified_base 35: mod_base = OTHER; note = 2'-O-methyl ribonucleotide
  modified_base 36: mod_base = OTHER; note = 2'-O-methyl ribonucleotide
  modified_base 37: mod_base = OTHER; note = 2'-O-methyl ribonucleotide
  modified_base 38: mod_base = OTHER; note = 2'-O-methyl ribonucleotide
  modified_base 39: mod_base = OTHER; note = 2'-O-methyl ribonucleotide
  modified_base 40: mod_base = OTHER; note = 2'-O-methyl ribonucleotide
  modified_base 41: mod_base = OTHER; note = 2'-O-methyl ribonucleotide
  modified_base 42: mod_base = OTHER; note = 2'-O-methyl ribonucleotide
  modified_base 46: mod_base = OTHER; note = 2'-O-methyl ribonucleotide
  modified_base 48: mod_base = OTHER; note = 2'-O-methyl ribonucleotide
  modified_base 50: mod_base = OTHER; note = 2'-O-methyl ribonucleotide
  modified_base 52: mod_base = OTHER; note = 2'-O-methyl ribonucleotide
  modified_base 53: mod_base = OTHER; note = 2'-O-methyl ribonucleotide
  modified_base 54: mod_base = OTHER; note = 2'-O-methyl ribonucleotide
  modified_base 55: mod_base = OTHER; note = 2'-O-methyl ribonucleotide
  modified_base 56: mod_base = OTHER; note = 2'-O-methyl ribonucleotide
  modified_base 57: mod_base = OTHER; note = 2'-O-methyl ribonucleotide
  modified_base 60: mod_base = OTHER; note = 2'-O-methyl ribonucleotide
  modified_base 61: mod_base = OTHER; note = 2'-O-methyl ribonucleotide
  modified_base 66: mod_base = OTHER; note = 2'-O-methyl ribonucleotide
  modified_base 67: mod_base = OTHER; note = 2'-O-methyl ribonucleotide
  modified_base 70: mod_base = OTHER; note = 2'-O-methyl ribonucleotide
  modified_base 71: mod_base = OTHER; note = 2'-O-methyl ribonucleotide
  modified_base 72: mod_base = OTHER; note = 2'-O-methyl ribonucleotide
  modified_base 73: mod_base = OTHER; note = 2'-O-methyl ribonucleotide
  modified_base 74: mod_base = OTHER; note = 2'-O-methyl ribonucleotide
  modified_base 75: mod_base = OTHER; note = 2'-O-methyl ribonucleotide
  modified_base 76: mod_base = OTHER; note = 2'-O-methyl ribonucleotide
  modified_base 77: mod_base = OTHER; note = 2'-O-methyl ribonucleotide
  modified_base 78: mod_base = OTHER; note = 2'-O-methyl ribonucleotide
  modified_base 79: mod_base = OTHER; note = 2'-O-methyl ribonucleotide
  modified_base 80: mod_base = OTHER; note = 2'-O-methyl ribonucleotide
  modified_base 81: mod_base = OTHER; note = 2'-O-methyl ribonucleotide
  modified_base 83: mod_base = OTHER; note = 2'-O-methyl ribonucleotide
  modified_base 84: mod_base = OTHER; note = 2'-O-methyl ribonucleotide
  modified_base 85: mod_base = OTHER; note = 2'-O-methyl ribonucleotide
  modified_base 86: mod_base = OTHER; note = 2'-O-methyl ribonucleotide
  modified_base 87: mod_base = OTHER; note = 2'-O-methyl ribonucleotide
  modified_base 88: mod_base = OTHER; note = 2'-O-methyl ribonucleotide
  modified_base 89: mod_base = OTHER; note = 2'-O-methyl ribonucleotide
  modified_base 90: mod_base = OTHER; note = 2'-O-methyl ribonucleotide
  modified_base 91: mod_base = OTHER; note = 2'-O-methyl ribonucleotide
  modified_base 92: mod_base = OTHER; note = 2'-O-methyl ribonucleotide
  modified_base 93: mod_base = OTHER; note = 2'-O-methyl ribonucleotide
  modified_base 94: mod_base = OTHER; note = 2'-O-methyl ribonucleotide
  modified_base 95: mod_base = OTHER; note = 2'-O-methyl ribonucleotide
  modified_base 96: mod_base = OTHER; note = 2'-O-methyl ribonucleotide
  modified_base 97: mod_base = OTHER; note = 2'-O-methyl ribonucleotide
  modified_base 98: mod_base = OTHER; note = 2'-O-methyl ribonucleotide
  modified_base 99: mod_base = OTHER; note = 2'-O-methyl ribonucleotide
  modified_base 100: mod_base = OTHER; note = 2'-O-methyl ribonucleotide
  modified_base 9: mod_base = OTHER; note = nebularine
  modified_base 14: mod_base = OTHER; note = nebularine
  modified_base 34: mod_base = OTHER; note = nebularine
  modified_base 42: mod_base = OTHER; note = nebularine
  modified_base 57: mod_base = OTHER; note = nebularine
  modified_base 1..4: mod_base = OTHER; note = phosphorothioate linkage
  modified_base 98..100: mod_base = OTHER; note = phosphorothioate linkage

SEQ ID NO: 2030 - RNA, 100 nt, synthetic construct; identical to SEQ ID NO: 1923
  source 1..100: mol_type = other RNA
  modified_base 1: mod_base = OTHER; note = 2'-O-methyl ribonucleotide
  modified_base 2: mod_base = OTHER; note = 2'-O-methyl ribonucleotide
  modified_base 3: mod_base = OTHER; note = 2'-O-methyl ribonucleotide
  modified_base 21: mod_base = OTHER; note = 2'-O-methyl ribonucleotide
  modified_base 28: mod_base = OTHER; note = 2'-O-methyl ribonucleotide
  modified_base 29: mod_base = OTHER; note = 2'-O-methyl ribonucleotide
  modified_base 30: mod_base = OTHER; note = 2'-O-methyl ribonucleotide
  modified_base 31: mod_base = OTHER; note = 2'-O-methyl ribonucleotide
  modified_base 32: mod_base = OTHER; note = 2'-O-methyl ribonucleotide
  modified_base 33: mod_base = OTHER; note = 2'-O-methyl ribonucleotide
  modified_base 34: mod_base = OTHER; note = 2'-O-methyl ribonucleotide
  modified_base 35: mod_base = OTHER; note = 2'-O-methyl ribonucleotide
  modified_base 36: mod_base = OTHER; note = 2'-O-methyl ribonucleotide
  modified_base 37: mod_base = OTHER; note = 2'-O-methyl ribonucleotide
  modified_base 38: mod_base = OTHER; note = 2'-O-methyl ribonucleotide
  modified_base 39: mod_base = OTHER; note = 2'-O-methyl ribonucleotide
  modified_base 40: mod_base = OTHER; note = 2'-O-methyl ribonucleotide
  modified_base 41: mod_base = OTHER; note = 2'-O-methyl ribonucleotide
  modified_base 42: mod_base = OTHER; note = 2'-O-methyl ribonucleotide
  modified_base 46: mod_base = OTHER; note = 2'-O-methyl ribonucleotide
  modified_base 48: mod_base = OTHER; note = 2'-O-methyl ribonucleotide
  modified_base 50: mod_base = OTHER; note = 2'-O-methyl ribonucleotide
  modified_base 52: mod_base = OTHER; note = 2'-O-methyl ribonucleotide
  modified_base 53: mod_base = OTHER; note = 2'-O-methyl ribonucleotide
  modified_base 54: mod_base = OTHER; note = 2'-O-methyl ribonucleotide
  modified_base 55: mod_base = OTHER; note = 2'-O-methyl ribonucleotide
  modified_base 56: mod_base = OTHER; note = 2'-O-methyl ribonucleotide
  modified_base 57: mod_base = OTHER; note = 2'-O-methyl ribonucleotide
  modified_base 60: mod_base = OTHER; note = 2'-O-methyl ribonucleotide
  modified_base 61: mod_base = OTHER; note = 2'-O-methyl ribonucleotide
  modified_base 66: mod_base = OTHER; note = 2'-O-methyl ribonucleotide
  modified_base 67: mod_base = OTHER; note = 2'-O-methyl ribonucleotide
  modified_base 70: mod_base = OTHER; note = 2'-O-methyl ribonucleotide
  modified_base 71: mod_base = OTHER; note = 2'-O-methyl ribonucleotide
  modified_base 72: mod_base = OTHER; note = 2'-O-methyl ribonucleotide
  modified_base 73: mod_base = OTHER; note = 2'-O-methyl ribonucleotide
  modified_base 74: mod_base = OTHER; note = 2'-O-methyl ribonucleotide
  modified_base 75: mod_base = OTHER; note = 2'-O-methyl ribonucleotide
  modified_base 76: mod_base = OTHER; note = 2'-O-methyl ribonucleotide
  modified_base 77: mod_base = OTHER; note = 2'-O-methyl ribonucleotide
  modified_base 78: mod_base = OTHER; note = 2'-O-methyl ribonucleotide
  modified_base 79: mod_base = OTHER; note = 2'-O-methyl ribonucleotide
  modified_base 80: mod_base = OTHER; note = 2'-O-methyl ribonucleotide
  modified_base 81: mod_base = OTHER; note = 2'-O-methyl ribonucleotide
  modified_base 83: mod_base = OTHER; note = 2'-O-methyl ribonucleotide
  modified_base 84: mod_base = OTHER; note = 2'-O-methyl ribonucleotide
  modified_base 85: mod_base = OTHER; note = 2'-O-methyl ribonucleotide
  modified_base 86: mod_base = OTHER; note = 2'-O-methyl ribonucleotide
  modified_base 87: mod_base = OTHER; note = 2'-O-methyl ribonucleotide
  modified_base 88: mod_base = OTHER; note = 2'-O-methyl ribonucleotide
  modified_base 89: mod_base = OTHER; note = 2'-O-methyl ribonucleotide
  modified_base 90: mod_base = OTHER; note = 2'-O-methyl ribonucleotide
  modified_base 91: mod_base = OTHER; note = 2'-O-methyl ribonucleotide
  modified_base 92: mod_base = OTHER; note = 2'-O-methyl ribonucleotide
  modified_base 93: mod_base = OTHER; note = 2'-O-methyl ribonucleotide
  modified_base 94: mod_base = OTHER; note = 2'-O-methyl ribonucleotide
  modified_base 95: mod_base = OTHER; note = 2'-O-methyl ribonucleotide
  modified_base 96: mod_base = OTHER; note = 2'-O-methyl ribonucleotide
  modified_base 97: mod_base = OTHER; note = 2'-O-methyl ribonucleotide
  modified_base 98: mod_base = OTHER; note = 2'-O-methyl ribonucleotide
  modified_base 99: mod_base = OTHER; note = 2'-O-methyl ribonucleotide
  modified_base 100: mod_base = OTHER; note = 2'-O-methyl ribonucleotide
  modified_base 9: mod_base = OTHER; note = nebularine
  modified_base 14: mod_base = OTHER; note = nebularine
  modified_base 42: mod_base = OTHER; note = nebularine
  modified_base 57: mod_base = OTHER; note = nebularine
  modified_base 1..4: mod_base = OTHER; note = phosphorothioate linkage
  modified_base 98..100: mod_base = OTHER; note = phosphorothioate linkage

SEQ ID NO: 2031 - RNA, 100 nt, synthetic construct; identical to SEQ ID NO: 1924
  source 1..100: mol_type = other RNA
  modified_base 1: mod_base = OTHER; note = 2'-O-methyl ribonucleotide
  modified_base 2: mod_base = OTHER; note = 2'-O-methyl ribonucleotide
  modified_base 3: mod_base = OTHER; note = 2'-O-methyl ribonucleotide
  modified_base 21: mod_base = OTHER; note = 2'-O-methyl ribonucleotide
  modified_base 28: mod_base = OTHER; note = 2'-O-methyl ribonucleotide
  modified_base 29: mod_base = OTHER; note = 2'-O-methyl ribonucleotide
  modified_base 30: mod_base = OTHER; note = 2'-O-methyl ribonucleotide
  modified_base 31: mod_base = OTHER; note = 2'-O-methyl ribonucleotide
  modified_base 32: mod_base = OTHER; note = 2'-O-methyl ribonucleotide
  modified_base 33: mod_base = OTHER; note = 2'-O-methyl ribonucleotide
  modified_base 34: mod_base = OTHER; note = 2'-O-methyl ribonucleotide
  modified_base 35: mod_base = OTHER; note = 2'-O-methyl ribonucleotide
  modified_base 36: mod_base = OTHER; note = 2'-O-methyl ribonucleotide
  modified_base 37: mod_base = OTHER; note = 2'-O-methyl ribonucleotide
  modified_base 38: mod_base = OTHER; note = 2'-O-methyl ribonucleotide
  modified_base 39: mod_base = OTHER; note = 2'-O-methyl ribonucleotide
  modified_base 40: mod_base = OTHER; note = 2'-O-methyl ribonucleotide
  modified_base 41: mod_base = OTHER; note = 2'-O-methyl ribonucleotide
  modified_base 42: mod_base = OTHER; note = 2'-O-methyl ribonucleotide
  modified_base 46: mod_base = OTHER; note = 2'-O-methyl ribonucleotide
  modified_base 48: mod_base = OTHER; note = 2'-O-methyl ribonucleotide
  modified_base 50: mod_base = OTHER; note = 2'-O-methyl ribonucleotide
  modified_base 52: mod_base = OTHER; note = 2'-O-methyl ribonucleotide
  modified_base 53: mod_base = OTHER; note = 2'-O-methyl ribonucleotide
  modified_base 54: mod_base = OTHER; note = 2'-O-methyl ribonucleotide
  modified_base 55: mod_base = OTHER; note = 2'-O-methyl ribonucleotide
  modified_base 56: mod_base = OTHER; note = 2'-O-methyl ribonucleotide
  modified_base 57: mod_base = OTHER; note = 2'-O-methyl ribonucleotide
  modified_base 60: mod_base = OTHER; note = 2'-O-methyl ribonucleotide
  modified_base 61: mod_base = OTHER; note = 2'-O-methyl ribonucleotide
  modified_base 66: mod_base = OTHER; note = 2'-O-methyl ribonucleotide
  modified_base 67: mod_base = OTHER; note = 2'-O-methyl ribonucleotide
  modified_base 70: mod_base = OTHER; note = 2'-O-methyl ribonucleotide
  modified_base 71: mod_base = OTHER; note = 2'-O-methyl ribonucleotide
  modified_base 72: mod_base = OTHER; note = 2'-O-methyl ribonucleotide
  modified_base 73: mod_base = OTHER; note = 2'-O-methyl ribonucleotide
  modified_base 74: mod_base = OTHER; note = 2'-O-methyl ribonucleotide
  modified_base 75: mod_base = OTHER; note = 2'-O-methyl ribonucleotide
  modified_base 76: mod_base = OTHER; note = 2'-O-methyl ribonucleotide
  modified_base 77: mod_base = OTHER; note = 2'-O-methyl ribonucleotide
  modified_base 78: mod_base = OTHER; note = 2'-O-methyl ribonucleotide
  modified_base 79: mod_base = OTHER; note = 2'-O-methyl ribonucleotide
  modified_base 80: mod_base = OTHER; note = 2'-O-methyl ribonucleotide
  modified_base 81: mod_base = OTHER; note = 2'-O-methyl ribonucleotide
  modified_base 83: mod_base = OTHER; note = 2'-O-methyl ribonucleotide
  modified_base 84: mod_base = OTHER; note = 2'-O-methyl ribonucleotide
  modified_base 85: mod_base = OTHER; note = 2'-O-methyl ribonucleotide
  modified_base 86: mod_base = OTHER; note = 2'-O-methyl ribonucleotide
  modified_base 87: mod_base = OTHER; note = 2'-O-methyl ribonucleotide
  modified_base 88: mod_base = OTHER; note = 2'-O-methyl ribonucleotide
  modified_base 89: mod_base = OTHER; note = 2'-O-methyl ribonucleotide
  modified_base 90: mod_base = OTHER; note = 2'-O-methyl ribonucleotide
  modified_base 91: mod_base = OTHER; note = 2'-O-methyl ribonucleotide
  modified_base 92: mod_base = OTHER; note = 2'-O-methyl ribonucleotide
  modified_base 93: mod_base = OTHER; note = 2'-O-methyl ribonucleotide
  modified_base 94: mod_base = OTHER; note = 2'-O-methyl ribonucleotide
  modified_base 95: mod_base = OTHER; note = 2'-O-methyl ribonucleotide
  modified_base 96: mod_base = OTHER; note = 2'-O-methyl ribonucleotide
  modified_base 97: mod_base = OTHER; note = 2'-O-methyl ribonucleotide
  modified_base 98: mod_base = OTHER; note = 2'-O-methyl ribonucleotide
  modified_base 99: mod_base = OTHER; note = 2'-O-methyl ribonucleotide
  modified_base 100: mod_base = OTHER; note = 2'-O-methyl ribonucleotide
  modified_base 9: mod_base = OTHER; note = nebularine
  modified_base 14: mod_base = OTHER; note = nebularine
  modified_base 57: mod_base = OTHER; note = nebularine
  modified_base 1..4: mod_base = OTHER; note = phosphorothioate linkage
  modified_base 98..100: mod_base = OTHER; note = phosphorothioate linkage

SEQ ID NO: 2032 - RNA, 100 nt, synthetic construct; identical to SEQ ID NO: 1925
  source 1..100: mol_type = other RNA
  modified_base 1: mod_base = OTHER; note = 2'-O-methyl ribonucleotide
  modified_base 2: mod_base = OTHER; note = 2'-O-methyl ribonucleotide
  modified_base 3: mod_base = OTHER; note = 2'-O-methyl ribonucleotide
  modified_base 21: mod_base = OTHER; note = 2'-O-methyl ribonucleotide
  modified_base 28: mod_base = OTHER; note = 2'-O-methyl ribonucleotide
  modified_base 29: mod_base = OTHER; note = 2'-O-methyl ribonucleotide
  modified_base 30: mod_base = OTHER; note = 2'-O-methyl ribonucleotide
  modified_base 31: mod_base = OTHER; note = 2'-O-methyl ribonucleotide
  modified_base 32: mod_base = OTHER; note = 2'-O-methyl ribonucleotide
  modified_base 33: mod_base = OTHER; note = 2'-O-methyl ribonucleotide
  modified_base 34: mod_base = OTHER; note = 2'-O-methyl ribonucleotide
  modified_base 35: mod_base = OTHER; note = 2'-O-methyl ribonucleotide
  modified_base 36: mod_base = OTHER; note = 2'-O-methyl ribonucleotide
  modified_base 37: mod_base = OTHER; note = 2'-O-methyl ribonucleotide
  modified_base 38: mod_base = OTHER; note = 2'-O-methyl ribonucleotide
  modified_base 39: mod_base = OTHER; note = 2'-O-methyl ribonucleotide
  modified_base 40: mod_base = OTHER; note = 2'-O-methyl ribonucleotide
  modified_base 41: mod_base = OTHER; note = 2'-O-methyl ribonucleotide
  modified_base 42: mod_base = OTHER; note = 2'-O-methyl ribonucleotide
  modified_base 46: mod_base = OTHER; note = 2'-O-methyl ribonucleotide
  modified_base 48: mod_base = OTHER; note = 2'-O-methyl ribonucleotide
  modified_base 50: mod_base = OTHER; note = 2'-O-methyl ribonucleotide
  modified_base 52: mod_base = OTHER; note = 2'-O-methyl ribonucleotide
  modified_base 53: mod_base = OTHER; note = 2'-O-methyl ribonucleotide
  modified_base 54: mod_base = OTHER; note = 2'-O-methyl ribonucleotide
  modified_base 55: mod_base = OTHER; note = 2'-O-methyl ribonucleotide
  modified_base 56: mod_base = OTHER; note = 2'-O-methyl ribonucleotide
  modified_base 57: mod_base = OTHER; note = 2'-O-methyl ribonucleotide
  modified_base 60: mod_base = OTHER; note = 2'-O-methyl ribonucleotide
  modified_base 61: mod_base = OTHER; note = 2'-O-methyl ribonucleotide
  modified_base 66: mod_base = OTHER; note = 2'-O-methyl ribonucleotide
  modified_base 67: mod_base = OTHER; note = 2'-O-methyl ribonucleotide
  modified_base 70: mod_base = OTHER; note = 2'-O-methyl ribonucleotide
  modified_base 71: mod_base = OTHER; note = 2'-O-methyl ribonucleotide
  modified_base 72: mod_base = OTHER; note = 2'-O-methyl ribonucleotide
  modified_base 73: mod_base = OTHER; note = 2'-O-methyl ribonucleotide
  modified_base 74: mod_base = OTHER; note = 2'-O-methyl ribonucleotide
  modified_base 75: mod_base = OTHER; note = 2'-O-methyl ribonucleotide
  modified_base 76: mod_base = OTHER; note = 2'-O-methyl ribonucleotide
  modified_base 77: mod_base = OTHER; note = 2'-O-methyl ribonucleotide
  modified_base 78: mod_base = OTHER; note = 2'-O-methyl ribonucleotide
  modified_base 79: mod_base = OTHER; note = 2'-O-methyl ribonucleotide
  modified_base 80: mod_base = OTHER; note = 2'-O-methyl ribonucleotide
  modified_base 81: mod_base = OTHER; note = 2'-O-methyl ribonucleotide
  modified_base 83: mod_base = OTHER; note = 2'-O-methyl ribonucleotide
  modified_base 84: mod_base = OTHER; note = 2'-O-methyl ribonucleotide
  modified_base 85: mod_base = OTHER; note = 2'-O-methyl ribonucleotide
  modified_base 86: mod_base = OTHER; note = 2'-O-methyl ribonucleotide
  modified_base 87: mod_base = OTHER; note = 2'-O-methyl ribonucleotide
  modified_base 88: mod_base = OTHER; note = 2'-O-methyl ribonucleotide
  modified_base 89: mod_base = OTHER; note = 2'-O-methyl ribonucleotide
  modified_base 90: mod_base = OTHER; note = 2'-O-methyl ribonucleotide
  modified_base 91: mod_base = OTHER; note = 2'-O-methyl ribonucleotide
  modified_base 92: mod_base = OTHER; note = 2'-O-methyl ribonucleotide
  modified_base 93: mod_base = OTHER; note = 2'-O-methyl ribonucleotide
  modified_base 94: mod_base = OTHER; note = 2'-O-methyl ribonucleotide
  modified_base 95: mod_base = OTHER; note = 2'-O-methyl ribonucleotide
  modified_base 96: mod_base = OTHER; note = 2'-O-methyl ribonucleotide
  modified_base 97: mod_base = OTHER; note = 2'-O-methyl ribonucleotide
  modified_base 98: mod_base = OTHER; note = 2'-O-methyl ribonucleotide
  modified_base 99: mod_base = OTHER; note = 2'-O-methyl ribonucleotide
  modified_base 100: mod_base = OTHER; note = 2'-O-methyl ribonucleotide
  modified_base 9: mod_base = OTHER; note = nebularine
  modified_base 14: mod_base = OTHER; note = nebularine
  modified_base 28: mod_base = OTHER; note = nebularine
  modified_base 1..4: mod_base = OTHER; note = phosphorothioate linkage
  modified_base 98..100: mod_base = OTHER; note = phosphorothioate linkage

SEQ ID NO: 2033 - RNA, 100 nt, synthetic construct; identical to SEQ ID NO: 1926
  source 1..100: mol_type = other RNA
  modified_base 1: mod_base = OTHER; note = 2'-O-methyl ribonucleotide
  modified_base 2: mod_base = OTHER; note = 2'-O-methyl ribonucleotide
  modified_base 3: mod_base = OTHER; note = 2'-O-methyl ribonucleotide
  modified_base 21: mod_base = OTHER; note = 2'-O-methyl ribonucleotide
  modified_base 28: mod_base = OTHER; note = 2'-O-methyl ribonucleotide
  modified_base 29: mod_base = OTHER; note = 2'-O-methyl ribonucleotide
  modified_base 30: mod_base = OTHER; note = 2'-O-methyl ribonucleotide
  modified_base 31: mod_base = OTHER; note = 2'-O-methyl ribonucleotide
  modified_base 32: mod_base = OTHER; note = 2'-O-methyl ribonucleotide
  modified_base 33: mod_base = OTHER; note = 2'-O-methyl ribonucleotide
  modified_base 34: mod_base = OTHER; note = 2'-O-methyl ribonucleotide
  modified_base 35: mod_base = OTHER; note = 2'-O-methyl ribonucleotide
  modified_base 36: mod_base = OTHER; note = 2'-O-methyl ribonucleotide
  modified_base 37: mod_base = OTHER; note = 2'-O-methyl ribonucleotide
  modified_base 38: mod_base = OTHER; note = 2'-O-methyl ribonucleotide
  modified_base 39: mod_base = OTHER; note = 2'-O-methyl ribonucleotide
  modified_base 40: mod_base = OTHER; note = 2'-O-methyl ribonucleotide
  modified_base 41: mod_base = OTHER; note = 2'-O-methyl ribonucleotide
  modified_base 42: mod_base = OTHER; note = 2'-O-methyl ribonucleotide
  modified_base 46: mod_base = OTHER; note = 2'-O-methyl ribonucleotide
  modified_base 48: mod_base = OTHER; note = 2'-O-methyl ribonucleotide
  modified_base 50: mod_base = OTHER; note = 2'-O-methyl ribonucleotide
  modified_base 52: mod_base = OTHER; note = 2'-O-methyl ribonucleotide
  modified_base 53: mod_base = OTHER; note = 2'-O-methyl ribonucleotide
  modified_base 54: mod_base = OTHER; note = 2'-O-methyl ribonucleotide
  modified_base 55: mod_base = OTHER; note = 2'-O-methyl ribonucleotide
  modified_base 56: mod_base = OTHER; note = 2'-O-methyl ribonucleotide
  modified_base 57: mod_base = OTHER; note = 2'-O-methyl ribonucleotide
  modified_base 60: mod_base = OTHER; note = 2'-O-methyl ribonucleotide
  modified_base 61: mod_base = OTHER; note = 2'-O-methyl ribonucleotide
  modified_base 66: mod_base = OTHER; note = 2'-O-methyl ribonucleotide
  modified_base 67: mod_base = OTHER; note = 2'-O-methyl ribonucleotide
  modified_base 70: mod_base = OTHER; note = 2'-O-methyl ribonucleotide
  modified_base 71: mod_base = OTHER; note = 2'-O-methyl ribonucleotide
  modified_base 72: mod_base = OTHER; note = 2'-O-methyl ribonucleotide
  modified_base 73: mod_base = OTHER; note = 2'-O-methyl ribonucleotide
  modified_base 74: mod_base = OTHER; note = 2'-O-methyl ribonucleotide
  modified_base 75: mod_base = OTHER; note = 2'-O-methyl ribonucleotide
  modified_base 76: mod_base = OTHER; note = 2'-O-methyl ribonucleotide
  modified_base 77: mod_base = OTHER; note = 2'-O-methyl ribonucleotide
  modified_base 78: mod_base = OTHER; note = 2'-O-methyl ribonucleotide
  modified_base 79: mod_base = OTHER; note = 2'-O-methyl ribonucleotide
  modified_base 80: mod_base = OTHER; note = 2'-O-methyl ribonucleotide
  modified_base 81: mod_base = OTHER; note = 2'-O-methyl ribonucleotide
  modified_base 83: mod_base = OTHER; note = 2'-O-methyl ribonucleotide
  modified_base 84: mod_base = OTHER; note = 2'-O-methyl ribonucleotide
  modified_base 85: mod_base = OTHER; note = 2'-O-methyl ribonucleotide
  modified_base 86: mod_base = OTHER; note = 2'-O-methyl ribonucleotide
  modified_base 87: mod_base = OTHER; note = 2'-O-methyl ribonucleotide
  modified_base 88: mod_base = OTHER; note = 2'-O-methyl ribonucleotide
  modified_base 89: mod_base = OTHER; note = 2'-O-methyl ribonucleotide
  modified_base 90: mod_base = OTHER; note = 2'-O-methyl ribonucleotide
  modified_base 91: mod_base = OTHER; note = 2'-O-methyl ribonucleotide
  modified_base 92: mod_base = OTHER; note = 2'-O-methyl ribonucleotide
  modified_base 93: mod_base = OTHER; note = 2'-O-methyl ribonucleotide
  modified_base 94: mod_base = OTHER; note = 2'-O-methyl ribonucleotide
  modified_base 95: mod_base = OTHER; note = 2'-O-methyl ribonucleotide
  modified_base 96: mod_base = OTHER; note = 2'-O-methyl ribonucleotide
  modified_base 97: mod_base = OTHER; note = 2'-O-methyl ribonucleotide
  modified_base 98: mod_base = OTHER; note = 2'-O-methyl ribonucleotide
  modified_base 99: mod_base = OTHER; note = 2'-O-methyl ribonucleotide
  modified_base 100: mod_base = OTHER; note = 2'-O-methyl ribonucleotide
  modified_base 9: mod_base = OTHER; note = nebularine
  modified_base 14: mod_base = OTHER; note = nebularine
  modified_base 42: mod_base = OTHER; note = nebularine
  modified_base 1..4: mod_base = OTHER; note = phosphorothioate linkage
  modified_base 98..100: mod_base = OTHER; note = phosphorothioate linkage

SEQ ID NO: 2034 - RNA, 100 nt, synthetic construct; identical to SEQ ID NO: 1927
  source 1..100: mol_type = other RNA
  modified_base 1: mod_base = OTHER; note = 2'-O-methyl ribonucleotide
  modified_base 2: mod_base = OTHER; note = 2'-O-methyl ribonucleotide
  modified_base 3: mod_base = OTHER; note = 2'-O-methyl ribonucleotide
  modified_base 21: mod_base = OTHER; note = 2'-O-methyl ribonucleotide
  modified_base 28: mod_base = OTHER; note = 2'-O-methyl ribonucleotide
  modified_base 29: mod_base = OTHER; note = 2'-O-methyl ribonucleotide
  modified_base 30: mod_base = OTHER; note = 2'-O-methyl ribonucleotide
  modified_base 31: mod_base = OTHER; note = 2'-O-methyl ribonucleotide
  modified_base 32: mod_base = OTHER; note = 2'-O-methyl ribonucleotide
  modified_base 33: mod_base = OTHER; note = 2'-O-methyl ribonucleotide
  modified_base 34: mod_base = OTHER; note = 2'-O-methyl ribonucleotide
  modified_base 35: mod_base = OTHER; note = 2'-O-methyl ribonucleotide
  modified_base 36: mod_base = OTHER; note = 2'-O-methyl ribonucleotide
  modified_base 37: mod_base = OTHER; note = 2'-O-methyl ribonucleotide
  modified_base 38: mod_base = OTHER; note = 2'-O-methyl ribonucleotide
  modified_base 39: mod_base = OTHER; note = 2'-O-methyl ribonucleotide
  modified_base 40: mod_base = OTHER; note = 2'-O-methyl ribonucleotide
  modified_base 41: mod_base = OTHER; note = 2'-O-methyl ribonucleotide
  modified_base 42: mod_base = OTHER; note = 2'-O-methyl ribonucleotide
  modified_base 46: mod_base = OTHER; note = 2'-O-methyl ribonucleotide
  modified_base 48: mod_base = OTHER; note = 2'-O-methyl ribonucleotide
  modified_base 50: mod_base = OTHER; note = 2'-O-methyl ribonucleotide
  modified_base 52: mod_base = OTHER; note = 2'-O-methyl ribonucleotide
  modified_base 53: mod_base = OTHER; note = 2'-O-methyl ribonucleotide
  modified_base 54: mod_base = OTHER; note = 2'-O-methyl ribonucleotide
  modified_base 55: mod_base = OTHER; note = 2'-O-methyl ribonucleotide
  modified_base 56: mod_base = OTHER; note = 2'-O-methyl ribonucleotide
  modified_base 57: mod_base = OTHER; note = 2'-O-methyl ribonucleotide
  modified_base 60: mod_base = OTHER; note = 2'-O-methyl ribonucleotide
  modified_base 61: mod_base = OTHER; note = 2'-O-methyl ribonucleotide
  modified_base 66: mod_base = OTHER; note = 2'-O-methyl ribonucleotide
  modified_base 67: mod_base = OTHER; note = 2'-O-methyl ribonucleotide
  modified_base 70: mod_base = OTHER; note = 2'-O-methyl ribonucleotide
  modified_base 71: mod_base = OTHER; note = 2'-O-methyl ribonucleotide
  modified_base 72: mod_base = OTHER; note = 2'-O-methyl ribonucleotide
  modified_base 73: mod_base = OTHER; note = 2'-O-methyl ribonucleotide
  modified_base 74: mod_base = OTHER; note = 2'-O-methyl ribonucleotide
  modified_base 75: mod_base = OTHER; note = 2'-O-methyl ribonucleotide
  modified_base 76: mod_base = OTHER; note = 2'-O-methyl ribonucleotide
  modified_base 77: mod_base = OTHER; note = 2'-O-methyl ribonucleotide
  modified_base 78: mod_base = OTHER; note = 2'-O-methyl ribonucleotide
  modified_base 79: mod_base = OTHER; note = 2'-O-methyl ribonucleotide
  modified_base 80: mod_base = OTHER; note = 2'-O-methyl ribonucleotide
  modified_base 81: mod_base = OTHER; note = 2'-O-methyl ribonucleotide
  modified_base 83: mod_base = OTHER; note = 2'-O-methyl ribonucleotide
  modified_base 84: mod_base = OTHER; note = 2'-O-methyl ribonucleotide
  modified_base 85: mod_base = OTHER; note = 2'-O-methyl ribonucleotide
  modified_base 86: mod_base = OTHER; note = 2'-O-methyl ribonucleotide
  modified_base 87: mod_base = OTHER; note = 2'-O-methyl ribonucleotide
  modified_base 88: mod_base = OTHER; note = 2'-O-methyl ribonucleotide
  modified_base 89: mod_base = OTHER; note = 2'-O-methyl ribonucleotide
  modified_base 90: mod_base = OTHER; note = 2'-O-methyl ribonucleotide
  modified_base 91: mod_base = OTHER; note = 2'-O-methyl ribonucleotide
  modified_base 92: mod_base = OTHER; note = 2'-O-methyl ribonucleotide
  modified_base 93: mod_base = OTHER; note = 2'-O-methyl ribonucleotide
  modified_base 94: mod_base = OTHER; note = 2'-O-methyl ribonucleotide
  modified_base 95: mod_base = OTHER; note = 2'-O-methyl ribonucleotide
  modified_base 96: mod_base = OTHER; note = 2'-O-methyl ribonucleotide
  modified_base 97: mod_base = OTHER; note = 2'-O-methyl ribonucleotide
  modified_base 98: mod_base = OTHER; note = 2'-O-methyl ribonucleotide
  modified_base 99: mod_base = OTHER; note = 2'-O-methyl ribonucleotide
  modified_base 100: mod_base = OTHER; note = 2'-O-methyl ribonucleotide
  modified_base 9: mod_base = OTHER; note = nebularine
  modified_base 14: mod_base = OTHER; note = nebularine
  modified_base 34: mod_base = OTHER; note = nebularine
  modified_base 42: mod_base = OTHER; note = nebularine
  modified_base 1..4: mod_base = OTHER; note = phosphorothioate linkage
  modified_base 98..100: mod_base = OTHER; note = phosphorothioate linkage

SEQ ID NO: 2035 - RNA, 100 nt, synthetic construct; identical to SEQ ID NO: 1928
  source 1..100: mol_type = other RNA
  modified_base 1: mod_base = OTHER; note = 2'-O-methyl ribonucleotide
  modified_base 2: mod_base = OTHER; note = 2'-O-methyl ribonucleotide
  modified_base 3: mod_base = OTHER; note = 2'-O-methyl ribonucleotide
  modified_base 21: mod_base = OTHER; note = 2'-O-methyl ribonucleotide
  modified_base 28: mod_base = OTHER; note = 2'-O-methyl ribonucleotide
  modified_base 29: mod_base = OTHER; note = 2'-O-methyl ribonucleotide
  modified_base 30: mod_base = OTHER; note = 2'-O-methyl ribonucleotide
  modified_base 31: mod_base = OTHER; note = 2'-O-methyl ribonucleotide
  modified_base 32: mod_base = OTHER; note = 2'-O-methyl ribonucleotide
  modified_base 33: mod_base = OTHER; note = 2'-O-methyl ribonucleotide
  modified_base 34: mod_base = OTHER; note = 2'-O-methyl ribonucleotide
  modified_base 35: mod_base = OTHER; note = 2'-O-methyl ribonucleotide
  modified_base 36: mod_base = OTHER; note = 2'-O-methyl ribonucleotide
  modified_base 37: mod_base = OTHER; note = 2'-O-methyl ribonucleotide
  modified_base 38: mod_base = OTHER; note = 2'-O-methyl ribonucleotide
  modified_base 39: mod_base = OTHER; note = 2'-O-methyl ribonucleotide
  modified_base 40: mod_base = OTHER; note = 2'-O-methyl ribonucleotide
  modified_base 41: mod_base = OTHER; note = 2'-O-methyl ribonucleotide
  modified_base 42: mod_base = OTHER; note = 2'-O-methyl ribonucleotide
  modified_base 46: mod_base = OTHER; note = 2'-O-methyl ribonucleotide
  modified_base 48: mod_base = OTHER; note = 2'-O-methyl ribonucleotide
  modified_base 50: mod_base = OTHER; note = 2'-O-methyl ribonucleotide
  modified_base 52: mod_base = OTHER; note = 2'-O-methyl ribonucleotide
  modified_base 53: mod_base = OTHER; note = 2'-O-methyl ribonucleotide
  modified_base 54: mod_base = OTHER; note = 2'-O-methyl ribonucleotide
  modified_base 55: mod_base = OTHER; note = 2'-O-methyl ribonucleotide
  modified_base 56: mod_base = OTHER; note = 2'-O-methyl ribonucleotide
  modified_base 57: mod_base = OTHER; note = 2'-O-methyl ribonucleotide
  modified_base 60: mod_base = OTHER; note = 2'-O-methyl ribonucleotide
  modified_base 61: mod_base = OTHER; note = 2'-O-methyl ribonucleotide
  modified_base 66: mod_base = OTHER; note = 2'-O-methyl ribonucleotide
  modified_base 67: mod_base = OTHER; note = 2'-O-methyl ribonucleotide
  modified_base 70: mod_base = OTHER; note = 2'-O-methyl ribonucleotide
  modified_base 71: mod_base = OTHER; note = 2'-O-methyl ribonucleotide
  modified_base 72: mod_base = OTHER; note = 2'-O-methyl ribonucleotide
  modified_base 73: mod_base = OTHER; note = 2'-O-methyl ribonucleotide
  modified_base 74: mod_base = OTHER; note = 2'-O-methyl ribonucleotide
  modified_base 75: mod_base = OTHER; note = 2'-O-methyl ribonucleotide
  modified_base 76: mod_base = OTHER; note = 2'-O-methyl ribonucleotide
  modified_base 77: mod_base = OTHER; note = 2'-O-methyl ribonucleotide
  modified_base 78: mod_base = OTHER; note = 2'-O-methyl ribonucleotide
  modified_base 79: mod_base = OTHER; note = 2'-O-methyl ribonucleotide
  modified_base 80: mod_base = OTHER; note = 2'-O-methyl ribonucleotide
  modified_base 81: mod_base = OTHER; note = 2'-O-methyl ribonucleotide
  modified_base 83: mod_base = OTHER; note = 2'-O-methyl ribonucleotide
  modified_base 84: mod_base = OTHER; note = 2'-O-methyl ribonucleotide
  modified_base 85: mod_base = OTHER; note = 2'-O-methyl ribonucleotide
  modified_base 86: mod_base = OTHER; note = 2'-O-methyl ribonucleotide
  modified_base 87: mod_base = OTHER; note = 2'-O-methyl ribonucleotide
  modified_base 88: mod_base = OTHER; note = 2'-O-methyl ribonucleotide
  modified_base 89: mod_base = OTHER; note = 2'-O-methyl ribonucleotide
  modified_base 90: mod_base = OTHER; note = 2'-O-methyl ribonucleotide
  modified_base 91: mod_base = OTHER; note = 2'-O-methyl ribonucleotide
  modified_base 92: mod_base = OTHER; note = 2'-O-methyl ribonucleotide
  modified_base 93: mod_base = OTHER; note = 2'-O-methyl ribonucleotide
  modified_base 94: mod_base = OTHER; note = 2'-O-methyl ribonucleotide
  modified_base 95: mod_base = OTHER; note = 2'-O-methyl ribonucleotide
  modified_base 96: mod_base = OTHER; note = 2'-O-methyl ribonucleotide
  modified_base 97: mod_base = OTHER; note = 2'-O-methyl ribonucleotide
  modified_base 98: mod_base = OTHER; note = 2'-O-methyl ribonucleotide
  modified_base 99: mod_base = OTHER; note = 2'-O-methyl ribonucleotide
  modified_base 100: mod_base = OTHER; note = 2'-O-methyl ribonucleotide
  modified_base 14: mod_base = OTHER; note = nebularine
  modified_base 28: mod_base = OTHER; note = nebularine
  modified_base 34: mod_base = OTHER; note = nebularine
  modified_base 42: mod_base = OTHER; note = nebularine
  modified_base 57: mod_base = OTHER; note = nebularine
  modified_base 1..4: mod_base = OTHER; note = phosphorothioate linkage
  modified_base 98..100: mod_base = OTHER; note = phosphorothioate linkage

SEQ ID NO: 2036 - RNA, 100 nt, synthetic construct; identical to SEQ ID NO: 1929
  source 1..100: mol_type = other RNA
  modified_base 1: mod_base = OTHER; note = 2'-O-methyl ribonucleotide
  modified_base 2: mod_base = OTHER; note = 2'-O-methyl ribonucleotide
  modified_base 3: mod_base = OTHER; note = 2'-O-methyl ribonucleotide
  modified_base 21: mod_base = OTHER; note = 2'-O-methyl ribonucleotide
  modified_base 28: mod_base = OTHER; note = 2'-O-methyl ribonucleotide
  modified_base 29: mod_base = OTHER; note = 2'-O-methyl ribonucleotide
  modified_base 30: mod_base = OTHER; note = 2'-O-methyl ribonucleotide
  modified_base 31: mod_base = OTHER; note = 2'-O-methyl ribonucleotide
  modified_base 32: mod_base = OTHER; note = 2'-O-methyl ribonucleotide
  modified_base 33: mod_base = OTHER; note = 2'-O-methyl ribonucleotide
  modified_base 34: mod_base = OTHER; note = 2'-O-methyl ribonucleotide
  modified_base 35: mod_base = OTHER; note = 2'-O-methyl ribonucleotide
  modified_base 36: mod_base = OTHER; note = 2'-O-methyl ribonucleotide
  modified_base 37: mod_base = OTHER; note = 2'-O-methyl ribonucleotide
  modified_base 38: mod_base = OTHER; note = 2'-O-methyl ribonucleotide
  modified_base 39: mod_base = OTHER; note = 2'-O-methyl ribonucleotide
  modified_base 40: mod_base = OTHER; note = 2'-O-methyl ribonucleotide
  modified_base 41: mod_base = OTHER; note = 2'-O-methyl ribonucleotide
  modified_base 42: mod_base = OTHER; note = 2'-O-methyl ribonucleotide
  modified_base 46: mod_base = OTHER; note = 2'-O-methyl ribonucleotide
  modified_base 48: mod_base = OTHER; note = 2'-O-methyl ribonucleotide
  modified_base 50: mod_base = OTHER; note = 2'-O-methyl ribonucleotide
  modified_base 52: mod_base = OTHER; note = 2'-O-methyl ribonucleotide
  modified_base 53: mod_base = OTHER; note = 2'-O-methyl ribonucleotide
  modified_base 54: mod_base = OTHER; note = 2'-O-methyl ribonucleotide
  modified_base 55: mod_base = OTHER; note = 2'-O-methyl ribonucleotide
  modified_base 56: mod_base = OTHER; note = 2'-O-methyl ribonucleotide
  modified_base 57: mod_base = OTHER; note = 2'-O-methyl ribonucleotide
  modified_base 60: mod_base = OTHER; note = 2'-O-methyl ribonucleotide
  modified_base 61: mod_base = OTHER; note = 2'-O-methyl ribonucleotide
  modified_base 66: mod_base = OTHER; note = 2'-O-methyl ribonucleotide
  modified_base 67: mod_base = OTHER; note = 2'-O-methyl ribonucleotide
  modified_base 70: mod_base = OTHER; note = 2'-O-methyl ribonucleotide
  modified_base 71: mod_base = OTHER; note = 2'-O-methyl ribonucleotide
  modified_base 72: mod_base = OTHER; note = 2'-O-methyl ribonucleotide
  modified_base 73: mod_base = OTHER; note = 2'-O-methyl ribonucleotide
  modified_base 74: mod_base = OTHER; note = 2'-O-methyl ribonucleotide
  modified_base 75: mod_base = OTHER; note = 2'-O-methyl ribonucleotide
  modified_base 76: mod_base = OTHER; note = 2'-O-methyl ribonucleotide
  modified_base 77: mod_base = OTHER; note = 2'-O-methyl ribonucleotide
  modified_base 78: mod_base = OTHER; note = 2'-O-methyl ribonucleotide
  modified_base 79: mod_base = OTHER; note = 2'-O-methyl ribonucleotide
  modified_base 80: mod_base = OTHER; note = 2'-O-methyl ribonucleotide
  modified_base 81: mod_base = OTHER; note = 2'-O-methyl ribonucleotide
  modified_base 83: mod_base = OTHER; note = 2'-O-methyl ribonucleotide
  modified_base 84: mod_base = OTHER; note = 2'-O-methyl ribonucleotide
  modified_base 85: mod_base = OTHER; note = 2'-O-methyl ribonucleotide
  modified_base 86: mod_base = OTHER; note = 2'-O-methyl ribonucleotide
  modified_base 87: mod_base = OTHER; note = 2'-O-methyl ribonucleotide
  modified_base 88: mod_base = OTHER; note = 2'-O-methyl ribonucleotide
  modified_base 89: mod_base = OTHER; note = 2'-O-methyl ribonucleotide
  modified_base 90: mod_base = OTHER; note = 2'-O-methyl ribonucleotide
  modified_base 91: mod_base = OTHER; note = 2'-O-methyl ribonucleotide
  modified_base 92: mod_base = OTHER; note = 2'-O-methyl ribonucleotide
  modified_base 93: mod_base = OTHER; note = 2'-O-methyl ribonucleotide
  modified_base 94: mod_base = OTHER; note = 2'-O-methyl ribonucleotide
  modified_base 95: mod_base = OTHER; note = 2'-O-methyl ribonucleotide
  modified_base 96: mod_base = OTHER; note = 2'-O-methyl ribonucleotide
  modified_base 97: mod_base = OTHER; note = 2'-O-methyl ribonucleotide
  modified_base 98: mod_base = OTHER; note = 2'-O-methyl ribonucleotide
  modified_base 99: mod_base = OTHER; note = 2'-O-methyl ribonucleotide
  modified_base 100: mod_base = OTHER; note = 2'-O-methyl ribonucleotide
  modified_base 14: mod_base = OTHER; note = nebularine
  modified_base 34: mod_base = OTHER; note = nebularine
  modified_base 42: mod_base = OTHER; note = nebularine
  modified_base 57: mod_base = OTHER; note = nebularine
  modified_base 1..4: mod_base = OTHER; note = phosphorothioate linkage
  modified_base 98..100: mod_base = OTHER; note = phosphorothioate linkage

SEQ ID NO: 2037 - RNA, 100 nt, synthetic construct; identical to SEQ ID NO: 1930
  source 1..100: mol_type = other RNA
  modified_base 1: mod_base = OTHER; note = 2'-O-methyl ribonucleotide
  modified_base 2: mod_base = OTHER; note = 2'-O-methyl ribonucleotide
  modified_base 3: mod_base = OTHER; note = 2'-O-methyl ribonucleotide
  modified_base 21: mod_base = OTHER; note = 2'-O-methyl ribonucleotide
  modified_base 28: mod_base = OTHER; note = 2'-O-methyl ribonucleotide
  modified_base 29: mod_base = OTHER; note = 2'-O-methyl ribonucleotide
  modified_base 30: mod_base = OTHER; note = 2'-O-methyl ribonucleotide
  modified_base 31: mod_base = OTHER; note = 2'-O-methyl ribonucleotide
  modified_base 32: mod_base = OTHER; note = 2'-O-methyl ribonucleotide
  modified_base 33: mod_base = OTHER; note = 2'-O-methyl ribonucleotide
  modified_base 34: mod_base = OTHER; note = 2'-O-methyl ribonucleotide
  modified_base 35: mod_base = OTHER; note = 2'-O-methyl ribonucleotide
  modified_base 36: mod_base = OTHER; note = 2'-O-methyl ribonucleotide
  modified_base 37: mod_base = OTHER; note = 2'-O-methyl ribonucleotide
  modified_base 38: mod_base = OTHER; note = 2'-O-methyl ribonucleotide
  modified_base 39: mod_base = OTHER; note = 2'-O-methyl ribonucleotide
  modified_base 40: mod_base = OTHER; note = 2'-O-methyl ribonucleotide
  modified_base 41: mod_base = OTHER; note = 2'-O-methyl ribonucleotide
  modified_base 42: mod_base = OTHER; note = 2'-O-methyl ribonucleotide
  modified_base 46: mod_base = OTHER; note = 2'-O-methyl ribonucleotide
  modified_base 48: mod_base = OTHER; note = 2'-O-methyl ribonucleotide
  modified_base 50: mod_base = OTHER; note = 2'-O-methyl ribonucleotide
  modified_base 52: mod_base = OTHER; note = 2'-O-methyl ribonucleotide
  modified_base 53: mod_base = OTHER; note = 2'-O-methyl ribonucleotide
  modified_base 54: mod_base = OTHER; note = 2'-O-methyl ribonucleotide
  modified_base 55: mod_base = OTHER; note = 2'-O-methyl ribonucleotide
  modified_base 56: mod_base = OTHER; note = 2'-O-methyl ribonucleotide
  modified_base 57: mod_base = OTHER; note = 2'-O-methyl ribonucleotide
  modified_base 60: mod_base = OTHER; note = 2'-O-methyl ribonucleotide
  modified_base 61: mod_base = OTHER; note = 2'-O-methyl ribonucleotide
  modified_base 66: mod_base = OTHER; note = 2'-O-methyl ribonucleotide
  modified_base 67: mod_base = OTHER; note = 2'-O-methyl ribonucleotide
  modified_base 70: mod_base = OTHER; note = 2'-O-methyl ribonucleotide
  modified_base 71: mod_base = OTHER; note = 2'-O-methyl ribonucleotide
  modified_base 72: mod_base = OTHER; note = 2'-O-methyl ribonucleotide
  modified_base 73: mod_base = OTHER; note = 2'-O-methyl ribonucleotide
  modified_base 74: mod_base = OTHER; note = 2'-O-methyl ribonucleotide
  modified_base 75: mod_base = OTHER; note = 2'-O-methyl ribonucleotide
  modified_base 76: mod_base = OTHER; note = 2'-O-methyl ribonucleotide
  modified_base 77: mod_base = OTHER; note = 2'-O-methyl ribonucleotide
  modified_base 78: mod_base = OTHER; note = 2'-O-methyl ribonucleotide
  modified_base 79: mod_base = OTHER; note = 2'-O-methyl ribonucleotide
  modified_base 80: mod_base = OTHER; note = 2'-O-methyl ribonucleotide
  modified_base 81: mod_base = OTHER; note = 2'-O-methyl ribonucleotide
  modified_base 83: mod_base = OTHER; note = 2'-O-methyl ribonucleotide
  modified_base 84: mod_base = OTHER; note = 2'-O-methyl ribonucleotide
  modified_base 85: mod_base = OTHER; note = 2'-O-methyl ribonucleotide
  modified_base 86: mod_base = OTHER; note = 2'-O-methyl ribonucleotide
  modified_base 87: mod_base = OTHER; note = 2'-O-methyl ribonucleotide
  modified_base 88: mod_base = OTHER; note = 2'-O-methyl ribonucleotide
  modified_base 89: mod_base = OTHER; note = 2'-O-methyl ribonucleotide
  modified_base 90: mod_base = OTHER; note = 2'-O-methyl ribonucleotide
  modified_base 91: mod_base = OTHER; note = 2'-O-methyl ribonucleotide
  modified_base 92: mod_base = OTHER; note = 2'-O-methyl ribonucleotide
  modified_base 93: mod_base = OTHER; note = 2'-O-methyl ribonucleotide
  modified_base 94: mod_base = OTHER; note = 2'-O-methyl ribonucleotide
  modified_base 95: mod_base = OTHER; note = 2'-O-methyl ribonucleotide
  modified_base 96: mod_base = OTHER; note = 2'-O-methyl ribonucleotide
  modified_base 97: mod_base = OTHER; note = 2'-O-methyl ribonucleotide
  modified_base 98: mod_base = OTHER; note = 2'-O-methyl ribonucleotide
  modified_base 99: mod_base = OTHER; note = 2'-O-methyl ribonucleotide
  modified_base 100: mod_base = OTHER; note = 2'-O-methyl ribonucleotide
  modified_base 14: mod_base = OTHER; note = nebularine
  modified_base 42: mod_base = OTHER; note = nebularine
  modified_base 57: mod_base = OTHER; note = nebularine
  modified_base 1..4: mod_base = OTHER; note = phosphorothioate linkage
  modified_base 98..100: mod_base = OTHER; note = phosphorothioate linkage

SEQ ID NO: 2038 - RNA, 100 nt, synthetic construct; identical to SEQ ID NO: 1931
  source 1..100: mol_type = other RNA
  modified_base 1: mod_base = OTHER; note = 2'-O-methyl ribonucleotide
  modified_base 2: mod_base = OTHER; note = 2'-O-methyl ribonucleotide
  modified_base 3: mod_base = OTHER; note = 2'-O-methyl ribonucleotide
  modified_base 21: mod_base = OTHER; note = 2'-O-methyl ribonucleotide
  modified_base 28: mod_base = OTHER; note = 2'-O-methyl ribonucleotide
  modified_base 29: mod_base = OTHER; note = 2'-O-methyl ribonucleotide
  modified_base 30: mod_base = OTHER; note = 2'-O-methyl ribonucleotide
  modified_base 31: mod_base = OTHER; note = 2'-O-methyl ribonucleotide
  modified_base 32: mod_base = OTHER; note = 2'-O-methyl ribonucleotide
  modified_base 33: mod_base = OTHER; note = 2'-O-methyl ribonucleotide
  modified_base 34: mod_base = OTHER; note = 2'-O-methyl ribonucleotide
  modified_base 35: mod_base = OTHER; note = 2'-O-methyl ribonucleotide
  modified_base 36: mod_base = OTHER; note = 2'-O-methyl ribonucleotide
  modified_base 37: mod_base = OTHER; note = 2'-O-methyl ribonucleotide
  modified_base 38: mod_base = OTHER; note = 2'-O-methyl ribonucleotide
  modified_base 39: mod_base = OTHER; note = 2'-O-methyl ribonucleotide
  modified_base 40: mod_base = OTHER; note = 2'-O-methyl ribonucleotide
  modified_base 41: mod_base = OTHER; note = 2'-O-methyl ribonucleotide
  modified_base 42: mod_base = OTHER; note = 2'-O-methyl ribonucleotide
  modified_base 46: mod_base = OTHER; note = 2'-O-methyl ribonucleotide
  modified_base 48: mod_base = OTHER; note = 2'-O-methyl ribonucleotide
  modified_base 50: mod_base = OTHER; note = 2'-O-methyl ribonucleotide
  modified_base 52: mod_base = OTHER; note = 2'-O-methyl ribonucleotide
  modified_base 53: mod_base = OTHER; note = 2'-O-methyl ribonucleotide
  modified_base 54: mod_base = OTHER; note = 2'-O-methyl ribonucleotide
  modified_base 55: mod_base = OTHER; note = 2'-O-methyl ribonucleotide
  modified_base 56: mod_base = OTHER; note = 2'-O-methyl ribonucleotide
  modified_base 57: mod_base = OTHER; note = 2'-O-methyl ribonucleotide
  modified_base 60: mod_base = OTHER; note = 2'-O-methyl ribonucleotide
  modified_base 61: mod_base = OTHER; note = 2'-O-methyl ribonucleotide
  modified_base 66: mod_base = OTHER; note = 2'-O-methyl ribonucleotide
  modified_base 67: mod_base = OTHER; note = 2'-O-methyl ribonucleotide
  modified_base 70: mod_base = OTHER; note = 2'-O-methyl ribonucleotide
  modified_base 71: mod_base = OTHER; note = 2'-O-methyl ribonucleotide
  modified_base 72: mod_base = OTHER; note = 2'-O-methyl ribonucleotide
  modified_base 73: mod_base = OTHER; note = 2'-O-methyl ribonucleotide
  modified_base 74: mod_base = OTHER; note = 2'-O-methyl ribonucleotide
  modified_base 75: mod_base = OTHER; note = 2'-O-methyl ribonucleotide
  modified_base 76: mod_base = OTHER; note = 2'-O-methyl ribonucleotide
  modified_base 77: mod_base = OTHER; note = 2'-O-methyl ribonucleotide
  modified_base 78: mod_base = OTHER; note = 2'-O-methyl ribonucleotide
  modified_base 79: mod_base = OTHER; note = 2'-O-methyl ribonucleotide
  modified_base 80: mod_base = OTHER; note = 2'-O-methyl ribonucleotide
  modified_base 81: mod_base = OTHER; note = 2'-O-methyl ribonucleotide
  modified_base 83: mod_base = OTHER; note = 2'-O-methyl ribonucleotide
  modified_base 84: mod_base = OTHER; note = 2'-O-methyl ribonucleotide
  modified_base 85: mod_base = OTHER; note = 2'-O-methyl ribonucleotide
  modified_base 86: mod_base = OTHER; note = 2'-O-methyl ribonucleotide
  modified_base 87: mod_base = OTHER; note = 2'-O-methyl ribonucleotide
  modified_base 88: mod_base = OTHER; note = 2'-O-methyl ribonucleotide
  modified_base 89: mod_base = OTHER; note = 2'-O-methyl ribonucleotide
  modified_base 90: mod_base = OTHER; note = 2'-O-methyl ribonucleotide
  modified_base 91: mod_base = OTHER; note = 2'-O-methyl ribonucleotide
  modified_base 92: mod_base = OTHER; note = 2'-O-methyl ribonucleotide
  modified_base 93: mod_base = OTHER; note = 2'-O-methyl ribonucleotide
  modified_base 94: mod_base = OTHER; note = 2'-O-methyl ribonucleotide
  modified_base 95: mod_base = OTHER; note = 2'-O-methyl ribonucleotide
  modified_base 96: mod_base = OTHER; note = 2'-O-methyl ribonucleotide
  modified_base 97: mod_base = OTHER; note = 2'-O-methyl ribonucleotide
  modified_base 98: mod_base = OTHER; note = 2'-O-methyl ribonucleotide
  modified_base 99: mod_base = OTHER; note = 2'-O-methyl ribonucleotide
  modified_base 100: mod_base = OTHER; note = 2'-O-methyl ribonucleotide
  modified_base 14: mod_base = OTHER; note = nebularine
  modified_base 28: mod_base = OTHER; note = nebularine
  modified_base 1..4: mod_base = OTHER; note = phosphorothioate linkage
  modified_base 98..100: mod_base = OTHER; note = phosphorothioate linkage

SEQ ID NO: 2039 - RNA, 100 nt, synthetic construct; identical to SEQ ID NO: 1932
  source 1..100: mol_type = other RNA
  modified_base 1: mod_base = OTHER; note = 2'-O-methyl ribonucleotide
  modified_base 2: mod_base = OTHER; note = 2'-O-methyl ribonucleotide
  modified_base 3: mod_base = OTHER; note = 2'-O-methyl ribonucleotide
  modified_base 21: mod_base = OTHER; note = 2'-O-methyl ribonucleotide
  modified_base 28: mod_base = OTHER; note = 2'-O-methyl ribonucleotide
  modified_base 29: mod_base = OTHER; note = 2'-O-methyl ribonucleotide
  modified_base 30: mod_base = OTHER; note = 2'-O-methyl ribonucleotide
  modified_base 31: mod_base = OTHER; note = 2'-O-methyl ribonucleotide
  modified_base 32: mod_base = OTHER; note = 2'-O-methyl ribonucleotide
  modified_base 33: mod_base = OTHER; note = 2'-O-methyl ribonucleotide
  modified_base 34: mod_base = OTHER; note = 2'-O-methyl ribonucleotide
  modified_base 35: mod_base = OTHER; note = 2'-O-methyl ribonucleotide
  modified_base 36: mod_base = OTHER; note = 2'-O-methyl ribonucleotide
  modified_base 37: mod_base = OTHER; note = 2'-O-methyl ribonucleotide
  modified_base 38: mod_base = OTHER; note = 2'-O-methyl ribonucleotide
  modified_base 39: mod_base = OTHER; note = 2'-O-methyl ribonucleotide
  modified_base 40: mod_base = OTHER; note = 2'-O-methyl ribonucleotide
  modified_base 41: mod_base = OTHER; note = 2'-O-methyl ribonucleotide
  modified_base 42: mod_base = OTHER; note = 2'-O-methyl ribonucleotide
  modified_base 46: mod_base = OTHER; note = 2'-O-methyl ribonucleotide
  modified_base 48: mod_base = OTHER; note = 2'-O-methyl ribonucleotide
  modified_base 50: mod_base = OTHER; note = 2'-O-methyl ribonucleotide
  modified_base 52: mod_base = OTHER; note = 2'-O-methyl ribonucleotide
  modified_base 53: mod_base = OTHER; note = 2'-O-methyl ribonucleotide
  modified_base 54: mod_base = OTHER; note = 2'-O-methyl ribonucleotide
  modified_base 55: mod_base = OTHER; note = 2'-O-methyl ribonucleotide
  modified_base 56: mod_base = OTHER; note = 2'-O-methyl ribonucleotide
  modified_base 57: mod_base = OTHER; note = 2'-O-methyl ribonucleotide
  modified_base 60: mod_base = OTHER; note = 2'-O-methyl ribonucleotide
  modified_base 61: mod_base = OTHER; note = 2'-O-methyl ribonucleotide
  modified_base 66: mod_base = OTHER; note = 2'-O-methyl ribonucleotide
  modified_base 67: mod_base = OTHER; note = 2'-O-methyl ribonucleotide
  modified_base 70: mod_base = OTHER; note = 2'-O-methyl ribonucleotide
  modified_base 71: mod_base = OTHER; note = 2'-O-methyl ribonucleotide
  modified_base 72: mod_base = OTHER; note = 2'-O-methyl ribonucleotide
  modified_base 73: mod_base = OTHER; note = 2'-O-methyl ribonucleotide
  modified_base 74: mod_base = OTHER; note = 2'-O-methyl ribonucleotide
  modified_base 75: mod_base = OTHER; note = 2'-O-methyl ribonucleotide
  modified_base 76: mod_base = OTHER; note = 2'-O-methyl ribonucleotide
  modified_base 77: mod_base = OTHER; note = 2'-O-methyl ribonucleotide
  modified_base 78: mod_base = OTHER; note = 2'-O-methyl ribonucleotide
  modified_base 79: mod_base = OTHER; note = 2'-O-methyl ribonucleotide
  modified_base 80: mod_base = OTHER; note = 2'-O-methyl ribonucleotide
  modified_base 81: mod_base = OTHER; note = 2'-O-methyl ribonucleotide
  modified_base 83: mod_base = OTHER; note = 2'-O-methyl ribonucleotide
  modified_base 84: mod_base = OTHER; note = 2'-O-methyl ribonucleotide
  modified_base 85: mod_base = OTHER; note = 2'-O-methyl ribonucleotide
  modified_base 86: mod_base = OTHER; note = 2'-O-methyl ribonucleotide
  modified_base 87: mod_base = OTHER; note = 2'-O-methyl ribonucleotide
  modified_base 88: mod_base = OTHER; note = 2'-O-methyl ribonucleotide
  modified_base 89: mod_base = OTHER; note = 2'-O-methyl ribonucleotide
  modified_base 90: mod_base = OTHER; note = 2'-O-methyl ribonucleotide
  modified_base 91: mod_base = OTHER; note = 2'-O-methyl ribonucleotide
  modified_base 92: mod_base = OTHER; note = 2'-O-methyl ribonucleotide
  modified_base 93: mod_base = OTHER; note = 2'-O-methyl ribonucleotide
  modified_base 94: mod_base = OTHER; note = 2'-O-methyl ribonucleotide
  modified_base 95: mod_base = OTHER; note = 2'-O-methyl ribonucleotide
  modified_base 96: mod_base = OTHER; note = 2'-O-methyl ribonucleotide
  modified_base 97: mod_base = OTHER; note = 2'-O-methyl ribonucleotide
  modified_base 98: mod_base = OTHER; note = 2'-O-methyl ribonucleotide
  modified_base 99: mod_base = OTHER; note = 2'-O-methyl ribonucleotide
  modified_base 100: mod_base = OTHER; note = 2'-O-methyl ribonucleotide
  modified_base 14: mod_base = OTHER; note = nebularine
  modified_base 42: mod_base = OTHER; note = nebularine
  modified_base 1..4: mod_base = OTHER; note = phosphorothioate linkage
  modified_base 98..100: mod_base = OTHER; note = phosphorothioate linkage

SEQ ID NO: 2040 - RNA, 100 nt, synthetic construct; identical to SEQ ID NO: 1933
  source 1..100: mol_type = other RNA
  modified_base 1: mod_base = OTHER; note = 2'-O-methyl ribonucleotide
  modified_base 2: mod_base = OTHER; note = 2'-O-methyl ribonucleotide
  modified_base 3: mod_base = OTHER; note = 2'-O-methyl ribonucleotide
  modified_base 21: mod_base = OTHER; note = 2'-O-methyl ribonucleotide
  modified_base 28: mod_base = OTHER; note = 2'-O-methyl ribonucleotide
  modified_base 29: mod_base = OTHER; note = 2'-O-methyl ribonucleotide
  modified_base 30: mod_base = OTHER; note = 2'-O-methyl ribonucleotide
  modified_base 31: mod_base = OTHER; note = 2'-O-methyl ribonucleotide
  modified_base 32: mod_base = OTHER; note = 2'-O-methyl ribonucleotide
  modified_base 33: mod_base = OTHER; note = 2'-O-methyl ribonucleotide
  modified_base 34: mod_base = OTHER; note = 2'-O-methyl ribonucleotide
  modified_base 35: mod_base = OTHER; note = 2'-O-methyl ribonucleotide
  modified_base 36: mod_base = OTHER; note = 2'-O-methyl ribonucleotide
  modified_base 37: mod_base = OTHER; note = 2'-O-methyl ribonucleotide
  modified_base 38: mod_base = OTHER; note = 2'-O-methyl ribonucleotide
  modified_base 39: mod_base = OTHER; note = 2'-O-methyl ribonucleotide
  modified_base 40: mod_base = OTHER; note = 2'-O-methyl ribonucleotide
  modified_base 41: mod_base = OTHER; note = 2'-O-methyl ribonucleotide
  modified_base 42: mod_base = OTHER; note = 2'-O-methyl ribonucleotide
  modified_base 46: mod_base = OTHER; note = 2'-O-methyl ribonucleotide
  modified_base 48: mod_base = OTHER; note = 2'-O-methyl ribonucleotide
  modified_base 50: mod_base = OTHER; note = 2'-O-methyl ribonucleotide
  modified_base 52: mod_base = OTHER; note = 2'-O-methyl ribonucleotide
  modified_base 53: mod_base = OTHER; note = 2'-O-methyl ribonucleotide
  modified_base 54: mod_base = OTHER; note = 2'-O-methyl ribonucleotide
  modified_base 55: mod_base = OTHER; note = 2'-O-methyl ribonucleotide
  modified_base 56: mod_base = OTHER; note = 2'-O-methyl ribonucleotide
  modified_base 57: mod_base = OTHER; note = 2'-O-methyl ribonucleotide
  modified_base 60: mod_base = OTHER; note = 2'-O-methyl ribonucleotide
  modified_base 61: mod_base = OTHER; note = 2'-O-methyl ribonucleotide
  modified_base 66: mod_base = OTHER; note = 2'-O-methyl ribonucleotide
  modified_base 67: mod_base = OTHER; note = 2'-O-methyl ribonucleotide
  modified_base 70: mod_base = OTHER; note = 2'-O-methyl ribonucleotide
  modified_base 71: mod_base = OTHER; note = 2'-O-methyl ribonucleotide
  modified_base 72: mod_base = OTHER; note = 2'-O-methyl ribonucleotide
  modified_base 73: mod_base = OTHER; note = 2'-O-methyl ribonucleotide
  modified_base 74: mod_base = OTHER; note = 2'-O-methyl ribonucleotide
  modified_base 75: mod_base = OTHER; note = 2'-O-methyl ribonucleotide
  modified_base 76: mod_base = OTHER; note = 2'-O-methyl ribonucleotide
  modified_base 77: mod_base = OTHER; note = 2'-O-methyl ribonucleotide
  modified_base 78: mod_base = OTHER; note = 2'-O-methyl ribonucleotide
  modified_base 79: mod_base = OTHER; note = 2'-O-methyl ribonucleotide
  modified_base 80: mod_base = OTHER; note = 2'-O-methyl ribonucleotide
  modified_base 81: mod_base = OTHER; note = 2'-O-methyl ribonucleotide
  modified_base 83: mod_base = OTHER; note = 2'-O-methyl ribonucleotide
  modified_base 84: mod_base = OTHER; note = 2'-O-methyl ribonucleotide
  modified_base 85: mod_base = OTHER; note = 2'-O-methyl ribonucleotide
  modified_base 86: mod_base = OTHER; note = 2'-O-methyl ribonucleotide
  modified_base 87: mod_base = OTHER; note = 2'-O-methyl ribonucleotide
  modified_base 88: mod_base = OTHER; note = 2'-O-methyl ribonucleotide
  modified_base 89: mod_base = OTHER; note = 2'-O-methyl ribonucleotide
  modified_base 90: mod_base = OTHER; note = 2'-O-methyl ribonucleotide
  modified_base 91: mod_base = OTHER; note = 2'-O-methyl ribonucleotide
  modified_base 92: mod_base = OTHER; note = 2'-O-methyl ribonucleotide
  modified_base 93: mod_base = OTHER; note = 2'-O-methyl ribonucleotide
  modified_base 94: mod_base = OTHER; note = 2'-O-methyl ribonucleotide
  modified_base 95: mod_base = OTHER; note = 2'-O-methyl ribonucleotide
  modified_base 96: mod_base = OTHER; note = 2'-O-methyl ribonucleotide
  modified_base 97: mod_base = OTHER; note = 2'-O-methyl ribonucleotide
  modified_base 98: mod_base = OTHER; note = 2'-O-methyl ribonucleotide
  modified_base 99: mod_base = OTHER; note = 2'-O-methyl ribonucleotide
  modified_base 100: mod_base = OTHER; note = 2'-O-methyl ribonucleotide
  modified_base 14: mod_base = OTHER; note = nebularine
  modified_base 34: mod_base = OTHER; note = nebularine
  modified_base 42: mod_base = OTHER; note = nebularine
  modified_base 1..4: mod_base = OTHER; note = phosphorothioate linkage
  modified_base 98..100: mod_base = OTHER; note = phosphorothioate linkage

SEQ ID NO: 2041 - RNA, 100 nt, synthetic construct; identical to SEQ ID NO: 1934
  source 1..100: mol_type = other RNA
  modified_base 1: mod_base = OTHER; note = 2'-O-methyl ribonucleotide
  modified_base 2: mod_base = OTHER; note = 2'-O-methyl ribonucleotide
  modified_base 3: mod_base = OTHER; note = 2'-O-methyl ribonucleotide
  modified_base 21: mod_base = OTHER; note = 2'-O-methyl ribonucleotide
  modified_base 28: mod_base = OTHER; note = 2'-O-methyl ribonucleotide
  modified_base 29: mod_base = OTHER; note = 2'-O-methyl ribonucleotide
  modified_base 30: mod_base = OTHER; note = 2'-O-methyl ribonucleotide
  modified_base 31: mod_base = OTHER; note = 2'-O-methyl ribonucleotide
  modified_base 32: mod_base = OTHER; note = 2'-O-methyl ribonucleotide
  modified_base 33: mod_base = OTHER; note = 2'-O-methyl ribonucleotide
  modified_base 34: mod_base = OTHER; note = 2'-O-methyl ribonucleotide
  modified_base 35: mod_base = OTHER; note = 2'-O-methyl ribonucleotide
  modified_base 36: mod_base = OTHER; note = 2'-O-methyl ribonucleotide
  modified_base 37: mod_base = OTHER; note = 2'-O-methyl ribonucleotide
  modified_base 38: mod_base = OTHER; note = 2'-O-methyl ribonucleotide
  modified_base 39: mod_base = OTHER; note = 2'-O-methyl ribonucleotide
  modified_base 40: mod_base = OTHER; note = 2'-O-methyl ribonucleotide
  modified_base 41: mod_base = OTHER; note = 2'-O-methyl ribonucleotide
  modified_base 42: mod_base = OTHER; note = 2'-O-methyl ribonucleotide
  modified_base 46: mod_base = OTHER; note = 2'-O-methyl ribonucleotide
  modified_base 48: mod_base = OTHER; note = 2'-O-methyl ribonucleotide
  modified_base 50: mod_base = OTHER; note = 2'-O-methyl ribonucleotide
  modified_base 52: mod_base = OTHER; note = 2'-O-methyl ribonucleotide
  modified_base 53: mod_base = OTHER; note = 2'-O-methyl ribonucleotide
  modified_base 54: mod_base = OTHER; note = 2'-O-methyl ribonucleotide
  modified_base 55: mod_base = OTHER; note = 2'-O-methyl ribonucleotide
  modified_base 56: mod_base = OTHER; note = 2'-O-methyl ribonucleotide
  modified_base 57: mod_base = OTHER; note = 2'-O-methyl ribonucleotide
  modified_base 60: mod_base = OTHER; note = 2'-O-methyl ribonucleotide
  modified_base 61: mod_base = OTHER; note = 2'-O-methyl ribonucleotide
  modified_base 66: mod_base = OTHER; note = 2'-O-methyl ribonucleotide
  modified_base 67: mod_base = OTHER; note = 2'-O-methyl ribonucleotide
  modified_base 70: mod_base = OTHER; note = 2'-O-methyl ribonucleotide
  modified_base 71: mod_base = OTHER; note = 2'-O-methyl ribonucleotide
  modified_base 72: mod_base = OTHER; note = 2'-O-methyl ribonucleotide
  modified_base 73: mod_base = OTHER; note = 2'-O-methyl ribonucleotide
  modified_base 74: mod_base = OTHER; note = 2'-O-methyl ribonucleotide
  modified_base 75: mod_base = OTHER; note = 2'-O-methyl ribonucleotide
  modified_base 76: mod_base = OTHER; note = 2'-O-methyl ribonucleotide
  modified_base 77: mod_base = OTHER; note = 2'-O-methyl ribonucleotide
  modified_base 78: mod_base = OTHER; note = 2'-O-methyl ribonucleotide
  modified_base 79: mod_base = OTHER; note = 2'-O-methyl ribonucleotide
  modified_base 80: mod_base = OTHER; note = 2'-O-methyl ribonucleotide
  modified_base 81: mod_base = OTHER; note = 2'-O-methyl ribonucleotide
  modified_base 83: mod_base = OTHER; note = 2'-O-methyl ribonucleotide
  modified_base 84: mod_base = OTHER; note = 2'-O-methyl ribonucleotide
  modified_base 85: mod_base = OTHER; note = 2'-O-methyl ribonucleotide
  modified_base 86: mod_base = OTHER; note = 2'-O-methyl ribonucleotide
  modified_base 87: mod_base = OTHER; note = 2'-O-methyl ribonucleotide
  modified_base 88: mod_base = OTHER; note = 2'-O-methyl ribonucleotide
  modified_base 89: mod_base = OTHER; note = 2'-O-methyl ribonucleotide
  modified_base 90: mod_base = OTHER; note = 2'-O-methyl ribonucleotide
  modified_base 91: mod_base = OTHER; note = 2'-O-methyl ribonucleotide
  modified_base 92: mod_base = OTHER; note = 2'-O-methyl ribonucleotide
  modified_base 93: mod_base = OTHER; note = 2'-O-methyl ribonucleotide
  modified_base 94: mod_base = OTHER; note = 2'-O-methyl ribonucleotide
  modified_base 95: mod_base = OTHER; note = 2'-O-methyl ribonucleotide
  modified_base 96: mod_base = OTHER; note = 2'-O-methyl ribonucleotide
  modified_base 97: mod_base = OTHER; note = 2'-O-methyl ribonucleotide
  modified_base 98: mod_base = OTHER; note = 2'-O-methyl ribonucleotide
  modified_base 99: mod_base = OTHER; note = 2'-O-methyl ribonucleotide
  modified_base 100: mod_base = OTHER; note = 2'-O-methyl ribonucleotide
  modified_base 9: mod_base = OTHER; note = nebularine
  modified_base 28: mod_base = OTHER; note = nebularine
  modified_base 34: mod_base = OTHER; note = nebularine
  modified_base 42: mod_base = OTHER; note = nebularine
  modified_base 57: mod_base = OTHER; note = nebularine
  modified_base 1..4: mod_base = OTHER; note = phosphorothioate linkage
  modified_base 98..100: mod_base = OTHER; note = phosphorothioate linkage

SEQ ID NO: 2042 - RNA, 100 nt, synthetic construct; identical to SEQ ID NO: 1935
  source 1..100: mol_type = other RNA
  modified_base 1: mod_base = OTHER; note = 2'-O-methyl ribonucleotide
  modified_base 2: mod_base = OTHER; note = 2'-O-methyl ribonucleotide
  modified_base 3: mod_base = OTHER; note = 2'-O-methyl ribonucleotide
  modified_base 21: mod_base = OTHER; note = 2'-O-methyl ribonucleotide
  modified_base 28: mod_base = OTHER; note = 2'-O-methyl ribonucleotide
  modified_base 29: mod_base = OTHER; note = 2'-O-methyl ribonucleotide
  modified_base 30: mod_base = OTHER; note = 2'-O-methyl ribonucleotide
  modified_base 31: mod_base = OTHER; note = 2'-O-methyl ribonucleotide
  modified_base 32: mod_base = OTHER; note = 2'-O-methyl ribonucleotide
  modified_base 33: mod_base = OTHER; note = 2'-O-methyl ribonucleotide
  modified_base 34: mod_base = OTHER; note = 2'-O-methyl ribonucleotide
  modified_base 35: mod_base = OTHER; note = 2'-O-methyl ribonucleotide
  modified_base 36: mod_base = OTHER; note = 2'-O-methyl ribonucleotide
  modified_base 37: mod_base = OTHER; note = 2'-O-methyl ribonucleotide
  modified_base 38: mod_base = OTHER; note = 2'-O-methyl ribonucleotide
  modified_base 39: mod_base = OTHER; note = 2'-O-methyl ribonucleotide
  modified_base 40: mod_base = OTHER; note = 2'-O-methyl ribonucleotide
  modified_base 41: mod_base = OTHER; note = 2'-O-methyl ribonucleotide
  modified_base 42: mod_base = OTHER; note = 2'-O-methyl ribonucleotide
  modified_base 46: mod_base = OTHER; note = 2'-O-methyl ribonucleotide
  modified_base 48: mod_base = OTHER; note = 2'-O-methyl ribonucleotide
  modified_base 50: mod_base = OTHER; note = 2'-O-methyl ribonucleotide
  modified_base 52: mod_base = OTHER; note = 2'-O-methyl ribonucleotide
  modified_base 53: mod_base = OTHER; note = 2'-O-methyl ribonucleotide
  modified_base 54: mod_base = OTHER; note = 2'-O-methyl ribonucleotide
  modified_base 55: mod_base = OTHER; note = 2'-O-methyl ribonucleotide
  modified_base 56: mod_base = OTHER; note = 2'-O-methyl ribonucleotide
  modified_base 57: mod_base = OTHER; note = 2'-O-methyl ribonucleotide
  modified_base 60: mod_base = OTHER; note = 2'-O-methyl ribonucleotide
  modified_base 61: mod_base = OTHER; note = 2'-O-methyl ribonucleotide
  modified_base 66: mod_base = OTHER; note = 2'-O-methyl ribonucleotide
  modified_base 67: mod_base = OTHER; note = 2'-O-methyl ribonucleotide
  modified_base 70: mod_base = OTHER; note = 2'-O-methyl ribonucleotide
  modified_base 71: mod_base = OTHER; note = 2'-O-methyl ribonucleotide
  modified_base 72: mod_base = OTHER; note = 2'-O-methyl ribonucleotide
  modified_base 73: mod_base = OTHER; note = 2'-O-methyl ribonucleotide
  modified_base 74: mod_base = OTHER; note = 2'-O-methyl ribonucleotide
  modified_base 75: mod_base = OTHER; note = 2'-O-methyl ribonucleotide
  modified_base 76: mod_base = OTHER; note = 2'-O-methyl ribonucleotide
  modified_base 77: mod_base = OTHER; note = 2'-O-methyl ribonucleotide
  modified_base 78: mod_base = OTHER; note = 2'-O-methyl ribonucleotide
  modified_base 79: mod_base = OTHER; note = 2'-O-methyl ribonucleotide
  modified_base 80: mod_base = OTHER; note = 2'-O-methyl ribonucleotide
  modified_base 81: mod_base = OTHER; note = 2'-O-methyl ribonucleotide
  modified_base 83: mod_base = OTHER; note = 2'-O-methyl ribonucleotide
  modified_base 84: mod_base = OTHER; note = 2'-O-methyl ribonucleotide
  modified_base 85: mod_base = OTHER; note = 2'-O-methyl ribonucleotide
  modified_base 86: mod_base = OTHER; note = 2'-O-methyl ribonucleotide
  modified_base 87: mod_base = OTHER; note = 2'-O-methyl ribonucleotide
  modified_base 88: mod_base = OTHER; note = 2'-O-methyl ribonucleotide
  modified_base 89: mod_base = OTHER; note = 2'-O-methyl ribonucleotide
  modified_base 90: mod_base = OTHER; note = 2'-O-methyl ribonucleotide
  modified_base 91: mod_base = OTHER; note = 2'-O-methyl ribonucleotide
  modified_base 92: mod_base = OTHER; note = 2'-O-methyl ribonucleotide
  modified_base 93: mod_base = OTHER; note = 2'-O-methyl ribonucleotide
  modified_base 94: mod_base = OTHER; note = 2'-O-methyl ribonucleotide
  modified_base 95: mod_base = OTHER; note = 2'-O-methyl ribonucleotide
  modified_base 96: mod_base = OTHER; note = 2'-O-methyl ribonucleotide
  modified_base 97: mod_base = OTHER; note = 2'-O-methyl ribonucleotide
  modified_base 98: mod_base = OTHER; note = 2'-O-methyl ribonucleotide
  modified_base 99: mod_base = OTHER; note = 2'-O-methyl ribonucleotide
  modified_base 100: mod_base = OTHER; note = 2'-O-methyl ribonucleotide
  modified_base 9: mod_base = OTHER; note = nebularine
  modified_base 34: mod_base = OTHER; note = nebularine
  modified_base 42: mod_base = OTHER; note = nebularine
  modified_base 57: mod_base = OTHER; note = nebularine
  modified_base 1..4: mod_base = OTHER; note = phosphorothioate linkage
  modified_base 98..100: mod_base = OTHER; note = phosphorothioate linkage

SEQ ID NO: 2043 - RNA, 100 nt, synthetic construct; identical to SEQ ID NO: 1936
  source 1..100: mol_type = other RNA
  modified_base 1: mod_base = OTHER; note = 2'-O-methyl ribonucleotide
  modified_base 2: mod_base = OTHER; note = 2'-O-methyl ribonucleotide
  modified_base 3: mod_base = OTHER; note = 2'-O-methyl ribonucleotide
  modified_base 21: mod_base = OTHER; note = 2'-O-methyl ribonucleotide
  modified_base 28: mod_base = OTHER; note = 2'-O-methyl ribonucleotide
  modified_base 29: mod_base = OTHER; note = 2'-O-methyl ribonucleotide
  modified_base 30: mod_base = OTHER; note = 2'-O-methyl ribonucleotide
  modified_base 31: mod_base = OTHER; note = 2'-O-methyl ribonucleotide
  modified_base 32: mod_base = OTHER; note = 2'-O-methyl ribonucleotide
  modified_base 33: mod_base = OTHER; note = 2'-O-methyl ribonucleotide
  modified_base 34: mod_base = OTHER; note = 2'-O-methyl ribonucleotide
  modified_base 35: mod_base = OTHER; note = 2'-O-methyl ribonucleotide
  modified_base 36: mod_base = OTHER; note = 2'-O-methyl ribonucleotide
  modified_base 37: mod_base = OTHER; note = 2'-O-methyl ribonucleotide
  modified_base 38: mod_base = OTHER; note = 2'-O-methyl ribonucleotide
  modified_base 39: mod_base = OTHER; note = 2'-O-methyl ribonucleotide
  modified_base 40: mod_base = OTHER; note = 2'-O-methyl ribonucleotide
  modified_base 41: mod_base = OTHER; note = 2'-O-methyl ribonucleotide
  modified_base 42: mod_base = OTHER; note = 2'-O-methyl ribonucleotide
  modified_base 46: mod_base = OTHER; note = 2'-O-methyl ribonucleotide
  modified_base 48: mod_base = OTHER; note = 2'-O-methyl ribonucleotide
  modified_base 50: mod_base = OTHER; note = 2'-O-methyl ribonucleotide
  modified_base 52: mod_base = OTHER; note = 2'-O-methyl ribonucleotide
  modified_base 53: mod_base = OTHER; note = 2'-O-methyl ribonucleotide
  modified_base 54: mod_base = OTHER; note = 2'-O-methyl ribonucleotide
  modified_base 55: mod_base = OTHER; note = 2'-O-methyl ribonucleotide
  modified_base 56: mod_base = OTHER; note = 2'-O-methyl ribonucleotide
  modified_base 57: mod_base = OTHER; note = 2'-O-methyl ribonucleotide
  modified_base 60: mod_base = OTHER; note = 2'-O-methyl ribonucleotide
  modified_base 61: mod_base = OTHER; note = 2'-O-methyl ribonucleotide
  modified_base 66: mod_base = OTHER; note = 2'-O-methyl ribonucleotide
  modified_base 67: mod_base = OTHER; note = 2'-O-methyl ribonucleotide
  modified_base 70: mod_base = OTHER; note = 2'-O-methyl ribonucleotide
  modified_base 71: mod_base = OTHER; note = 2'-O-methyl ribonucleotide
  modified_base 72: mod_base = OTHER; note = 2'-O-methyl ribonucleotide
  modified_base 73: mod_base = OTHER; note = 2'-O-methyl ribonucleotide
  modified_base 74: mod_base = OTHER; note = 2'-O-methyl ribonucleotide
  modified_base 75: mod_base = OTHER; note = 2'-O-methyl ribonucleotide
  modified_base 76: mod_base = OTHER; note = 2'-O-methyl ribonucleotide
  modified_base 77: mod_base = OTHER; note = 2'-O-methyl ribonucleotide
  modified_base 78: mod_base = OTHER; note = 2'-O-methyl ribonucleotide
  modified_base 79: mod_base = OTHER; note = 2'-O-methyl ribonucleotide
  modified_base 80: mod_base = OTHER; note = 2'-O-methyl ribonucleotide
  modified_base 81: mod_base = OTHER; note = 2'-O-methyl ribonucleotide
  modified_base 83: mod_base = OTHER; note = 2'-O-methyl ribonucleotide
  modified_base 84: mod_base = OTHER; note = 2'-O-methyl ribonucleotide
  modified_base 85: mod_base = OTHER; note = 2'-O-methyl ribonucleotide
  modified_base 86: mod_base = OTHER; note = 2'-O-methyl ribonucleotide
  modified_base 87: mod_base = OTHER; note = 2'-O-methyl ribonucleotide
  modified_base 88: mod_base = OTHER; note = 2'-O-methyl ribonucleotide
  modified_base 89: mod_base = OTHER; note = 2'-O-methyl ribonucleotide
  modified_base 90: mod_base = OTHER; note = 2'-O-methyl ribonucleotide
  modified_base 91: mod_base = OTHER; note = 2'-O-methyl ribonucleotide
  modified_base 92: mod_base = OTHER; note = 2'-O-methyl ribonucleotide
  modified_base 93: mod_base = OTHER; note = 2'-O-methyl ribonucleotide
  modified_base 94: mod_base = OTHER; note = 2'-O-methyl ribonucleotide
  modified_base 95: mod_base = OTHER; note = 2'-O-methyl ribonucleotide
  modified_base 96: mod_base = OTHER; note = 2'-O-methyl ribonucleotide
  modified_base 97: mod_base = OTHER; note = 2'-O-methyl ribonucleotide
  modified_base 98: mod_base = OTHER; note = 2'-O-methyl ribonucleotide
  modified_base 99: mod_base = OTHER; note = 2'-O-methyl ribonucleotide
  modified_base 100: mod_base = OTHER; note = 2'-O-methyl ribonucleotide
  modified_base 9: mod_base = OTHER; note = nebularine
  modified_base 42: mod_base = OTHER; note = nebularine
  modified_base 57: mod_base = OTHER; note = nebularine
  modified_base 1..4: mod_base = OTHER; note = phosphorothioate linkage
  modified_base 98..100: mod_base = OTHER; note = phosphorothioate linkage

SEQ ID NO: 2044 - RNA, 100 nt, synthetic construct; identical to SEQ ID NO: 1937
  source 1..100: mol_type = other RNA
  modified_base 1: mod_base = OTHER; note = 2'-O-methyl ribonucleotide
  modified_base 2: mod_base = OTHER; note = 2'-O-methyl ribonucleotide
  modified_base 3: mod_base = OTHER; note = 2'-O-methyl ribonucleotide
  modified_base 21: mod_base = OTHER; note = 2'-O-methyl ribonucleotide
  modified_base 28: mod_base = OTHER; note = 2'-O-methyl ribonucleotide
  modified_base 29: mod_base = OTHER; note = 2'-O-methyl ribonucleotide
  modified_base 30: mod_base = OTHER; note = 2'-O-methyl ribonucleotide
  modified_base 31: mod_base = OTHER; note = 2'-O-methyl ribonucleotide
  modified_base 32: mod_base = OTHER; note = 2'-O-methyl ribonucleotide
  modified_base 33: mod_base = OTHER; note = 2'-O-methyl ribonucleotide
  modified_base 34: mod_base = OTHER; note = 2'-O-methyl ribonucleotide
  modified_base 35: mod_base = OTHER; note = 2'-O-methyl ribonucleotide
  modified_base 36: mod_base = OTHER; note = 2'-O-methyl ribonucleotide
  modified_base 37: mod_base = OTHER; note = 2'-O-methyl ribonucleotide
  modified_base 38: mod_base = OTHER; note = 2'-O-methyl ribonucleotide
  modified_base 39: mod_base = OTHER; note = 2'-O-methyl ribonucleotide
  modified_base 40: mod_base = OTHER; note = 2'-O-methyl ribonucleotide
  modified_base 41: mod_base = OTHER; note = 2'-O-methyl ribonucleotide
  modified_base 42: mod_base = OTHER; note = 2'-O-methyl ribonucleotide
  modified_base 46: mod_base = OTHER; note = 2'-O-methyl ribonucleotide
  modified_base 48: mod_base = OTHER; note = 2'-O-methyl ribonucleotide
  modified_base 50: mod_base = OTHER; note = 2'-O-methyl ribonucleotide
  modified_base 52: mod_base = OTHER; note = 2'-O-methyl ribonucleotide
  modified_base 53: mod_base = OTHER; note = 2'-O-methyl ribonucleotide
  modified_base 54: mod_base = OTHER; note = 2'-O-methyl ribonucleotide
  modified_base 55: mod_base = OTHER; note = 2'-O-methyl ribonucleotide
  modified_base 56: mod_base = OTHER; note = 2'-O-methyl ribonucleotide
  modified_base 57: mod_base = OTHER; note = 2'-O-methyl ribonucleotide
  modified_base 60: mod_base = OTHER; note = 2'-O-methyl ribonucleotide
  modified_base 61: mod_base = OTHER; note = 2'-O-methyl ribonucleotide
  modified_base 66: mod_base = OTHER; note = 2'-O-methyl ribonucleotide
  modified_base 67: mod_base = OTHER; note = 2'-O-methyl ribonucleotide
  modified_base 70: mod_base = OTHER; note = 2'-O-methyl ribonucleotide
  modified_base 71: mod_base = OTHER; note = 2'-O-methyl ribonucleotide
  modified_base 72: mod_base = OTHER; note = 2'-O-methyl ribonucleotide
  modified_base 73: mod_base = OTHER; note = 2'-O-methyl ribonucleotide
  modified_base 74: mod_base = OTHER; note = 2'-O-methyl ribonucleotide
  modified_base 75: mod_base = OTHER; note = 2'-O-methyl ribonucleotide
  modified_base 76: mod_base = OTHER; note = 2'-O-methyl ribonucleotide
  modified_base 77: mod_base = OTHER; note = 2'-O-methyl ribonucleotide
  modified_base 78: mod_base = OTHER; note = 2'-O-methyl ribonucleotide
  modified_base 79: mod_base = OTHER; note = 2'-O-methyl ribonucleotide
  modified_base 80: mod_base = OTHER; note = 2'-O-methyl ribonucleotide
  modified_base 81: mod_base = OTHER; note = 2'-O-methyl ribonucleotide
  modified_base 83: mod_base = OTHER; note = 2'-O-methyl ribonucleotide
  modified_base 84: mod_base = OTHER; note = 2'-O-methyl ribonucleotide
  modified_base 85: mod_base = OTHER; note = 2'-O-methyl ribonucleotide
  modified_base 86: mod_base = OTHER; note = 2'-O-methyl ribonucleotide
  modified_base 87: mod_base = OTHER; note = 2'-O-methyl ribonucleotide
  modified_base 88: mod_base = OTHER; note = 2'-O-methyl ribonucleotide
  modified_base 89: mod_base = OTHER; note = 2'-O-methyl ribonucleotide
  modified_base 90: mod_base = OTHER; note = 2'-O-methyl ribonucleotide
  modified_base 91: mod_base = OTHER; note = 2'-O-methyl ribonucleotide
  modified_base 92: mod_base = OTHER; note = 2'-O-methyl ribonucleotide
  modified_base 93: mod_base = OTHER; note = 2'-O-methyl ribonucleotide
  modified_base 94: mod_base = OTHER; note = 2'-O-methyl ribonucleotide
  modified_base 95: mod_base = OTHER; note = 2'-O-methyl ribonucleotide
  modified_base 96: mod_base = OTHER; note = 2'-O-methyl ribonucleotide
  modified_base 97: mod_base = OTHER; note = 2'-O-methyl ribonucleotide
  modified_base 98: mod_base = OTHER; note = 2'-O-methyl ribonucleotide
  modified_base 99: mod_base = OTHER; note = 2'-O-methyl ribonucleotide
  modified_base 100: mod_base = OTHER; note = 2'-O-methyl ribonucleotide
  modified_base 9: mod_base = OTHER; note = nebularine
  modified_base 28: mod_base = OTHER; note = nebularine
  modified_base 1..4: mod_base = OTHER; note = phosphorothioate linkage
  modified_base 98..100: mod_base = OTHER; note = phosphorothioate linkage

SEQ ID NO: 2045 - RNA, 100 nt, synthetic construct; identical to SEQ ID NO: 1938
  source 1..100: mol_type = other RNA
  modified_base 1: mod_base = OTHER; note = 2'-O-methyl ribonucleotide
  modified_base 2: mod_base = OTHER; note = 2'-O-methyl ribonucleotide
  modified_base 3: mod_base = OTHER; note = 2'-O-methyl ribonucleotide
  modified_base 21: mod_base = OTHER; note = 2'-O-methyl ribonucleotide
  modified_base 28: mod_base = OTHER; note = 2'-O-methyl ribonucleotide
  modified_base 29: mod_base = OTHER; note = 2'-O-methyl ribonucleotide
  modified_base 30: mod_base = OTHER; note = 2'-O-methyl ribonucleotide
  modified_base 31: mod_base = OTHER; note = 2'-O-methyl ribonucleotide
  modified_base 32: mod_base = OTHER; note = 2'-O-methyl ribonucleotide
  modified_base 33: mod_base = OTHER; note = 2'-O-methyl ribonucleotide
  modified_base 34: mod_base = OTHER; note = 2'-O-methyl ribonucleotide
  modified_base 35: mod_base = OTHER; note = 2'-O-methyl ribonucleotide
  modified_base 36: mod_base = OTHER; note = 2'-O-methyl ribonucleotide
  modified_base 37: mod_base = OTHER; note = 2'-O-methyl ribonucleotide
  modified_base 38: mod_base = OTHER; note = 2'-O-methyl ribonucleotide
  modified_base 39: mod_base = OTHER; note = 2'-O-methyl ribonucleotide
  modified_base 40: mod_base = OTHER; note = 2'-O-methyl ribonucleotide
  modified_base 41: mod_base = OTHER; note = 2'-O-methyl ribonucleotide
  modified_base 42: mod_base = OTHER; note = 2'-O-methyl ribonucleotide
  modified_base 46: mod_base = OTHER; note = 2'-O-methyl ribonucleotide
  modified_base 48: mod_base = OTHER; note = 2'-O-methyl ribonucleotide
  modified_base 50: mod_base = OTHER; note = 2'-O-methyl ribonucleotide
  modified_base 52: mod_base = OTHER; note = 2'-O-methyl ribonucleotide
  modified_base 53: mod_base = OTHER; note = 2'-O-methyl ribonucleotide
  modified_base 54: mod_base = OTHER; note = 2'-O-methyl ribonucleotide
  modified_base 55: mod_base = OTHER; note = 2'-O-methyl ribonucleotide
  modified_base 56: mod_base = OTHER; note = 2'-O-methyl ribonucleotide
  modified_base 57: mod_base = OTHER; note = 2'-O-methyl ribonucleotide
  modified_base 60: mod_base = OTHER; note = 2'-O-methyl ribonucleotide
  modified_base 61: mod_base = OTHER; note = 2'-O-methyl ribonucleotide
  modified_base 66: mod_base = OTHER; note = 2'-O-methyl ribonucleotide
  modified_base 67: mod_base = OTHER; note = 2'-O-methyl ribonucleotide
  modified_base 70: mod_base = OTHER; note = 2'-O-methyl ribonucleotide
  modified_base 71: mod_base = OTHER; note = 2'-O-methyl ribonucleotide
  modified_base 72: mod_base = OTHER; note = 2'-O-methyl ribonucleotide
  modified_base 73: mod_base = OTHER; note = 2'-O-methyl ribonucleotide
  modified_base 74: mod_base = OTHER; note = 2'-O-methyl ribonucleotide
  modified_base 75: mod_base = OTHER; note = 2'-O-methyl ribonucleotide
  modified_base 76: mod_base = OTHER; note = 2'-O-methyl ribonucleotide
  modified_base 77: mod_base = OTHER; note = 2'-O-methyl ribonucleotide
  modified_base 78: mod_base = OTHER; note = 2'-O-methyl ribonucleotide
  modified_base 79: mod_base = OTHER; note = 2'-O-methyl ribonucleotide
  modified_base 80: mod_base = OTHER; note = 2'-O-methyl ribonucleotide
  modified_base 81: mod_base = OTHER; note = 2'-O-methyl ribonucleotide
  modified_base 83: mod_base = OTHER; note = 2'-O-methyl ribonucleotide
  modified_base 84: mod_base = OTHER; note = 2'-O-methyl ribonucleotide
  modified_base 85: mod_base = OTHER; note = 2'-O-methyl ribonucleotide
  modified_base 86: mod_base = OTHER; note = 2'-O-methyl ribonucleotide
  modified_base 87: mod_base = OTHER; note = 2'-O-methyl ribonucleotide
  modified_base 88: mod_base = OTHER; note = 2'-O-methyl ribonucleotide
  modified_base 89: mod_base = OTHER; note = 2'-O-methyl ribonucleotide
  modified_base 90: mod_base = OTHER; note = 2'-O-methyl ribonucleotide
  modified_base 91: mod_base = OTHER; note = 2'-O-methyl ribonucleotide
  modified_base 92: mod_base = OTHER; note = 2'-O-methyl ribonucleotide
  modified_base 93: mod_base = OTHER; note = 2'-O-methyl ribonucleotide
  modified_base 94: mod_base = OTHER; note = 2'-O-methyl ribonucleotide
  modified_base 95: mod_base = OTHER; note = 2'-O-methyl ribonucleotide
  modified_base 96: mod_base = OTHER; note = 2'-O-methyl ribonucleotide
  modified_base 97: mod_base = OTHER; note = 2'-O-methyl ribonucleotide
  modified_base 98: mod_base = OTHER; note = 2'-O-methyl ribonucleotide
  modified_base 99: mod_base = OTHER; note = 2'-O-methyl ribonucleotide
  modified_base 100: mod_base = OTHER; note = 2'-O-methyl ribonucleotide
  modified_base 9: mod_base = OTHER; note = nebularine
  modified_base 42: mod_base = OTHER; note = nebularine
  modified_base 1..4: mod_base = OTHER; note = phosphorothioate linkage
  modified_base 98..100: mod_base = OTHER; note = phosphorothioate linkage

SEQ ID NO: 2046 - RNA, 100 nt, synthetic construct; identical to SEQ ID NO: 1939
  source 1..100: mol_type = other RNA
  modified_base 1: mod_base = OTHER; note = 2'-O-methyl ribonucleotide
  modified_base 2: mod_base = OTHER; note = 2'-O-methyl ribonucleotide
  modified_base 3: mod_base = OTHER; note = 2'-O-methyl ribonucleotide
  modified_base 21: mod_base = OTHER; note = 2'-O-methyl ribonucleotide
  modified_base 28: mod_base = OTHER; note = 2'-O-methyl ribonucleotide
  modified_base 29: mod_base = OTHER; note = 2'-O-methyl ribonucleotide
  modified_base 30: mod_base = OTHER; note = 2'-O-methyl ribonucleotide
  modified_base 31: mod_base = OTHER; note = 2'-O-methyl ribonucleotide
  modified_base 32: mod_base = OTHER; note = 2'-O-methyl ribonucleotide
  modified_base 33: mod_base = OTHER; note = 2'-O-methyl ribonucleotide
  modified_base 34: mod_base = OTHER; note = 2'-O-methyl ribonucleotide
  modified_base 35: mod_base = OTHER; note = 2'-O-methyl ribonucleotide
  modified_base 36: mod_base = OTHER; note = 2'-O-methyl ribonucleotide
  modified_base 37: mod_base = OTHER; note = 2'-O-methyl ribonucleotide
  modified_base 38: mod_base = OTHER; note = 2'-O-methyl ribonucleotide
  modified_base 39: mod_base = OTHER; note = 2'-O-methyl ribonucleotide
  modified_base 40: mod_base = OTHER; note = 2'-O-methyl ribonucleotide
  modified_base 41: mod_base = OTHER; note = 2'-O-methyl ribonucleotide
  modified_base 42: mod_base = OTHER; note = 2'-O-methyl ribonucleotide
  modified_base 46: mod_base = OTHER; note = 2'-O-methyl ribonucleotide
  modified_base 48: mod_base = OTHER; note = 2'-O-methyl ribonucleotide
  modified_base 50: mod_base = OTHER; note = 2'-O-methyl ribonucleotide
  modified_base 52: mod_base = OTHER; note = 2'-O-methyl ribonucleotide
  modified_base 53: mod_base = OTHER; note = 2'-O-methyl ribonucleotide
  modified_base 54: mod_base = OTHER; note = 2'-O-methyl ribonucleotide
  modified_base 55: mod_base = OTHER; note = 2'-O-methyl ribonucleotide
  modified_base 56: mod_base = OTHER; note = 2'-O-methyl ribonucleotide
  modified_base 57: mod_base = OTHER; note = 2'-O-methyl ribonucleotide
  modified_base 60: mod_base = OTHER; note = 2'-O-methyl ribonucleotide
  modified_base 61: mod_base = OTHER; note = 2'-O-methyl ribonucleotide
  modified_base 66: mod_base = OTHER; note = 2'-O-methyl ribonucleotide
  modified_base 67: mod_base = OTHER; note = 2'-O-methyl ribonucleotide
  modified_base 70: mod_base = OTHER; note = 2'-O-methyl ribonucleotide
  modified_base 71: mod_base = OTHER; note = 2'-O-methyl ribonucleotide
  modified_base 72: mod_base = OTHER; note = 2'-O-methyl ribonucleotide
  modified_base 73: mod_base = OTHER; note = 2'-O-methyl ribonucleotide
  modified_base 74: mod_base = OTHER; note = 2'-O-methyl ribonucleotide
  modified_base 75: mod_base = OTHER; note = 2'-O-methyl ribonucleotide
  modified_base 76: mod_base = OTHER; note = 2'-O-methyl ribonucleotide
  modified_base 77: mod_base = OTHER; note = 2'-O-methyl ribonucleotide
  modified_base 78: mod_base = OTHER; note = 2'-O-methyl ribonucleotide
  modified_base 79: mod_base = OTHER; note = 2'-O-methyl ribonucleotide
  modified_base 80: mod_base = OTHER; note = 2'-O-methyl ribonucleotide
  modified_base 81: mod_base = OTHER; note = 2'-O-methyl ribonucleotide
  modified_base 83: mod_base = OTHER; note = 2'-O-methyl ribonucleotide
  modified_base 84: mod_base = OTHER; note = 2'-O-methyl ribonucleotide
  modified_base 85: mod_base = OTHER; note = 2'-O-methyl ribonucleotide
  modified_base 86: mod_base = OTHER; note = 2'-O-methyl ribonucleotide
  modified_base 87: mod_base = OTHER; note = 2'-O-methyl ribonucleotide
  modified_base 88: mod_base = OTHER; note = 2'-O-methyl ribonucleotide
  modified_base 89: mod_base = OTHER; note = 2'-O-methyl ribonucleotide
  modified_base 90: mod_base = OTHER; note = 2'-O-methyl ribonucleotide
  modified_base 91: mod_base = OTHER; note = 2'-O-methyl ribonucleotide
  modified_base 92: mod_base = OTHER; note = 2'-O-methyl ribonucleotide
  modified_base 93: mod_base = OTHER; note = 2'-O-methyl ribonucleotide
  modified_base 94: mod_base = OTHER; note = 2'-O-methyl ribonucleotide
  modified_base 95: mod_base = OTHER; note = 2'-O-methyl ribonucleotide
  modified_base 96: mod_base = OTHER; note = 2'-O-methyl ribonucleotide
  modified_base 97: mod_base = OTHER; note = 2'-O-methyl ribonucleotide
  modified_base 98: mod_base = OTHER; note = 2'-O-methyl ribonucleotide
  modified_base 99: mod_base = OTHER; note = 2'-O-methyl ribonucleotide
  modified_base 100: mod_base = OTHER; note = 2'-O-methyl ribonucleotide
  modified_base 9: mod_base = OTHER; note = nebularine
  modified_base 34: mod_base = OTHER; note = nebularine
  modified_base 42: mod_base = OTHER; note = nebularine
  modified_base 1..4: mod_base = OTHER; note = phosphorothioate linkage
  modified_base 98..100: mod_base = OTHER; note = phosphorothioate linkage

SEQ ID NO: 2047 - RNA, 100 nt, synthetic construct; identical to SEQ ID NO: 1940
  source 1..100: mol_type = other RNA
  modified_base 1: mod_base = OTHER; note = 2'-O-methyl ribonucleotide
  modified_base 2: mod_base = OTHER; note = 2'-O-methyl ribonucleotide
  modified_base 3: mod_base = OTHER; note = 2'-O-methyl ribonucleotide
  modified_base 21: mod_base = OTHER; note = 2'-O-methyl ribonucleotide
  modified_base 28: mod_base = OTHER; note = 2'-O-methyl ribonucleotide
  modified_base 29: mod_base = OTHER; note = 2'-O-methyl ribonucleotide
  modified_base 30: mod_base = OTHER; note = 2'-O-methyl ribonucleotide
  modified_base 31: mod_base = OTHER; note = 2'-O-methyl ribonucleotide
  modified_base 32: mod_base = OTHER; note = 2'-O-methyl ribonucleotide
  modified_base 33: mod_base = OTHER; note = 2'-O-methyl ribonucleotide
  modified_base 34: mod_base = OTHER; note = 2'-O-methyl ribonucleotide
  modified_base 35: mod_base = OTHER; note = 2'-O-methyl ribonucleotide
  modified_base 36: mod_base = OTHER; note = 2'-O-methyl ribonucleotide
  modified_base 37: mod_base = OTHER; note = 2'-O-methyl ribonucleotide
  modified_base 38: mod_base = OTHER; note = 2'-O-methyl ribonucleotide
  modified_base 39: mod_base = OTHER; note = 2'-O-methyl ribonucleotide
  modified_base 40: mod_base = OTHER; note = 2'-O-methyl ribonucleotide
  modified_base 41: mod_base = OTHER; note = 2'-O-methyl ribonucleotide
  modified_base 42: mod_base = OTHER; note = 2'-O-methyl ribonucleotide
  modified_base 46: mod_base = OTHER; note = 2'-O-methyl ribonucleotide
  modified_base 48: mod_base = OTHER; note = 2'-O-methyl ribonucleotide
  modified_base 50: mod_base = OTHER; note = 2'-O-methyl ribonucleotide
  modified_base 52: mod_base = OTHER; note = 2'-O-methyl ribonucleotide
  modified_base 53: mod_base = OTHER; note = 2'-O-methyl ribonucleotide
  modified_base 54: mod_base = OTHER; note = 2'-O-methyl ribonucleotide
  modified_base 55: mod_base = OTHER; note = 2'-O-methyl ribonucleotide
  modified_base 56: mod_base = OTHER; note = 2'-O-methyl ribonucleotide
  modified_base 57: mod_base = OTHER; note = 2'-O-methyl ribonucleotide
  modified_base 60: mod_base = OTHER; note = 2'-O-methyl ribonucleotide
  modified_base 61: mod_base = OTHER; note = 2'-O-methyl ribonucleotide
  modified_base 66: mod_base = OTHER; note = 2'-O-methyl ribonucleotide
  modified_base 67: mod_base = OTHER; note = 2'-O-methyl ribonucleotide
  modified_base 70: mod_base = OTHER; note = 2'-O-methyl ribonucleotide
  modified_base 71: mod_base = OTHER; note = 2'-O-methyl ribonucleotide
  modified_base 72: mod_base = OTHER; note = 2'-O-methyl ribonucleotide
  modified_base 73: mod_base = OTHER; note = 2'-O-methyl ribonucleotide
  modified_base 74: mod_base = OTHER; note = 2'-O-methyl ribonucleotide
  modified_base 75: mod_base = OTHER; note = 2'-O-methyl ribonucleotide
  modified_base 76: mod_base = OTHER; note = 2'-O-methyl ribonucleotide
  modified_base 77: mod_base = OTHER; note = 2'-O-methyl ribonucleotide
  modified_base 78: mod_base = OTHER; note = 2'-O-methyl ribonucleotide
  modified_base 79: mod_base = OTHER; note = 2'-O-methyl ribonucleotide
  modified_base 80: mod_base = OTHER; note = 2'-O-methyl ribonucleotide
  modified_base 81: mod_base = OTHER; note = 2'-O-methyl ribonucleotide
  modified_base 83: mod_base = OTHER; note = 2'-O-methyl ribonucleotide
  modified_base 84: mod_base = OTHER; note = 2'-O-methyl ribonucleotide
  modified_base 85: mod_base = OTHER; note = 2'-O-methyl ribonucleotide
  modified_base 86: mod_base = OTHER; note = 2'-O-methyl ribonucleotide
  modified_base 87: mod_base = OTHER; note = 2'-O-methyl ribonucleotide
  modified_base 88: mod_base = OTHER; note = 2'-O-methyl ribonucleotide
  modified_base 89: mod_base = OTHER; note = 2'-O-methyl ribonucleotide
  modified_base 90: mod_base = OTHER; note = 2'-O-methyl ribonucleotide
  modified_base 91: mod_base = OTHER; note = 2'-O-methyl ribonucleotide
  modified_base 92: mod_base = OTHER; note = 2'-O-methyl ribonucleotide
  modified_base 93: mod_base = OTHER; note = 2'-O-methyl ribonucleotide
  modified_base 94: mod_base = OTHER; note = 2'-O-methyl ribonucleotide
  modified_base 95: mod_base = OTHER; note = 2'-O-methyl ribonucleotide
  modified_base 96: mod_base = OTHER; note = 2'-O-methyl ribonucleotide
  modified_base 97: mod_base = OTHER; note = 2'-O-methyl ribonucleotide
  modified_base 98: mod_base = OTHER; note = 2'-O-methyl ribonucleotide
  modified_base 99: mod_base = OTHER; note = 2'-O-methyl ribonucleotide
  modified_base 100: mod_base = OTHER; note = 2'-O-methyl ribonucleotide
  modified_base 9: mod_base = OTHER; note = nebularine
  modified_base 34: mod_base = OTHER; note = nebularine
  modified_base 1..4: mod_base = OTHER; note = phosphorothioate linkage
  modified_base 98..100: mod_base = OTHER; note = phosphorothioate linkage

SEQ ID NO: 2048 - DNA, 100 bp, synthetic construct; identical to SEQ ID NO: 1941
  source 1..100: mol_type = other DNA
  modified_base 1: mod_base = OTHER; note = 2'-O-methyl ribonucleotide
  modified_base 2: mod_base = OTHER; note = 2'-O-methyl ribonucleotide
  modified_base 3: mod_base = OTHER; note = 2'-O-methyl ribonucleotide
  modified_base 21: mod_base = OTHER; note = 2'-O-methyl ribonucleotide
  modified_base 28: mod_base = OTHER; note = 2'-O-methyl ribonucleotide
  modified_base 29: mod_base = OTHER; note = 2'-O-methyl ribonucleotide
  modified_base 30: mod_base = OTHER; note = 2'-O-methyl ribonucleotide
  modified_base 31: mod_base = OTHER; note = 2'-O-methyl ribonucleotide
  modified_base 32: mod_base = OTHER; note = 2'-O-methyl ribonucleotide
  modified_base 33: mod_base = OTHER; note = 2'-O-methyl ribonucleotide
  modified_base 34: mod_base = OTHER; note = 2'-O-methyl ribonucleotide
  modified_base 35: mod_base = OTHER; note = 2'-O-methyl ribonucleotide
  modified_base 36: mod_base = OTHER; note = 2'-O-methyl ribonucleotide
  modified_base 37: mod_base = OTHER; note = 2'-O-methyl ribonucleotide
  modified_base 38: mod_base = OTHER; note = 2'-O-methyl ribonucleotide
  modified_base 39: mod_base = OTHER; note = 2'-O-methyl ribonucleotide
  modified_base 40: mod_base = OTHER; note = 2'-O-methyl ribonucleotide
  modified_base 41: mod_base = OTHER; note = 2'-O-methyl ribonucleotide
  modified_base 42: mod_base = OTHER; note = 2'-O-methyl ribonucleotide
  modified_base 46: mod_base = OTHER; note = 2'-O-methyl ribonucleotide
  modified_base 48: mod_base = OTHER; note = 2'-O-methyl ribonucleotide
  modified_base 50: mod_base = OTHER; note = 2'-O-methyl ribonucleotide
  modified_base 52: mod_base = OTHER; note = 2'-O-methyl ribonucleotide
  modified_base 53: mod_base = OTHER; note = 2'-O-methyl ribonucleotide
  modified_base 54: mod_base = OTHER; note = 2'-O-methyl ribonucleotide
  modified_base 55: mod_base = OTHER; note = 2'-O-methyl ribonucleotide
  modified_base 56: mod_base = OTHER; note = 2'-O-methyl ribonucleotide
  modified_base 57: mod_base = OTHER; note = 2'-O-methyl ribonucleotide
  modified_base 60: mod_base = OTHER; note = 2'-O-methyl ribonucleotide
  modified_base 61: mod_base = OTHER; note = 2'-O-methyl ribonucleotide
  modified_base 66: mod_base = OTHER; note = 2'-O-methyl ribonucleotide
  modified_base 67: mod_base = OTHER; note = 2'-O-methyl ribonucleotide
  modified_base 70: mod_base = OTHER; note = 2'-O-methyl ribonucleotide
  modified_base 71: mod_base = OTHER; note = 2'-O-methyl ribonucleotide
  modified_base 72: mod_base = OTHER; note = 2'-O-methyl ribonucleotide
  modified_base 73: mod_base = OTHER; note = 2'-O-methyl ribonucleotide
  modified_base 74: mod_base = OTHER; note = 2'-O-methyl ribonucleotide
  modified_base 75: mod_base = OTHER; note = 2'-O-methyl ribonucleotide
  modified_base 76: mod_base = OTHER; note = 2'-O-methyl ribonucleotide
  modified_base 77: mod_base = OTHER; note = 2'-O-methyl ribonucleotide
  modified_base 78: mod_base = OTHER; note = 2'-O-methyl ribonucleotide
  modified_base 79: mod_base = OTHER; note = 2'-O-methyl ribonucleotide
  modified_base 80: mod_base = OTHER; note = 2'-O-methyl ribonucleotide
  modified_base 81: mod_base = OTHER; note = 2'-O-methyl ribonucleotide
  modified_base 83: mod_base = OTHER; note = 2'-O-methyl ribonucleotide
  modified_base 84: mod_base = OTHER; note = 2'-O-methyl ribonucleotide
  modified_base 85: mod_base = OTHER; note = 2'-O-methyl ribonucleotide
  modified_base 86: mod_base = OTHER; note = 2'-O-methyl ribonucleotide
  modified_base 87: mod_base = OTHER; note = 2'-O-methyl ribonucleotide
  modified_base 88: mod_base = OTHER; note = 2'-O-methyl ribonucleotide
  modified_base 89: mod_base = OTHER; note = 2'-O-methyl ribonucleotide
  modified_base 90: mod_base = OTHER; note = 2'-O-methyl ribonucleotide
  modified_base 91: mod_base = OTHER; note = 2'-O-methyl ribonucleotide
  modified_base 92: mod_base = OTHER; note = 2'-O-methyl ribonucleotide
  modified_base 93: mod_base = OTHER; note = 2'-O-methyl ribonucleotide
  modified_base 94: mod_base = OTHER; note = 2'-O-methyl ribonucleotide
  modified_base 95: mod_base = OTHER; note = 2'-O-methyl ribonucleotide
  modified_base 96: mod_base = OTHER; note = 2'-O-methyl ribonucleotide
  modified_base 97: mod_base = OTHER; note = 2'-O-methyl ribonucleotide
  modified_base 98: mod_base = OTHER; note = 2'-O-methyl ribonucleotide
  modified_base 99: mod_base = OTHER; note = 2'-O-methyl ribonucleotide
  modified_base 100: mod_base = OTHER; note = 2'-O-methyl ribonucleotide
  modified_base 9: mod_base = OTHER; note = nebularine
  modified_base 14: mod_base = OTHER; note = nebularine
  modified_base 1..4: mod_base = OTHER; note = phosphorothioate linkage
  modified_base 98..100: mod_base = OTHER; note = phosphorothioate linkage
  misc_feature 1: note = RNA
  misc_feature 2: note = RNA
  misc_feature 3: note = RNA
  misc_feature 4: note = RNA
  misc_feature 5: note = RNA
  misc_feature 6: note = RNA
  misc_feature 7: note = RNA
  misc_feature 8: note = RNA
  misc_feature 10: note = RNA
  misc_feature 11: note = RNA
  misc_feature 12: note = RNA
  misc_feature 13: note = RNA
  misc_feature 15: note = RNA
  misc_feature 16: note = RNA
  misc_feature 17: note = RNA
  misc_feature 18: note = RNA
  misc_feature 19: note = RNA
  misc_feature 20: note = RNA
  misc_feature 21: note = RNA
  misc_feature 22: note = RNA
  misc_feature 23: note = RNA
  misc_feature 24: note = RNA
  misc_feature 25: note = RNA
  misc_feature 26: note = RNA
  misc_feature 27: note = RNA
  misc_feature 28: note = RNA
  misc_feature 29: note = RNA
  misc_feature 30: note = RNA
  misc_feature 31: note = RNA
  misc_feature 32: note = RNA
  misc_feature 33: note = RNA
  misc_feature 34: note = RNA
  misc_feature 35: note = RNA
  misc_feature 36: note = RNA
  misc_feature 37: note = RNA
  misc_feature 38: note = RNA
  misc_feature 39: note = RNA
  misc_feature 40: note = RNA
  misc_feature 41: note = RNA
  misc_feature 42: note = RNA
  misc_feature 43: note = RNA
  misc_feature 44: note = RNA
  misc_feature 45: note = RNA
  misc_feature 46: note = RNA
  misc_feature 47: note = RNA
  misc_feature 48: note = RNA
  misc_feature 49: note = RNA
  misc_feature 50: note = RNA
  misc_feature 51: note = RNA
  misc_feature 52: note = RNA
  misc_feature 53: note = RNA
  misc_feature 54: note = RNA
  misc_feature 55: note = RNA
  misc_feature 56: note = RNA
  misc_feature 57: note = RNA
  misc_feature 58: note = RNA
  misc_feature 59: note = RNA
  misc_feature 60: note = RNA
  misc_feature 61: note = RNA
  misc_feature 62: note = RNA
  misc_feature 63: note = RNA
  misc_feature 64: note = RNA
  misc_feature 65: note = RNA
  misc_feature 66: note = RNA
  misc_feature 67: note = RNA
  misc_feature 68: note = RNA
  misc_feature 69: note = RNA
  misc_feature 70: note = RNA
  misc_feature 71: note = RNA
  misc_feature 72: note = RNA
  misc_feature 73: note = RNA
  misc_feature 74: note = RNA
  misc_feature 75: note = RNA
  misc_feature 76: note = RNA
  misc_feature 77: note = RNA
  misc_feature 78: note = RNA
  misc_feature 79: note = RNA
  misc_feature 80: note = RNA
  misc_feature 81: note = RNA
  misc_feature 82: note = RNA
  misc_feature 83: note = RNA
  misc_feature 84: note = RNA
  misc_feature 85: note = RNA
  misc_feature 86: note = RNA
  misc_feature 87: note = RNA
  misc_feature 88: note = RNA
  misc_feature 89: note = RNA
  misc_feature 90: note = RNA
  misc_feature 91: note = RNA
  misc_feature 92: note = RNA
  misc_feature 93: note = RNA
  misc_feature 94: note = RNA
  misc_feature 95: note = RNA
  misc_feature 96: note = RNA
  misc_feature 97: note = RNA
  misc_feature 98: note = RNA
  misc_feature 99: note = RNA
  misc_feature 100: note = RNA
  misc_feature 9: note = DNA
  misc_feature 14: note = DNA

SEQ ID NO: 2049 - DNA, 100 bp, synthetic construct; identical to SEQ ID NO: 1942
  source 1..100: mol_type = other DNA
  modified_base 1: mod_base = OTHER; note = 2'-O-methyl ribonucleotide
  modified_base 2: mod_base = OTHER; note = 2'-O-methyl ribonucleotide
  modified_base 3: mod_base = OTHER; note = 2'-O-methyl ribonucleotide
  modified_base 21: mod_base = OTHER; note = 2'-O-methyl ribonucleotide
  modified_base 28: mod_base = OTHER; note = 2'-O-methyl ribonucleotide
  modified_base 29: mod_base = OTHER; note = 2'-O-methyl ribonucleotide
  modified_base 30: mod_base = OTHER; note = 2'-O-methyl ribonucleotide
  modified_base 31: mod_base = OTHER; note = 2'-O-methyl ribonucleotide
  modified_base 32: mod_base = OTHER; note = 2'-O-methyl ribonucleotide
  modified_base 33: mod_base = OTHER; note = 2'-O-methyl ribonucleotide
  modified_base 34: mod_base = OTHER; note = 2'-O-methyl ribonucleotide
  modified_base 35: mod_base = OTHER; note = 2'-O-methyl ribonucleotide
  modified_base 36: mod_base = OTHER; note = 2'-O-methyl ribonucleotide
  modified_base 37: mod_base = OTHER; note = 2'-O-methyl ribonucleotide
  modified_base 38: mod_base = OTHER; note = 2'-O-methyl ribonucleotide
  modified_base 39: mod_base = OTHER; note = 2'-O-methyl ribonucleotide
  modified_base 40: mod_base = OTHER; note = 2'-O-methyl ribonucleotide
  modified_base 41: mod_base = OTHER; note = 2'-O-methyl ribonucleotide
  modified_base 42: mod_base = OTHER; note = 2'-O-methyl ribonucleotide
  modified_base 46: mod_base = OTHER; note = 2'-O-methyl ribonucleotide
  modified_base 48: mod_base = OTHER; note = 2'-O-methyl ribonucleotide
  modified_base 50: mod_base = OTHER; note = 2'-O-methyl ribonucleotide
  modified_base 52: mod_base = OTHER; note = 2'-O-methyl ribonucleotide
  modified_base 53: mod_base = OTHER; note = 2'-O-methyl ribonucleotide
  modified_base 54: mod_base = OTHER; note = 2'-O-methyl ribonucleotide
  modified_base 55: mod_base = OTHER; note = 2'-O-methyl ribonucleotide
  modified_base 56: mod_base = OTHER; note = 2'-O-methyl ribonucleotide
  modified_base 57: mod_base = OTHER; note = 2'-O-methyl ribonucleotide
  modified_base 60: mod_base = OTHER; note = 2'-O-methyl ribonucleotide
  modified_base 61: mod_base = OTHER; note = 2'-O-methyl ribonucleotide
  modified_base 66: mod_base = OTHER; note = 2'-O-methyl ribonucleotide
  modified_base 67: mod_base = OTHER; note = 2'-O-methyl ribonucleotide
  modified_base 70: mod_base = OTHER; note = 2'-O-methyl ribonucleotide
  modified_base 71: mod_base = OTHER; note = 2'-O-methyl ribonucleotide
  modified_base 72: mod_base = OTHER; note = 2'-O-methyl ribonucleotide
  modified_base 73: mod_base = OTHER; note = 2'-O-methyl ribonucleotide
  modified_base 74: mod_base = OTHER; note = 2'-O-methyl ribonucleotide
  modified_base 75: mod_base = OTHER; note = 2'-O-methyl ribonucleotide
  modified_base 76: mod_base = OTHER; note = 2'-O-methyl ribonucleotide
  modified_base 77: mod_base = OTHER; note = 2'-O-methyl ribonucleotide
  modified_base 78: mod_base = OTHER; note = 2'-O-methyl ribonucleotide
  modified_base 79: mod_base = OTHER; note = 2'-O-methyl ribonucleotide
  modified_base 80: mod_base = OTHER; note = 2'-O-methyl ribonucleotide
  modified_base 81: mod_base = OTHER; note = 2'-O-methyl ribonucleotide
  modified_base 83: mod_base = OTHER; note = 2'-O-methyl ribonucleotide
  modified_base 84: mod_base = OTHER; note = 2'-O-methyl ribonucleotide
  modified_base 85: mod_base = OTHER; note = 2'-O-methyl ribonucleotide
  modified_base 86: mod_base = OTHER; note = 2'-O-methyl ribonucleotide
  modified_base 87: mod_base = OTHER; note = 2'-O-methyl ribonucleotide
  modified_base 88: mod_base = OTHER; note = 2'-O-methyl ribonucleotide
  modified_base 89: mod_base = OTHER; note = 2'-O-methyl ribonucleotide
  modified_base 90: mod_base = OTHER; note = 2'-O-methyl ribonucleotide
  modified_base 91: mod_base = OTHER; note = 2'-O-methyl ribonucleotide
  modified_base 92: mod_base = OTHER; note = 2'-O-methyl ribonucleotide
  modified_base 93: mod_base = OTHER; note = 2'-O-methyl ribonucleotide
  modified_base 94: mod_base = OTHER; note = 2'-O-methyl ribonucleotide
  modified_base 95: mod_base = OTHER; note = 2'-O-methyl ribonucleotide
  modified_base 96: mod_base = OTHER; note = 2'-O-methyl ribonucleotide
  modified_base 97: mod_base = OTHER; note = 2'-O-methyl ribonucleotide
  modified_base 98: mod_base = OTHER; note = 2'-O-methyl ribonucleotide
  modified_base 99: mod_base = OTHER; note = 2'-O-methyl ribonucleotide
  modified_base 100: mod_base = OTHER; note = 2'-O-methyl ribonucleotide
  modified_base 9: mod_base = OTHER; note = nebularine
  modified_base 1..4: mod_base = OTHER; note = phosphorothioate linkage
  modified_base 98..100: mod_base = OTHER; note = phosphorothioate linkage
  misc_feature 1: note = RNA
  misc_feature 2: note = RNA
  misc_feature 3: note = RNA
  misc_feature 4: note = RNA
  misc_feature 5: note = RNA
  misc_feature 6: note = RNA
  misc_feature 7: note = RNA
  misc_feature 8: note = RNA
  misc_feature 10: note = RNA
  misc_feature 11: note = RNA
  misc_feature 12: note = RNA
  misc_feature 13: note = RNA
  misc_feature 14: note = RNA
  misc_feature 15: note = RNA
  misc_feature 16: note = RNA
  misc_feature 17: note = RNA
  misc_feature 18: note = RNA
  misc_feature 19: note = RNA
  misc_feature 20: note = RNA
  misc_feature 21: note = RNA
  misc_feature 22: note = RNA
  misc_feature 23: note = RNA
  misc_feature 24: note = RNA
  misc_feature 25: note = RNA
  misc_feature 26: note = RNA
  misc_feature 27: note = RNA
  misc_feature 28: note = RNA
  misc_feature 29: note = RNA
  misc_feature 30: note = RNA
  misc_feature 31: note = RNA
  misc_feature 32: note = RNA
  misc_feature 33: note = RNA
  misc_feature 34: note = RNA
  misc_feature 35: note = RNA
  misc_feature 36: note = RNA
  misc_feature 37: note = RNA
  misc_feature 38: note = RNA
  misc_feature 39: note = RNA
  misc_feature 40: note = RNA
  misc_feature 41: note = RNA
  misc_feature 42: note = RNA
  misc_feature 43: note = RNA
  misc_feature 44: note = RNA
  misc_feature 45: note = RNA
  misc_feature 46: note = RNA
  misc_feature 47: note = RNA
  misc_feature 48: note = RNA
  misc_feature 49: note = RNA
  misc_feature 50: note = RNA
  misc_feature 51: note = RNA
  misc_feature 52: note = RNA
  misc_feature 53: note = RNA
  misc_feature 54: note = RNA
  misc_feature 55: note = RNA
  misc_feature 56: note = RNA
  misc_feature 57: note = RNA
  misc_feature 58: note = RNA
  misc_feature 59: note = RNA
  misc_feature 60: note = RNA
  misc_feature 61: note = RNA
  misc_feature 62: note = RNA
  misc_feature 63: note = RNA
  misc_feature 64: note = RNA
  misc_feature 65: note = RNA
  misc_feature 66: note = RNA
  misc_feature 67: note = RNA
  misc_feature 68: note = RNA
  misc_feature 69: note = RNA
  misc_feature 70: note = RNA
  misc_feature 71: note = RNA
  misc_feature 72: note = RNA
  misc_feature 73: note = RNA
  misc_feature 74: note = RNA
  misc_feature 75: note = RNA
  misc_feature 76: note = RNA
  misc_feature 77: note = RNA
  misc_feature 78: note = RNA
  misc_feature 79: note = RNA
  misc_feature 80: note = RNA
  misc_feature 81: note = RNA
  misc_feature 82: note = RNA
  misc_feature 83: note = RNA
  misc_feature 84: note = RNA
  misc_feature 85: note = RNA
  misc_feature 86: note = RNA
  misc_feature 87: note = RNA
  misc_feature 88: note = RNA
  misc_feature 89: note = RNA
  misc_feature 90: note = RNA
  misc_feature 91: note = RNA
  misc_feature 92: note = RNA
  misc_feature 93: note = RNA
  misc_feature 94: note = RNA
  misc_feature 95: note = RNA
  misc_feature 96: note = RNA
  misc_feature 97: note = RNA
  misc_feature 98: note = RNA
  misc_feature 99: note = RNA
  misc_feature 100: note = RNA
  misc_feature 9: note = DNA

SEQ ID NO: 2050 - DNA, 100 bp, synthetic construct; identical to SEQ ID NO: 1943
  source 1..100: mol_type = other DNA
  modified_base 1: mod_base = OTHER; note = 2'-O-methyl ribonucleotide
  modified_base 2: mod_base = OTHER; note = 2'-O-methyl ribonucleotide
  modified_base 3: mod_base = OTHER; note = 2'-O-methyl ribonucleotide
  modified_base 21: mod_base = OTHER; note = 2'-O-methyl ribonucleotide
  modified_base 28: mod_base = OTHER; note = 2'-O-methyl ribonucleotide
  modified_base 29: mod_base = OTHER; note = 2'-O-methyl ribonucleotide
  modified_base 30: mod_base = OTHER; note = 2'-O-methyl ribonucleotide
  modified_base 31: mod_base = OTHER; note = 2'-O-methyl ribonucleotide
  modified_base 32: mod_base = OTHER; note = 2'-O-methyl ribonucleotide
  modified_base 33: mod_base = OTHER; note = 2'-O-methyl ribonucleotide
  modified_base 34: mod_base = OTHER; note = 2'-O-methyl ribonucleotide
  modified_base 35: mod_base = OTHER; note = 2'-O-methyl ribonucleotide
  modified_base 36: mod_base = OTHER; note = 2'-O-methyl ribonucleotide
  modified_base 37: mod_base = OTHER; note = 2'-O-methyl ribonucleotide
  modified_base 38: mod_base = OTHER; note = 2'-O-methyl ribonucleotide
  modified_base 39: mod_base = OTHER; note = 2'-O-methyl ribonucleotide
  modified_base 40: mod_base = OTHER; note = 2'-O-methyl ribonucleotide
  modified_base 41: mod_base = OTHER; note = 2'-O-methyl ribonucleotide
  modified_base 42: mod_base = OTHER; note = 2'-O-methyl ribonucleotide
  modified_base 46: mod_base = OTHER; note = 2'-O-methyl ribonucleotide
  modified_base 48: mod_base = OTHER; note = 2'-O-methyl ribonucleotide
  modified_base 50: mod_base = OTHER; note = 2'-O-methyl ribonucleotide
  modified_base 52: mod_base = OTHER; note = 2'-O-methyl ribonucleotide
  modified_base 53: mod_base = OTHER; note = 2'-O-methyl ribonucleotide
  modified_base 54: mod_base = OTHER; note = 2'-O-methyl ribonucleotide
  modified_base 55: mod_base = OTHER; note = 2'-O-methyl ribonucleotide
  modified_base 56: mod_base = OTHER; note = 2'-O-methyl ribonucleotide
  modified_base 57: mod_base = OTHER; note = 2'-O-methyl ribonucleotide
  modified_base 60: mod_base = OTHER; note = 2'-O-methyl ribonucleotide
  modified_base 61: mod_base = OTHER; note = 2'-O-methyl ribonucleotide
  modified_base 66: mod_base = OTHER; note = 2'-O-methyl ribonucleotide
  modified_base 67: mod_base = OTHER; note = 2'-O-methyl ribonucleotide
  modified_base 70: mod_base = OTHER; note = 2'-O-methyl ribonucleotide
  modified_base 71: mod_base = OTHER; note = 2'-O-methyl ribonucleotide
  modified_base 72: mod_base = OTHER; note = 2'-O-methyl ribonucleotide
  modified_base 73: mod_base = OTHER; note = 2'-O-methyl ribonucleotide
  modified_base 74: mod_base = OTHER; note = 2'-O-methyl ribonucleotide
  modified_base 75: mod_base = OTHER; note = 2'-O-methyl ribonucleotide
  modified_base 76: mod_base = OTHER; note = 2'-O-methyl ribonucleotide
  modified_base 77: mod_base = OTHER; note = 2'-O-methyl ribonucleotide
  modified_base 78: mod_base = OTHER; note = 2'-O-methyl ribonucleotide
  modified_base 79: mod_base = OTHER; note = 2'-O-methyl ribonucleotide
  modified_base 80: mod_base = OTHER; note = 2'-O-methyl ribonucleotide
  modified_base 81: mod_base = OTHER; note = 2'-O-methyl ribonucleotide
  modified_base 83: mod_base = OTHER; note = 2'-O-methyl ribonucleotide
  modified_base 84: mod_base = OTHER; note = 2'-O-methyl ribonucleotide
  modified_base 85: mod_base = OTHER; note = 2'-O-methyl ribonucleotide
  modified_base 86: mod_base = OTHER; note = 2'-O-methyl ribonucleotide
  modified_base 87: mod_base = OTHER; note = 2'-O-methyl ribonucleotide
  modified_base 88: mod_base = OTHER; note = 2'-O-methyl ribonucleotide
  modified_base 89: mod_base = OTHER; note = 2'-O-methyl ribonucleotide
  modified_base 90: mod_base = OTHER; note = 2'-O-methyl ribonucleotide
  modified_base 91: mod_base = OTHER; note = 2'-O-methyl ribonucleotide
  modified_base 92: mod_base = OTHER; note = 2'-O-methyl ribonucleotide
  modified_base 93: mod_base = OTHER; note = 2'-O-methyl ribonucleotide
  modified_base 94: mod_base = OTHER; note = 2'-O-methyl ribonucleotide
  modified_base 95: mod_base = OTHER; note = 2'-O-methyl ribonucleotide
  modified_base 96: mod_base = OTHER; note = 2'-O-methyl ribonucleotide
  modified_base 97: mod_base = OTHER; note = 2'-O-methyl ribonucleotide
  modified_base 98: mod_base = OTHER; note = 2'-O-methyl ribonucleotide
  modified_base 99: mod_base = OTHER; note = 2'-O-methyl ribonucleotide
  modified_base 100: mod_base = OTHER; note = 2'-O-methyl ribonucleotide
  modified_base 14: mod_base = OTHER; note = nebularine
  modified_base 1..4: mod_base = OTHER; note = phosphorothioate linkage
  modified_base 98..100: mod_base = OTHER; note = phosphorothioate linkage
  misc_feature 1: note = RNA
  misc_feature 2: note = RNA
  misc_feature 3: note = RNA
  misc_feature 4: note = RNA
  misc_feature 5: note = RNA
  misc_feature 6: note = RNA
  misc_feature 7: note = RNA
  misc_feature 8: note = RNA
  misc_feature 9: note = RNA
  misc_feature 10: note = RNA
  misc_feature 11: note = RNA
  misc_feature 12: note = RNA
  misc_feature 13: note = RNA
  misc_feature 15: note = RNA
  misc_feature 16: note = RNA
  misc_feature 17: note = RNA
  misc_feature 18: note = RNA
  misc_feature 19: note = RNA
  misc_feature 20: note = RNA
  misc_feature 21: note = RNA
  misc_feature 22: note = RNA
  misc_feature 23: note = RNA
  misc_feature 24: note = RNA
  misc_feature 25: note = RNA
  misc_feature 26: note = RNA
  misc_feature 27: note = RNA
  misc_feature 28: note = RNA
  misc_feature 29: note = RNA
  misc_feature 30: note = RNA
  misc_feature 31: note = RNA
  misc_feature 32: note = RNA
  misc_feature 33: note = RNA
  misc_feature 34: note = RNA
  misc_feature 35: note = RNA
  misc_feature 36: note = RNA
  misc_feature 37: note = RNA
  misc_feature 38: note = RNA
  misc_feature 39: note = RNA
  misc_feature 40: note = RNA
  misc_feature 41: note = RNA
  misc_feature 42: note = RNA
  misc_feature 43: note = RNA
  misc_feature 44: note = RNA
  misc_feature 45: note = RNA
  misc_feature 46: note = RNA
  misc_feature 47: note = RNA
  misc_feature 48: note = RNA
  misc_feature 49: note = RNA
  misc_feature 50: note = RNA
  misc_feature 51: note = RNA
  misc_feature 52: note = RNA
  misc_feature 53: note = RNA
  misc_feature 54: note = RNA
  misc_feature 55: note = RNA
  misc_feature 56: note = RNA
  misc_feature 57: note = RNA
  misc_feature 58: note = RNA
  misc_feature 59: note = RNA
  misc_feature 60: note = RNA
  misc_feature 61: note = RNA
  misc_feature 62: note = RNA
  misc_feature 63: note = RNA
  misc_feature 64: note = RNA
  misc_feature 65: note = RNA
  misc_feature 66: note = RNA
  misc_feature 67: note = RNA
  misc_feature 68: note = RNA
  misc_feature 69: note = RNA
  misc_feature 70: note = RNA
  misc_feature 71: note = RNA
  misc_feature 72: note = RNA
  misc_feature 73: note = RNA
  misc_feature 74: note = RNA
  misc_feature 75: note = RNA
  misc_feature 76: note = RNA
  misc_feature 77: note = RNA
  misc_feature 78: note = RNA
  misc_feature 79: note = RNA
  misc_feature 80: note = RNA
  misc_feature 81: note = RNA
  misc_feature 82: note = RNA
  misc_feature 83: note = RNA
  misc_feature 84: note = RNA
  misc_feature 85: note = RNA
  misc_feature 86: note = RNA
  misc_feature 87: note = RNA
  misc_feature 88: note = RNA
  misc_feature 89: note = RNA
  misc_feature 90: note = RNA
  misc_feature 91: note = RNA
  misc_feature 92: note = RNA
  misc_feature 93: note = RNA
  misc_feature 94: note = RNA
  misc_feature 95: note = RNA
  misc_feature 96: note = RNA
  misc_feature 97: note = RNA
  misc_feature 98: note = RNA
  misc_feature 99: note = RNA
  misc_feature 100: note = RNA
  misc_feature 14: note = DNA

SEQ ID NO: 2051 - DNA, 100 bp, synthetic construct; identical to SEQ ID NO: 1944
  source 1..100: mol_type = other DNA
  modified_base 1: mod_base = OTHER; note = 2'-O-methyl ribonucleotide
  modified_base 2: mod_base = OTHER; note = 2'-O-methyl ribonucleotide
  modified_base 3: mod_base = OTHER; note = 2'-O-methyl ribonucleotide
  modified_base 21: mod_base = OTHER; note = 2'-O-methyl ribonucleotide
  modified_base 28: mod_base = OTHER; note = 2'-O-methyl ribonucleotide
  modified_base 29: mod_base = OTHER; note = 2'-O-methyl ribonucleotide
  modified_base 30: mod_base = OTHER; note = 2'-O-methyl ribonucleotide
  modified_base 31: mod_base = OTHER; note = 2'-O-methyl ribonucleotide
  modified_base 32: mod_base = OTHER; note = 2'-O-methyl ribonucleotide
  modified_base 33: mod_base = OTHER; note = 2'-O-methyl ribonucleotide
  modified_base 35: mod_base = OTHER; note = 2'-O-methyl ribonucleotide
  modified_base 36: mod_base = OTHER; note = 2'-O-methyl ribonucleotide
  modified_base 37: mod_base = OTHER; note = 2'-O-methyl ribonucleotide
  modified_base 38: mod_base = OTHER; note = 2'-O-methyl ribonucleotide
  modified_base 39: mod_base = OTHER; note = 2'-O-methyl ribonucleotide
  modified_base 40: mod_base = OTHER; note = 2'-O-methyl ribonucleotide
  modified_base 41: mod_base = OTHER; note = 2'-O-methyl ribonucleotide
  modified_base 42: mod_base = OTHER; note = 2'-O-methyl ribonucleotide
  modified_base 46: mod_base = OTHER; note = 2'-O-methyl ribonucleotide
  modified_base 48: mod_base = OTHER; note = 2'-O-methyl ribonucleotide
  modified_base 50: mod_base = OTHER; note = 2'-O-methyl ribonucleotide
  modified_base 52: mod_base = OTHER; note = 2'-O-methyl ribonucleotide
  modified_base 53: mod_base = OTHER; note = 2'-O-methyl ribonucleotide
  modified_base 54: mod_base = OTHER; note = 2'-O-methyl ribonucleotide
  modified_base 55: mod_base = OTHER; note = 2'-O-methyl ribonucleotide
  modified_base 56: mod_base = OTHER; note = 2'-O-methyl ribonucleotide
  modified_base 57: mod_base = OTHER; note = 2'-O-methyl ribonucleotide
  modified_base 60: mod_base = OTHER; note = 2'-O-methyl ribonucleotide
  modified_base 61: mod_base = OTHER; note = 2'-O-methyl ribonucleotide
  modified_base 66: mod_base = OTHER; note = 2'-O-methyl ribonucleotide
  modified_base 67: mod_base = OTHER; note = 2'-O-methyl ribonucleotide
  modified_base 70: mod_base = OTHER; note = 2'-O-methyl ribonucleotide
  modified_base 71: mod_base = OTHER; note = 2'-O-methyl ribonucleotide
  modified_base 72: mod_base = OTHER; note = 2'-O-methyl ribonucleotide
  modified_base 73: mod_base = OTHER; note = 2'-O-methyl ribonucleotide
  modified_base 74: mod_base = OTHER; note = 2'-O-methyl ribonucleotide
  modified_base 75: mod_base = OTHER; note = 2'-O-methyl ribonucleotide
  modified_base 76: mod_base = OTHER; note = 2'-O-methyl ribonucleotide
  modified_base 77: mod_base = OTHER; note = 2'-O-methyl ribonucleotide
  modified_base 78: mod_base = OTHER; note = 2'-O-methyl ribonucleotide
  modified_base 79: mod_base = OTHER; note = 2'-O-methyl ribonucleotide
  modified_base 80: mod_base = OTHER; note = 2'-O-methyl ribonucleotide
  modified_base 81: mod_base = OTHER; note = 2'-O-methyl ribonucleotide
  modified_base 83: mod_base = OTHER; note = 2'-O-methyl ribonucleotide
  modified_base 84: mod_base = OTHER; note = 2'-O-methyl ribonucleotide
  modified_base 85: mod_base = OTHER; note = 2'-O-methyl ribonucleotide
  modified_base 86: mod_base = OTHER; note = 2'-O-methyl ribonucleotide
  modified_base 87: mod_base = OTHER; note = 2'-O-methyl ribonucleotide
  modified_base 88: mod_base = OTHER; note = 2'-O-methyl ribonucleotide
  modified_base 89: mod_base = OTHER; note = 2'-O-methyl ribonucleotide
  modified_base 90: mod_base = OTHER; note = 2'-O-methyl ribonucleotide
  modified_base 91: mod_base = OTHER; note = 2'-O-methyl ribonucleotide
  modified_base 92: mod_base = OTHER; note = 2'-O-methyl ribonucleotide
  modified_base 93: mod_base = OTHER; note = 2'-O-methyl ribonucleotide
  modified_base 94: mod_base = OTHER; note = 2'-O-methyl ribonucleotide
  modified_base 95: mod_base = OTHER; note = 2'-O-methyl ribonucleotide
  modified_base 96: mod_base = OTHER; note = 2'-O-methyl ribonucleotide
  modified_base 97: mod_base = OTHER; note = 2'-O-methyl ribonucleotide
  modified_base 98: mod_base = OTHER; note = 2'-O-methyl ribonucleotide
  modified_base 99: mod_base = OTHER; note = 2'-O-methyl ribonucleotide
  modified_base 100: mod_base = OTHER; note = 2'-O-methyl ribonucleotide
  modified_base 34: mod_base = OTHER; note = nebularine
  modified_base 1..4: mod_base = OTHER; note = phosphorothioate linkage
  modified_base 98..100: mod_base = OTHER; note = phosphorothioate linkage
  misc_feature 1: note = RNA
  misc_feature 2: note = RNA
  misc_feature 3: note = RNA
  misc_feature 4: note = RNA
  misc_feature 5: note = RNA
  misc_feature 6: note = RNA
  misc_feature 7: note = RNA
  misc_feature 8: note = RNA
  misc_feature 9: note = RNA
  misc_feature 10: note = RNA
  misc_feature 11: note = RNA
  misc_feature 12: note = RNA
  misc_feature 13: note = RNA
  misc_feature 14: note = RNA
  misc_feature 15: note = RNA
  misc_feature 16: note = RNA
  misc_feature 17: note = RNA
  misc_feature 18: note = RNA
  misc_feature 19: note = RNA
  misc_feature 20: note = RNA
  misc_feature 21: note = RNA
  misc_feature 22: note = RNA
  misc_feature 23: note = RNA
  misc_feature 24: note = RNA
  misc_feature 25: note = RNA
  misc_feature 26: note = RNA
  misc_feature 27: note = RNA
  misc_feature 28: note = RNA
  misc_feature 29: note = RNA
  misc_feature 30: note = RNA
  misc_feature 31: note = RNA
  misc_feature 32: note = RNA
  misc_feature 33: note = RNA
  misc_feature 35: note = RNA
  misc_feature 36: note = RNA
  misc_feature 37: note = RNA
  misc_feature 38: note = RNA
  misc_feature 39: note = RNA
  misc_feature 40: note = RNA
  misc_feature 41: note = RNA
  misc_feature 42: note = RNA
  misc_feature 43: note = RNA
  misc_feature 44: note = RNA
  misc_feature 45: note = RNA
  misc_feature 46: note = RNA
  misc_feature 47: note = RNA
  misc_feature 48: note = RNA
  misc_feature 49: note = RNA
  misc_feature 50: note = RNA
  misc_feature 51: note = RNA
  misc_feature 52: note = RNA
  misc_feature 53: note = RNA
  misc_feature 54: note = RNA
  misc_feature 55: note = RNA
  misc_feature 56: note = RNA
  misc_feature 57: note = RNA
  misc_feature 58: note = RNA
  misc_feature 59: note = RNA
  misc_feature 60: note = RNA
  misc_feature 61: note = RNA
  misc_feature 62: note = RNA
  misc_feature 63: note = RNA
  misc_feature 64: note = RNA
  misc_feature 65: note = RNA
  misc_feature 66: note = RNA
  misc_feature 67: note = RNA
  misc_feature 68: note = RNA
  misc_feature 69: note = RNA
  misc_feature 70: note = RNA
  misc_feature 71: note = RNA
  misc_feature 72: note = RNA
  misc_feature 73: note = RNA
  misc_feature 74: note = RNA
  misc_feature 75: note = RNA
  misc_feature 76: note = RNA
  misc_feature 77: note = RNA
  misc_feature 78: note = RNA
  misc_feature 79: note = RNA
  misc_feature 80: note = RNA
  misc_feature 81: note = RNA
  misc_feature 82: note = RNA
  misc_feature 83: note = RNA
  misc_feature 84: note = RNA
  misc_feature 85: note = RNA
  misc_feature 86: note = RNA
  misc_feature 87: note = RNA
  misc_feature 88: note = RNA
  misc_feature 89: note = RNA
  misc_feature 90: note = RNA
  misc_feature 91: note = RNA
  misc_feature 92: note = RNA
  misc_feature 93: note = RNA
  misc_feature 94: note = RNA
  misc_feature 95: note = RNA
  misc_feature 96: note = RNA
  misc_feature 97: note = RNA
  misc_feature 98: note = RNA
  misc_feature 99: note = RNA
  misc_feature 100: note = RNA
  misc_feature 34: note = DNA

SEQ ID NO: 2052 - DNA, 100 bp, synthetic construct; identical to SEQ ID NO: 1945
  source 1..100: mol_type = other DNA
  modified_base 1: mod_base = OTHER; note = 2'-O-methyl ribonucleotide
  modified_base 2: mod_base = OTHER; note = 2'-O-methyl ribonucleotide
  modified_base 3: mod_base = OTHER; note = 2'-O-methyl ribonucleotide
  modified_base 21: mod_base = OTHER; note = 2'-O-methyl ribonucleotide
  modified_base 28: mod_base = OTHER; note = 2'-O-methyl ribonucleotide
  modified_base 29: mod_base = OTHER; note = 2'-O-methyl ribonucleotide
  modified_base 30: mod_base = OTHER; note = 2'-O-methyl ribonucleotide
  modified_base 31: mod_base = OTHER; note = 2'-O-methyl ribonucleotide
  modified_base 32: mod_base = OTHER; note = 2'-O-methyl ribonucleotide
  modified_base 33: mod_base = OTHER; note = 2'-O-methyl ribonucleotide
  modified_base 35: mod_base = OTHER; note = 2'-O-methyl ribonucleotide
  modified_base 36: mod_base = OTHER; note = 2'-O-methyl ribonucleotide
  modified_base 37: mod_base = OTHER; note = 2'-O-methyl ribonucleotide
  modified_base 38: mod_base = OTHER; note = 2'-O-methyl ribonucleotide
  modified_base 39: mod_base = OTHER; note = 2'-O-methyl ribonucleotide
  modified_base 40: mod_base = OTHER; note = 2'-O-methyl ribonucleotide
  modified_base 41: mod_base = OTHER; note = 2'-O-methyl ribonucleotide
  modified_base 42: mod_base = OTHER; note = 2'-O-methyl ribonucleotide
  modified_base 46: mod_base = OTHER; note = 2'-O-methyl ribonucleotide
  modified_base 48: mod_base = OTHER; note = 2'-O-methyl ribonucleotide
  modified_base 50: mod_base = OTHER; note = 2'-O-methyl ribonucleotide
  modified_base 52: mod_base = OTHER; note = 2'-O-methyl ribonucleotide
  modified_base 53: mod_base = OTHER; note = 2'-O-methyl ribonucleotide
  modified_base 54: mod_base = OTHER; note = 2'-O-methyl ribonucleotide
  modified_base 55: mod_base = OTHER; note = 2'-O-methyl ribonucleotide
  modified_base 56: mod_base = OTHER; note = 2'-O-methyl ribonucleotide
  modified_base 60: mod_base = OTHER; note = 2'-O-methyl ribonucleotide
  modified_base 61: mod_base = OTHER; note = 2'-O-methyl ribonucleotide
  modified_base 66: mod_base = OTHER; note = 2'-O-methyl ribonucleotide
  modified_base 67: mod_base = OTHER; note = 2'-O-methyl ribonucleotide
  modified_base 70: mod_base = OTHER; note = 2'-O-methyl ribonucleotide
  modified_base 71: mod_base = OTHER; note = 2'-O-methyl ribonucleotide
  modified_base 72: mod_base = OTHER; note = 2'-O-methyl ribonucleotide
  modified_base 73: mod_base = OTHER; note = 2'-O-methyl ribonucleotide
  modified_base 74: mod_base = OTHER; note = 2'-O-methyl ribonucleotide
  modified_base 75: mod_base = OTHER; note = 2'-O-methyl ribonucleotide
  modified_base 76: mod_base = OTHER; note = 2'-O-methyl ribonucleotide
  modified_base 77: mod_base = OTHER; note = 2'-O-methyl ribonucleotide
  modified_base 78: mod_base = OTHER; note = 2'-O-methyl ribonucleotide
  modified_base 79: mod_base = OTHER; note = 2'-O-methyl ribonucleotide
  modified_base 80: mod_base = OTHER; note = 2'-O-methyl ribonucleotide
  modified_base 81: mod_base = OTHER; note = 2'-O-methyl ribonucleotide
  modified_base 83: mod_base = OTHER; note = 2'-O-methyl ribonucleotide
  modified_base 84: mod_base = OTHER; note = 2'-O-methyl ribonucleotide
  modified_base 85: mod_base = OTHER; note = 2'-O-methyl ribonucleotide
  modified_base 86: mod_base = OTHER; note = 2'-O-methyl ribonucleotide
  modified_base 87: mod_base = OTHER; note = 2'-O-methyl ribonucleotide
  modified_base 88: mod_base = OTHER; note = 2'-O-methyl ribonucleotide
  modified_base 89: mod_base = OTHER; note = 2'-O-methyl ribonucleotide
  modified_base 90: mod_base = OTHER; note = 2'-O-methyl ribonucleotide
  modified_base 91: mod_base = OTHER; note = 2'-O-methyl ribonucleotide
  modified_base 92: mod_base = OTHER; note = 2'-O-methyl ribonucleotide
  modified_base 93: mod_base = OTHER; note = 2'-O-methyl ribonucleotide
  modified_base 94: mod_base = OTHER; note = 2'-O-methyl ribonucleotide
  modified_base 95: mod_base = OTHER; note = 2'-O-methyl ribonucleotide
  modified_base 96: mod_base = OTHER; note = 2'-O-methyl ribonucleotide
  modified_base 97: mod_base = OTHER; note = 2'-O-methyl ribonucleotide
  modified_base 98: mod_base = OTHER; note = 2'-O-methyl ribonucleotide
  modified_base 99: mod_base = OTHER; note = 2'-O-methyl ribonucleotide
  modified_base 100: mod_base = OTHER; note = 2'-O-methyl ribonucleotide
  modified_base 34: mod_base = OTHER; note = nebularine
  modified_base 57: mod_base = OTHER; note = nebularine
  modified_base 1..4: mod_base = OTHER; note = phosphorothioate linkage
  modified_base 98..100: mod_base = OTHER; note = phosphorothioate linkage
  misc_feature 1: note = RNA
  misc_feature 2: note = RNA
  misc_feature 3: note = RNA
  misc_feature 4: note = RNA
  misc_feature 5: note = RNA
  misc_feature 6: note = RNA
  misc_feature 7: note = RNA
  misc_feature 8: note = RNA
  misc_feature 9: note = RNA
  misc_feature 10: note = RNA
  misc_feature 11: note = RNA
  misc_feature 12: note = RNA
  misc_feature 13: note = RNA
  misc_feature 14: note = RNA
  misc_feature 15: note = RNA
  misc_feature 16: note = RNA
  misc_feature 17: note = RNA
  misc_feature 18: note = RNA
  misc_feature 19: note = RNA
  misc_feature 20: note = RNA
  misc_feature 21: note = RNA
  misc_feature 22: note = RNA
  misc_feature 23: note = RNA
  misc_feature 24: note = RNA
  misc_feature 25: note = RNA
  misc_feature 26: note = RNA
  misc_feature 27: note = RNA
  misc_feature 28: note = RNA
  misc_feature 29: note = RNA
  misc_feature 30: note = RNA
  misc_feature 31: note = RNA
  misc_feature 32: note = RNA
  misc_feature 33: note = RNA
  misc_feature 35: note = RNA
  misc_feature 36: note = RNA
  misc_feature 37: note = RNA
  misc_feature 38: note = RNA
  misc_feature 39: note = RNA
  misc_feature 40: note = RNA
  misc_feature 41: note = RNA
  misc_feature 42: note = RNA
  misc_feature 43: note = RNA
  misc_feature 44: note = RNA
  misc_feature 45: note = RNA
  misc_feature 46: note = RNA
  misc_feature 47: note = RNA
  misc_feature 48: note = RNA
  misc_feature 49: note = RNA
  misc_feature 50: note = RNA
  misc_feature 51: note = RNA
  misc_feature 52: note = RNA
  misc_feature 53: note = RNA
  misc_feature 54: note = RNA
  misc_feature 55: note = RNA
  misc_feature 56: note = RNA
  misc_feature 58: note = RNA
  misc_feature 59: note = RNA
  misc_feature 60: note = RNA
  misc_feature 61: note = RNA
  misc_feature 62: note = RNA
  misc_feature 63: note = RNA
  misc_feature 64: note = RNA
  misc_feature 65: note = RNA
  misc_feature 66: note = RNA
  misc_feature 67: note = RNA
  misc_feature 68: note = RNA
  misc_feature 69: note = RNA
  misc_feature 70: note = RNA
  misc_feature 71: note = RNA
  misc_feature 72: note = RNA
  misc_feature 73: note = RNA
  misc_feature 74: note = RNA
  misc_feature 75: note = RNA
  misc_feature 76: note = RNA
  misc_feature 77: note = RNA
  misc_feature 78: note = RNA
  misc_feature 79: note = RNA
  misc_feature 80: note = RNA
  misc_feature 81: note = RNA
  misc_feature 82: note = RNA
  misc_feature 83: note = RNA
  misc_feature 84: note = RNA
  misc_feature 85: note = RNA
  misc_feature 86: note = RNA
  misc_feature 87: note = RNA
  misc_feature 88: note = RNA
  misc_feature 89: note = RNA
  misc_feature 90: note = RNA
  misc_feature 91: note = RNA
  misc_feature 92: note = RNA
  misc_feature 93: note = RNA
  misc_feature 94: note = RNA
  misc_feature 95: note = RNA
  misc_feature 96: note = RNA
  misc_feature 97: note = RNA
  misc_feature 98: note = RNA
  misc_feature 99: note = RNA
  misc_feature 100: note = RNA
  misc_feature 34: note = DNA
  misc_feature 57: note = DNA

SEQ ID NO: 2053 - DNA, 100 bp, synthetic construct; identical to SEQ ID NO: 1946
  source 1..100: mol_type = other DNA
  modified_base 1: mod_base = OTHER; note = 2'-O-methyl ribonucleotide
  modified_base 2: mod_base = OTHER; note = 2'-O-methyl ribonucleotide
  modified_base 3: mod_base = OTHER; note = 2'-O-methyl ribonucleotide
  modified_base 21: mod_base = OTHER; note = 2'-O-methyl ribonucleotide
  modified_base 28: mod_base = OTHER; note = 2'-O-methyl ribonucleotide
  modified_base 29: mod_base = OTHER; note = 2'-O-methyl ribonucleotide
  modified_base 30: mod_base = OTHER; note = 2'-O-methyl ribonucleotide
  modified_base 31: mod_base = OTHER; note = 2'-O-methyl ribonucleotide
  modified_base 32: mod_base = OTHER; note = 2'-O-methyl ribonucleotide
  modified_base 33: mod_base = OTHER; note = 2'-O-methyl ribonucleotide
  modified_base 34: mod_base = OTHER; note = 2'-O-methyl ribonucleotide
  modified_base 35: mod_base = OTHER; note = 2'-O-methyl ribonucleotide
  modified_base 36: mod_base = OTHER; note = 2'-O-methyl ribonucleotide
  modified_base 37: mod_base = OTHER; note = 2'-O-methyl ribonucleotide
  modified_base 38: mod_base = OTHER; note = 2'-O-methyl ribonucleotide
  modified_base 39: mod_base = OTHER; note = 2'-O-methyl ribonucleotide
  modified_base 40: mod_base = OTHER; note = 2'-O-methyl ribonucleotide
  modified_base 41: mod_base = OTHER; note = 2'-O-methyl ribonucleotide
  modified_base 42: mod_base = OTHER; note = 2'-O-methyl ribonucleotide
  modified_base 46: mod_base = OTHER; note = 2'-O-methyl ribonucleotide
  modified_base 48: mod_base = OTHER; note = 2'-O-methyl ribonucleotide
  modified_base 50: mod_base = OTHER; note = 2'-O-methyl ribonucleotide
  modified_base 52: mod_base = OTHER; note = 2'-O-methyl ribonucleotide
  modified_base 53: mod_base = OTHER; note = 2'-O-methyl ribonucleotide
  modified_base 54: mod_base = OTHER; note = 2'-O-methyl ribonucleotide
  modified_base 55: mod_base = OTHER; note = 2'-O-methyl ribonucleotide
  modified_base 56: mod_base = OTHER; note = 2'-O-methyl ribonucleotide
  modified_base 60: mod_base = OTHER; note = 2'-O-methyl ribonucleotide
  modified_base 61: mod_base = OTHER; note = 2'-O-methyl ribonucleotide
  modified_base 66: mod_base = OTHER; note = 2'-O-methyl ribonucleotide
  modified_base 67: mod_base = OTHER; note = 2'-O-methyl ribonucleotide
  modified_base 70: mod_base = OTHER; note = 2'-O-methyl ribonucleotide
  modified_base 71: mod_base = OTHER; note = 2'-O-methyl ribonucleotide
  modified_base 72: mod_base = OTHER; note = 2'-O-methyl ribonucleotide
  modified_base 73: mod_base = OTHER; note = 2'-O-methyl ribonucleotide
  modified_base 74: mod_base = OTHER; note = 2'-O-methyl ribonucleotide
  modified_base 75: mod_base = OTHER; note = 2'-O-methyl ribonucleotide
  modified_base 76: mod_base = OTHER; note = 2'-O-methyl ribonucleotide
  modified_base 77: mod_base = OTHER; note = 2'-O-methyl ribonucleotide
  modified_base 78: mod_base = OTHER; note = 2'-O-methyl ribonucleotide
  modified_base 79: mod_base = OTHER; note = 2'-O-methyl ribonucleotide
  modified_base 80: mod_base = OTHER; note = 2'-O-methyl ribonucleotide
  modified_base 81: mod_base = OTHER; note = 2'-O-methyl ribonucleotide
  modified_base 83: mod_base = OTHER; note = 2'-O-methyl ribonucleotide
  modified_base 84: mod_base = OTHER; note = 2'-O-methyl ribonucleotide
  modified_base 85: mod_base = OTHER; note = 2'-O-methyl ribonucleotide
  modified_base 86: mod_base = OTHER; note = 2'-O-methyl ribonucleotide
  modified_base 87: mod_base = OTHER; note = 2'-O-methyl ribonucleotide
  modified_base 88: mod_base = OTHER; note = 2'-O-methyl ribonucleotide
  modified_base 89: mod_base = OTHER; note = 2'-O-methyl ribonucleotide
  modified_base 90: mod_base = OTHER; note = 2'-O-methyl ribonucleotide
  modified_base 91: mod_base = OTHER; note = 2'-O-methyl ribonucleotide
  modified_base 92: mod_base = OTHER; note = 2'-O-methyl ribonucleotide
  modified_base 93: mod_base = OTHER; note = 2'-O-methyl ribonucleotide
  modified_base 94: mod_base = OTHER; note = 2'-O-methyl ribonucleotide
  modified_base 95: mod_base = OTHER; note = 2'-O-methyl ribonucleotide
  modified_base 96: mod_base = OTHER; note = 2'-O-methyl ribonucleotide
  modified_base 97: mod_base = OTHER; note = 2'-O-methyl ribonucleotide
  modified_base 98: mod_base = OTHER; note = 2'-O-methyl ribonucleotide
  modified_base 99: mod_base = OTHER; note = 2'-O-methyl ribonucleotide
  modified_base 100: mod_base = OTHER; note = 2'-O-methyl ribonucleotide
  modified_base 57: mod_base = OTHER; note = nebularine
  modified_base 1..4: mod_base = OTHER; note = phosphorothioate linkage
  modified_base 98..100: mod_base = OTHER; note = phosphorothioate linkage
  misc_feature 1: note = RNA
  misc_feature 2: note = RNA
  misc_feature 3: note = RNA
  misc_feature 4: note = RNA
  misc_feature 5: note = RNA
  misc_feature 6: note = RNA
  misc_feature 7: note = RNA
  misc_feature 8: note = RNA
  misc_feature 9: note = RNA
  misc_feature 10: note = RNA
  misc_feature 11: note = RNA
  misc_feature 12: note = RNA
  misc_feature 13: note = RNA
  misc_feature 14: note = RNA
  misc_feature 15: note = RNA
  misc_feature 16: note = RNA
  misc_feature 17: note = RNA
  misc_feature 18: note = RNA
  misc_feature 19: note = RNA
  misc_feature 20: note = RNA
  misc_feature 21: note = RNA
  misc_feature 22: note = RNA
  misc_feature 23: note = RNA
  misc_feature 24: note = RNA
  misc_feature 25: note = RNA
  misc_feature 26: note = RNA
  misc_feature 27: note = RNA
  misc_feature 28: note = RNA
  misc_feature 29: note = RNA
  misc_feature 30: note = RNA
  misc_feature 31: note = RNA
  misc_feature 32: note = RNA
  misc_feature 33: note = RNA
  misc_feature 34: note = RNA
  misc_feature 35: note = RNA
  misc_feature 36: note = RNA
  misc_feature 37: note = RNA
  misc_feature 38: note = RNA
  misc_feature 39: note = RNA
  misc_feature 40: note = RNA
  misc_feature 41: note = RNA
  misc_feature 42: note = RNA
  misc_feature 43: note = RNA
  misc_feature 44: note = RNA
  misc_feature 45: note = RNA
  misc_feature 46: note = RNA
  misc_feature 47: note = RNA
  misc_feature 48: note = RNA
  misc_feature 49: note = RNA
  misc_feature 50: note = RNA
  misc_feature 51: note = RNA
  misc_feature 52: note = RNA
  misc_feature 53: note = RNA
  misc_feature 54: note = RNA
  misc_feature 55: note = RNA
  misc_feature 56: note = RNA
  misc_feature 58: note = RNA
  misc_feature 59: note = RNA
  misc_feature 60: note = RNA
  misc_feature 61: note = RNA
  misc_feature 62: note = RNA
  misc_feature 63: note = RNA
  misc_feature 64: note = RNA
  misc_feature 65: note = RNA
  misc_feature 66: note = RNA
  misc_feature 67: note = RNA
  misc_feature 68: note = RNA
  misc_feature 69: note = RNA
  misc_feature 70: note = RNA
  misc_feature 71: note = RNA
  misc_feature 72: note = RNA
  misc_feature 73: note = RNA
  misc_feature 74: note = RNA
  misc_feature 75: note = RNA
  misc_feature 76: note = RNA
  misc_feature 77: note = RNA
  misc_feature 78: note = RNA
  misc_feature 79: note = RNA
  misc_feature 80: note = RNA
  misc_feature 81: note = RNA
  misc_feature 82: note = RNA
  misc_feature 83: note = RNA
  misc_feature 84: note = RNA
  misc_feature 85: note = RNA
  misc_feature 86: note = RNA
  misc_feature 87: note = RNA
  misc_feature 88: note = RNA
  misc_feature 89: note = RNA
  misc_feature 90: note = RNA
  misc_feature 91: note = RNA
  misc_feature 92: note = RNA
  misc_feature 93: note = RNA
  misc_feature 94: note = RNA
  misc_feature 95: note = RNA
  misc_feature 96: note = RNA
  misc_feature 97: note = RNA
  misc_feature 98: note = RNA
  misc_feature 99: note = RNA
  misc_feature 100: note = RNA
  misc_feature 57: note = DNA

SEQ ID NO: 2054 - DNA, 100 bp, synthetic construct; identical to SEQ ID NO: 1947
  source 1..100: mol_type = other DNA
  modified_base 1: mod_base = OTHER; note = 2'-O-methyl ribonucleotide
  modified_base 2: mod_base = OTHER; note = 2'-O-methyl ribonucleotide
  modified_base 3: mod_base = OTHER; note = 2'-O-methyl ribonucleotide
  modified_base 21: mod_base = OTHER; note = 2'-O-methyl ribonucleotide
  modified_base 28: mod_base = OTHER; note = 2'-O-methyl ribonucleotide
  modified_base 29: mod_base = OTHER; note = 2'-O-methyl ribonucleotide
  modified_base 30: mod_base = OTHER; note = 2'-O-methyl ribonucleotide
  modified_base 31: mod_base = OTHER; note = 2'-O-methyl ribonucleotide
  modified_base 32: mod_base = OTHER; note = 2'-O-methyl ribonucleotide
  modified_base 33: mod_base = OTHER; note = 2'-O-methyl ribonucleotide
  modified_base 34: mod_base = OTHER; note = 2'-O-methyl ribonucleotide
  modified_base 35: mod_base = OTHER; note = 2'-O-methyl ribonucleotide
  modified_base 36: mod_base = OTHER; note = 2'-O-methyl ribonucleotide
  modified_base 37: mod_base = OTHER; note = 2'-O-methyl ribonucleotide
  modified_base 38: mod_base = OTHER; note = 2'-O-methyl ribonucleotide
  modified_base 39: mod_base = OTHER; note = 2'-O-methyl ribonucleotide
  modified_base 40: mod_base = OTHER; note = 2'-O-methyl ribonucleotide
  modified_base 41: mod_base = OTHER; note = 2'-O-methyl ribonucleotide
  modified_base 42: mod_base = OTHER; note = 2'-O-methyl ribonucleotide
  modified_base 46: mod_base = OTHER; note = 2'-O-methyl ribonucleotide
  modified_base 48: mod_base = OTHER; note = 2'-O-methyl ribonucleotide
  modified_base 50: mod_base = OTHER; note = 2'-O-methyl ribonucleotide
  modified_base 52: mod_base = OTHER; note = 2'-O-methyl ribonucleotide
  modified_base 53: mod_base = OTHER; note = 2'-O-methyl ribonucleotide
  modified_base 54: mod_base = OTHER; note = 2'-O-methyl ribonucleotide
  modified_base 55: mod_base = OTHER; note = 2'-O-methyl ribonucleotide
  modified_base 56: mod_base = OTHER; note = 2'-O-methyl ribonucleotide
  modified_base 57: mod_base = OTHER; note = 2'-O-methyl ribonucleotide
  modified_base 60: mod_base = OTHER; note = 2'-O-methyl ribonucleotide
  modified_base 61: mod_base = OTHER; note = 2'-O-methyl ribonucleotide
  modified_base 66: mod_base = OTHER; note = 2'-O-methyl ribonucleotide
  modified_base 67: mod_base = OTHER; note = 2'-O-methyl ribonucleotide
  modified_base 70: mod_base = OTHER; note = 2'-O-methyl ribonucleotide
  modified_base 71: mod_base = OTHER; note = 2'-O-methyl ribonucleotide
  modified_base 72: mod_base = OTHER; note = 2'-O-methyl ribonucleotide
  modified_base 73: mod_base = OTHER; note = 2'-O-methyl ribonucleotide
  modified_base 74: mod_base = OTHER; note = 2'-O-methyl ribonucleotide
  modified_base 75: mod_base = OTHER; note = 2'-O-methyl ribonucleotide
  modified_base 76: mod_base = OTHER; note = 2'-O-methyl ribonucleotide
  modified_base 77: mod_base = OTHER; note = 2'-O-methyl ribonucleotide
  modified_base 78: mod_base = OTHER; note = 2'-O-methyl ribonucleotide
  modified_base 79: mod_base = OTHER; note = 2'-O-methyl ribonucleotide
  modified_base 80: mod_base = OTHER; note = 2'-O-methyl ribonucleotide
  modified_base 81: mod_base = OTHER; note = 2'-O-methyl ribonucleotide
  modified_base 83: mod_base = OTHER; note = 2'-O-methyl ribonucleotide
  modified_base 84: mod_base = OTHER; note = 2'-O-methyl ribonucleotide
  modified_base 85: mod_base = OTHER; note = 2'-O-methyl ribonucleotide
  modified_base 86: mod_base = OTHER; note = 2'-O-methyl ribonucleotide
  modified_base 87: mod_base = OTHER; note = 2'-O-methyl ribonucleotide
  modified_base 88: mod_base = OTHER; note = 2'-O-methyl ribonucleotide
  modified_base 89: mod_base = OTHER; note = 2'-O-methyl ribonucleotide
  modified_base 90: mod_base = OTHER; note = 2'-O-methyl ribonucleotide
  modified_base 91: mod_base = OTHER; note = 2'-O-methyl ribonucleotide
  modified_base 92: mod_base = OTHER; note = 2'-O-methyl ribonucleotide
  modified_base 93: mod_base = OTHER; note = 2'-O-methyl ribonucleotide
  modified_base 94: mod_base = OTHER; note = 2'-O-methyl ribonucleotide
  modified_base 95: mod_base = OTHER; note = 2'-O-methyl ribonucleotide
  modified_base 96: mod_base = OTHER; note = 2'-O-methyl ribonucleotide
  modified_base 97: mod_base = OTHER; note = 2'-O-methyl ribonucleotide
  modified_base 98: mod_base = OTHER; note = 2'-O-methyl ribonucleotide
  modified_base 99: mod_base = OTHER; note = 2'-O-methyl ribonucleotide
  modified_base 100: mod_base = OTHER; note = 2'-O-methyl ribonucleotide
  modified_base 65: mod_base = OTHER; note = nebularine
  modified_base 1..4: mod_base = OTHER; note = phosphorothioate linkage
  modified_base 98..100: mod_base = OTHER; note = phosphorothioate linkage
  misc_feature 1: note = RNA
  misc_feature 2: note = RNA
  misc_feature 3: note = RNA
  misc_feature 4: note = RNA
  misc_feature 5: note = RNA
  misc_feature 6: note = RNA
  misc_feature 7: note = RNA
  misc_feature 8: note = RNA
  misc_feature 9: note = RNA
  misc_feature 10: note = RNA
  misc_feature 11: note = RNA
  misc_feature 12: note = RNA
  misc_feature 13: note = RNA
  misc_feature 14: note = RNA
  misc_feature 15: note = RNA
  misc_feature 16: note = RNA
  misc_feature 17: note = RNA
  misc_feature 18: note = RNA
  misc_feature 19: note = RNA
  misc_feature 20: note = RNA
  misc_feature 21: note = RNA
  misc_feature 22: note = RNA
  misc_feature 23: note = RNA
  misc_feature 24: note = RNA
  misc_feature 25: note = RNA
  misc_feature 26: note = RNA
  misc_feature 27: note = RNA
  misc_feature 28: note = RNA
  misc_feature 29: note = RNA
  misc_feature 30: note = RNA
  misc_feature 31: note = RNA
  misc_feature 32: note = RNA
  misc_feature 33: note = RNA
  misc_feature 34: note = RNA
  misc_feature 35: note = RNA
  misc_feature 36: note = RNA
  misc_feature 37: note = RNA
  misc_feature 38: note = RNA
  misc_feature 39: note = RNA
  misc_feature 40: note = RNA
  misc_feature 41: note = RNA
  misc_feature 42: note = RNA
  misc_feature 43: note = RNA
  misc_feature 44: note = RNA
  misc_feature 45: note = RNA
  misc_feature 46: note = RNA
  misc_feature 47: note = RNA
  misc_feature 48: note = RNA
  misc_feature 49: note = RNA
  misc_feature 50: note = RNA
  misc_feature 51: note = RNA
  misc_feature 52: note = RNA
  misc_feature 53: note = RNA
  misc_feature 54: note = RNA
  misc_feature 55: note = RNA
  misc_feature 56: note = RNA
  misc_feature 57: note = RNA
  misc_feature 58: note = RNA
  misc_feature 59: note = RNA
  misc_feature 60: note = RNA
  misc_feature 61: note = RNA
  misc_feature 62: note = RNA
  misc_feature 63: note = RNA
  misc_feature 64: note = RNA
  misc_feature 66: note = RNA
  misc_feature 67: note = RNA
  misc_feature 68: note = RNA
  misc_feature 69: note = RNA
  misc_feature 70: note = RNA
  misc_feature 71: note = RNA
  misc_feature 72: note = RNA
  misc_feature 73: note = RNA
  misc_feature 74: note = RNA
  misc_feature 75: note = RNA
  misc_feature 76: note = RNA
  misc_feature 77: note = RNA
  misc_feature 78: note = RNA
  misc_feature 79: note = RNA
  misc_feature 80: note = RNA
  misc_feature 81: note = RNA
  misc_feature 82: note = RNA
  misc_feature 83: note = RNA
  misc_feature 84: note = RNA
  misc_feature 85: note = RNA
  misc_feature 86: note = RNA
  misc_feature 87: note = RNA
  misc_feature 88: note = RNA
  misc_feature 89: note = RNA
  misc_feature 90: note = RNA
  misc_feature 91: note = RNA
  misc_feature 92: note = RNA
  misc_feature 93: note = RNA
  misc_feature 94: note = RNA
  misc_feature 95: note = RNA
  misc_feature 96: note = RNA
  misc_feature 97: note = RNA
  misc_feature 98: note = RNA
  misc_feature 99: note = RNA
  misc_feature 100: note = RNA
  misc_feature 65: note = DNA

SEQ ID NO: 2055 - DNA, 100 bp, synthetic construct; identical to SEQ ID NO: 1948
  source 1..100: mol_type = other DNA
  modified_base 1: mod_base = OTHER; note = 2'-O-methyl ribonucleotide
  modified_base 2: mod_base = OTHER; note = 2'-O-methyl ribonucleotide
  modified_base 3: mod_base = OTHER; note = 2'-O-methyl ribonucleotide
  modified_base 21: mod_base = OTHER; note = 2'-O-methyl ribonucleotide
  modified_base 28: mod_base = OTHER; note = 2'-O-methyl ribonucleotide
  modified_base 29: mod_base = OTHER; note = 2'-O-methyl ribonucleotide
  modified_base 30: mod_base = OTHER; note = 2'-O-methyl ribonucleotide
  modified_base 31: mod_base = OTHER; note = 2'-O-methyl ribonucleotide
  modified_base 32: mod_base = OTHER; note = 2'-O-methyl ribonucleotide
  modified_base 33: mod_base = OTHER; note = 2'-O-methyl ribonucleotide
  modified_base 35: mod_base = OTHER; note = 2'-O-methyl ribonucleotide
  modified_base 36: mod_base = OTHER; note = 2'-O-methyl ribonucleotide
  modified_base 37: mod_base = OTHER; note = 2'-O-methyl ribonucleotide
  modified_base 38: mod_base = OTHER; note = 2'-O-methyl ribonucleotide
  modified_base 39: mod_base = OTHER; note = 2'-O-methyl ribonucleotide
  modified_base 40: mod_base = OTHER; note = 2'-O-methyl ribonucleotide
  modified_base 41: mod_base = OTHER; note = 2'-O-methyl ribonucleotide
  modified_base 42: mod_base = OTHER; note = 2'-O-methyl ribonucleotide
  modified_base 46: mod_base = OTHER; note = 2'-O-methyl ribonucleotide
  modified_base 48: mod_base = OTHER; note = 2'-O-methyl ribonucleotide
  modified_base 50: mod_base = OTHER; note = 2'-O-methyl ribonucleotide
  modified_base 52: mod_base = OTHER; note = 2'-O-methyl ribonucleotide
  modified_base 53: mod_base = OTHER; note = 2'-O-methyl ribonucleotide
  modified_base 54: mod_base = OTHER; note = 2'-O-methyl ribonucleotide
  modified_base 55: mod_base = OTHER; note = 2'-O-methyl ribonucleotide
  modified_base 56: mod_base = OTHER; note = 2'-O-methyl ribonucleotide
  modified_base 60: mod_base = OTHER; note = 2'-O-methyl ribonucleotide
  modified_base 61: mod_base = OTHER; note = 2'-O-methyl ribonucleotide
  modified_base 66: mod_base = OTHER; note = 2'-O-methyl ribonucleotide
  modified_base 67: mod_base = OTHER; note = 2'-O-methyl ribonucleotide
  modified_base 70: mod_base = OTHER; note = 2'-O-methyl ribonucleotide
  modified_base 71: mod_base = OTHER; note = 2'-O-methyl ribonucleotide
  modified_base 72: mod_base = OTHER; note = 2'-O-methyl ribonucleotide
  modified_base 73: mod_base = OTHER; note = 2'-O-methyl ribonucleotide
  modified_base 74: mod_base = OTHER; note = 2'-O-methyl ribonucleotide
  modified_base 75: mod_base = OTHER; note = 2'-O-methyl ribonucleotide
  modified_base 76: mod_base = OTHER; note = 2'-O-methyl ribonucleotide
  modified_base 77: mod_base = OTHER; note = 2'-O-methyl ribonucleotide
  modified_base 78: mod_base = OTHER; note = 2'-O-methyl ribonucleotide
  modified_base 79: mod_base = OTHER; note = 2'-O-methyl ribonucleotide
  modified_base 80: mod_base = OTHER; note = 2'-O-methyl ribonucleotide
  modified_base 81: mod_base = OTHER; note = 2'-O-methyl ribonucleotide
  modified_base 83: mod_base = OTHER; note = 2'-O-methyl ribonucleotide
  modified_base 84: mod_base = OTHER; note = 2'-O-methyl ribonucleotide
  modified_base 85: mod_base = OTHER; note = 2'-O-methyl ribonucleotide
  modified_base 86: mod_base = OTHER; note = 2'-O-methyl ribonucleotide
  modified_base 87: mod_base = OTHER; note = 2'-O-methyl ribonucleotide
  modified_base 88: mod_base = OTHER; note = 2'-O-methyl ribonucleotide
  modified_base 89: mod_base = OTHER; note = 2'-O-methyl ribonucleotide
  modified_base 90: mod_base = OTHER; note = 2'-O-methyl ribonucleotide
  modified_base 91: mod_base = OTHER; note = 2'-O-methyl ribonucleotide
  modified_base 92: mod_base = OTHER; note = 2'-O-methyl ribonucleotide
  modified_base 93: mod_base = OTHER; note = 2'-O-methyl ribonucleotide
  modified_base 94: mod_base = OTHER; note = 2'-O-methyl ribonucleotide
  modified_base 95: mod_base = OTHER; note = 2'-O-methyl ribonucleotide
  modified_base 96: mod_base = OTHER; note = 2'-O-methyl ribonucleotide
  modified_base 97: mod_base = OTHER; note = 2'-O-methyl ribonucleotide
  modified_base 98: mod_base = OTHER; note = 2'-O-methyl ribonucleotide
  modified_base 99: mod_base = OTHER; note = 2'-O-methyl ribonucleotide
  modified_base 100: mod_base = OTHER; note = 2'-O-methyl ribonucleotide
  modified_base 34: mod_base = OTHER; note = nebularine
  modified_base 57: mod_base = OTHER; note = nebularine
  modified_base 65: mod_base = OTHER; note = nebularine
  modified_base 1..4: mod_base = OTHER; note = phosphorothioate linkage
  modified_base 98..100: mod_base = OTHER; note = phosphorothioate linkage
  misc_feature 1: note = RNA
  misc_feature 2: note = RNA
  misc_feature 3: note = RNA
  misc_feature 4: note = RNA
  misc_feature 5: note = RNA
  misc_feature 6: note = RNA
  misc_feature 7: note = RNA
  misc_feature 8: note = RNA
  misc_feature 9: note = RNA
  misc_feature 10: note = RNA
  misc_feature 11: note = RNA
  misc_feature 12: note = RNA
  misc_feature 13: note = RNA
  misc_feature 14: note = RNA
  misc_feature 15: note = RNA
  misc_feature 16: note = RNA
  misc_feature 17: note = RNA
  misc_feature 18: note = RNA
  misc_feature 19: note = RNA
  misc_feature 20: note = RNA
  misc_feature 21: note = RNA
  misc_feature 22: note = RNA
  misc_feature 23: note = RNA
  misc_feature 24: note = RNA
  misc_feature 25: note = RNA
  misc_feature 26: note = RNA
  misc_feature 27: note = RNA
  misc_feature 28: note = RNA
  misc_feature 29: note = RNA
  misc_feature 30: note = RNA
  misc_feature 31: note = RNA
  misc_feature 32: note = RNA
  misc_feature 33: note = RNA
  misc_feature 35: note = RNA
  misc_feature 36: note = RNA
  misc_feature 37: note = RNA
  misc_feature 38: note = RNA
  misc_feature 39: note = RNA
  misc_feature 40: note = RNA
  misc_feature 41: note = RNA
  misc_feature 42: note = RNA
  misc_feature 43: note = RNA
  misc_feature 44: note = RNA
  misc_feature 45: note = RNA
  misc_feature 46: note = RNA
  misc_feature 47: note = RNA
  misc_feature 48: note = RNA
  misc_feature 49: note = RNA
  misc_feature 50: note = RNA
  misc_feature 51: note = RNA
  misc_feature 52: note = RNA
  misc_feature 53: note = RNA
  misc_feature 54: note = RNA
  misc_feature 55: note = RNA
  misc_feature 56: note = RNA
  misc_feature 58: note = RNA
  misc_feature 59: note = RNA
  misc_feature 60: note = RNA
  misc_feature 61: note = RNA
  misc_feature 62: note = RNA
  misc_feature 63: note = RNA
  misc_feature 64: note = RNA
  misc_feature 66: note = RNA
  misc_feature 67: note = RNA
  misc_feature 68: note = RNA
  misc_feature 69: note = RNA
  misc_feature 70: note = RNA
  misc_feature 71: note = RNA
  misc_feature 72: note = RNA
  misc_feature 73: note = RNA
  misc_feature 74: note = RNA
  misc_feature 75: note = RNA
  misc_feature 76: note = RNA
  misc_feature 77: note = RNA
  misc_feature 78: note = RNA
  misc_feature 79: note = RNA
  misc_feature 80: note = RNA
  misc_feature 81: note = RNA
  misc_feature 82: note = RNA
  misc_feature 83: note = RNA
  misc_feature 84: note = RNA
  misc_feature 85: note = RNA
  misc_feature 86: note = RNA
  misc_feature 87: note = RNA
  misc_feature 88: note = RNA
  misc_feature 89: note = RNA
  misc_feature 90: note = RNA
  misc_feature 91: note = RNA
  misc_feature 92: note = RNA
  misc_feature 93: note = RNA
  misc_feature 94: note = RNA
  misc_feature 95: note = RNA
  misc_feature 96: note = RNA
  misc_feature 97: note = RNA
  misc_feature 98: note = RNA
  misc_feature 99: note = RNA
  misc_feature 100: note = RNA
  misc_feature 34: note = DNA
  misc_feature 57: note = DNA
  misc_feature 65: note = DNA

SEQ ID NO: 2056 - DNA, 100 bp, synthetic construct; identical to SEQ ID NO: 1949
  source 1..100: mol_type = other DNA
  modified_base 1: mod_base = OTHER; note = 2'-O-methyl ribonucleotide
  modified_base 2: mod_base = OTHER; note = 2'-O-methyl ribonucleotide
  modified_base 3: mod_base = OTHER; note = 2'-O-methyl ribonucleotide
  modified_base 21: mod_base = OTHER; note = 2'-O-methyl ribonucleotide
  modified_base 29: mod_base = OTHER; note = 2'-O-methyl ribonucleotide
  modified_base 30: mod_base = OTHER; note = 2'-O-methyl ribonucleotide
  modified_base 31: mod_base = OTHER; note = 2'-O-methyl ribonucleotide
  modified_base 32: mod_base = OTHER; note = 2'-O-methyl ribonucleotide
  modified_base 33: mod_base = OTHER; note = 2'-O-methyl ribonucleotide
  modified_base 35: mod_base = OTHER; note = 2'-O-methyl ribonucleotide
  modified_base 36: mod_base = OTHER; note = 2'-O-methyl ribonucleotide
  modified_base 37: mod_base = OTHER; note = 2'-O-methyl ribonucleotide
  modified_base 38: mod_base = OTHER; note = 2'-O-methyl ribonucleotide
  modified_base 39: mod_base = OTHER; note = 2'-O-methyl ribonucleotide
  modified_base 40: mod_base = OTHER; note = 2'-O-methyl ribonucleotide
  modified_base 41: mod_base = OTHER; note = 2'-O-methyl ribonucleotide
  modified_base 46: mod_base = OTHER; note = 2'-O-methyl ribonucleotide
  modified_base 48: mod_base = OTHER; note = 2'-O-methyl ribonucleotide
  modified_base 50: mod_base = OTHER; note = 2'-O-methyl ribonucleotide
  modified_base 52: mod_base = OTHER; note = 2'-O-methyl ribonucleotide
  modified_base 53: mod_base = OTHER; note = 2'-O-methyl ribonucleotide
  modified_base 54: mod_base = OTHER; note = 2'-O-methyl ribonucleotide
  modified_base 55: mod_base = OTHER; note = 2'-O-methyl ribonucleotide
  modified_base 56: mod_base = OTHER; note = 2'-O-methyl ribonucleotide
  modified_base 60: mod_base = OTHER; note = 2'-O-methyl ribonucleotide
  modified_base 61: mod_base = OTHER; note = 2'-O-methyl ribonucleotide
  modified_base 66: mod_base = OTHER; note = 2'-O-methyl ribonucleotide
  modified_base 67: mod_base = OTHER; note = 2'-O-methyl ribonucleotide
  modified_base 70: mod_base = OTHER; note = 2'-O-methyl ribonucleotide
  modified_base 71: mod_base = OTHER; note = 2'-O-methyl ribonucleotide
  modified_base 72: mod_base = OTHER; note = 2'-O-methyl ribonucleotide
  modified_base 73: mod_base = OTHER; note = 2'-O-methyl ribonucleotide
  modified_base 74: mod_base = OTHER; note = 2'-O-methyl ribonucleotide
  modified_base 75: mod_base = OTHER; note = 2'-O-methyl ribonucleotide
  modified_base 76: mod_base = OTHER; note = 2'-O-methyl ribonucleotide
  modified_base 77: mod_base = OTHER; note = 2'-O-methyl ribonucleotide
  modified_base 78: mod_base = OTHER; note = 2'-O-methyl ribonucleotide
  modified_base 79: mod_base = OTHER; note = 2'-O-methyl ribonucleotide
  modified_base 80: mod_base = OTHER; note = 2'-O-methyl ribonucleotide
  modified_base 81: mod_base = OTHER; note = 2'-O-methyl ribonucleotide
  modified_base 83: mod_base = OTHER; note = 2'-O-methyl ribonucleotide
  modified_base 84: mod_base = OTHER; note = 2'-O-methyl ribonucleotide
  modified_base 85: mod_base = OTHER; note = 2'-O-methyl ribonucleotide
  modified_base 86: mod_base = OTHER; note = 2'-O-methyl ribonucleotide
  modified_base 87: mod_base = OTHER; note = 2'-O-methyl ribonucleotide
  modified_base 88: mod_base = OTHER; note = 2'-O-methyl ribonucleotide
  modified_base 89: mod_base = OTHER; note = 2'-O-methyl ribonucleotide
  modified_base 90: mod_base = OTHER; note = 2'-O-methyl ribonucleotide
  modified_base 91: mod_base = OTHER; note = 2'-O-methyl ribonucleotide
  modified_base 92: mod_base = OTHER; note = 2'-O-methyl ribonucleotide
  modified_base 93: mod_base = OTHER; note = 2'-O-methyl ribonucleotide
  modified_base 94: mod_base = OTHER; note = 2'-O-methyl ribonucleotide
  modified_base 95: mod_base = OTHER; note = 2'-O-methyl ribonucleotide
  modified_base 96: mod_base = OTHER; note = 2'-O-methyl ribonucleotide
  modified_base 97: mod_base = OTHER; note = 2'-O-methyl ribonucleotide
  modified_base 98: mod_base = OTHER; note = 2'-O-methyl ribonucleotide
  modified_base 99: mod_base = OTHER; note = 2'-O-methyl ribonucleotide
  modified_base 100: mod_base = OTHER; note = 2'-O-methyl ribonucleotide
  modified_base 28: mod_base = OTHER; note = nebularine
  modified_base 34: mod_base = OTHER; note = nebularine
  modified_base 42: mod_base = OTHER; note = nebularine
  modified_base 57: mod_base = OTHER; note = nebularine
  modified_base 65: mod_base = OTHER; note = nebularine
  modified_base 1..4: mod_base = OTHER; note = phosphorothioate linkage
  modified_base 98..100: mod_base = OTHER; note = phosphorothioate linkage
  misc_feature 1: note = RNA
  misc_feature 2: note = RNA
  misc_feature 3: note = RNA
  misc_feature 4: note = RNA
  misc_feature 5: note = RNA
  misc_feature 6: note = RNA
  misc_feature 7: note = RNA
  misc_feature 8: note = RNA
  misc_feature 9: note = RNA
  misc_feature 10: note = RNA
  misc_feature 11: note = RNA
  misc_feature 12: note = RNA
  misc_feature 13: note = RNA
  misc_feature 14: note = RNA
  misc_feature 15: note = RNA
  misc_feature 16: note = RNA
  misc_feature 17: note = RNA
  misc_feature 18: note = RNA
  misc_feature 19: note = RNA
  misc_feature 20: note = RNA
  misc_feature 21: note = RNA
  misc_feature 22: note = RNA
  misc_feature 23: note = RNA
  misc_feature 24: note = RNA
  misc_feature 25: note = RNA
  misc_feature 26: note = RNA
  misc_feature 27: note = RNA
  misc_feature 29: note = RNA
  misc_feature 30: note = RNA
  misc_feature 31: note = RNA
  misc_feature 32: note = RNA
  misc_feature 33: note = RNA
  misc_feature 35: note = RNA
  misc_feature 36: note = RNA
  misc_feature 37: note = RNA
  misc_feature 38: note = RNA
  misc_feature 39: note = RNA
  misc_feature 40: note = RNA
  misc_feature 41: note = RNA
  misc_feature 43: note = RNA
  misc_feature 44: note = RNA
  misc_feature 45: note = RNA
  misc_feature 46: note = RNA
  misc_feature 47: note = RNA
  misc_feature 48: note = RNA
  misc_feature 49: note = RNA
  misc_feature 50: note = RNA
  misc_feature 51: note = RNA
  misc_feature 52: note = RNA
  misc_feature 53: note = RNA
  misc_feature 54: note = RNA
  misc_feature 55: note = RNA
  misc_feature 56: note = RNA
  misc_feature 58: note = RNA
  misc_feature 59: note = RNA
  misc_feature 60: note = RNA
  misc_feature 61: note = RNA
  misc_feature 62: note = RNA
  misc_feature 63: note = RNA
  misc_feature 64: note = RNA
  misc_feature 66: note = RNA
  misc_feature 67: note = RNA
  misc_feature 68: note = RNA
  misc_feature 69: note = RNA
  misc_feature 70: note = RNA
  misc_feature 71: note = RNA
  misc_feature 72: note = RNA
  misc_feature 73: note = RNA
  misc_feature 74: note = RNA
  misc_feature 75: note = RNA
  misc_feature 76: note = RNA
  misc_feature 77: note = RNA
  misc_feature 78: note = RNA
  misc_feature 79: note = RNA
  misc_feature 80: note = RNA
  misc_feature 81: note = RNA
  misc_feature 82: note = RNA
  misc_feature 83: note = RNA
  misc_feature 84: note = RNA
  misc_feature 85: note = RNA
  misc_feature 86: note = RNA
  misc_feature 87: note = RNA
  misc_feature 88: note = RNA
  misc_feature 89: note = RNA
  misc_feature 90: note = RNA
  misc_feature 91: note = RNA
  misc_feature 92: note = RNA
  misc_feature 93: note = RNA
  misc_feature 94: note = RNA
  misc_feature 95: note = RNA
  misc_feature 96: note = RNA
  misc_feature 97: note = RNA
  misc_feature 98: note = RNA
  misc_feature 99: note = RNA
  misc_feature 100: note = RNA
  misc_feature 28: note = DNA
  misc_feature 34: note = DNA
  misc_feature 42: note = DNA
  misc_feature 57: note = DNA
  misc_feature 65: note = DNA

SEQ ID NO: 2057 - RNA, 100 nt, synthetic construct; identical to SEQ ID NO: 1896
  source 1..100: mol_type = other RNA
  modified_base 1: mod_base = OTHER; note = 2'-O-methyl ribonucleotide
  modified_base 2: mod_base = OTHER; note = 2'-O-methyl ribonucleotide
  modified_base 3: mod_base = OTHER; note = 2'-O-methyl ribonucleotide
  modified_base 21: mod_base = OTHER; note = 2'-O-methyl ribonucleotide
  modified_base 28: mod_base = OTHER; note = 2'-O-methyl ribonucleotide
  modified_base 29: mod_base = OTHER; note = 2'-O-methyl ribonucleotide
  modified_base 30: mod_base = OTHER; note = 2'-O-methyl ribonucleotide
  modified_base 31: mod_base = OTHER; note = 2'-O-methyl ribonucleotide
  modified_base 32: mod_base = OTHER; note = 2'-O-methyl ribonucleotide
  modified_base 33: mod_base = OTHER; note = 2'-O-methyl ribonucleotide
  modified_base 34: mod_base = OTHER; note = 2'-O-methyl ribonucleotide
  modified_base 35: mod_base = OTHER; note = 2'-O-methyl ribonucleotide
  modified_base 36: mod_base = OTHER; note = 2'-O-methyl ribonucleotide
  modified_base 37: mod_base = OTHER; note = 2'-O-methyl ribonucleotide
  modified_base 38: mod_base = OTHER; note = 2'-O-methyl ribonucleotide
  modified_base 39: mod_base = OTHER; note = 2'-O-methyl ribonucleotide
  modified_base 40: mod_base = OTHER; note = 2'-O-methyl ribonucleotide
  modified_base 41: mod_base = OTHER; note = 2'-O-methyl ribonucleotide
  modified_base 42: mod_base = OTHER; note = 2'-O-methyl ribonucleotide
  modified_base 46: mod_base = OTHER; note = 2'-O-methyl ribonucleotide
  modified_base 48: mod_base = OTHER; note = 2'-O-methyl ribonucleotide
  modified_base 50: mod_base = OTHER; note = 2'-O-methyl ribonucleotide
  modified_base 52: mod_base = OTHER; note = 2'-O-methyl ribonucleotide
  modified_base 53: mod_base = OTHER; note = 2'-O-methyl ribonucleotide
  modified_base 54: mod_base = OTHER; note = 2'-O-methyl ribonucleotide
  modified_base 55: mod_base = OTHER; note = 2'-O-methyl ribonucleotide
  modified_base 56: mod_base = OTHER; note = 2'-O-methyl ribonucleotide
  modified_base 57: mod_base = OTHER; note = 2'-O-methyl ribonucleotide
  modified_base 60: mod_base = OTHER; note = 2'-O-methyl ribonucleotide
  modified_base 61: mod_base = OTHER; note = 2'-O-methyl ribonucleotide
  modified_base 66: mod_base = OTHER; note = 2'-O-methyl ribonucleotide
  modified_base 67: mod_base = OTHER; note = 2'-O-methyl ribonucleotide
  modified_base 70: mod_base = OTHER; note = 2'-O-methyl ribonucleotide
  modified_base 71: mod_base = OTHER; note = 2'-O-methyl ribonucleotide
  modified_base 72: mod_base = OTHER; note = 2'-O-methyl ribonucleotide
  modified_base 73: mod_base = OTHER; note = 2'-O-methyl ribonucleotide
  modified_base 74: mod_base = OTHER; note = 2'-O-methyl ribonucleotide
  modified_base 75: mod_base = OTHER; note = 2'-O-methyl ribonucleotide
  modified_base 76: mod_base = OTHER; note = 2'-O-methyl ribonucleotide
  modified_base 77: mod_base = OTHER; note = 2'-O-methyl ribonucleotide
  modified_base 78: mod_base = OTHER; note = 2'-O-methyl ribonucleotide
  modified_base 79: mod_base = OTHER; note = 2'-O-methyl ribonucleotide
  modified_base 80: mod_base = OTHER; note = 2'-O-methyl ribonucleotide
  modified_base 81: mod_base = OTHER; note = 2'-O-methyl ribonucleotide
  modified_base 83: mod_base = OTHER; note = 2'-O-methyl ribonucleotide
  modified_base 84: mod_base = OTHER; note = 2'-O-methyl ribonucleotide
  modified_base 85: mod_base = OTHER; note = 2'-O-methyl ribonucleotide
  modified_base 86: mod_base = OTHER; note = 2'-O-methyl ribonucleotide
  modified_base 87: mod_base = OTHER; note = 2'-O-methyl ribonucleotide
  modified_base 88: mod_base = OTHER; note = 2'-O-methyl ribonucleotide
  modified_base 89: mod_base = OTHER; note = 2'-O-methyl ribonucleotide
  modified_base 90: mod_base = OTHER; note = 2'-O-methyl ribonucleotide
  modified_base 91: mod_base = OTHER; note = 2'-O-methyl ribonucleotide
  modified_base 92: mod_base = OTHER; note = 2'-O-methyl ribonucleotide
  modified_base 93: mod_base = OTHER; note = 2'-O-methyl ribonucleotide
  modified_base 94: mod_base = OTHER; note = 2'-O-methyl ribonucleotide
  modified_base 95: mod_base = OTHER; note = 2'-O-methyl ribonucleotide
  modified_base 96: mod_base = OTHER; note = 2'-O-methyl ribonucleotide
  modified_base 97: mod_base = OTHER; note = 2'-O-methyl ribonucleotide
  modified_base 98: mod_base = OTHER; note = 2'-O-methyl ribonucleotide
  modified_base 99: mod_base = OTHER; note = 2'-O-methyl ribonucleotide
  modified_base 100: mod_base = OTHER; note = 2'-O-methyl ribonucleotide
  modified_base 9: mod_base = OTHER; note = nebularine
  modified_base 14: mod_base = OTHER; note = nebularine
  modified_base 1..3: mod_base = OTHER; note = phosphorothioate linkage
  modified_base 98..100: mod_base = OTHER; note = phosphorothioate linkage

SEQ ID NO: 2058 - RNA, 100 nt, synthetic construct; identical to SEQ ID NO: 1897
  source 1..100: mol_type = other RNA
  modified_base 1: mod_base = OTHER; note = 2'-O-methyl ribonucleotide
  modified_base 2: mod_base = OTHER; note = 2'-O-methyl ribonucleotide
  modified_base 3: mod_base = OTHER; note = 2'-O-methyl ribonucleotide
  modified_base 21: mod_base = OTHER; note = 2'-O-methyl ribonucleotide
  modified_base 28: mod_base = OTHER; note = 2'-O-methyl ribonucleotide
  modified_base 29: mod_base = OTHER; note = 2'-O-methyl ribonucleotide
  modified_base 30: mod_base = OTHER; note = 2'-O-methyl ribonucleotide
  modified_base 31: mod_base = OTHER; note = 2'-O-methyl ribonucleotide
  modified_base 32: mod_base = OTHER; note = 2'-O-methyl ribonucleotide
  modified_base 33: mod_base = OTHER; note = 2'-O-methyl ribonucleotide
  modified_base 34: mod_base = OTHER; note = 2'-O-methyl ribonucleotide
  modified_base 35: mod_base = OTHER; note = 2'-O-methyl ribonucleotide
  modified_base 36: mod_base = OTHER; note = 2'-O-methyl ribonucleotide
  modified_base 37: mod_base = OTHER; note = 2'-O-methyl ribonucleotide
  modified_base 38: mod_base = OTHER; note = 2'-O-methyl ribonucleotide
  modified_base 39: mod_base = OTHER; note = 2'-O-methyl ribonucleotide
  modified_base 40: mod_base = OTHER; note = 2'-O-methyl ribonucleotide
  modified_base 41: mod_base = OTHER; note = 2'-O-methyl ribonucleotide
  modified_base 42: mod_base = OTHER; note = 2'-O-methyl ribonucleotide
  modified_base 46: mod_base = OTHER; note = 2'-O-methyl ribonucleotide
  modified_base 48: mod_base = OTHER; note = 2'-O-methyl ribonucleotide
  modified_base 50: mod_base = OTHER; note = 2'-O-methyl ribonucleotide
  modified_base 52: mod_base = OTHER; note = 2'-O-methyl ribonucleotide
  modified_base 53: mod_base = OTHER; note = 2'-O-methyl ribonucleotide
  modified_base 54: mod_base = OTHER; note = 2'-O-methyl ribonucleotide
  modified_base 55: mod_base = OTHER; note = 2'-O-methyl ribonucleotide
  modified_base 56: mod_base = OTHER; note = 2'-O-methyl ribonucleotide
  modified_base 57: mod_base = OTHER; note = 2'-O-methyl ribonucleotide
  modified_base 60: mod_base = OTHER; note = 2'-O-methyl ribonucleotide
  modified_base 61: mod_base = OTHER; note = 2'-O-methyl ribonucleotide
  modified_base 66: mod_base = OTHER; note = 2'-O-methyl ribonucleotide
  modified_base 67: mod_base = OTHER; note = 2'-O-methyl ribonucleotide
  modified_base 70: mod_base = OTHER; note = 2'-O-methyl ribonucleotide
  modified_base 71: mod_base = OTHER; note = 2'-O-methyl ribonucleotide
  modified_base 72: mod_base = OTHER; note = 2'-O-methyl ribonucleotide
  modified_base 73: mod_base = OTHER; note = 2'-O-methyl ribonucleotide
  modified_base 74: mod_base = OTHER; note = 2'-O-methyl ribonucleotide
  modified_base 75: mod_base = OTHER; note = 2'-O-methyl ribonucleotide
  modified_base 76: mod_base = OTHER; note = 2'-O-methyl ribonucleotide
  modified_base 77: mod_base = OTHER; note = 2'-O-methyl ribonucleotide
  modified_base 78: mod_base = OTHER; note = 2'-O-methyl ribonucleotide
  modified_base 79: mod_base = OTHER; note = 2'-O-methyl ribonucleotide
  modified_base 80: mod_base = OTHER; note = 2'-O-methyl ribonucleotide
  modified_base 81: mod_base = OTHER; note = 2'-O-methyl ribonucleotide
  modified_base 83: mod_base = OTHER; note = 2'-O-methyl ribonucleotide
  modified_base 84: mod_base = OTHER; note = 2'-O-methyl ribonucleotide
  modified_base 85: mod_base = OTHER; note = 2'-O-methyl ribonucleotide
  modified_base 86: mod_base = OTHER; note = 2'-O-methyl ribonucleotide
  modified_base 87: mod_base = OTHER; note = 2'-O-methyl ribonucleotide
  modified_base 88: mod_base = OTHER; note = 2'-O-methyl ribonucleotide
  modified_base 89: mod_base = OTHER; note = 2'-O-methyl ribonucleotide
  modified_base 90: mod_base = OTHER; note = 2'-O-methyl ribonucleotide
  modified_base 91: mod_base = OTHER; note = 2'-O-methyl ribonucleotide
  modified_base 92: mod_base = OTHER; note = 2'-O-methyl ribonucleotide
  modified_base 93: mod_base = OTHER; note = 2'-O-methyl ribonucleotide
  modified_base 94: mod_base = OTHER; note = 2'-O-methyl ribonucleotide
  modified_base 95: mod_base = OTHER; note = 2'-O-methyl ribonucleotide
  modified_base 96: mod_base = OTHER; note = 2'-O-methyl ribonucleotide
  modified_base 97: mod_base = OTHER; note = 2'-O-methyl ribonucleotide
  modified_base 98: mod_base = OTHER; note = 2'-O-methyl ribonucleotide
  modified_base 99: mod_base = OTHER; note = 2'-O-methyl ribonucleotide
  modified_base 100: mod_base = OTHER; note = 2'-O-methyl ribonucleotide
  modified_base 9: mod_base = OTHER; note = nebularine
  modified_base 1..3: mod_base = OTHER; note = phosphorothioate linkage
  modified_base 98..100: mod_base = OTHER; note = phosphorothioate linkage

SEQ ID NO: 2059 - RNA, 100 nt, synthetic construct; identical to SEQ ID NO: 1898
  source 1..100: mol_type = other RNA
  modified_base 1: mod_base = OTHER; note = 2'-O-methyl ribonucleotide
  modified_base 2: mod_base = OTHER; note = 2'-O-methyl ribonucleotide
  modified_base 3: mod_base = OTHER; note = 2'-O-methyl ribonucleotide
  modified_base 21: mod_base = OTHER; note = 2'-O-methyl ribonucleotide
  modified_base 28: mod_base = OTHER; note = 2'-O-methyl ribonucleotide
  modified_base 29: mod_base = OTHER; note = 2'-O-methyl ribonucleotide
  modified_base 30: mod_base = OTHER; note = 2'-O-methyl ribonucleotide
  modified_base 31: mod_base = OTHER; note = 2'-O-methyl ribonucleotide
  modified_base 32: mod_base = OTHER; note = 2'-O-methyl ribonucleotide
  modified_base 33: mod_base = OTHER; note = 2'-O-methyl ribonucleotide
  modified_base 34: mod_base = OTHER; note = 2'-O-methyl ribonucleotide
  modified_base 35: mod_base = OTHER; note = 2'-O-methyl ribonucleotide
  modified_base 36: mod_base = OTHER; note = 2'-O-methyl ribonucleotide
  modified_base 37: mod_base = OTHER; note = 2'-O-methyl ribonucleotide
  modified_base 38: mod_base = OTHER; note = 2'-O-methyl ribonucleotide
  modified_base 39: mod_base = OTHER; note = 2'-O-methyl ribonucleotide
  modified_base 40: mod_base = OTHER; note = 2'-O-methyl ribonucleotide
  modified_base 41: mod_base = OTHER; note = 2'-O-methyl ribonucleotide
  modified_base 42: mod_base = OTHER; note = 2'-O-methyl ribonucleotide
  modified_base 46: mod_base = OTHER; note = 2'-O-methyl ribonucleotide
  modified_base 48: mod_base = OTHER; note = 2'-O-methyl ribonucleotide
  modified_base 50: mod_base = OTHER; note = 2'-O-methyl ribonucleotide
  modified_base 52: mod_base = OTHER; note = 2'-O-methyl ribonucleotide
  modified_base 53: mod_base = OTHER; note = 2'-O-methyl ribonucleotide
  modified_base 54: mod_base = OTHER; note = 2'-O-methyl ribonucleotide
  modified_base 55: mod_base = OTHER; note = 2'-O-methyl ribonucleotide
  modified_base 56: mod_base = OTHER; note = 2'-O-methyl ribonucleotide
  modified_base 57: mod_base = OTHER; note = 2'-O-methyl ribonucleotide
  modified_base 60: mod_base = OTHER; note = 2'-O-methyl ribonucleotide
  modified_base 61: mod_base = OTHER; note = 2'-O-methyl ribonucleotide
  modified_base 66: mod_base = OTHER; note = 2'-O-methyl ribonucleotide
  modified_base 67: mod_base = OTHER; note = 2'-O-methyl ribonucleotide
  modified_base 70: mod_base = OTHER; note = 2'-O-methyl ribonucleotide
  modified_base 71: mod_base = OTHER; note = 2'-O-methyl ribonucleotide
  modified_base 72: mod_base = OTHER; note = 2'-O-methyl ribonucleotide
  modified_base 73: mod_base = OTHER; note = 2'-O-methyl ribonucleotide
  modified_base 74: mod_base = OTHER; note = 2'-O-methyl ribonucleotide
  modified_base 75: mod_base = OTHER; note = 2'-O-methyl ribonucleotide
  modified_base 76: mod_base = OTHER; note = 2'-O-methyl ribonucleotide
  modified_base 77: mod_base = OTHER; note = 2'-O-methyl ribonucleotide
  modified_base 78: mod_base = OTHER; note = 2'-O-methyl ribonucleotide
  modified_base 79: mod_base = OTHER; note = 2'-O-methyl ribonucleotide
  modified_base 80: mod_base = OTHER; note = 2'-O-methyl ribonucleotide
  modified_base 81: mod_base = OTHER; note = 2'-O-methyl ribonucleotide
  modified_base 83: mod_base = OTHER; note = 2'-O-methyl ribonucleotide
  modified_base 84: mod_base = OTHER; note = 2'-O-methyl ribonucleotide
  modified_base 85: mod_base = OTHER; note = 2'-O-methyl ribonucleotide
  modified_base 86: mod_base = OTHER; note = 2'-O-methyl ribonucleotide
  modified_base 87: mod_base = OTHER; note = 2'-O-methyl ribonucleotide
  modified_base 88: mod_base = OTHER; note = 2'-O-methyl ribonucleotide
  modified_base 89: mod_base = OTHER; note = 2'-O-methyl ribonucleotide
  modified_base 90: mod_base = OTHER; note = 2'-O-methyl ribonucleotide
  modified_base 91: mod_base = OTHER; note = 2'-O-methyl ribonucleotide
  modified_base 92: mod_base = OTHER; note = 2'-O-methyl ribonucleotide
  modified_base 93: mod_base = OTHER; note = 2'-O-methyl ribonucleotide
  modified_base 94: mod_base = OTHER; note = 2'-O-methyl ribonucleotide
  modified_base 95: mod_base = OTHER; note = 2'-O-methyl ribonucleotide
  modified_base 96: mod_base = OTHER; note = 2'-O-methyl ribonucleotide
  modified_base 97: mod_base = OTHER; note = 2'-O-methyl ribonucleotide
  modified_base 98: mod_base = OTHER; note = 2'-O-methyl ribonucleotide
  modified_base 99: mod_base = OTHER; note = 2'-O-methyl ribonucleotide
  modified_base 100: mod_base = OTHER; note = 2'-O-methyl ribonucleotide
  modified_base 14: mod_base = OTHER; note = nebularine
  modified_base 1..3: mod_base = OTHER; note = phosphorothioate linkage
  modified_base 98..100: mod_base = OTHER; note = phosphorothioate linkage

SEQ ID NO: 2060 - RNA, 100 nt, synthetic construct; identical to SEQ ID NO: 1899
  source 1..100: mol_type = other RNA
  modified_base 1: mod_base = OTHER; note = 2'-O-methyl ribonucleotide
  modified_base 2: mod_base = OTHER; note = 2'-O-methyl ribonucleotide
  modified_base 3: mod_base = OTHER; note = 2'-O-methyl ribonucleotide
  modified_base 21: mod_base = OTHER; note = 2'-O-methyl ribonucleotide
  modified_base 28: mod_base = OTHER; note = 2'-O-methyl ribonucleotide
  modified_base 29: mod_base = OTHER; note = 2'-O-methyl ribonucleotide
  modified_base 30: mod_base = OTHER; note = 2'-O-methyl ribonucleotide
  modified_base 31: mod_base = OTHER; note = 2'-O-methyl ribonucleotide
  modified_base 32: mod_base = OTHER; note = 2'-O-methyl ribonucleotide
  modified_base 33: mod_base = OTHER; note = 2'-O-methyl ribonucleotide
  modified_base 35: mod_base = OTHER; note = 2'-O-methyl ribonucleotide
  modified_base 36: mod_base = OTHER; note = 2'-O-methyl ribonucleotide
  modified_base 37: mod_base = OTHER; note = 2'-O-methyl ribonucleotide
  modified_base 38: mod_base = OTHER; note = 2'-O-methyl ribonucleotide
  modified_base 39: mod_base = OTHER; note = 2'-O-methyl ribonucleotide
  modified_base 40: mod_base = OTHER; note = 2'-O-methyl ribonucleotide
  modified_base 41: mod_base = OTHER; note = 2'-O-methyl ribonucleotide
  modified_base 42: mod_base = OTHER; note = 2'-O-methyl ribonucleotide
  modified_base 46: mod_base = OTHER; note = 2'-O-methyl ribonucleotide
  modified_base 48: mod_base = OTHER; note = 2'-O-methyl ribonucleotide
  modified_base 50: mod_base = OTHER; note = 2'-O-methyl ribonucleotide
  modified_base 52: mod_base = OTHER; note = 2'-O-methyl ribonucleotide
  modified_base 53: mod_base = OTHER; note = 2'-O-methyl ribonucleotide
  modified_base 54: mod_base = OTHER; note = 2'-O-methyl ribonucleotide
  modified_base 55: mod_base = OTHER; note = 2'-O-methyl ribonucleotide
  modified_base 56: mod_base = OTHER; note = 2'-O-methyl ribonucleotide
  modified_base 57: mod_base = OTHER; note = 2'-O-methyl ribonucleotide
  modified_base 60: mod_base = OTHER; note = 2'-O-methyl ribonucleotide
  modified_base 61: mod_base = OTHER; note = 2'-O-methyl ribonucleotide
  modified_base 66: mod_base = OTHER; note = 2'-O-methyl ribonucleotide
  modified_base 67: mod_base = OTHER; note = 2'-O-methyl ribonucleotide
  modified_base 70: mod_base = OTHER; note = 2'-O-methyl ribonucleotide
  modified_base 71: mod_base = OTHER; note = 2'-O-methyl ribonucleotide
  modified_base 72: mod_base = OTHER; note = 2'-O-methyl ribonucleotide
  modified_base 73: mod_base = OTHER; note = 2'-O-methyl ribonucleotide
  modified_base 74: mod_base = OTHER; note = 2'-O-methyl ribonucleotide
  modified_base 75: mod_base = OTHER; note = 2'-O-methyl ribonucleotide
  modified_base 76: mod_base = OTHER; note = 2'-O-methyl ribonucleotide
  modified_base 77: mod_base = OTHER; note = 2'-O-methyl ribonucleotide
  modified_base 78: mod_base = OTHER; note = 2'-O-methyl ribonucleotide
  modified_base 79: mod_base = OTHER; note = 2'-O-methyl ribonucleotide
  modified_base 80: mod_base = OTHER; note = 2'-O-methyl ribonucleotide
  modified_base 81: mod_base = OTHER; note = 2'-O-methyl ribonucleotide
  modified_base 83: mod_base = OTHER; note = 2'-O-methyl ribonucleotide
  modified_base 84: mod_base = OTHER; note = 2'-O-methyl ribonucleotide
  modified_base 85: mod_base = OTHER; note = 2'-O-methyl ribonucleotide
  modified_base 86: mod_base = OTHER; note = 2'-O-methyl ribonucleotide
  modified_base 87: mod_base = OTHER; note = 2'-O-methyl ribonucleotide
  modified_base 88: mod_base = OTHER; note = 2'-O-methyl ribonucleotide
  modified_base 89: mod_base = OTHER; note = 2'-O-methyl ribonucleotide
  modified_base 90: mod_base = OTHER; note = 2'-O-methyl ribonucleotide
  modified_base 91: mod_base = OTHER; note = 2'-O-methyl ribonucleotide
  modified_base 92: mod_base = OTHER; note = 2'-O-methyl ribonucleotide
  modified_base 93: mod_base = OTHER; note = 2'-O-methyl ribonucleotide
  modified_base 94: mod_base = OTHER; note = 2'-O-methyl ribonucleotide
  modified_base 95: mod_base = OTHER; note = 2'-O-methyl ribonucleotide
  modified_base 96: mod_base = OTHER; note = 2'-O-methyl ribonucleotide
  modified_base 97: mod_base = OTHER; note = 2'-O-methyl ribonucleotide
  modified_base 98: mod_base = OTHER; note = 2'-O-methyl ribonucleotide
  modified_base 99: mod_base = OTHER; note = 2'-O-methyl ribonucleotide
  modified_base 100: mod_base = OTHER; note = 2'-O-methyl ribonucleotide
  modified_base 34: mod_base = OTHER; note = nebularine
  modified_base 1..3: mod_base = OTHER; note = phosphorothioate linkage
  modified_base 98..100: mod_base = OTHER; note = phosphorothioate linkage

SEQ ID NO: 2061 - RNA, 100 nt, synthetic construct; identical to SEQ ID NO: 1900
  source 1..100: mol_type = other RNA
  modified_base 1: mod_base = OTHER; note = 2'-O-methyl ribonucleotide
  modified_base 2: mod_base = OTHER; note = 2'-O-methyl ribonucleotide
  modified_base 3: mod_base = OTHER; note = 2'-O-methyl ribonucleotide
  modified_base 21: mod_base = OTHER; note = 2'-O-methyl ribonucleotide
  modified_base 28: mod_base = OTHER; note = 2'-O-methyl ribonucleotide
  modified_base 29: mod_base = OTHER; note = 2'-O-methyl ribonucleotide
  modified_base 30: mod_base = OTHER; note = 2'-O-methyl ribonucleotide
  modified_base 31: mod_base = OTHER; note = 2'-O-methyl ribonucleotide
  modified_base 32: mod_base = OTHER; note = 2'-O-methyl ribonucleotide
  modified_base 33: mod_base = OTHER; note = 2'-O-methyl ribonucleotide
  modified_base 35: mod_base = OTHER; note = 2'-O-methyl ribonucleotide
  modified_base 36: mod_base = OTHER; note = 2'-O-methyl ribonucleotide
  modified_base 37: mod_base = OTHER; note = 2'-O-methyl ribonucleotide
  modified_base 38: mod_base = OTHER; note = 2'-O-methyl ribonucleotide
  modified_base 39: mod_base = OTHER; note = 2'-O-methyl ribonucleotide
  modified_base 40: mod_base = OTHER; note = 2'-O-methyl ribonucleotide
  modified_base 41: mod_base = OTHER; note = 2'-O-methyl ribonucleotide
  modified_base 42: mod_base = OTHER; note = 2'-O-methyl ribonucleotide
  modified_base 46: mod_base = OTHER; note = 2'-O-methyl ribonucleotide
  modified_base 48: mod_base = OTHER; note = 2'-O-methyl ribonucleotide
  modified_base 50: mod_base = OTHER; note = 2'-O-methyl ribonucleotide
  modified_base 52: mod_base = OTHER; note = 2'-O-methyl ribonucleotide
  modified_base 53: mod_base = OTHER; note = 2'-O-methyl ribonucleotide
  modified_base 54: mod_base = OTHER; note = 2'-O-methyl ribonucleotide
  modified_base 55: mod_base = OTHER; note = 2'-O-methyl ribonucleotide
  modified_base 56: mod_base = OTHER; note = 2'-O-methyl ribonucleotide
  modified_base 60: mod_base = OTHER; note = 2'-O-methyl ribonucleotide
  modified_base 61: mod_base = OTHER; note = 2'-O-methyl ribonucleotide
  modified_base 66: mod_base = OTHER; note = 2'-O-methyl ribonucleotide
  modified_base 67: mod_base = OTHER; note = 2'-O-methyl ribonucleotide
  modified_base 70: mod_base = OTHER; note = 2'-O-methyl ribonucleotide
  modified_base 71: mod_base = OTHER; note = 2'-O-methyl ribonucleotide
  modified_base 72: mod_base = OTHER; note = 2'-O-methyl ribonucleotide
  modified_base 73: mod_base = OTHER; note = 2'-O-methyl ribonucleotide
  modified_base 74: mod_base = OTHER; note = 2'-O-methyl ribonucleotide
  modified_base 75: mod_base = OTHER; note = 2'-O-methyl ribonucleotide
  modified_base 76: mod_base = OTHER; note = 2'-O-methyl ribonucleotide
  modified_base 77: mod_base = OTHER; note = 2'-O-methyl ribonucleotide
  modified_base 78: mod_base = OTHER; note = 2'-O-methyl ribonucleotide
  modified_base 79: mod_base = OTHER; note = 2'-O-methyl ribonucleotide
  modified_base 80: mod_base = OTHER; note = 2'-O-methyl ribonucleotide
  modified_base 81: mod_base = OTHER; note = 2'-O-methyl ribonucleotide
  modified_base 83: mod_base = OTHER; note = 2'-O-methyl ribonucleotide
  modified_base 84: mod_base = OTHER; note = 2'-O-methyl ribonucleotide
  modified_base 85: mod_base = OTHER; note = 2'-O-methyl ribonucleotide
  modified_base 86: mod_base = OTHER; note = 2'-O-methyl ribonucleotide
  modified_base 87: mod_base = OTHER; note = 2'-O-methyl ribonucleotide
  modified_base 88: mod_base = OTHER; note = 2'-O-methyl ribonucleotide
  modified_base 89: mod_base = OTHER; note = 2'-O-methyl ribonucleotide
  modified_base 90: mod_base = OTHER; note = 2'-O-methyl ribonucleotide
  modified_base 91: mod_base = OTHER; note = 2'-O-methyl ribonucleotide
  modified_base 92: mod_base = OTHER; note = 2'-O-methyl ribonucleotide
  modified_base 93: mod_base = OTHER; note = 2'-O-methyl ribonucleotide
  modified_base 94: mod_base = OTHER; note = 2'-O-methyl ribonucleotide
  modified_base 95: mod_base = OTHER; note = 2'-O-methyl ribonucleotide
  modified_base 96: mod_base = OTHER; note = 2'-O-methyl ribonucleotide
  modified_base 97: mod_base = OTHER; note = 2'-O-methyl ribonucleotide
  modified_base 98: mod_base = OTHER; note = 2'-O-methyl ribonucleotide
  modified_base 99: mod_base = OTHER; note = 2'-O-methyl ribonucleotide
  modified_base 100: mod_base = OTHER; note = 2'-O-methyl ribonucleotide
  modified_base 34: mod_base = OTHER; note = nebularine
  modified_base 57: mod_base = OTHER; note = nebularine
  modified_base 1..3: mod_base = OTHER; note = phosphorothioate linkage
  modified_base 98..100: mod_base = OTHER; note = phosphorothioate linkage

SEQ ID NO: 2062 - RNA, 100 nt, synthetic construct; identical to SEQ ID NO: 1901
  source 1..100: mol_type = other RNA
  modified_base 1: mod_base = OTHER; note = 2'-O-methyl ribonucleotide
  modified_base 2: mod_base = OTHER; note = 2'-O-methyl ribonucleotide
  modified_base 3: mod_base = OTHER; note = 2'-O-methyl ribonucleotide
  modified_base 21: mod_base = OTHER; note = 2'-O-methyl ribonucleotide
  modified_base 28: mod_base = OTHER; note = 2'-O-methyl ribonucleotide
  modified_base 29: mod_base = OTHER; note = 2'-O-methyl ribonucleotide
  modified_base 30: mod_base = OTHER; note = 2'-O-methyl ribonucleotide
  modified_base 31: mod_base = OTHER; note = 2'-O-methyl ribonucleotide
  modified_base 32: mod_base = OTHER; note = 2'-O-methyl ribonucleotide
  modified_base 33: mod_base = OTHER; note = 2'-O-methyl ribonucleotide
  modified_base 34: mod_base = OTHER; note = 2'-O-methyl ribonucleotide
  modified_base 35: mod_base = OTHER; note = 2'-O-methyl ribonucleotide
  modified_base 36: mod_base = OTHER; note = 2'-O-methyl ribonucleotide
  modified_base 37: mod_base = OTHER; note = 2'-O-methyl ribonucleotide
  modified_base 38: mod_base = OTHER; note = 2'-O-methyl ribonucleotide
  modified_base 39: mod_base = OTHER; note = 2'-O-methyl ribonucleotide
  modified_base 40: mod_base = OTHER; note = 2'-O-methyl ribonucleotide
  modified_base 41: mod_base = OTHER; note = 2'-O-methyl ribonucleotide
  modified_base 42: mod_base = OTHER; note = 2'-O-methyl ribonucleotide
  modified_base 46: mod_base = OTHER; note = 2'-O-methyl ribonucleotide
  modified_base 48: mod_base = OTHER; note = 2'-O-methyl ribonucleotide
  modified_base 50: mod_base = OTHER; note = 2'-O-methyl ribonucleotide
  modified_base 52: mod_base = OTHER; note = 2'-O-methyl ribonucleotide
  modified_base 53: mod_base = OTHER; note = 2'-O-methyl ribonucleotide
  modified_base 54: mod_base = OTHER; note = 2'-O-methyl ribonucleotide
  modified_base 55: mod_base = OTHER; note = 2'-O-methyl ribonucleotide
  modified_base 56: mod_base = OTHER; note = 2'-O-methyl ribonucleotide
  modified_base 60: mod_base = OTHER; note = 2'-O-methyl ribonucleotide
  modified_base 61: mod_base = OTHER; note = 2'-O-methyl ribonucleotide
  modified_base 66: mod_base = OTHER; note = 2'-O-methyl ribonucleotide
  modified_base 67: mod_base = OTHER; note = 2'-O-methyl ribonucleotide
  modified_base 70: mod_base = OTHER; note = 2'-O-methyl ribonucleotide
  modified_base 71: mod_base = OTHER; note = 2'-O-methyl ribonucleotide
  modified_base 72: mod_base = OTHER; note = 2'-O-methyl ribonucleotide
  modified_base 73: mod_base = OTHER; note = 2'-O-methyl ribonucleotide
  modified_base 74: mod_base = OTHER; note = 2'-O-methyl ribonucleotide
  modified_base 75: mod_base = OTHER; note = 2'-O-methyl ribonucleotide
  modified_base 76: mod_base = OTHER; note = 2'-O-methyl ribonucleotide
  modified_base 77: mod_base = OTHER; note = 2'-O-methyl ribonucleotide
  modified_base 78: mod_base = OTHER; note = 2'-O-methyl ribonucleotide
  modified_base 79: mod_base = OTHER; note = 2'-O-methyl ribonucleotide
  modified_base 80: mod_base = OTHER; note = 2'-O-methyl ribonucleotide
  modified_base 81: mod_base = OTHER; note = 2'-O-methyl ribonucleotide
  modified_base 83: mod_base = OTHER; note = 2'-O-methyl ribonucleotide
  modified_base 84: mod_base = OTHER; note = 2'-O-methyl ribonucleotide
  modified_base 85: mod_base = OTHER; note = 2'-O-methyl ribonucleotide
  modified_base 86: mod_base = OTHER; note = 2'-O-methyl ribonucleotide
  modified_base 87: mod_base = OTHER; note = 2'-O-methyl ribonucleotide
  modified_base 88: mod_base = OTHER; note = 2'-O-methyl ribonucleotide
  modified_base 89: mod_base = OTHER; note = 2'-O-methyl ribonucleotide
  modified_base 90: mod_base = OTHER; note = 2'-O-methyl ribonucleotide
  modified_base 91: mod_base = OTHER; note = 2'-O-methyl ribonucleotide
  modified_base 92: mod_base = OTHER; note = 2'-O-methyl ribonucleotide
  modified_base 93: mod_base = OTHER; note = 2'-O-methyl ribonucleotide
  modified_base 94: mod_base = OTHER; note = 2'-O-methyl ribonucleotide
  modified_base 95: mod_base = OTHER; note = 2'-O-methyl ribonucleotide
  modified_base 96: mod_base = OTHER; note = 2'-O-methyl ribonucleotide
  modified_base 97: mod_base = OTHER; note = 2'-O-methyl ribonucleotide
  modified_base 98: mod_base = OTHER; note = 2'-O-methyl ribonucleotide
  modified_base 99: mod_base = OTHER; note = 2'-O-methyl ribonucleotide
  modified_base 100: mod_base = OTHER; note = 2'-O-methyl ribonucleotide
  modified_base 57: mod_base = OTHER; note = nebularine
  modified_base 1..3: mod_base = OTHER; note = phosphorothioate linkage
  modified_base 98..100: mod_base = OTHER; note = phosphorothioate linkage

SEQ ID NO: 2063 - RNA, 100 nt, synthetic construct; identical to SEQ ID NO: 1902
  source 1..100: mol_type = other RNA
  modified_base 1: mod_base = OTHER; note = 2'-O-methyl ribonucleotide
  modified_base 2: mod_base = OTHER; note = 2'-O-methyl ribonucleotide
  modified_base 3: mod_base = OTHER; note = 2'-O-methyl ribonucleotide
  modified_base 21: mod_base = OTHER; note = 2'-O-methyl ribonucleotide
  modified_base 28: mod_base = OTHER; note = 2'-O-methyl ribonucleotide
  modified_base 29: mod_base = OTHER; note = 2'-O-methyl ribonucleotide
  modified_base 30: mod_base = OTHER; note = 2'-O-methyl ribonucleotide
  modified_base 31: mod_base = OTHER; note = 2'-O-methyl ribonucleotide
  modified_base 32: mod_base = OTHER; note = 2'-O-methyl ribonucleotide
  modified_base 33: mod_base = OTHER; note = 2'-O-methyl ribonucleotide
  modified_base 34: mod_base = OTHER; note = 2'-O-methyl ribonucleotide
  modified_base 35: mod_base = OTHER; note = 2'-O-methyl ribonucleotide
  modified_base 36: mod_base = OTHER; note = 2'-O-methyl ribonucleotide
  modified_base 37: mod_base = OTHER; note = 2'-O-methyl ribonucleotide
  modified_base 38: mod_base = OTHER; note = 2'-O-methyl ribonucleotide
  modified_base 39: mod_base = OTHER; note = 2'-O-methyl ribonucleotide
  modified_base 40: mod_base = OTHER; note = 2'-O-methyl ribonucleotide
  modified_base 41: mod_base = OTHER; note = 2'-O-methyl ribonucleotide
  modified_base 42: mod_base = OTHER; note = 2'-O-methyl ribonucleotide
  modified_base 46: mod_base = OTHER; note = 2'-O-methyl ribonucleotide
  modified_base 48: mod_base = OTHER; note = 2'-O-methyl ribonucleotide
  modified_base 50: mod_base = OTHER; note = 2'-O-methyl ribonucleotide
  modified_base 52: mod_base = OTHER; note = 2'-O-methyl ribonucleotide
  modified_base 53: mod_base = OTHER; note = 2'-O-methyl ribonucleotide
  modified_base 54: mod_base = OTHER; note = 2'-O-methyl ribonucleotide
  modified_base 55: mod_base = OTHER; note = 2'-O-methyl ribonucleotide
  modified_base 56: mod_base = OTHER; note = 2'-O-methyl ribonucleotide
  modified_base 57: mod_base = OTHER; note = 2'-O-methyl ribonucleotide
  modified_base 60: mod_base = OTHER; note = 2'-O-methyl ribonucleotide
  modified_base 61: mod_base = OTHER; note = 2'-O-methyl ribonucleotide
  modified_base 66: mod_base = OTHER; note = 2'-O-methyl ribonucleotide
  modified_base 67: mod_base = OTHER; note = 2'-O-methyl ribonucleotide
  modified_base 70: mod_base = OTHER; note = 2'-O-methyl ribonucleotide
  modified_base 71: mod_base = OTHER; note = 2'-O-methyl ribonucleotide
  modified_base 72: mod_base = OTHER; note = 2'-O-methyl ribonucleotide
  modified_base 73: mod_base = OTHER; note = 2'-O-methyl ribonucleotide
  modified_base 74: mod_base = OTHER; note = 2'-O-methyl ribonucleotide
  modified_base 75: mod_base = OTHER; note = 2'-O-methyl ribonucleotide
  modified_base 76: mod_base = OTHER; note = 2'-O-methyl ribonucleotide
  modified_base 77: mod_base = OTHER; note = 2'-O-methyl ribonucleotide
  modified_base 78: mod_base = OTHER; note = 2'-O-methyl ribonucleotide
  modified_base 79: mod_base = OTHER; note = 2'-O-methyl ribonucleotide
  modified_base 80: mod_base = OTHER; note = 2'-O-methyl ribonucleotide
  modified_base 81: mod_base = OTHER; note = 2'-O-methyl ribonucleotide
  modified_base 83: mod_base = OTHER; note = 2'-O-methyl ribonucleotide
  modified_base 84: mod_base = OTHER; note = 2'-O-methyl ribonucleotide
  modified_base 85: mod_base = OTHER; note = 2'-O-methyl ribonucleotide
  modified_base 86: mod_base = OTHER; note = 2'-O-methyl ribonucleotide
  modified_base 87: mod_base = OTHER; note = 2'-O-methyl ribonucleotide
  modified_base 88: mod_base = OTHER; note = 2'-O-methyl ribonucleotide
  modified_base 89: mod_base = OTHER; note = 2'-O-methyl ribonucleotide
  modified_base 90: mod_base = OTHER; note = 2'-O-methyl ribonucleotide
  modified_base 91: mod_base = OTHER; note = 2'-O-methyl ribonucleotide
  modified_base 92: mod_base = OTHER; note = 2'-O-methyl ribonucleotide
  modified_base 93: mod_base = OTHER; note = 2'-O-methyl ribonucleotide
  modified_base 94: mod_base = OTHER; note = 2'-O-methyl ribonucleotide
  modified_base 95: mod_base = OTHER; note = 2'-O-methyl ribonucleotide
  modified_base 96: mod_base = OTHER; note = 2'-O-methyl ribonucleotide
  modified_base 97: mod_base = OTHER; note = 2'-O-methyl ribonucleotide
  modified_base 98: mod_base = OTHER; note = 2'-O-methyl ribonucleotide
  modified_base 99: mod_base = OTHER; note = 2'-O-methyl ribonucleotide
  modified_base 100: mod_base = OTHER; note = 2'-O-methyl ribonucleotide
  modified_base 65: mod_base = OTHER; note = nebularine
  modified_base 1..3: mod_base = OTHER; note = phosphorothioate linkage
  modified_base 98..100: mod_base = OTHER; note = phosphorothioate linkage

SEQ ID NO: 2064 - RNA, 100 nt, synthetic construct; identical to SEQ ID NO: 1903
  source 1..100: mol_type = other RNA
  modified_base 1: mod_base = OTHER; note = 2'-O-methyl ribonucleotide
  modified_base 2: mod_base = OTHER; note = 2'-O-methyl ribonucleotide
  modified_base 3: mod_base = OTHER; note = 2'-O-methyl ribonucleotide
  modified_base 21: mod_base = OTHER; note = 2'-O-methyl ribonucleotide
  modified_base 28: mod_base = OTHER; note = 2'-O-methyl ribonucleotide
  modified_base 29: mod_base = OTHER; note = 2'-O-methyl ribonucleotide
  modified_base 30: mod_base = OTHER; note = 2'-O-methyl ribonucleotide
  modified_base 31: mod_base = OTHER; note = 2'-O-methyl ribonucleotide
  modified_base 32: mod_base = OTHER; note = 2'-O-methyl ribonucleotide
  modified_base 33: mod_base = OTHER; note = 2'-O-methyl ribonucleotide
  modified_base 35: mod_base = OTHER; note = 2'-O-methyl ribonucleotide
  modified_base 36: mod_base = OTHER; note = 2'-O-methyl ribonucleotide
  modified_base 37: mod_base = OTHER; note = 2'-O-methyl ribonucleotide
  modified_base 38: mod_base = OTHER; note = 2'-O-methyl ribonucleotide
  modified_base 39: mod_base = OTHER; note = 2'-O-methyl ribonucleotide
  modified_base 40: mod_base = OTHER; note = 2'-O-methyl ribonucleotide
  modified_base 41: mod_base = OTHER; note = 2'-O-methyl ribonucleotide
  modified_base 42: mod_base = OTHER; note = 2'-O-methyl ribonucleotide
  modified_base 46: mod_base = OTHER; note = 2'-O-methyl ribonucleotide
  modified_base 48: mod_base = OTHER; note = 2'-O-methyl ribonucleotide
  modified_base 50: mod_base = OTHER; note = 2'-O-methyl ribonucleotide
  modified_base 52: mod_base = OTHER; note = 2'-O-methyl ribonucleotide
  modified_base 53: mod_base = OTHER; note = 2'-O-methyl ribonucleotide
  modified_base 54: mod_base = OTHER; note = 2'-O-methyl ribonucleotide
  modified_base 55: mod_base = OTHER; note = 2'-O-methyl ribonucleotide
  modified_base 56: mod_base = OTHER; note = 2'-O-methyl ribonucleotide
  modified_base 60: mod_base = OTHER; note = 2'-O-methyl ribonucleotide
  modified_base 61: mod_base = OTHER; note = 2'-O-methyl ribonucleotide
  modified_base 66: mod_base = OTHER; note = 2'-O-methyl ribonucleotide
  modified_base 67: mod_base = OTHER; note = 2'-O-methyl ribonucleotide
  modified_base 70: mod_base = OTHER; note = 2'-O-methyl ribonucleotide
  modified_base 71: mod_base = OTHER; note = 2'-O-methyl ribonucleotide
  modified_base 72: mod_base = OTHER; note = 2'-O-methyl ribonucleotide
  modified_base 73: mod_base = OTHER; note = 2'-O-methyl ribonucleotide
  modified_base 74: mod_base = OTHER; note = 2'-O-methyl ribonucleotide
  modified_base 75: mod_base = OTHER; note = 2'-O-methyl ribonucleotide
  modified_base 76: mod_base = OTHER; note = 2'-O-methyl ribonucleotide
  modified_base 77: mod_base = OTHER; note = 2'-O-methyl ribonucleotide
  modified_base 78: mod_base = OTHER; note = 2'-O-methyl ribonucleotide
  modified_base 79: mod_base = OTHER; note = 2'-O-methyl ribonucleotide
  modified_base 80: mod_base = OTHER; note = 2'-O-methyl ribonucleotide
  modified_base 81: mod_base = OTHER; note = 2'-O-methyl ribonucleotide
  modified_base 83: mod_base = OTHER; note = 2'-O-methyl ribonucleotide
  modified_base 84: mod_base = OTHER; note = 2'-O-methyl ribonucleotide
  modified_base 85: mod_base = OTHER; note = 2'-O-methyl ribonucleotide
  modified_base 86: mod_base = OTHER; note = 2'-O-methyl ribonucleotide
  modified_base 87: mod_base = OTHER; note = 2'-O-methyl ribonucleotide
  modified_base 88: mod_base = OTHER; note = 2'-O-methyl ribonucleotide
  modified_base 89: mod_base = OTHER; note = 2'-O-methyl ribonucleotide
  modified_base 90: mod_base = OTHER; note = 2'-O-methyl ribonucleotide
  modified_base 91: mod_base = OTHER; note = 2'-O-methyl ribonucleotide
  modified_base 92: mod_base = OTHER; note = 2'-O-methyl ribonucleotide
  modified_base 93: mod_base = OTHER; note = 2'-O-methyl ribonucleotide
  modified_base 94: mod_base = OTHER; note = 2'-O-methyl ribonucleotide
  modified_base 95: mod_base = OTHER; note = 2'-O-methyl ribonucleotide
  modified_base 96: mod_base = OTHER; note = 2'-O-methyl ribonucleotide
  modified_base 97: mod_base = OTHER; note = 2'-O-methyl ribonucleotide
  modified_base 98: mod_base = OTHER; note = 2'-O-methyl ribonucleotide
  modified_base 99: mod_base = OTHER; note = 2'-O-methyl ribonucleotide
  modified_base 100: mod_base = OTHER; note = 2'-O-methyl ribonucleotide
  modified_base 34: mod_base = OTHER; note = nebularine
  modified_base 57: mod_base = OTHER; note = nebularine
  modified_base 65: mod_base = OTHER; note = nebularine
  modified_base 1..3: mod_base = OTHER; note = phosphorothioate linkage
  modified_base 98..100: mod_base = OTHER; note = phosphorothioate linkage

SEQ ID NO: 2065 - RNA, 100 nt, synthetic construct; identical to SEQ ID NO: 1904
  source 1..100: mol_type = other RNA
  modified_base 1: mod_base = OTHER; note = 2'-O-methyl ribonucleotide
  modified_base 2: mod_base = OTHER; note = 2'-O-methyl ribonucleotide
  modified_base 3: mod_base = OTHER; note = 2'-O-methyl ribonucleotide
  modified_base 21: mod_base = OTHER; note = 2'-O-methyl ribonucleotide
  modified_base 29: mod_base = OTHER; note = 2'-O-methyl ribonucleotide
  modified_base 30: mod_base = OTHER; note = 2'-O-methyl ribonucleotide
  modified_base 31: mod_base = OTHER; note = 2'-O-methyl ribonucleotide
  modified_base 32: mod_base = OTHER; note = 2'-O-methyl ribonucleotide
  modified_base 33: mod_base = OTHER; note = 2'-O-methyl ribonucleotide
  modified_base 35: mod_base = OTHER; note = 2'-O-methyl ribonucleotide
  modified_base 36: mod_base = OTHER; note = 2'-O-methyl ribonucleotide
  modified_base 37: mod_base = OTHER; note = 2'-O-methyl ribonucleotide
  modified_base 38: mod_base = OTHER; note = 2'-O-methyl ribonucleotide
  modified_base 39: mod_base = OTHER; note = 2'-O-methyl ribonucleotide
  modified_base 40: mod_base = OTHER; note = 2'-O-methyl ribonucleotide
  modified_base 41: mod_base = OTHER; note = 2'-O-methyl ribonucleotide
  modified_base 46: mod_base = OTHER; note = 2'-O-methyl ribonucleotide
  modified_base 48: mod_base = OTHER; note = 2'-O-methyl ribonucleotide
  modified_base 50: mod_base = OTHER; note = 2'-O-methyl ribonucleotide
  modified_base 52: mod_base = OTHER; note = 2'-O-methyl ribonucleotide
  modified_base 53: mod_base = OTHER; note = 2'-O-methyl ribonucleotide
  modified_base 54: mod_base = OTHER; note = 2'-O-methyl ribonucleotide
  modified_base 55: mod_base = OTHER; note = 2'-O-methyl ribonucleotide
  modified_base 56: mod_base = OTHER; note = 2'-O-methyl ribonucleotide
  modified_base 60: mod_base = OTHER; note = 2'-O-methyl ribonucleotide
  modified_base 61: mod_base = OTHER; note = 2'-O-methyl ribonucleotide
  modified_base 66: mod_base = OTHER; note = 2'-O-methyl ribonucleotide
  modified_base 67: mod_base = OTHER; note = 2'-O-methyl ribonucleotide
  modified_base 70: mod_base = OTHER; note = 2'-O-methyl ribonucleotide
  modified_base 71: mod_base = OTHER; note = 2'-O-methyl ribonucleotide
  modified_base 72: mod_base = OTHER; note = 2'-O-methyl ribonucleotide
  modified_base 73: mod_base = OTHER; note = 2'-O-methyl ribonucleotide
  modified_base 74: mod_base = OTHER; note = 2'-O-methyl ribonucleotide
  modified_base 75: mod_base = OTHER; note = 2'-O-methyl ribonucleotide
  modified_base 76: mod_base = OTHER; note = 2'-O-methyl ribonucleotide
  modified_base 77: mod_base = OTHER; note = 2'-O-methyl ribonucleotide
  modified_base 78: mod_base = OTHER; note = 2'-O-methyl ribonucleotide
  modified_base 79: mod_base = OTHER; note = 2'-O-methyl ribonucleotide
  modified_base 80: mod_base = OTHER; note = 2'-O-methyl ribonucleotide
  modified_base 81: mod_base = OTHER; note = 2'-O-methyl ribonucleotide
  modified_base 83: mod_base = OTHER; note = 2'-O-methyl ribonucleotide
  modified_base 84: mod_base = OTHER; note = 2'-O-methyl ribonucleotide
  modified_base 85: mod_base = OTHER; note = 2'-O-methyl ribonucleotide
  modified_base 86: mod_base = OTHER; note = 2'-O-methyl ribonucleotide
  modified_base 87: mod_base = OTHER; note = 2'-O-methyl ribonucleotide
  modified_base 88: mod_base = OTHER; note = 2'-O-methyl ribonucleotide
  modified_base 89: mod_base = OTHER; note = 2'-O-methyl ribonucleotide
  modified_base 90: mod_base = OTHER; note = 2'-O-methyl ribonucleotide
  modified_base 91: mod_base = OTHER; note = 2'-O-methyl ribonucleotide
  modified_base 92: mod_base = OTHER; note = 2'-O-methyl ribonucleotide
  modified_base 93: mod_base = OTHER; note = 2'-O-methyl ribonucleotide
  modified_base 94: mod_base = OTHER; note = 2'-O-methyl ribonucleotide
  modified_base 95: mod_base = OTHER; note = 2'-O-methyl ribonucleotide
  modified_base 96: mod_base = OTHER; note = 2'-O-methyl ribonucleotide
  modified_base 97: mod_base = OTHER; note = 2'-O-methyl ribonucleotide
  modified_base 98: mod_base = OTHER; note = 2'-O-methyl ribonucleotide
  modified_base 99: mod_base = OTHER; note = 2'-O-methyl ribonucleotide
  modified_base 100: mod_base = OTHER; note = 2'-O-methyl ribonucleotide
  modified_base 28: mod_base = OTHER; note = nebularine
  modified_base 34: mod_base = OTHER; note = nebularine
  modified_base 42: mod_base = OTHER; note = nebularine
  modified_base 57: mod_base = OTHER; note = nebularine
  modified_base 65: mod_base = OTHER; note = nebularine
  modified_base 1..3: mod_base = OTHER; note = phosphorothioate linkage
  modified_base 98..100: mod_base = OTHER; note = phosphorothioate linkage

SEQ ID NO: 2066 - RNA, 100 nt, synthetic construct; identical to SEQ ID NO: 1905
  source 1..100: mol_type = other RNA
  modified_base 1: mod_base = OTHER; note = 2'-O-methyl ribonucleotide
  modified_base 2: mod_base = OTHER; note = 2'-O-methyl ribonucleotide
  modified_base 3: mod_base = OTHER; note = 2'-O-methyl ribonucleotide
  modified_base 21: mod_base = OTHER; note = 2'-O-methyl ribonucleotide
  modified_base 28: mod_base = OTHER; note = 2'-O-methyl ribonucleotide
  modified_base 29: mod_base = OTHER; note = 2'-O-methyl ribonucleotide
  modified_base 30: mod_base = OTHER; note = 2'-O-methyl ribonucleotide
  modified_base 31: mod_base = OTHER; note = 2'-O-methyl ribonucleotide
  modified_base 32: mod_base = OTHER; note = 2'-O-methyl ribonucleotide
  modified_base 33: mod_base = OTHER; note = 2'-O-methyl ribonucleotide
  modified_base 35: mod_base = OTHER; note = 2'-O-methyl ribonucleotide
  modified_base 36: mod_base = OTHER; note = 2'-O-methyl ribonucleotide
  modified_base 37: mod_base = OTHER; note = 2'-O-methyl ribonucleotide
  modified_base 38: mod_base = OTHER; note = 2'-O-methyl ribonucleotide
  modified_base 39: mod_base = OTHER; note = 2'-O-methyl ribonucleotide
  modified_base 40: mod_base = OTHER; note = 2'-O-methyl ribonucleotide
  modified_base 41: mod_base = OTHER; note = 2'-O-methyl ribonucleotide
  modified_base 42: mod_base = OTHER; note = 2'-O-methyl ribonucleotide
  modified_base 46: mod_base = OTHER; note = 2'-O-methyl ribonucleotide
  modified_base 48: mod_base = OTHER; note = 2'-O-methyl ribonucleotide
  modified_base 50: mod_base = OTHER; note = 2'-O-methyl ribonucleotide
  modified_base 52: mod_base = OTHER; note = 2'-O-methyl ribonucleotide
  modified_base 53: mod_base = OTHER; note = 2'-O-methyl ribonucleotide
  modified_base 54: mod_base = OTHER; note = 2'-O-methyl ribonucleotide
  modified_base 55: mod_base = OTHER; note = 2'-O-methyl ribonucleotide
  modified_base 56: mod_base = OTHER; note = 2'-O-methyl ribonucleotide
  modified_base 57: mod_base = OTHER; note = 2'-O-methyl ribonucleotide
  modified_base 60: mod_base = OTHER; note = 2'-O-methyl ribonucleotide
  modified_base 61: mod_base = OTHER; note = 2'-O-methyl ribonucleotide
  modified_base 66: mod_base = OTHER; note = 2'-O-methyl ribonucleotide
  modified_base 67: mod_base = OTHER; note = 2'-O-methyl ribonucleotide
  modified_base 70: mod_base = OTHER; note = 2'-O-methyl ribonucleotide
  modified_base 71: mod_base = OTHER; note = 2'-O-methyl ribonucleotide
  modified_base 72: mod_base = OTHER; note = 2'-O-methyl ribonucleotide
  modified_base 73: mod_base = OTHER; note = 2'-O-methyl ribonucleotide
  modified_base 74: mod_base = OTHER; note = 2'-O-methyl ribonucleotide
  modified_base 75: mod_base = OTHER; note = 2'-O-methyl ribonucleotide
  modified_base 76: mod_base = OTHER; note = 2'-O-methyl ribonucleotide
  modified_base 77: mod_base = OTHER; note = 2'-O-methyl ribonucleotide
  modified_base 78: mod_base = OTHER; note = 2'-O-methyl ribonucleotide
  modified_base 79: mod_base = OTHER; note = 2'-O-methyl ribonucleotide
  modified_base 80: mod_base = OTHER; note = 2'-O-methyl ribonucleotide
  modified_base 81: mod_base = OTHER; note = 2'-O-methyl ribonucleotide
  modified_base 83: mod_base = OTHER; note = 2'-O-methyl ribonucleotide
  modified_base 84: mod_base = OTHER; note = 2'-O-methyl ribonucleotide
  modified_base 85: mod_base = OTHER; note = 2'-O-methyl ribonucleotide
  modified_base 86: mod_base = OTHER; note = 2'-O-methyl ribonucleotide
  modified_base 87: mod_base = OTHER; note = 2'-O-methyl ribonucleotide
  modified_base 88: mod_base = OTHER; note = 2'-O-methyl ribonucleotide
  modified_base 89: mod_base = OTHER; note = 2'-O-methyl ribonucleotide
  modified_base 90: mod_base = OTHER; note = 2'-O-methyl ribonucleotide
  modified_base 91: mod_base = OTHER; note = 2'-O-methyl ribonucleotide
  modified_base 92: mod_base = OTHER; note = 2'-O-methyl ribonucleotide
  modified_base 93: mod_base = OTHER; note = 2'-O-methyl ribonucleotide
  modified_base 94: mod_base = OTHER; note = 2'-O-methyl ribonucleotide
  modified_base 95: mod_base = OTHER; note = 2'-O-methyl ribonucleotide
  modified_base 96: mod_base = OTHER; note = 2'-O-methyl ribonucleotide
  modified_base 97: mod_base = OTHER; note = 2'-O-methyl ribonucleotide
  modified_base 98: mod_base = OTHER; note = 2'-O-methyl ribonucleotide
  modified_base 99: mod_base = OTHER; note = 2'-O-methyl ribonucleotide
  modified_base 100: mod_base = OTHER; note = 2'-O-methyl ribonucleotide
  modified_base 9: mod_base = OTHER; note = nebularine
  modified_base 14: mod_base = OTHER; note = nebularine
  modified_base 34: mod_base = OTHER; note = nebularine
  modified_base 1..3: mod_base = OTHER; note = phosphorothioate linkage
  modified_base 98..100: mod_base = OTHER; note = phosphorothioate linkage

SEQ ID NO: 2067 - RNA, 100 nt, synthetic construct; identical to SEQ ID NO: 1906
  source 1..100: mol_type = other RNA
  modified_base 1: mod_base = OTHER; note = 2'-O-methyl ribonucleotide
  modified_base 2: mod_base = OTHER; note = 2'-O-methyl ribonucleotide
  modified_base 3: mod_base = OTHER; note = 2'-O-methyl ribonucleotide
  modified_base 21: mod_base = OTHER; note = 2'-O-methyl ribonucleotide
  modified_base 28: mod_base = OTHER; note = 2'-O-methyl ribonucleotide
  modified_base 29: mod_base = OTHER; note = 2'-O-methyl ribonucleotide
  modified_base 30: mod_base = OTHER; note = 2'-O-methyl ribonucleotide
  modified_base 31: mod_base = OTHER; note = 2'-O-methyl ribonucleotide
  modified_base 32: mod_base = OTHER; note = 2'-O-methyl ribonucleotide
  modified_base 33: mod_base = OTHER; note = 2'-O-methyl ribonucleotide
  modified_base 35: mod_base = OTHER; note = 2'-O-methyl ribonucleotide
  modified_base 36: mod_base = OTHER; note = 2'-O-methyl ribonucleotide
  modified_base 37: mod_base = OTHER; note = 2'-O-methyl ribonucleotide
  modified_base 38: mod_base = OTHER; note = 2'-O-methyl ribonucleotide
  modified_base 39: mod_base = OTHER; note = 2'-O-methyl ribonucleotide
  modified_base 40: mod_base = OTHER; note = 2'-O-methyl ribonucleotide
  modified_base 41: mod_base = OTHER; note = 2'-O-methyl ribonucleotide
  modified_base 42: mod_base = OTHER; note = 2'-O-methyl ribonucleotide
  modified_base 46: mod_base = OTHER; note = 2'-O-methyl ribonucleotide
  modified_base 48: mod_base = OTHER; note = 2'-O-methyl ribonucleotide
  modified_base 50: mod_base = OTHER; note = 2'-O-methyl ribonucleotide
  modified_base 52: mod_base = OTHER; note = 2'-O-methyl ribonucleotide
  modified_base 53: mod_base = OTHER; note = 2'-O-methyl ribonucleotide
  modified_base 54: mod_base = OTHER; note = 2'-O-methyl ribonucleotide
  modified_base 55: mod_base = OTHER; note = 2'-O-methyl ribonucleotide
  modified_base 56: mod_base = OTHER; note = 2'-O-methyl ribonucleotide
  modified_base 60: mod_base = OTHER; note = 2'-O-methyl ribonucleotide
  modified_base 61: mod_base = OTHER; note = 2'-O-methyl ribonucleotide
  modified_base 66: mod_base = OTHER; note = 2'-O-methyl ribonucleotide
  modified_base 67: mod_base = OTHER; note = 2'-O-methyl ribonucleotide
  modified_base 70: mod_base = OTHER; note = 2'-O-methyl ribonucleotide
  modified_base 71: mod_base = OTHER; note = 2'-O-methyl ribonucleotide
  modified_base 72: mod_base = OTHER; note = 2'-O-methyl ribonucleotide
  modified_base 73: mod_base = OTHER; note = 2'-O-methyl ribonucleotide
  modified_base 74: mod_base = OTHER; note = 2'-O-methyl ribonucleotide
  modified_base 75: mod_base = OTHER; note = 2'-O-methyl ribonucleotide
  modified_base 76: mod_base = OTHER; note = 2'-O-methyl ribonucleotide
  modified_base 77: mod_base = OTHER; note = 2'-O-methyl ribonucleotide
  modified_base 78: mod_base = OTHER; note = 2'-O-methyl ribonucleotide
  modified_base 79: mod_base = OTHER; note = 2'-O-methyl ribonucleotide
  modified_base 80: mod_base = OTHER; note = 2'-O-methyl ribonucleotide
  modified_base 81: mod_base = OTHER; note = 2'-O-methyl ribonucleotide
  modified_base 83: mod_base = OTHER; note = 2'-O-methyl ribonucleotide
  modified_base 84: mod_base = OTHER; note = 2'-O-methyl ribonucleotide
  modified_base 85: mod_base = OTHER; note = 2'-O-methyl ribonucleotide
  modified_base 86: mod_base = OTHER; note = 2'-O-methyl ribonucleotide
  modified_base 87: mod_base = OTHER; note = 2'-O-methyl ribonucleotide
  modified_base 88: mod_base = OTHER; note = 2'-O-methyl ribonucleotide
  modified_base 89: mod_base = OTHER; note = 2'-O-methyl ribonucleotide
  modified_base 90: mod_base = OTHER; note = 2'-O-methyl ribonucleotide
  modified_base 91: mod_base = OTHER; note = 2'-O-methyl ribonucleotide
  modified_base 92: mod_base = OTHER; note = 2'-O-methyl ribonucleotide
  modified_base 93: mod_base = OTHER; note = 2'-O-methyl ribonucleotide
  modified_base 94: mod_base = OTHER; note = 2'-O-methyl ribonucleotide
  modified_base 95: mod_base = OTHER; note = 2'-O-methyl ribonucleotide
  modified_base 96: mod_base = OTHER; note = 2'-O-methyl ribonucleotide
  modified_base 97: mod_base = OTHER; note = 2'-O-methyl ribonucleotide
  modified_base 98: mod_base = OTHER; note = 2'-O-methyl ribonucleotide
  modified_base 99: mod_base = OTHER; note = 2'-O-methyl ribonucleotide
  modified_base 100: mod_base = OTHER; note = 2'-O-methyl ribonucleotide
  modified_base 9: mod_base = OTHER; note = nebularine
  modified_base 14: mod_base = OTHER; note = nebularine
  modified_base 34: mod_base = OTHER; note = nebularine
  modified_base 57: mod_base = OTHER; note = nebularine
  modified_base 1..3: mod_base = OTHER; note = phosphorothioate linkage
  modified_base 98..100: mod_base = OTHER; note = phosphorothioate linkage

SEQ ID NO: 2068 - RNA, 100 nt, synthetic construct; identical to SEQ ID NO: 1907
  source 1..100: mol_type = other RNA
  modified_base 1: mod_base = OTHER; note = 2'-O-methyl ribonucleotide
  modified_base 2: mod_base = OTHER; note = 2'-O-methyl ribonucleotide
  modified_base 3: mod_base = OTHER; note = 2'-O-methyl ribonucleotide
  modified_base 21: mod_base = OTHER; note = 2'-O-methyl ribonucleotide
  modified_base 28: mod_base = OTHER; note = 2'-O-methyl ribonucleotide
  modified_base 29: mod_base = OTHER; note = 2'-O-methyl ribonucleotide
  modified_base 30: mod_base = OTHER; note = 2'-O-methyl ribonucleotide
  modified_base 31: mod_base = OTHER; note = 2'-O-methyl ribonucleotide
  modified_base 32: mod_base = OTHER; note = 2'-O-methyl ribonucleotide
  modified_base 33: mod_base = OTHER; note = 2'-O-methyl ribonucleotide
  modified_base 34: mod_base = OTHER; note = 2'-O-methyl ribonucleotide
  modified_base 35: mod_base = OTHER; note = 2'-O-methyl ribonucleotide
  modified_base 36: mod_base = OTHER; note = 2'-O-methyl ribonucleotide
  modified_base 37: mod_base = OTHER; note = 2'-O-methyl ribonucleotide
  modified_base 38: mod_base = OTHER; note = 2'-O-methyl ribonucleotide
  modified_base 39: mod_base = OTHER; note = 2'-O-methyl ribonucleotide
  modified_base 40: mod_base = OTHER; note = 2'-O-methyl ribonucleotide
  modified_base 41: mod_base = OTHER; note = 2'-O-methyl ribonucleotide
  modified_base 42: mod_base = OTHER; note = 2'-O-methyl ribonucleotide
  modified_base 46: mod_base = OTHER; note = 2'-O-methyl ribonucleotide
  modified_base 48: mod_base = OTHER; note = 2'-O-methyl ribonucleotide
  modified_base 50: mod_base = OTHER; note = 2'-O-methyl ribonucleotide
  modified_base 52: mod_base = OTHER; note = 2'-O-methyl ribonucleotide
  modified_base 53: mod_base = OTHER; note = 2'-O-methyl ribonucleotide
  modified_base 54: mod_base = OTHER; note = 2'-O-methyl ribonucleotide
  modified_base 55: mod_base = OTHER; note = 2'-O-methyl ribonucleotide
  modified_base 56: mod_base = OTHER; note = 2'-O-methyl ribonucleotide
  modified_base 57: mod_base = OTHER; note = 2'-O-methyl ribonucleotide
  modified_base 60: mod_base = OTHER; note = 2'-O-methyl ribonucleotide
  modified_base 61: mod_base = OTHER; note = 2'-O-methyl ribonucleotide
  modified_base 66: mod_base = OTHER; note = 2'-O-methyl ribonucleotide
  modified_base 67: mod_base = OTHER; note = 2'-O-methyl ribonucleotide
  modified_base 70: mod_base = OTHER; note = 2'-O-methyl ribonucleotide
  modified_base 71: mod_base = OTHER; note = 2'-O-methyl ribonucleotide
  modified_base 72: mod_base = OTHER; note = 2'-O-methyl ribonucleotide
  modified_base 73: mod_base = OTHER; note = 2'-O-methyl ribonucleotide
  modified_base 74: mod_base = OTHER; note = 2'-O-methyl ribonucleotide
  modified_base 75: mod_base = OTHER; note = 2'-O-methyl ribonucleotide
  modified_base 76: mod_base = OTHER; note = 2'-O-methyl ribonucleotide
  modified_base 77: mod_base = OTHER; note = 2'-O-methyl ribonucleotide
  modified_base 78: mod_base = OTHER; note = 2'-O-methyl ribonucleotide
  modified_base 79: mod_base = OTHER; note = 2'-O-methyl ribonucleotide
  modified_base 80: mod_base = OTHER; note = 2'-O-methyl ribonucleotide
  modified_base 81: mod_base = OTHER; note = 2'-O-methyl ribonucleotide
  modified_base 83: mod_base = OTHER; note = 2'-O-methyl ribonucleotide
  modified_base 84: mod_base = OTHER; note = 2'-O-methyl ribonucleotide
  modified_base 85: mod_base = OTHER; note = 2'-O-methyl ribonucleotide
  modified_base 86: mod_base = OTHER; note = 2'-O-methyl ribonucleotide
  modified_base 87: mod_base = OTHER; note = 2'-O-methyl ribonucleotide
  modified_base 88: mod_base = OTHER; note = 2'-O-methyl ribonucleotide
  modified_base 89: mod_base = OTHER; note = 2'-O-methyl ribonucleotide
  modified_base 90: mod_base = OTHER; note = 2'-O-methyl ribonucleotide
  modified_base 91: mod_base = OTHER; note = 2'-O-methyl ribonucleotide
  modified_base 92: mod_base = OTHER; note = 2'-O-methyl ribonucleotide
  modified_base 93: mod_base = OTHER; note = 2'-O-methyl ribonucleotide
  modified_base 94: mod_base = OTHER; note = 2'-O-methyl ribonucleotide
  modified_base 95: mod_base = OTHER; note = 2'-O-methyl ribonucleotide
  modified_base 96: mod_base = OTHER; note = 2'-O-methyl ribonucleotide
  modified_base 97: mod_base = OTHER; note = 2'-O-methyl ribonucleotide
  modified_base 98: mod_base = OTHER; note = 2'-O-methyl ribonucleotide
  modified_base 99: mod_base = OTHER; note = 2'-O-methyl ribonucleotide
  modified_base 100: mod_base = OTHER; note = 2'-O-methyl ribonucleotide
  modified_base 9: mod_base = OTHER; note = nebularine
  modified_base 14: mod_base = OTHER; note = nebularine
  modified_base 65: mod_base = OTHER; note = nebularine
  modified_base 1..3: mod_base = OTHER; note = phosphorothioate linkage
  modified_base 98..100: mod_base = OTHER; note = phosphorothioate linkage

SEQ ID NO: 2069 - RNA, 100 nt, synthetic construct; identical to SEQ ID NO: 1908
  source 1..100: mol_type = other RNA
  modified_base 1: mod_base = OTHER; note = 2'-O-methyl ribonucleotide
  modified_base 2: mod_base = OTHER; note = 2'-O-methyl ribonucleotide
  modified_base 3: mod_base = OTHER; note = 2'-O-methyl ribonucleotide
  modified_base 21: mod_base = OTHER; note = 2'-O-methyl ribonucleotide
  modified_base 28: mod_base = OTHER; note = 2'-O-methyl ribonucleotide
  modified_base 29: mod_base = OTHER; note = 2'-O-methyl ribonucleotide
  modified_base 30: mod_base = OTHER; note = 2'-O-methyl ribonucleotide
  modified_base 31: mod_base = OTHER; note = 2'-O-methyl ribonucleotide
  modified_base 32: mod_base = OTHER; note = 2'-O-methyl ribonucleotide
  modified_base 33: mod_base = OTHER; note = 2'-O-methyl ribonucleotide
  modified_base 35: mod_base = OTHER; note = 2'-O-methyl ribonucleotide
  modified_base 36: mod_base = OTHER; note = 2'-O-methyl ribonucleotide
  modified_base 37: mod_base = OTHER; note = 2'-O-methyl ribonucleotide
  modified_base 38: mod_base = OTHER; note = 2'-O-methyl ribonucleotide
  modified_base 39: mod_base = OTHER; note = 2'-O-methyl ribonucleotide
  modified_base 40: mod_base = OTHER; note = 2'-O-methyl ribonucleotide
  modified_base 41: mod_base = OTHER; note = 2'-O-methyl ribonucleotide
  modified_base 42: mod_base = OTHER; note = 2'-O-methyl ribonucleotide
  modified_base 46: mod_base = OTHER; note = 2'-O-methyl ribonucleotide
  modified_base 48: mod_base = OTHER; note = 2'-O-methyl ribonucleotide
  modified_base 50: mod_base = OTHER; note = 2'-O-methyl ribonucleotide
  modified_base 52: mod_base = OTHER; note = 2'-O-methyl ribonucleotide
  modified_base 53: mod_base = OTHER; note = 2'-O-methyl ribonucleotide
  modified_base 54: mod_base = OTHER; note = 2'-O-methyl ribonucleotide
  modified_base 55: mod_base = OTHER; note = 2'-O-methyl ribonucleotide
  modified_base 56: mod_base = OTHER; note = 2'-O-methyl ribonucleotide
  modified_base 60: mod_base = OTHER; note = 2'-O-methyl ribonucleotide
  modified_base 61: mod_base = OTHER; note = 2'-O-methyl ribonucleotide
  modified_base 66: mod_base = OTHER; note = 2'-O-methyl ribonucleotide
  modified_base 67: mod_base = OTHER; note = 2'-O-methyl ribonucleotide
  modified_base 70: mod_base = OTHER; note = 2'-O-methyl ribonucleotide
  modified_base 71: mod_base = OTHER; note = 2'-O-methyl ribonucleotide
  modified_base 72: mod_base = OTHER; note = 2'-O-methyl ribonucleotide
  modified_base 73: mod_base = OTHER; note = 2'-O-methyl ribonucleotide
  modified_base 74: mod_base = OTHER; note = 2'-O-methyl ribonucleotide
  modified_base 75: mod_base = OTHER; note = 2'-O-methyl ribonucleotide
  modified_base 76: mod_base = OTHER; note = 2'-O-methyl ribonucleotide
  modified_base 77: mod_base = OTHER; note = 2'-O-methyl ribonucleotide
  modified_base 78: mod_base = OTHER; note = 2'-O-methyl ribonucleotide
  modified_base 79: mod_base = OTHER; note = 2'-O-methyl ribonucleotide
  modified_base 80: mod_base = OTHER; note = 2'-O-methyl ribonucleotide
  modified_base 81: mod_base = OTHER; note = 2'-O-methyl ribonucleotide
  modified_base 83: mod_base = OTHER; note = 2'-O-methyl ribonucleotide
  modified_base 84: mod_base = OTHER; note = 2'-O-methyl ribonucleotide
  modified_base 85: mod_base = OTHER; note = 2'-O-methyl ribonucleotide
  modified_base 86: mod_base = OTHER; note = 2'-O-methyl ribonucleotide
  modified_base 87: mod_base = OTHER; note = 2'-O-methyl ribonucleotide
  modified_base 88: mod_base = OTHER; note = 2'-O-methyl ribonucleotide
  modified_base 89: mod_base = OTHER; note = 2'-O-methyl ribonucleotide
  modified_base 90: mod_base = OTHER; note = 2'-O-methyl ribonucleotide
  modified_base 91: mod_base = OTHER; note = 2'-O-methyl ribonucleotide
  modified_base 92: mod_base = OTHER; note = 2'-O-methyl ribonucleotide
  modified_base 93: mod_base = OTHER; note = 2'-O-methyl ribonucleotide
  modified_base 94: mod_base = OTHER; note = 2'-O-methyl ribonucleotide
  modified_base 95: mod_base = OTHER; note = 2'-O-methyl ribonucleotide
  modified_base 96: mod_base = OTHER; note = 2'-O-methyl ribonucleotide
  modified_base 97: mod_base = OTHER; note = 2'-O-methyl ribonucleotide
  modified_base 98: mod_base = OTHER; note = 2'-O-methyl ribonucleotide
  modified_base 99: mod_base = OTHER; note = 2'-O-methyl ribonucleotide
  modified_base 100: mod_base = OTHER; note = 2'-O-methyl ribonucleotide
  modified_base 9: mod_base = OTHER; note = nebularine
  modified_base 14: mod_base = OTHER; note = nebularine
  modified_base 34: mod_base = OTHER; note = nebularine
  modified_base 57: mod_base = OTHER; note = nebularine
  modified_base 65: mod_base = OTHER; note = nebularine
  modified_base 1..3: mod_base = OTHER; note = phosphorothioate linkage
  modified_base 98..100: mod_base = OTHER; note = phosphorothioate linkage

SEQ ID NO: 2070 - RNA, 100 nt, synthetic construct; identical to SEQ ID NO: 1909
  source 1..100: mol_type = other RNA
  modified_base 1: mod_base = OTHER; note = 2'-O-methyl ribonucleotide
  modified_base 2: mod_base = OTHER; note = 2'-O-methyl ribonucleotide
  modified_base 3: mod_base = OTHER; note = 2'-O-methyl ribonucleotide
  modified_base 21: mod_base = OTHER; note = 2'-O-methyl ribonucleotide
  modified_base 29: mod_base = OTHER; note = 2'-O-methyl ribonucleotide
  modified_base 30: mod_base = OTHER; note = 2'-O-methyl ribonucleotide
  modified_base 31: mod_base = OTHER; note = 2'-O-methyl ribonucleotide
  modified_base 32: mod_base = OTHER; note = 2'-O-methyl ribonucleotide
  modified_base 33: mod_base = OTHER; note = 2'-O-methyl ribonucleotide
  modified_base 35: mod_base = OTHER; note = 2'-O-methyl ribonucleotide
  modified_base 36: mod_base = OTHER; note = 2'-O-methyl ribonucleotide
  modified_base 37: mod_base = OTHER; note = 2'-O-methyl ribonucleotide
  modified_base 38: mod_base = OTHER; note = 2'-O-methyl ribonucleotide
  modified_base 39: mod_base = OTHER; note = 2'-O-methyl ribonucleotide
  modified_base 40: mod_base = OTHER; note = 2'-O-methyl ribonucleotide
  modified_base 41: mod_base = OTHER; note = 2'-O-methyl ribonucleotide
  modified_base 46: mod_base = OTHER; note = 2'-O-methyl ribonucleotide
  modified_base 48: mod_base = OTHER; note = 2'-O-methyl ribonucleotide
  modified_base 50: mod_base = OTHER; note = 2'-O-methyl ribonucleotide
  modified_base 52: mod_base = OTHER; note = 2'-O-methyl ribonucleotide
  modified_base 53: mod_base = OTHER; note = 2'-O-methyl ribonucleotide
  modified_base 54: mod_base = OTHER; note = 2'-O-methyl ribonucleotide
  modified_base 55: mod_base = OTHER; note = 2'-O-methyl ribonucleotide
  modified_base 56: mod_base = OTHER; note = 2'-O-methyl ribonucleotide
  modified_base 60: mod_base = OTHER; note = 2'-O-methyl ribonucleotide
  modified_base 61: mod_base = OTHER; note = 2'-O-methyl ribonucleotide
  modified_base 66: mod_base = OTHER; note = 2'-O-methyl ribonucleotide
  modified_base 67: mod_base = OTHER; note = 2'-O-methyl ribonucleotide
  modified_base 70: mod_base = OTHER; note = 2'-O-methyl ribonucleotide
  modified_base 71: mod_base = OTHER; note = 2'-O-methyl ribonucleotide
  modified_base 72: mod_base = OTHER; note = 2'-O-methyl ribonucleotide
  modified_base 73: mod_base = OTHER; note = 2'-O-methyl ribonucleotide
  modified_base 74: mod_base = OTHER; note = 2'-O-methyl ribonucleotide
  modified_base 75: mod_base = OTHER; note = 2'-O-methyl ribonucleotide
  modified_base 76: mod_base = OTHER; note = 2'-O-methyl ribonucleotide
  modified_base 77: mod_base = OTHER; note = 2'-O-methyl ribonucleotide
  modified_base 78: mod_base = OTHER; note = 2'-O-methyl ribonucleotide
  modified_base 79: mod_base = OTHER; note = 2'-O-methyl ribonucleotide
  modified_base 80: mod_base = OTHER; note = 2'-O-methyl ribonucleotide
  modified_base 81: mod_base = OTHER; note = 2'-O-methyl ribonucleotide
  modified_base 83: mod_base = OTHER; note = 2'-O-methyl ribonucleotide
  modified_base 84: mod_base = OTHER; note = 2'-O-methyl ribonucleotide
  modified_base 85: mod_base = OTHER; note = 2'-O-methyl ribonucleotide
  modified_base 86: mod_base = OTHER; note = 2'-O-methyl ribonucleotide
  modified_base 87: mod_base = OTHER; note = 2'-O-methyl ribonucleotide
  modified_base 88: mod_base = OTHER; note = 2'-O-methyl ribonucleotide
  modified_base 89: mod_base = OTHER; note = 2'-O-methyl ribonucleotide
  modified_base 90: mod_base = OTHER; note = 2'-O-methyl ribonucleotide
  modified_base 91: mod_base = OTHER; note = 2'-O-methyl ribonucleotide
  modified_base 92: mod_base = OTHER; note = 2'-O-methyl ribonucleotide
  modified_base 93: mod_base = OTHER; note = 2'-O-methyl ribonucleotide
  modified_base 94: mod_base = OTHER; note = 2'-O-methyl ribonucleotide
  modified_base 95: mod_base = OTHER; note = 2'-O-methyl ribonucleotide
  modified_base 96: mod_base = OTHER; note = 2'-O-methyl ribonucleotide
  modified_base 97: mod_base = OTHER; note = 2'-O-methyl ribonucleotide
  modified_base 98: mod_base = OTHER; note = 2'-O-methyl ribonucleotide
  modified_base 99: mod_base = OTHER; note = 2'-O-methyl ribonucleotide
  modified_base 100: mod_base = OTHER; note = 2'-O-methyl ribonucleotide
  modified_base 9: mod_base = OTHER; note = nebularine
  modified_base 14: mod_base = OTHER; note = nebularine
  modified_base 28: mod_base = OTHER; note = nebularine
  modified_base 34: mod_base = OTHER; note = nebularine
  modified_base 42: mod_base = OTHER; note = nebularine
  modified_base 57: mod_base = OTHER; note = nebularine
  modified_base 65: mod_base = OTHER; note = nebularine
  modified_base 1..3: mod_base = OTHER; note = phosphorothioate linkage
  modified_base 98..100: mod_base = OTHER; note = phosphorothioate linkage

SEQ ID NO: 2071 - RNA, 100 nt, synthetic construct; identical to SEQ ID NO: 1910
  source 1..100: mol_type = other RNA
  modified_base 1: mod_base = OTHER; note = 2'-O-methyl ribonucleotide
  modified_base 2: mod_base = OTHER; note = 2'-O-methyl ribonucleotide
  modified_base 3: mod_base = OTHER; note = 2'-O-methyl ribonucleotide
  modified_base 21: mod_base = OTHER; note = 2'-O-methyl ribonucleotide
  modified_base 28: mod_base = OTHER; note = 2'-O-methyl ribonucleotide
  modified_base 29: mod_base = OTHER; note = 2'-O-methyl ribonucleotide
  modified_base 30: mod_base = OTHER; note = 2'-O-methyl ribonucleotide
  modified_base 31: mod_base = OTHER; note = 2'-O-methyl ribonucleotide
  modified_base 32: mod_base = OTHER; note = 2'-O-methyl ribonucleotide
  modified_base 33: mod_base = OTHER; note = 2'-O-methyl ribonucleotide
  modified_base 35: mod_base = OTHER; note = 2'-O-methyl ribonucleotide
  modified_base 36: mod_base = OTHER; note = 2'-O-methyl ribonucleotide
  modified_base 37: mod_base = OTHER; note = 2'-O-methyl ribonucleotide
  modified_base 38: mod_base = OTHER; note = 2'-O-methyl ribonucleotide
  modified_base 39: mod_base = OTHER; note = 2'-O-methyl ribonucleotide
  modified_base 40: mod_base = OTHER; note = 2'-O-methyl ribonucleotide
  modified_base 41: mod_base = OTHER; note = 2'-O-methyl ribonucleotide
  modified_base 42: mod_base = OTHER; note = 2'-O-methyl ribonucleotide
  modified_base 46: mod_base = OTHER; note = 2'-O-methyl ribonucleotide
  modified_base 48: mod_base = OTHER; note = 2'-O-methyl ribonucleotide
  modified_base 50: mod_base = OTHER; note = 2'-O-methyl ribonucleotide
  modified_base 52: mod_base = OTHER; note = 2'-O-methyl ribonucleotide
  modified_base 53: mod_base = OTHER; note = 2'-O-methyl ribonucleotide
  modified_base 54: mod_base = OTHER; note = 2'-O-methyl ribonucleotide
  modified_base 55: mod_base = OTHER; note = 2'-O-methyl ribonucleotide
  modified_base 56: mod_base = OTHER; note = 2'-O-methyl ribonucleotide
  modified_base 60: mod_base = OTHER; note = 2'-O-methyl ribonucleotide
  modified_base 61: mod_base = OTHER; note = 2'-O-methyl ribonucleotide
  modified_base 66: mod_base = OTHER; note = 2'-O-methyl ribonucleotide
  modified_base 67: mod_base = OTHER; note = 2'-O-methyl ribonucleotide
  modified_base 70: mod_base = OTHER; note = 2'-O-methyl ribonucleotide
  modified_base 71: mod_base = OTHER; note = 2'-O-methyl ribonucleotide
  modified_base 72: mod_base = OTHER; note = 2'-O-methyl ribonucleotide
  modified_base 73: mod_base = OTHER; note = 2'-O-methyl ribonucleotide
  modified_base 74: mod_base = OTHER; note = 2'-O-methyl ribonucleotide
  modified_base 75: mod_base = OTHER; note = 2'-O-methyl ribonucleotide
  modified_base 76: mod_base = OTHER; note = 2'-O-methyl ribonucleotide
  modified_base 77: mod_base = OTHER; note = 2'-O-methyl ribonucleotide
  modified_base 78: mod_base = OTHER; note = 2'-O-methyl ribonucleotide
  modified_base 79: mod_base = OTHER; note = 2'-O-methyl ribonucleotide
  modified_base 80: mod_base = OTHER; note = 2'-O-methyl ribonucleotide
  modified_base 81: mod_base = OTHER; note = 2'-O-methyl ribonucleotide
  modified_base 83: mod_base = OTHER; note = 2'-O-methyl ribonucleotide
  modified_base 84: mod_base = OTHER; note = 2'-O-methyl ribonucleotide
  modified_base 85: mod_base = OTHER; note = 2'-O-methyl ribonucleotide
  modified_base 86: mod_base = OTHER; note = 2'-O-methyl ribonucleotide
  modified_base 87: mod_base = OTHER; note = 2'-O-methyl ribonucleotide
  modified_base 88: mod_base = OTHER; note = 2'-O-methyl ribonucleotide
  modified_base 89: mod_base = OTHER; note = 2'-O-methyl ribonucleotide
  modified_base 90: mod_base = OTHER; note = 2'-O-methyl ribonucleotide
  modified_base 91: mod_base = OTHER; note = 2'-O-methyl ribonucleotide
  modified_base 92: mod_base = OTHER; note = 2'-O-methyl ribonucleotide
  modified_base 93: mod_base = OTHER; note = 2'-O-methyl ribonucleotide
  modified_base 94: mod_base = OTHER; note = 2'-O-methyl ribonucleotide
  modified_base 95: mod_base = OTHER; note = 2'-O-methyl ribonucleotide
  modified_base 96: mod_base = OTHER; note = 2'-O-methyl ribonucleotide
  modified_base 97: mod_base = OTHER; note = 2'-O-methyl ribonucleotide
  modified_base 98: mod_base = OTHER; note = 2'-O-methyl ribonucleotide
  modified_base 99: mod_base = OTHER; note = 2'-O-methyl ribonucleotide
  modified_base 100: mod_base = OTHER; note = 2'-O-methyl ribonucleotide
  modified_base 9: mod_base = OTHER; note = nebularine
  modified_base 34: mod_base = OTHER; note = nebularine
  modified_base 57: mod_base = OTHER; note = nebularine
  modified_base 1..3: mod_base = OTHER; note = phosphorothioate linkage
  modified_base 98..100: mod_base = OTHER; note = phosphorothioate linkage

SEQ ID NO: 2072 - RNA, 100 nt, synthetic construct; identical to SEQ ID NO: 1911
  source 1..100: mol_type = other RNA
  modified_base 1: mod_base = OTHER; note = 2'-O-methyl ribonucleotide
  modified_base 2: mod_base = OTHER; note = 2'-O-methyl ribonucleotide
  modified_base 3: mod_base = OTHER; note = 2'-O-methyl ribonucleotide
  modified_base 21: mod_base = OTHER; note = 2'-O-methyl ribonucleotide
  modified_base 28: mod_base = OTHER; note = 2'-O-methyl ribonucleotide
  modified_base 29: mod_base = OTHER; note = 2'-O-methyl ribonucleotide
  modified_base 30: mod_base = OTHER; note = 2'-O-methyl ribonucleotide
  modified_base 31: mod_base = OTHER; note = 2'-O-methyl ribonucleotide
  modified_base 32: mod_base = OTHER; note = 2'-O-methyl ribonucleotide
  modified_base 33: mod_base = OTHER; note = 2'-O-methyl ribonucleotide
  modified_base 34: mod_base = OTHER; note = 2'-O-methyl ribonucleotide
  modified_base 35: mod_base = OTHER; note = 2'-O-methyl ribonucleotide
  modified_base 36: mod_base = OTHER; note = 2'-O-methyl ribonucleotide
  modified_base 37: mod_base = OTHER; note = 2'-O-methyl ribonucleotide
  modified_base 38: mod_base = OTHER; note = 2'-O-methyl ribonucleotide
  modified_base 39: mod_base = OTHER; note = 2'-O-methyl ribonucleotide
  modified_base 40: mod_base = OTHER; note = 2'-O-methyl ribonucleotide
  modified_base 41: mod_base = OTHER; note = 2'-O-methyl ribonucleotide
  modified_base 42: mod_base = OTHER; note = 2'-O-methyl ribonucleotide
  modified_base 46: mod_base = OTHER; note = 2'-O-methyl ribonucleotide
  modified_base 48: mod_base = OTHER; note = 2'-O-methyl ribonucleotide
  modified_base 50: mod_base = OTHER; note = 2'-O-methyl ribonucleotide
  modified_base 52: mod_base = OTHER; note = 2'-O-methyl ribonucleotide
  modified_base 53: mod_base = OTHER; note = 2'-O-methyl ribonucleotide
  modified_base 54: mod_base = OTHER; note = 2'-O-methyl ribonucleotide
  modified_base 55: mod_base = OTHER; note = 2'-O-methyl ribonucleotide
  modified_base 56: mod_base = OTHER; note = 2'-O-methyl ribonucleotide
  modified_base 60: mod_base = OTHER; note = 2'-O-methyl ribonucleotide
  modified_base 61: mod_base = OTHER; note = 2'-O-methyl ribonucleotide
  modified_base 66: mod_base = OTHER; note = 2'-O-methyl ribonucleotide
  modified_base 67: mod_base = OTHER; note = 2'-O-methyl ribonucleotide
  modified_base 70: mod_base = OTHER; note = 2'-O-methyl ribonucleotide
  modified_base 71: mod_base = OTHER; note = 2'-O-methyl ribonucleotide
  modified_base 72: mod_base = OTHER; note = 2'-O-methyl ribonucleotide
  modified_base 73: mod_base = OTHER; note = 2'-O-methyl ribonucleotide
  modified_base 74: mod_base = OTHER; note = 2'-O-methyl ribonucleotide
  modified_base 75: mod_base = OTHER; note = 2'-O-methyl ribonucleotide
  modified_base 76: mod_base = OTHER; note = 2'-O-methyl ribonucleotide
  modified_base 77: mod_base = OTHER; note = 2'-O-methyl ribonucleotide
  modified_base 78: mod_base = OTHER; note = 2'-O-methyl ribonucleotide
  modified_base 79: mod_base = OTHER; note = 2'-O-methyl ribonucleotide
  modified_base 80: mod_base = OTHER; note = 2'-O-methyl ribonucleotide
  modified_base 81: mod_base = OTHER; note = 2'-O-methyl ribonucleotide
  modified_base 83: mod_base = OTHER; note = 2'-O-methyl ribonucleotide
  modified_base 84: mod_base = OTHER; note = 2'-O-methyl ribonucleotide
  modified_base 85: mod_base = OTHER; note = 2'-O-methyl ribonucleotide
  modified_base 86: mod_base = OTHER; note = 2'-O-methyl ribonucleotide
  modified_base 87: mod_base = OTHER; note = 2'-O-methyl ribonucleotide
  modified_base 88: mod_base = OTHER; note = 2'-O-methyl ribonucleotide
  modified_base 89: mod_base = OTHER; note = 2'-O-methyl ribonucleotide
  modified_base 90: mod_base = OTHER; note = 2'-O-methyl ribonucleotide
  modified_base 91: mod_base = OTHER; note = 2'-O-methyl ribonucleotide
  modified_base 92: mod_base = OTHER; note = 2'-O-methyl ribonucleotide
  modified_base 93: mod_base = OTHER; note = 2'-O-methyl ribonucleotide
  modified_base 94: mod_base = OTHER; note = 2'-O-methyl ribonucleotide
  modified_base 95: mod_base = OTHER; note = 2'-O-methyl ribonucleotide
  modified_base 96: mod_base = OTHER; note = 2'-O-methyl ribonucleotide
  modified_base 97: mod_base = OTHER; note = 2'-O-methyl ribonucleotide
  modified_base 98: mod_base = OTHER; note = 2'-O-methyl ribonucleotide
  modified_base 99: mod_base = OTHER; note = 2'-O-methyl ribonucleotide
  modified_base 100: mod_base = OTHER; note = 2'-O-methyl ribonucleotide
  modified_base 9: mod_base = OTHER; note = nebularine
  modified_base 57: mod_base = OTHER; note = nebularine
  modified_base 1..3: mod_base = OTHER; note = phosphorothioate linkage
  modified_base 98..100: mod_base = OTHER; note = phosphorothioate linkage

SEQ ID NO: 2073 - RNA, 100 nt, synthetic construct; identical to SEQ ID NO: 1912
  source 1..100: mol_type = other RNA
  modified_base 1: mod_base = OTHER; note = 2'-O-methyl ribonucleotide
  modified_base 2: mod_base = OTHER; note = 2'-O-methyl ribonucleotide
  modified_base 3: mod_base = OTHER; note = 2'-O-methyl ribonucleotide
  modified_base 21: mod_base = OTHER; note = 2'-O-methyl ribonucleotide
  modified_base 28: mod_base = OTHER; note = 2'-O-methyl ribonucleotide
  modified_base 29: mod_base = OTHER; note = 2'-O-methyl ribonucleotide
  modified_base 30: mod_base = OTHER; note = 2'-O-methyl ribonucleotide
  modified_base 31: mod_base = OTHER; note = 2'-O-methyl ribonucleotide
  modified_base 32: mod_base = OTHER; note = 2'-O-methyl ribonucleotide
  modified_base 33: mod_base = OTHER; note = 2'-O-methyl ribonucleotide
  modified_base 34: mod_base = OTHER; note = 2'-O-methyl ribonucleotide
  modified_base 35: mod_base = OTHER; note = 2'-O-methyl ribonucleotide
  modified_base 36: mod_base = OTHER; note = 2'-O-methyl ribonucleotide
  modified_base 37: mod_base = OTHER; note = 2'-O-methyl ribonucleotide
  modified_base 38: mod_base = OTHER; note = 2'-O-methyl ribonucleotide
  modified_base 39: mod_base = OTHER; note = 2'-O-methyl ribonucleotide
  modified_base 40: mod_base = OTHER; note = 2'-O-methyl ribonucleotide
  modified_base 41: mod_base = OTHER; note = 2'-O-methyl ribonucleotide
  modified_base 42: mod_base = OTHER; note = 2'-O-methyl ribonucleotide
  modified_base 46: mod_base = OTHER; note = 2'-O-methyl ribonucleotide
  modified_base 48: mod_base = OTHER; note = 2'-O-methyl ribonucleotide
  modified_base 50: mod_base = OTHER; note = 2'-O-methyl ribonucleotide
  modified_base 52: mod_base = OTHER; note = 2'-O-methyl ribonucleotide
  modified_base 53: mod_base = OTHER; note = 2'-O-methyl ribonucleotide
  modified_base 54: mod_base = OTHER; note = 2'-O-methyl ribonucleotide
  modified_base 55: mod_base = OTHER; note = 2'-O-methyl ribonucleotide
  modified_base 56: mod_base = OTHER; note = 2'-O-methyl ribonucleotide
  modified_base 57: mod_base = OTHER; note = 2'-O-methyl ribonucleotide
  modified_base 60: mod_base = OTHER; note = 2'-O-methyl ribonucleotide
  modified_base 61: mod_base = OTHER; note = 2'-O-methyl ribonucleotide
  modified_base 66: mod_base = OTHER; note = 2'-O-methyl ribonucleotide
  modified_base 67: mod_base = OTHER; note = 2'-O-methyl ribonucleotide
  modified_base 70: mod_base = OTHER; note = 2'-O-methyl ribonucleotide
  modified_base 71: mod_base = OTHER; note = 2'-O-methyl ribonucleotide
  modified_base 72: mod_base = OTHER; note = 2'-O-methyl ribonucleotide
  modified_base 73: mod_base = OTHER; note = 2'-O-methyl ribonucleotide
  modified_base 74: mod_base = OTHER; note = 2'-O-methyl ribonucleotide
  modified_base 75: mod_base = OTHER; note = 2'-O-methyl ribonucleotide
  modified_base 76: mod_base = OTHER; note = 2'-O-methyl ribonucleotide
  modified_base 77: mod_base = OTHER; note = 2'-O-methyl ribonucleotide
  modified_base 78: mod_base = OTHER; note = 2'-O-methyl ribonucleotide
  modified_base 79: mod_base = OTHER; note = 2'-O-methyl ribonucleotide
  modified_base 80: mod_base = OTHER; note = 2'-O-methyl ribonucleotide
  modified_base 81: mod_base = OTHER; note = 2'-O-methyl ribonucleotide
  modified_base 83: mod_base = OTHER; note = 2'-O-methyl ribonucleotide
  modified_base 84: mod_base = OTHER; note = 2'-O-methyl ribonucleotide
  modified_base 85: mod_base = OTHER; note = 2'-O-methyl ribonucleotide
  modified_base 86: mod_base = OTHER; note = 2'-O-methyl ribonucleotide
  modified_base 87: mod_base = OTHER; note = 2'-O-methyl ribonucleotide
  modified_base 88: mod_base = OTHER; note = 2'-O-methyl ribonucleotide
  modified_base 89: mod_base = OTHER; note = 2'-O-methyl ribonucleotide
  modified_base 90: mod_base = OTHER; note = 2'-O-methyl ribonucleotide
  modified_base 91: mod_base = OTHER; note = 2'-O-methyl ribonucleotide
  modified_base 92: mod_base = OTHER; note = 2'-O-methyl ribonucleotide
  modified_base 93: mod_base = OTHER; note = 2'-O-methyl ribonucleotide
  modified_base 94: mod_base = OTHER; note = 2'-O-methyl ribonucleotide
  modified_base 95: mod_base = OTHER; note = 2'-O-methyl ribonucleotide
  modified_base 96: mod_base = OTHER; note = 2'-O-methyl ribonucleotide
  modified_base 97: mod_base = OTHER; note = 2'-O-methyl ribonucleotide
  modified_base 98: mod_base = OTHER; note = 2'-O-methyl ribonucleotide
  modified_base 99: mod_base = OTHER; note = 2'-O-methyl ribonucleotide
  modified_base 100: mod_base = OTHER; note = 2'-O-methyl ribonucleotide
  modified_base 9: mod_base = OTHER; note = nebularine
  modified_base 65: mod_base = OTHER; note = nebularine
  modified_base 1..3: mod_base = OTHER; note = phosphorothioate linkage
  modified_base 98..100: mod_base = OTHER; note = phosphorothioate linkage

SEQ ID NO: 2074 - RNA, 100 nt, synthetic construct; identical to SEQ ID NO: 1913
  source 1..100: mol_type = other RNA
  modified_base 1: mod_base = OTHER; note = 2'-O-methyl ribonucleotide
  modified_base 2: mod_base = OTHER; note = 2'-O-methyl ribonucleotide
  modified_base 3: mod_base = OTHER; note = 2'-O-methyl ribonucleotide
  modified_base 21: mod_base = OTHER; note = 2'-O-methyl ribonucleotide
  modified_base 28: mod_base = OTHER; note = 2'-O-methyl ribonucleotide
  modified_base 29: mod_base = OTHER; note = 2'-O-methyl ribonucleotide
  modified_base 30: mod_base = OTHER; note = 2'-O-methyl ribonucleotide
  modified_base 31: mod_base = OTHER; note = 2'-O-methyl ribonucleotide
  modified_base 32: mod_base = OTHER; note = 2'-O-methyl ribonucleotide
  modified_base 33: mod_base = OTHER; note = 2'-O-methyl ribonucleotide
  modified_base 35: mod_base = OTHER; note = 2'-O-methyl ribonucleotide
  modified_base 36: mod_base = OTHER; note = 2'-O-methyl ribonucleotide
  modified_base 37: mod_base = OTHER; note = 2'-O-methyl ribonucleotide
  modified_base 38: mod_base = OTHER; note = 2'-O-methyl ribonucleotide
  modified_base 39: mod_base = OTHER; note = 2'-O-methyl ribonucleotide
  modified_base 40: mod_base = OTHER; note = 2'-O-methyl ribonucleotide
  modified_base 41: mod_base = OTHER; note = 2'-O-methyl ribonucleotide
  modified_base 42: mod_base = OTHER; note = 2'-O-methyl ribonucleotide
  modified_base 46: mod_base = OTHER; note = 2'-O-methyl ribonucleotide
  modified_base 48: mod_base = OTHER; note = 2'-O-methyl ribonucleotide
  modified_base 50: mod_base = OTHER; note = 2'-O-methyl ribonucleotide
  modified_base 52: mod_base = OTHER; note = 2'-O-methyl ribonucleotide
  modified_base 53: mod_base = OTHER; note = 2'-O-methyl ribonucleotide
  modified_base 54: mod_base = OTHER; note = 2'-O-methyl ribonucleotide
  modified_base 55: mod_base = OTHER; note = 2'-O-methyl ribonucleotide
  modified_base 56: mod_base = OTHER; note = 2'-O-methyl ribonucleotide
  modified_base 60: mod_base = OTHER; note = 2'-O-methyl ribonucleotide
  modified_base 61: mod_base = OTHER; note = 2'-O-methyl ribonucleotide
  modified_base 66: mod_base = OTHER; note = 2'-O-methyl ribonucleotide
  modified_base 67: mod_base = OTHER; note = 2'-O-methyl ribonucleotide
  modified_base 70: mod_base = OTHER; note = 2'-O-methyl ribonucleotide
  modified_base 71: mod_base = OTHER; note = 2'-O-methyl ribonucleotide
  modified_base 72: mod_base = OTHER; note = 2'-O-methyl ribonucleotide
  modified_base 73: mod_base = OTHER; note = 2'-O-methyl ribonucleotide
  modified_base 74: mod_base = OTHER; note = 2'-O-methyl ribonucleotide
  modified_base 75: mod_base = OTHER; note = 2'-O-methyl ribonucleotide
  modified_base 76: mod_base = OTHER; note = 2'-O-methyl ribonucleotide
  modified_base 77: mod_base = OTHER; note = 2'-O-methyl ribonucleotide
  modified_base 78: mod_base = OTHER; note = 2'-O-methyl ribonucleotide
  modified_base 79: mod_base = OTHER; note = 2'-O-methyl ribonucleotide
  modified_base 80: mod_base = OTHER; note = 2'-O-methyl ribonucleotide
  modified_base 81: mod_base = OTHER; note = 2'-O-methyl ribonucleotide
  modified_base 83: mod_base = OTHER; note = 2'-O-methyl ribonucleotide
  modified_base 84: mod_base = OTHER; note = 2'-O-methyl ribonucleotide
  modified_base 85: mod_base = OTHER; note = 2'-O-methyl ribonucleotide
  modified_base 86: mod_base = OTHER; note = 2'-O-methyl ribonucleotide
  modified_base 87: mod_base = OTHER; note = 2'-O-methyl ribonucleotide
  modified_base 88: mod_base = OTHER; note = 2'-O-methyl ribonucleotide
  modified_base 89: mod_base = OTHER; note = 2'-O-methyl ribonucleotide
  modified_base 90: mod_base = OTHER; note = 2'-O-methyl ribonucleotide
  modified_base 91: mod_base = OTHER; note = 2'-O-methyl ribonucleotide
  modified_base 92: mod_base = OTHER; note = 2'-O-methyl ribonucleotide
  modified_base 93: mod_base = OTHER; note = 2'-O-methyl ribonucleotide
  modified_base 94: mod_base = OTHER; note = 2'-O-methyl ribonucleotide
  modified_base 95: mod_base = OTHER; note = 2'-O-methyl ribonucleotide
  modified_base 96: mod_base = OTHER; note = 2'-O-methyl ribonucleotide
  modified_base 97: mod_base = OTHER; note = 2'-O-methyl ribonucleotide
  modified_base 98: mod_base = OTHER; note = 2'-O-methyl ribonucleotide
  modified_base 99: mod_base = OTHER; note = 2'-O-methyl ribonucleotide
  modified_base 100: mod_base = OTHER; note = 2'-O-methyl ribonucleotide
  modified_base 9: mod_base = OTHER; note = nebularine
  modified_base 34: mod_base = OTHER; note = nebularine
  modified_base 57: mod_base = OTHER; note = nebularine
  modified_base 65: mod_base = OTHER; note = nebularine
  modified_base 1..3: mod_base = OTHER; note = phosphorothioate linkage
  modified_base 98..100: mod_base = OTHER; note = phosphorothioate linkage

SEQ ID NO: 2075 - RNA, 100 nt, synthetic construct; identical to SEQ ID NO: 1914
  source 1..100: mol_type = other RNA
  modified_base 1: mod_base = OTHER; note = 2'-O-methyl ribonucleotide
  modified_base 2: mod_base = OTHER; note = 2'-O-methyl ribonucleotide
  modified_base 3: mod_base = OTHER; note = 2'-O-methyl ribonucleotide
  modified_base 21: mod_base = OTHER; note = 2'-O-methyl ribonucleotide
  modified_base 29: mod_base = OTHER; note = 2'-O-methyl ribonucleotide
  modified_base 30: mod_base = OTHER; note = 2'-O-methyl ribonucleotide
  modified_base 31: mod_base = OTHER; note = 2'-O-methyl ribonucleotide
  modified_base 32: mod_base = OTHER; note = 2'-O-methyl ribonucleotide
  modified_base 33: mod_base = OTHER; note = 2'-O-methyl ribonucleotide
  modified_base 35: mod_base = OTHER; note = 2'-O-methyl ribonucleotide
  modified_base 36: mod_base = OTHER; note = 2'-O-methyl ribonucleotide
  modified_base 37: mod_base = OTHER; note = 2'-O-methyl ribonucleotide
  modified_base 38: mod_base = OTHER; note = 2'-O-methyl ribonucleotide
  modified_base 39: mod_base = OTHER; note = 2'-O-methyl ribonucleotide
  modified_base 40: mod_base = OTHER; note = 2'-O-methyl ribonucleotide
  modified_base 41: mod_base = OTHER; note = 2'-O-methyl ribonucleotide
  modified_base 46: mod_base = OTHER; note = 2'-O-methyl ribonucleotide
  modified_base 48: mod_base = OTHER; note = 2'-O-methyl ribonucleotide
  modified_base 50: mod_base = OTHER; note = 2'-O-methyl ribonucleotide
  modified_base 52: mod_base = OTHER; note = 2'-O-methyl ribonucleotide
  modified_base 53: mod_base = OTHER; note = 2'-O-methyl ribonucleotide
  modified_base 54: mod_base = OTHER; note = 2'-O-methyl ribonucleotide
  modified_base 55: mod_base = OTHER; note = 2'-O-methyl ribonucleotide
  modified_base 56: mod_base = OTHER; note = 2'-O-methyl ribonucleotide
  modified_base 60: mod_base = OTHER; note = 2'-O-methyl ribonucleotide
  modified_base 61: mod_base = OTHER; note = 2'-O-methyl ribonucleotide
  modified_base 66: mod_base = OTHER; note = 2'-O-methyl ribonucleotide
  modified_base 67: mod_base = OTHER; note = 2'-O-methyl ribonucleotide
  modified_base 70: mod_base = OTHER; note = 2'-O-methyl ribonucleotide
  modified_base 71: mod_base = OTHER; note = 2'-O-methyl ribonucleotide
  modified_base 72: mod_base = OTHER; note = 2'-O-methyl ribonucleotide
  modified_base 73: mod_base = OTHER; note = 2'-O-methyl ribonucleotide
  modified_base 74: mod_base = OTHER; note = 2'-O-methyl ribonucleotide
  modified_base 75: mod_base = OTHER; note = 2'-O-methyl ribonucleotide
  modified_base 76: mod_base = OTHER; note = 2'-O-methyl ribonucleotide
  modified_base 77: mod_base = OTHER; note = 2'-O-methyl ribonucleotide
  modified_base 78: mod_base = OTHER; note = 2'-O-methyl ribonucleotide
  modified_base 79: mod_base = OTHER; note = 2'-O-methyl ribonucleotide
  modified_base 80: mod_base = OTHER; note = 2'-O-methyl ribonucleotide
  modified_base 81: mod_base = OTHER; note = 2'-O-methyl ribonucleotide
  modified_base 83: mod_base = OTHER; note = 2'-O-methyl ribonucleotide
  modified_base 84: mod_base = OTHER; note = 2'-O-methyl ribonucleotide
  modified_base 85: mod_base = OTHER; note = 2'-O-methyl ribonucleotide
  modified_base 86: mod_base = OTHER; note = 2'-O-methyl ribonucleotide
  modified_base 87: mod_base = OTHER; note = 2'-O-methyl ribonucleotide
  modified_base 88: mod_base = OTHER; note = 2'-O-methyl ribonucleotide
  modified_base 89: mod_base = OTHER; note = 2'-O-methyl ribonucleotide
  modified_base 90: mod_base = OTHER; note = 2'-O-methyl ribonucleotide
  modified_base 91: mod_base = OTHER; note = 2'-O-methyl ribonucleotide
  modified_base 92: mod_base = OTHER; note = 2'-O-methyl ribonucleotide
  modified_base 93: mod_base = OTHER; note = 2'-O-methyl ribonucleotide
  modified_base 94: mod_base = OTHER; note = 2'-O-methyl ribonucleotide
  modified_base 95: mod_base = OTHER; note = 2'-O-methyl ribonucleotide
  modified_base 96: mod_base = OTHER; note = 2'-O-methyl ribonucleotide
  modified_base 97: mod_base = OTHER; note = 2'-O-methyl ribonucleotide
  modified_base 98: mod_base = OTHER; note = 2'-O-methyl ribonucleotide
  modified_base 99: mod_base = OTHER; note = 2'-O-methyl ribonucleotide
  modified_base 100: mod_base = OTHER; note = 2'-O-methyl ribonucleotide
  modified_base 9: mod_base = OTHER; note = nebularine
  modified_base 28: mod_base = OTHER; note = nebularine
  modified_base 34: mod_base = OTHER; note = nebularine
  modified_base 42: mod_base = OTHER; note = nebularine
  modified_base 57: mod_base = OTHER; note = nebularine
  modified_base 65: mod_base = OTHER; note = nebularine
  modified_base 1..3: mod_base = OTHER; note = phosphorothioate linkage
  modified_base 98..100: mod_base = OTHER; note = phosphorothioate linkage

SEQ ID NO: 2076 - RNA, 100 nt, synthetic construct; identical to SEQ ID NO: 1915
  source 1..100: mol_type = other RNA
  modified_base 1: mod_base = OTHER; note = 2'-O-methyl ribonucleotide
  modified_base 2: mod_base = OTHER; note = 2'-O-methyl ribonucleotide
  modified_base 3: mod_base = OTHER; note = 2'-O-methyl ribonucleotide
  modified_base 21: mod_base = OTHER; note = 2'-O-methyl ribonucleotide
  modified_base 28: mod_base = OTHER; note = 2'-O-methyl ribonucleotide
  modified_base 29: mod_base = OTHER; note = 2'-O-methyl ribonucleotide
  modified_base 30: mod_base = OTHER; note = 2'-O-methyl ribonucleotide
  modified_base 31: mod_base = OTHER; note = 2'-O-methyl ribonucleotide
  modified_base 32: mod_base = OTHER; note = 2'-O-methyl ribonucleotide
  modified_base 33: mod_base = OTHER; note = 2'-O-methyl ribonucleotide
  modified_base 35: mod_base = OTHER; note = 2'-O-methyl ribonucleotide
  modified_base 36: mod_base = OTHER; note = 2'-O-methyl ribonucleotide
  modified_base 37: mod_base = OTHER; note = 2'-O-methyl ribonucleotide
  modified_base 38: mod_base = OTHER; note = 2'-O-methyl ribonucleotide
  modified_base 39: mod_base = OTHER; note = 2'-O-methyl ribonucleotide
  modified_base 40: mod_base = OTHER; note = 2'-O-methyl ribonucleotide
  modified_base 41: mod_base = OTHER; note = 2'-O-methyl ribonucleotide
  modified_base 42: mod_base = OTHER; note = 2'-O-methyl ribonucleotide
  modified_base 46: mod_base = OTHER; note = 2'-O-methyl ribonucleotide
  modified_base 48: mod_base = OTHER; note = 2'-O-methyl ribonucleotide
  modified_base 50: mod_base = OTHER; note = 2'-O-methyl ribonucleotide
  modified_base 52: mod_base = OTHER; note = 2'-O-methyl ribonucleotide
  modified_base 53: mod_base = OTHER; note = 2'-O-methyl ribonucleotide
  modified_base 54: mod_base = OTHER; note = 2'-O-methyl ribonucleotide
  modified_base 55: mod_base = OTHER; note = 2'-O-methyl ribonucleotide
  modified_base 56: mod_base = OTHER; note = 2'-O-methyl ribonucleotide
  modified_base 57: mod_base = OTHER; note = 2'-O-methyl ribonucleotide
  modified_base 60: mod_base = OTHER; note = 2'-O-methyl ribonucleotide
  modified_base 61: mod_base = OTHER; note = 2'-O-methyl ribonucleotide
  modified_base 66: mod_base = OTHER; note = 2'-O-methyl ribonucleotide
  modified_base 67: mod_base = OTHER; note = 2'-O-methyl ribonucleotide
  modified_base 70: mod_base = OTHER; note = 2'-O-methyl ribonucleotide
  modified_base 71: mod_base = OTHER; note = 2'-O-methyl ribonucleotide
  modified_base 72: mod_base = OTHER; note = 2'-O-methyl ribonucleotide
  modified_base 73: mod_base = OTHER; note = 2'-O-methyl ribonucleotide
  modified_base 74: mod_base = OTHER; note = 2'-O-methyl ribonucleotide
  modified_base 75: mod_base = OTHER; note = 2'-O-methyl ribonucleotide
  modified_base 76: mod_base = OTHER; note = 2'-O-methyl ribonucleotide
  modified_base 77: mod_base = OTHER; note = 2'-O-methyl ribonucleotide
  modified_base 78: mod_base = OTHER; note = 2'-O-methyl ribonucleotide
  modified_base 79: mod_base = OTHER; note = 2'-O-methyl ribonucleotide
  modified_base 80: mod_base = OTHER; note = 2'-O-methyl ribonucleotide
  modified_base 81: mod_base = OTHER; note = 2'-O-methyl ribonucleotide
  modified_base 83: mod_base = OTHER; note = 2'-O-methyl ribonucleotide
  modified_base 84: mod_base = OTHER; note = 2'-O-methyl ribonucleotide
  modified_base 85: mod_base = OTHER; note = 2'-O-methyl ribonucleotide
  modified_base 86: mod_base = OTHER; note = 2'-O-methyl ribonucleotide
  modified_base 87: mod_base = OTHER; note = 2'-O-methyl ribonucleotide
  modified_base 88: mod_base = OTHER; note = 2'-O-methyl ribonucleotide
  modified_base 89: mod_base = OTHER; note = 2'-O-methyl ribonucleotide
  modified_base 90: mod_base = OTHER; note = 2'-O-methyl ribonucleotide
  modified_base 91: mod_base = OTHER; note = 2'-O-methyl ribonucleotide
  modified_base 92: mod_base = OTHER; note = 2'-O-methyl ribonucleotide
  modified_base 93: mod_base = OTHER; note = 2'-O-methyl ribonucleotide
  modified_base 94: mod_base = OTHER; note = 2'-O-methyl ribonucleotide
  modified_base 95: mod_base = OTHER; note = 2'-O-methyl ribonucleotide
  modified_base 96: mod_base = OTHER; note = 2'-O-methyl ribonucleotide
  modified_base 97: mod_base = OTHER; note = 2'-O-methyl ribonucleotide
  modified_base 98: mod_base = OTHER; note = 2'-O-methyl ribonucleotide
  modified_base 99: mod_base = OTHER; note = 2'-O-methyl ribonucleotide
  modified_base 100: mod_base = OTHER; note = 2'-O-methyl ribonucleotide
  modified_base 14: mod_base = OTHER; note = nebularine
  modified_base 34: mod_base = OTHER; note = nebularine
  modified_base 1..3: mod_base = OTHER; note = phosphorothioate linkage
  modified_base 98..100: mod_base = OTHER; note = phosphorothioate linkage

SEQ ID NO: 2077 - RNA, 100 nt, synthetic construct; identical to SEQ ID NO: 1916
  source 1..100: mol_type = other RNA
  modified_base 1: mod_base = OTHER; note = 2'-O-methyl ribonucleotide
  modified_base 2: mod_base = OTHER; note = 2'-O-methyl ribonucleotide
  modified_base 3: mod_base = OTHER; note = 2'-O-methyl ribonucleotide
  modified_base 21: mod_base = OTHER; note = 2'-O-methyl ribonucleotide
  modified_base 28: mod_base = OTHER; note = 2'-O-methyl ribonucleotide
  modified_base 29: mod_base = OTHER; note = 2'-O-methyl ribonucleotide
  modified_base 30: mod_base = OTHER; note = 2'-O-methyl ribonucleotide
  modified_base 31: mod_base = OTHER; note = 2'-O-methyl ribonucleotide
  modified_base 32: mod_base = OTHER; note = 2'-O-methyl ribonucleotide
  modified_base 33: mod_base = OTHER; note = 2'-O-methyl ribonucleotide
  modified_base 35: mod_base = OTHER; note = 2'-O-methyl ribonucleotide
  modified_base 36: mod_base = OTHER; note = 2'-O-methyl ribonucleotide
  modified_base 37: mod_base = OTHER; note = 2'-O-methyl ribonucleotide
  modified_base 38: mod_base = OTHER; note = 2'-O-methyl ribonucleotide
  modified_base 39: mod_base = OTHER; note = 2'-O-methyl ribonucleotide
  modified_base 40: mod_base = OTHER; note = 2'-O-methyl ribonucleotide
  modified_base 41: mod_base = OTHER; note = 2'-O-methyl ribonucleotide
  modified_base 42: mod_base = OTHER; note = 2'-O-methyl ribonucleotide
  modified_base 46: mod_base = OTHER; note = 2'-O-methyl ribonucleotide
  modified_base 48: mod_base = OTHER; note = 2'-O-methyl ribonucleotide
  modified_base 50: mod_base = OTHER; note = 2'-O-methyl ribonucleotide
  modified_base 52: mod_base = OTHER; note = 2'-O-methyl ribonucleotide
  modified_base 53: mod_base = OTHER; note = 2'-O-methyl ribonucleotide
  modified_base 54: mod_base = OTHER; note = 2'-O-methyl ribonucleotide
  modified_base 55: mod_base = OTHER; note = 2'-O-methyl ribonucleotide
  modified_base 56: mod_base = OTHER; note = 2'-O-methyl ribonucleotide
  modified_base 60: mod_base = OTHER; note = 2'-O-methyl ribonucleotide
  modified_base 61: mod_base = OTHER; note = 2'-O-methyl ribonucleotide
  modified_base 66: mod_base = OTHER; note = 2'-O-methyl ribonucleotide
  modified_base 67: mod_base = OTHER; note = 2'-O-methyl ribonucleotide
  modified_base 70: mod_base = OTHER; note = 2'-O-methyl ribonucleotide
  modified_base 71: mod_base = OTHER; note = 2'-O-methyl ribonucleotide
  modified_base 72: mod_base = OTHER; note = 2'-O-methyl ribonucleotide
  modified_base 73: mod_base = OTHER; note = 2'-O-methyl ribonucleotide
  modified_base 74: mod_base = OTHER; note = 2'-O-methyl ribonucleotide
  modified_base 75: mod_base = OTHER; note = 2'-O-methyl ribonucleotide
  modified_base 76: mod_base = OTHER; note = 2'-O-methyl ribonucleotide
  modified_base 77: mod_base = OTHER; note = 2'-O-methyl ribonucleotide
  modified_base 78: mod_base = OTHER; note = 2'-O-methyl ribonucleotide
  modified_base 79: mod_base = OTHER; note = 2'-O-methyl ribonucleotide
  modified_base 80: mod_base = OTHER; note = 2'-O-methyl ribonucleotide
  modified_base 81: mod_base = OTHER; note = 2'-O-methyl ribonucleotide
  modified_base 83: mod_base = OTHER; note = 2'-O-methyl ribonucleotide
  modified_base 84: mod_base = OTHER; note = 2'-O-methyl ribonucleotide
  modified_base 85: mod_base = OTHER; note = 2'-O-methyl ribonucleotide
  modified_base 86: mod_base = OTHER; note = 2'-O-methyl ribonucleotide
  modified_base 87: mod_base = OTHER; note = 2'-O-methyl ribonucleotide
  modified_base 88: mod_base = OTHER; note = 2'-O-methyl ribonucleotide
  modified_base 89: mod_base = OTHER; note = 2'-O-methyl ribonucleotide
  modified_base 90: mod_base = OTHER; note = 2'-O-methyl ribonucleotide
  modified_base 91: mod_base = OTHER; note = 2'-O-methyl ribonucleotide
  modified_base 92: mod_base = OTHER; note = 2'-O-methyl ribonucleotide
  modified_base 93: mod_base = OTHER; note = 2'-O-methyl ribonucleotide
  modified_base 94: mod_base = OTHER; note = 2'-O-methyl ribonucleotide
  modified_base 95: mod_base = OTHER; note = 2'-O-methyl ribonucleotide
  modified_base 96: mod_base = OTHER; note = 2'-O-methyl ribonucleotide
  modified_base 97: mod_base = OTHER; note = 2'-O-methyl ribonucleotide
  modified_base 98: mod_base = OTHER; note = 2'-O-methyl ribonucleotide
  modified_base 99: mod_base = OTHER; note = 2'-O-methyl ribonucleotide
  modified_base 100: mod_base = OTHER; note = 2'-O-methyl ribonucleotide
  modified_base 14: mod_base = OTHER; note = nebularine
  modified_base 34: mod_base = OTHER; note = nebularine
  modified_base 57: mod_base = OTHER; note = nebularine
  modified_base 1..3: mod_base = OTHER; note = phosphorothioate linkage
  modified_base 98..100: mod_base = OTHER; note = phosphorothioate linkage

SEQ ID NO: 2078 - RNA, 100 nt, synthetic construct; identical to SEQ ID NO: 1917
  source 1..100: mol_type = other RNA
  modified_base 1: mod_base = OTHER; note = 2'-O-methyl ribonucleotide
  modified_base 2: mod_base = OTHER; note = 2'-O-methyl ribonucleotide
  modified_base 3: mod_base = OTHER; note = 2'-O-methyl ribonucleotide
  modified_base 21: mod_base = OTHER; note = 2'-O-methyl ribonucleotide
  modified_base 28: mod_base = OTHER; note = 2'-O-methyl ribonucleotide
  modified_base 29: mod_base = OTHER; note = 2'-O-methyl ribonucleotide
  modified_base 30: mod_base = OTHER; note = 2'-O-methyl ribonucleotide
  modified_base 31: mod_base = OTHER; note = 2'-O-methyl ribonucleotide
  modified_base 32: mod_base = OTHER; note = 2'-O-methyl ribonucleotide
  modified_base 33: mod_base = OTHER; note = 2'-O-methyl ribonucleotide
  modified_base 34: mod_base = OTHER; note = 2'-O-methyl ribonucleotide
  modified_base 35: mod_base = OTHER; note = 2'-O-methyl ribonucleotide
  modified_base 36: mod_base = OTHER; note = 2'-O-methyl ribonucleotide
  modified_base 37: mod_base = OTHER; note = 2'-O-methyl ribonucleotide
  modified_base 38: mod_base = OTHER; note = 2'-O-methyl ribonucleotide
  modified_base 39: mod_base = OTHER; note = 2'-O-methyl ribonucleotide
  modified_base 40: mod_base = OTHER; note = 2'-O-methyl ribonucleotide
  modified_base 41: mod_base = OTHER; note = 2'-O-methyl ribonucleotide
  modified_base 42: mod_base = OTHER; note = 2'-O-methyl ribonucleotide
  modified_base 46: mod_base = OTHER; note = 2'-O-methyl ribonucleotide
  modified_base 48: mod_base = OTHER; note = 2'-O-methyl ribonucleotide
  modified_base 50: mod_base = OTHER; note = 2'-O-methyl ribonucleotide
  modified_base 52: mod_base = OTHER; note = 2'-O-methyl ribonucleotide
  modified_base 53: mod_base = OTHER; note = 2'-O-methyl ribonucleotide
  modified_base 54: mod_base = OTHER; note = 2'-O-methyl ribonucleotide
  modified_base 55: mod_base = OTHER; note = 2'-O-methyl ribonucleotide
  modified_base 56: mod_base = OTHER; note = 2'-O-methyl ribonucleotide
  modified_base 60: mod_base = OTHER; note = 2'-O-methyl ribonucleotide
  modified_base 61: mod_base = OTHER; note = 2'-O-methyl ribonucleotide
  modified_base 66: mod_base = OTHER; note = 2'-O-methyl ribonucleotide
  modified_base 67: mod_base = OTHER; note = 2'-O-methyl ribonucleotide
  modified_base 70: mod_base = OTHER; note = 2'-O-methyl ribonucleotide
  modified_base 71: mod_base = OTHER; note = 2'-O-methyl ribonucleotide
  modified_base 72: mod_base = OTHER; note = 2'-O-methyl ribonucleotide
  modified_base 73: mod_base = OTHER; note = 2'-O-methyl ribonucleotide
  modified_base 74: mod_base = OTHER; note = 2'-O-methyl ribonucleotide
  modified_base 75: mod_base = OTHER; note = 2'-O-methyl ribonucleotide
  modified_base 76: mod_base = OTHER; note = 2'-O-methyl ribonucleotide
  modified_base 77: mod_base = OTHER; note = 2'-O-methyl ribonucleotide
  modified_base 78: mod_base = OTHER; note = 2'-O-methyl ribonucleotide
  modified_base 79: mod_base = OTHER; note = 2'-O-methyl ribonucleotide
  modified_base 80: mod_base = OTHER; note = 2'-O-methyl ribonucleotide
  modified_base 81: mod_base = OTHER; note = 2'-O-methyl ribonucleotide
  modified_base 83: mod_base = OTHER; note = 2'-O-methyl ribonucleotide
  modified_base 84: mod_base = OTHER; note = 2'-O-methyl ribonucleotide
  modified_base 85: mod_base = OTHER; note = 2'-O-methyl ribonucleotide
  modified_base 86: mod_base = OTHER; note = 2'-O-methyl ribonucleotide
  modified_base 87: mod_base = OTHER; note = 2'-O-methyl ribonucleotide
  modified_base 88: mod_base = OTHER; note = 2'-O-methyl ribonucleotide
  modified_base 89: mod_base = OTHER; note = 2'-O-methyl ribonucleotide
  modified_base 90: mod_base = OTHER; note = 2'-O-methyl ribonucleotide
  modified_base 91: mod_base = OTHER; note = 2'-O-methyl ribonucleotide
  modified_base 92: mod_base = OTHER; note = 2'-O-methyl ribonucleotide
  modified_base 93: mod_base = OTHER; note = 2'-O-methyl ribonucleotide
  modified_base 94: mod_base = OTHER; note = 2'-O-methyl ribonucleotide
  modified_base 95: mod_base = OTHER; note = 2'-O-methyl ribonucleotide
  modified_base 96: mod_base = OTHER; note = 2'-O-methyl ribonucleotide
  modified_base 97: mod_base = OTHER; note = 2'-O-methyl ribonucleotide
  modified_base 98: mod_base = OTHER; note = 2'-O-methyl ribonucleotide
  modified_base 99: mod_base = OTHER; note = 2'-O-methyl ribonucleotide
  modified_base 100: mod_base = OTHER; note = 2'-O-methyl ribonucleotide
  modified_base 14: mod_base = OTHER; note = nebularine
  modified_base 57: mod_base = OTHER; note = nebularine
  modified_base 1..3: mod_base = OTHER; note = phosphorothioate linkage
  modified_base 98..100: mod_base = OTHER; note = phosphorothioate linkage

SEQ ID NO: 2079 - RNA, 100 nt, synthetic construct; identical to SEQ ID NO: 1918
  source 1..100: mol_type = other RNA
  modified_base 1: mod_base = OTHER; note = 2'-O-methyl ribonucleotide
  modified_base 2: mod_base = OTHER; note = 2'-O-methyl ribonucleotide
  modified_base 3: mod_base = OTHER; note = 2'-O-methyl ribonucleotide
  modified_base 21: mod_base = OTHER; note = 2'-O-methyl ribonucleotide
  modified_base 28: mod_base = OTHER; note = 2'-O-methyl ribonucleotide
  modified_base 29: mod_base = OTHER; note = 2'-O-methyl ribonucleotide
  modified_base 30: mod_base = OTHER; note = 2'-O-methyl ribonucleotide
  modified_base 31: mod_base = OTHER; note = 2'-O-methyl ribonucleotide
  modified_base 32: mod_base = OTHER; note = 2'-O-methyl ribonucleotide
  modified_base 33: mod_base = OTHER; note = 2'-O-methyl ribonucleotide
  modified_base 34: mod_base = OTHER; note = 2'-O-methyl ribonucleotide
  modified_base 35: mod_base = OTHER; note = 2'-O-methyl ribonucleotide
  modified_base 36: mod_base = OTHER; note = 2'-O-methyl ribonucleotide
  modified_base 37: mod_base = OTHER; note = 2'-O-methyl ribonucleotide
  modified_base 38: mod_base = OTHER; note = 2'-O-methyl ribonucleotide
  modified_base 39: mod_base = OTHER; note = 2'-O-methyl ribonucleotide
  modified_base 40: mod_base = OTHER; note = 2'-O-methyl ribonucleotide
  modified_base 41: mod_base = OTHER; note = 2'-O-methyl ribonucleotide
  modified_base 42: mod_base = OTHER; note = 2'-O-methyl ribonucleotide
  modified_base 46: mod_base = OTHER; note = 2'-O-methyl ribonucleotide
  modified_base 48: mod_base = OTHER; note = 2'-O-methyl ribonucleotide
  modified_base 50: mod_base = OTHER; note = 2'-O-methyl ribonucleotide
  modified_base 52: mod_base = OTHER; note = 2'-O-methyl ribonucleotide
  modified_base 53: mod_base = OTHER; note = 2'-O-methyl ribonucleotide
  modified_base 54: mod_base = OTHER; note = 2'-O-methyl ribonucleotide
  modified_base 55: mod_base = OTHER; note = 2'-O-methyl ribonucleotide
  modified_base 56: mod_base = OTHER; note = 2'-O-methyl ribonucleotide
  modified_base 57: mod_base = OTHER; note = 2'-O-methyl ribonucleotide
  modified_base 60: mod_base = OTHER; note = 2'-O-methyl ribonucleotide
  modified_base 61: mod_base = OTHER; note = 2'-O-methyl ribonucleotide
  modified_base 66: mod_base = OTHER; note = 2'-O-methyl ribonucleotide
  modified_base 67: mod_base = OTHER; note = 2'-O-methyl ribonucleotide
  modified_base 70: mod_base = OTHER; note = 2'-O-methyl ribonucleotide
  modified_base 71: mod_base = OTHER; note = 2'-O-methyl ribonucleotide
  modified_base 72: mod_base = OTHER; note = 2'-O-methyl ribonucleotide
  modified_base 73: mod_base = OTHER; note = 2'-O-methyl ribonucleotide
  modified_base 74: mod_base = OTHER; note = 2'-O-methyl ribonucleotide
  modified_base 75: mod_base = OTHER; note = 2'-O-methyl ribonucleotide
  modified_base 76: mod_base = OTHER; note = 2'-O-methyl ribonucleotide
  modified_base 77: mod_base = OTHER; note = 2'-O-methyl ribonucleotide
  modified_base 78: mod_base = OTHER; note = 2'-O-methyl ribonucleotide
  modified_base 79: mod_base = OTHER; note = 2'-O-methyl ribonucleotide
  modified_base 80: mod_base = OTHER; note = 2'-O-methyl ribonucleotide
  modified_base 81: mod_base = OTHER; note = 2'-O-methyl ribonucleotide
  modified_base 83: mod_base = OTHER; note = 2'-O-methyl ribonucleotide
  modified_base 84: mod_base = OTHER; note = 2'-O-methyl ribonucleotide
  modified_base 85: mod_base = OTHER; note = 2'-O-methyl ribonucleotide
  modified_base 86: mod_base = OTHER; note = 2'-O-methyl ribonucleotide
  modified_base 87: mod_base = OTHER; note = 2'-O-methyl ribonucleotide
  modified_base 88: mod_base = OTHER; note = 2'-O-methyl ribonucleotide
  modified_base 89: mod_base = OTHER; note = 2'-O-methyl ribonucleotide
  modified_base 90: mod_base = OTHER; note = 2'-O-methyl ribonucleotide
  modified_base 91: mod_base = OTHER; note = 2'-O-methyl ribonucleotide
  modified_base 92: mod_base = OTHER; note = 2'-O-methyl ribonucleotide
  modified_base 93: mod_base = OTHER; note = 2'-O-methyl ribonucleotide
  modified_base 94: mod_base = OTHER; note = 2'-O-methyl ribonucleotide
  modified_base 95: mod_base = OTHER; note = 2'-O-methyl ribonucleotide
  modified_base 96: mod_base = OTHER; note = 2'-O-methyl ribonucleotide
  modified_base 97: mod_base = OTHER; note = 2'-O-methyl ribonucleotide
  modified_base 98: mod_base = OTHER; note = 2'-O-methyl ribonucleotide
  modified_base 99: mod_base = OTHER; note = 2'-O-methyl ribonucleotide
  modified_base 100: mod_base = OTHER; note = 2'-O-methyl ribonucleotide
  modified_base 14: mod_base = OTHER; note = nebularine
  modified_base 65: mod_base = OTHER; note = nebularine
  modified_base 1..3: mod_base = OTHER; note = phosphorothioate linkage
  modified_base 98..100: mod_base = OTHER; note = phosphorothioate linkage

SEQ ID NO: 2080 - RNA, 100 nt, synthetic construct; identical to SEQ ID NO: 1919
  source 1..100: mol_type = other RNA
  modified_base 1: mod_base = OTHER; note = 2'-O-methyl ribonucleotide
  modified_base 2: mod_base = OTHER; note = 2'-O-methyl ribonucleotide
  modified_base 3: mod_base = OTHER; note = 2'-O-methyl ribonucleotide
  modified_base 21: mod_base = OTHER; note = 2'-O-methyl ribonucleotide
  modified_base 28: mod_base = OTHER; note = 2'-O-methyl ribonucleotide
  modified_base 29: mod_base = OTHER; note = 2'-O-methyl ribonucleotide
  modified_base 30: mod_base = OTHER; note = 2'-O-methyl ribonucleotide
  modified_base 31: mod_base = OTHER; note = 2'-O-methyl ribonucleotide
  modified_base 32: mod_base = OTHER; note = 2'-O-methyl ribonucleotide
  modified_base 33: mod_base = OTHER; note = 2'-O-methyl ribonucleotide
  modified_base 35: mod_base = OTHER; note = 2'-O-methyl ribonucleotide
  modified_base 36: mod_base = OTHER; note = 2'-O-methyl ribonucleotide
  modified_base 37: mod_base = OTHER; note = 2'-O-methyl ribonucleotide
  modified_base 38: mod_base = OTHER; note = 2'-O-methyl ribonucleotide
  modified_base 39: mod_base = OTHER; note = 2'-O-methyl ribonucleotide
  modified_base 40: mod_base = OTHER; note = 2'-O-methyl ribonucleotide
  modified_base 41: mod_base = OTHER; note = 2'-O-methyl ribonucleotide
  modified_base 42: mod_base = OTHER; note = 2'-O-methyl ribonucleotide
  modified_base 46: mod_base = OTHER; note = 2'-O-methyl ribonucleotide
  modified_base 48: mod_base = OTHER; note = 2'-O-methyl ribonucleotide
  modified_base 50: mod_base = OTHER; note = 2'-O-methyl ribonucleotide
  modified_base 52: mod_base = OTHER; note = 2'-O-methyl ribonucleotide
  modified_base 53: mod_base = OTHER; note = 2'-O-methyl ribonucleotide
  modified_base 54: mod_base = OTHER; note = 2'-O-methyl ribonucleotide
  modified_base 55: mod_base = OTHER; note = 2'-O-methyl ribonucleotide
  modified_base 56: mod_base = OTHER; note = 2'-O-methyl ribonucleotide
  modified_base 60: mod_base = OTHER; note = 2'-O-methyl ribonucleotide
  modified_base 61: mod_base = OTHER; note = 2'-O-methyl ribonucleotide
  modified_base 66: mod_base = OTHER; note = 2'-O-methyl ribonucleotide
  modified_base 67: mod_base = OTHER; note = 2'-O-methyl ribonucleotide
  modified_base 70: mod_base = OTHER; note = 2'-O-methyl ribonucleotide
  modified_base 71: mod_base = OTHER; note = 2'-O-methyl ribonucleotide
  modified_base 72: mod_base = OTHER; note = 2'-O-methyl ribonucleotide
  modified_base 73: mod_base = OTHER; note = 2'-O-methyl ribonucleotide
  modified_base 74: mod_base = OTHER; note = 2'-O-methyl ribonucleotide
  modified_base 75: mod_base = OTHER; note = 2'-O-methyl ribonucleotide
  modified_base 76: mod_base = OTHER; note = 2'-O-methyl ribonucleotide
  modified_base 77: mod_base = OTHER; note = 2'-O-methyl ribonucleotide
  modified_base 78: mod_base = OTHER; note = 2'-O-methyl ribonucleotide
  modified_base 79: mod_base = OTHER; note = 2'-O-methyl ribonucleotide
  modified_base 80: mod_base = OTHER; note = 2'-O-methyl ribonucleotide
  modified_base 81: mod_base = OTHER; note = 2'-O-methyl ribonucleotide
  modified_base 83: mod_base = OTHER; note = 2'-O-methyl ribonucleotide
  modified_base 84: mod_base = OTHER; note = 2'-O-methyl ribonucleotide
  modified_base 85: mod_base = OTHER; note = 2'-O-methyl ribonucleotide
  modified_base 86: mod_base = OTHER; note = 2'-O-methyl ribonucleotide
  modified_base 87: mod_base = OTHER; note = 2'-O-methyl ribonucleotide
  modified_base 88: mod_base = OTHER; note = 2'-O-methyl ribonucleotide
  modified_base 89: mod_base = OTHER; note = 2'-O-methyl ribonucleotide
  modified_base 90: mod_base = OTHER; note = 2'-O-methyl ribonucleotide
  modified_base 91: mod_base = OTHER; note = 2'-O-methyl ribonucleotide
  modified_base 92: mod_base = OTHER; note = 2'-O-methyl ribonucleotide
  modified_base 93: mod_base = OTHER; note = 2'-O-methyl ribonucleotide
  modified_base 94: mod_base = OTHER; note = 2'-O-methyl ribonucleotide
  modified_base 95: mod_base = OTHER; note = 2'-O-methyl ribonucleotide
  modified_base 96: mod_base = OTHER; note = 2'-O-methyl ribonucleotide
  modified_base 97: mod_base = OTHER; note = 2'-O-methyl ribonucleotide
  modified_base 98: mod_base = OTHER; note = 2'-O-methyl ribonucleotide
  modified_base 99: mod_base = OTHER; note = 2'-O-methyl ribonucleotide
  modified_base 100: mod_base = OTHER; note = 2'-O-methyl ribonucleotide
  modified_base 14: mod_base = OTHER; note = nebularine
  modified_base 34: mod_base = OTHER; note = nebularine
  modified_base 57: mod_base = OTHER; note = nebularine
  modified_base 65: mod_base = OTHER; note = nebularine
  modified_base 1..3: mod_base = OTHER; note = phosphorothioate linkage
  modified_base 98..100: mod_base = OTHER; note = phosphorothioate linkage

SEQ ID NO: 2081 - RNA, 100 nt, synthetic construct; identical to SEQ ID NO: 1920
  source 1..100: mol_type = other RNA
  modified_base 1: mod_base = OTHER; note = 2'-O-methyl ribonucleotide
  modified_base 2: mod_base = OTHER; note = 2'-O-methyl ribonucleotide
  modified_base 3: mod_base = OTHER; note = 2'-O-methyl ribonucleotide
  modified_base 21: mod_base = OTHER; note = 2'-O-methyl ribonucleotide
  modified_base 29: mod_base = OTHER; note = 2'-O-methyl ribonucleotide
  modified_base 30: mod_base = OTHER; note = 2'-O-methyl ribonucleotide
  modified_base 31: mod_base = OTHER; note = 2'-O-methyl ribonucleotide
  modified_base 32: mod_base = OTHER; note = 2'-O-methyl ribonucleotide
  modified_base 33: mod_base = OTHER; note = 2'-O-methyl ribonucleotide
  modified_base 35: mod_base = OTHER; note = 2'-O-methyl ribonucleotide
  modified_base 36: mod_base = OTHER; note = 2'-O-methyl ribonucleotide
  modified_base 37: mod_base = OTHER; note = 2'-O-methyl ribonucleotide
  modified_base 38: mod_base = OTHER; note = 2'-O-methyl ribonucleotide
  modified_base 39: mod_base = OTHER; note = 2'-O-methyl ribonucleotide
  modified_base 40: mod_base = OTHER; note = 2'-O-methyl ribonucleotide
  modified_base 41: mod_base = OTHER; note = 2'-O-methyl ribonucleotide
  modified_base 46: mod_base = OTHER; note = 2'-O-methyl ribonucleotide
  modified_base 48: mod_base = OTHER; note = 2'-O-methyl ribonucleotide
  modified_base 50: mod_base = OTHER; note = 2'-O-methyl ribonucleotide
  modified_base 52: mod_base = OTHER; note = 2'-O-methyl ribonucleotide
  modified_base 53: mod_base = OTHER; note = 2'-O-methyl ribonucleotide
  modified_base 54: mod_base = OTHER; note = 2'-O-methyl ribonucleotide
  modified_base 55: mod_base = OTHER; note = 2'-O-methyl ribonucleotide
  modified_base 56: mod_base = OTHER; note = 2'-O-methyl ribonucleotide
  modified_base 60: mod_base = OTHER; note = 2'-O-methyl ribonucleotide
  modified_base 61: mod_base = OTHER; note = 2'-O-methyl ribonucleotide
  modified_base 66: mod_base = OTHER; note = 2'-O-methyl ribonucleotide
  modified_base 67: mod_base = OTHER; note = 2'-O-methyl ribonucleotide
  modified_base 70: mod_base = OTHER; note = 2'-O-methyl ribonucleotide
  modified_base 71: mod_base = OTHER; note = 2'-O-methyl ribonucleotide
  modified_base 72: mod_base = OTHER; note = 2'-O-methyl ribonucleotide
  modified_base 73: mod_base = OTHER; note = 2'-O-methyl ribonucleotide
  modified_base 74: mod_base = OTHER; note = 2'-O-methyl ribonucleotide
  modified_base 75: mod_base = OTHER; note = 2'-O-methyl ribonucleotide
  modified_base 76: mod_base = OTHER; note = 2'-O-methyl ribonucleotide
  modified_base 77: mod_base = OTHER; note = 2'-O-methyl ribonucleotide
  modified_base 78: mod_base = OTHER; note = 2'-O-methyl ribonucleotide
  modified_base 79: mod_base = OTHER; note = 2'-O-methyl ribonucleotide
  modified_base 80: mod_base = OTHER; note = 2'-O-methyl ribonucleotide
  modified_base 81: mod_base = OTHER; note = 2'-O-methyl ribonucleotide
  modified_base 83: mod_base = OTHER; note = 2'-O-methyl ribonucleotide
  modified_base 84: mod_base = OTHER; note = 2'-O-methyl ribonucleotide
  modified_base 85: mod_base = OTHER; note = 2'-O-methyl ribonucleotide
  modified_base 86: mod_base = OTHER; note = 2'-O-methyl ribonucleotide
  modified_base 87: mod_base = OTHER; note = 2'-O-methyl ribonucleotide
  modified_base 88: mod_base = OTHER; note = 2'-O-methyl ribonucleotide
  modified_base 89: mod_base = OTHER; note = 2'-O-methyl ribonucleotide
  modified_base 90: mod_base = OTHER; note = 2'-O-methyl ribonucleotide
  modified_base 91: mod_base = OTHER; note = 2'-O-methyl ribonucleotide
  modified_base 92: mod_base = OTHER; note = 2'-O-methyl ribonucleotide
  modified_base 93: mod_base = OTHER; note = 2'-O-methyl ribonucleotide
  modified_base 94: mod_base = OTHER; note = 2'-O-methyl ribonucleotide
  modified_base 95: mod_base = OTHER; note = 2'-O-methyl ribonucleotide
  modified_base 96: mod_base = OTHER; note = 2'-O-methyl ribonucleotide
  modified_base 97: mod_base = OTHER; note = 2'-O-methyl ribonucleotide
  modified_base 98: mod_base = OTHER; note = 2'-O-methyl ribonucleotide
  modified_base 99: mod_base = OTHER; note = 2'-O-methyl ribonucleotide
  modified_base 100: mod_base = OTHER; note = 2'-O-methyl ribonucleotide
  modified_base 14: mod_base = OTHER; note = nebularine
  modified_base 28: mod_base = OTHER; note = nebularine
  modified_base 34: mod_base = OTHER; note = nebularine
  modified_base 42: mod_base = OTHER; note = nebularine
  modified_base 57: mod_base = OTHER; note = nebularine
  modified_base 65: mod_base = OTHER; note = nebularine
  modified_base 1..3: mod_base = OTHER; note = phosphorothioate linkage
  modified_base 98..100: mod_base = OTHER; note = phosphorothioate linkage

SEQ ID NO: 2082 - RNA, 100 nt, synthetic construct; identical to SEQ ID NO: 1921
  source 1..100: mol_type = other RNA
  modified_base 1: mod_base = OTHER; note = 2'-O-methyl ribonucleotide
  modified_base 2: mod_base = OTHER; note = 2'-O-methyl ribonucleotide
  modified_base 3: mod_base = OTHER; note = 2'-O-methyl ribonucleotide
  modified_base 21: mod_base = OTHER; note = 2'-O-methyl ribonucleotide
  modified_base 28: mod_base = OTHER; note = 2'-O-methyl ribonucleotide
  modified_base 29: mod_base = OTHER; note = 2'-O-methyl ribonucleotide
  modified_base 30: mod_base = OTHER; note = 2'-O-methyl ribonucleotide
  modified_base 31: mod_base = OTHER; note = 2'-O-methyl ribonucleotide
  modified_base 32: mod_base = OTHER; note = 2'-O-methyl ribonucleotide
  modified_base 33: mod_base = OTHER; note = 2'-O-methyl ribonucleotide
  modified_base 34: mod_base = OTHER; note = 2'-O-methyl ribonucleotide
  modified_base 35: mod_base = OTHER; note = 2'-O-methyl ribonucleotide
  modified_base 36: mod_base = OTHER; note = 2'-O-methyl ribonucleotide
  modified_base 37: mod_base = OTHER; note = 2'-O-methyl ribonucleotide
  modified_base 38: mod_base = OTHER; note = 2'-O-methyl ribonucleotide
  modified_base 39: mod_base = OTHER; note = 2'-O-methyl ribonucleotide
  modified_base 40: mod_base = OTHER; note = 2'-O-methyl ribonucleotide
  modified_base 41: mod_base = OTHER; note = 2'-O-methyl ribonucleotide
  modified_base 42: mod_base = OTHER; note = 2'-O-methyl ribonucleotide
  modified_base 46: mod_base = OTHER; note = 2'-O-methyl ribonucleotide
  modified_base 48: mod_base = OTHER; note = 2'-O-methyl ribonucleotide
  modified_base 50: mod_base = OTHER; note = 2'-O-methyl ribonucleotide
  modified_base 52: mod_base = OTHER; note = 2'-O-methyl ribonucleotide
  modified_base 53: mod_base = OTHER; note = 2'-O-methyl ribonucleotide
  modified_base 54: mod_base = OTHER; note = 2'-O-methyl ribonucleotide
  modified_base 55: mod_base = OTHER; note = 2'-O-methyl ribonucleotide
  modified_base 56: mod_base = OTHER; note = 2'-O-methyl ribonucleotide
  modified_base 57: mod_base = OTHER; note = 2'-O-methyl ribonucleotide
  modified_base 60: mod_base = OTHER; note = 2'-O-methyl ribonucleotide
  modified_base 61: mod_base = OTHER; note = 2'-O-methyl ribonucleotide
  modified_base 66: mod_base = OTHER; note = 2'-O-methyl ribonucleotide
  modified_base 67: mod_base = OTHER; note = 2'-O-methyl ribonucleotide
  modified_base 70: mod_base = OTHER; note = 2'-O-methyl ribonucleotide
  modified_base 71: mod_base = OTHER; note = 2'-O-methyl ribonucleotide
  modified_base 72: mod_base = OTHER; note = 2'-O-methyl ribonucleotide
  modified_base 73: mod_base = OTHER; note = 2'-O-methyl ribonucleotide
  modified_base 74: mod_base = OTHER; note = 2'-O-methyl ribonucleotide
  modified_base 75: mod_base = OTHER; note = 2'-O-methyl ribonucleotide
  modified_base 76: mod_base = OTHER; note = 2'-O-methyl ribonucleotide
  modified_base 77: mod_base = OTHER; note = 2'-O-methyl ribonucleotide
  modified_base 78: mod_base = OTHER; note = 2'-O-methyl ribonucleotide
  modified_base 79: mod_base = OTHER; note = 2'-O-methyl ribonucleotide
  modified_base 80: mod_base = OTHER; note = 2'-O-methyl ribonucleotide
  modified_base 81: mod_base = OTHER; note = 2'-O-methyl ribonucleotide
  modified_base 83: mod_base = OTHER; note = 2'-O-methyl ribonucleotide
  modified_base 84: mod_base = OTHER; note = 2'-O-methyl ribonucleotide
  modified_base 85: mod_base = OTHER; note = 2'-O-methyl ribonucleotide
  modified_base 86: mod_base = OTHER; note = 2'-O-methyl ribonucleotide
  modified_base 87: mod_base = OTHER; note = 2'-O-methyl ribonucleotide
  modified_base 88: mod_base = OTHER; note = 2'-O-methyl ribonucleotide
  modified_base 89: mod_base = OTHER; note = 2'-O-methyl ribonucleotide
  modified_base 90: mod_base = OTHER; note = 2'-O-methyl ribonucleotide
  modified_base 91: mod_base = OTHER; note = 2'-O-methyl ribonucleotide
  modified_base 92: mod_base = OTHER; note = 2'-O-methyl ribonucleotide
  modified_base 93: mod_base = OTHER; note = 2'-O-methyl ribonucleotide
  modified_base 94: mod_base = OTHER; note = 2'-O-methyl ribonucleotide
  modified_base 95: mod_base = OTHER; note = 2'-O-methyl ribonucleotide
  modified_base 96: mod_base = OTHER; note = 2'-O-methyl ribonucleotide
  modified_base 97: mod_base = OTHER; note = 2'-O-methyl ribonucleotide
  modified_base 98: mod_base = OTHER; note = 2'-O-methyl ribonucleotide
  modified_base 99: mod_base = OTHER; note = 2'-O-methyl ribonucleotide
  modified_base 100: mod_base = OTHER; note = 2'-O-methyl ribonucleotide
  modified_base 9: mod_base = OTHER; note = nebularine
  modified_base 14: mod_base = OTHER; note = nebularine
  modified_base 28: mod_base = OTHER; note = nebularine
  modified_base 34: mod_base = OTHER; note = nebularine
  modified_base 42: mod_base = OTHER; note = nebularine
  modified_base 57: mod_base = OTHER; note = nebularine
  modified_base 1..3: mod_base = OTHER; note = phosphorothioate linkage
  modified_base 98..100: mod_base = OTHER; note = phosphorothioate linkage

SEQ ID NO: 2083 - RNA, 100 nt, synthetic construct; identical to SEQ ID NO: 1922
  source 1..100: mol_type = other RNA
  modified_base 1: mod_base = OTHER; note = 2'-O-methyl ribonucleotide
  modified_base 2: mod_base = OTHER; note = 2'-O-methyl ribonucleotide
  modified_base 3: mod_base = OTHER; note = 2'-O-methyl ribonucleotide
  modified_base 21: mod_base = OTHER; note = 2'-O-methyl ribonucleotide
  modified_base 28: mod_base = OTHER; note = 2'-O-methyl ribonucleotide
  modified_base 29: mod_base = OTHER; note = 2'-O-methyl ribonucleotide
  modified_base 30: mod_base = OTHER; note = 2'-O-methyl ribonucleotide
  modified_base 31: mod_base = OTHER; note = 2'-O-methyl ribonucleotide
  modified_base 32: mod_base = OTHER; note = 2'-O-methyl ribonucleotide
  modified_base 33: mod_base = OTHER; note = 2'-O-methyl ribonucleotide
  modified_base 34: mod_base = OTHER; note = 2'-O-methyl ribonucleotide
  modified_base 35: mod_base = OTHER; note = 2'-O-methyl ribonucleotide
  modified_base 36: mod_base = OTHER; note = 2'-O-methyl ribonucleotide
  modified_base 37: mod_base = OTHER; note = 2'-O-methyl ribonucleotide
  modified_base 38: mod_base = OTHER; note = 2'-O-methyl ribonucleotide
  modified_base 39: mod_base = OTHER; note = 2'-O-methyl ribonucleotide
  modified_base 40: mod_base = OTHER; note = 2'-O-methyl ribonucleotide
  modified_base 41: mod_base = OTHER; note = 2'-O-methyl ribonucleotide
  modified_base 42: mod_base = OTHER; note = 2'-O-methyl ribonucleotide
  modified_base 46: mod_base = OTHER; note = 2'-O-methyl ribonucleotide
  modified_base 48: mod_base = OTHER; note = 2'-O-methyl ribonucleotide
  modified_base 50: mod_base = OTHER; note = 2'-O-methyl ribonucleotide
  modified_base 52: mod_base = OTHER; note = 2'-O-methyl ribonucleotide
  modified_base 53: mod_base = OTHER; note = 2'-O-methyl ribonucleotide
  modified_base 54: mod_base = OTHER; note = 2'-O-methyl ribonucleotide
  modified_base 55: mod_base = OTHER; note = 2'-O-methyl ribonucleotide
  modified_base 56: mod_base = OTHER; note = 2'-O-methyl ribonucleotide
  modified_base 57: mod_base = OTHER; note = 2'-O-methyl ribonucleotide
  modified_base 60: mod_base = OTHER; note = 2'-O-methyl ribonucleotide
  modified_base 61: mod_base = OTHER; note = 2'-O-methyl ribonucleotide
  modified_base 66: mod_base = OTHER; note = 2'-O-methyl ribonucleotide
  modified_base 67: mod_base = OTHER; note = 2'-O-methyl ribonucleotide
  modified_base 70: mod_base = OTHER; note = 2'-O-methyl ribonucleotide
  modified_base 71: mod_base = OTHER; note = 2'-O-methyl ribonucleotide
  modified_base 72: mod_base = OTHER; note = 2'-O-methyl ribonucleotide
  modified_base 73: mod_base = OTHER; note = 2'-O-methyl ribonucleotide
  modified_base 74: mod_base = OTHER; note = 2'-O-methyl ribonucleotide
  modified_base 75: mod_base = OTHER; note = 2'-O-methyl ribonucleotide
  modified_base 76: mod_base = OTHER; note = 2'-O-methyl ribonucleotide
  modified_base 77: mod_base = OTHER; note = 2'-O-methyl ribonucleotide
  modified_base 78: mod_base = OTHER; note = 2'-O-methyl ribonucleotide
  modified_base 79: mod_base = OTHER; note = 2'-O-methyl ribonucleotide
  modified_base 80: mod_base = OTHER; note = 2'-O-methyl ribonucleotide
  modified_base 81: mod_base = OTHER; note = 2'-O-methyl ribonucleotide
  modified_base 83: mod_base = OTHER; note = 2'-O-methyl ribonucleotide
  modified_base 84: mod_base = OTHER; note = 2'-O-methyl ribonucleotide
  modified_base 85: mod_base = OTHER; note = 2'-O-methyl ribonucleotide
  modified_base 86: mod_base = OTHER; note = 2'-O-methyl ribonucleotide
  modified_base 87: mod_base = OTHER; note = 2'-O-methyl ribonucleotide
  modified_base 88: mod_base = OTHER; note = 2'-O-methyl ribonucleotide
  modified_base 89: mod_base = OTHER; note = 2'-O-methyl ribonucleotide
  modified_base 90: mod_base = OTHER; note = 2'-O-methyl ribonucleotide
  modified_base 91: mod_base = OTHER; note = 2'-O-methyl ribonucleotide
  modified_base 92: mod_base = OTHER; note = 2'-O-methyl ribonucleotide
  modified_base 93: mod_base = OTHER; note = 2'-O-methyl ribonucleotide
  modified_base 94: mod_base = OTHER; note = 2'-O-methyl ribonucleotide
  modified_base 95: mod_base = OTHER; note = 2'-O-methyl ribonucleotide
  modified_base 96: mod_base = OTHER; note = 2'-O-methyl ribonucleotide
  modified_base 97: mod_base = OTHER; note = 2'-O-methyl ribonucleotide
  modified_base 98: mod_base = OTHER; note = 2'-O-methyl ribonucleotide
  modified_base 99: mod_base = OTHER; note = 2'-O-methyl ribonucleotide
  modified_base 100: mod_base = OTHER; note = 2'-O-methyl ribonucleotide
  modified_base 9: mod_base = OTHER; note = nebularine
  modified_base 14: mod_base = OTHER; note = nebularine
  modified_base 34: mod_base = OTHER; note = nebularine
  modified_base 42: mod_base = OTHER; note = nebularine
  modified_base 57: mod_base = OTHER; note = nebularine
  modified_base 1..3: mod_base = OTHER; note = phosphorothioate linkage
  modified_base 98..100: mod_base = OTHER; note = phosphorothioate linkage

SEQ ID NO: 2084 - RNA, 100 nt, synthetic construct; identical to SEQ ID NO: 1923
  source 1..100: mol_type = other RNA
  modified_base 1: mod_base = OTHER; note = 2'-O-methyl ribonucleotide
  modified_base 2: mod_base = OTHER; note = 2'-O-methyl ribonucleotide
  modified_base 3: mod_base = OTHER; note = 2'-O-methyl ribonucleotide
  modified_base 21: mod_base = OTHER; note = 2'-O-methyl ribonucleotide
  modified_base 28: mod_base = OTHER; note = 2'-O-methyl ribonucleotide
  modified_base 29: mod_base = OTHER; note = 2'-O-methyl ribonucleotide
  modified_base 30: mod_base = OTHER; note = 2'-O-methyl ribonucleotide
  modified_base 31: mod_base = OTHER; note = 2'-O-methyl ribonucleotide
  modified_base 32: mod_base = OTHER; note = 2'-O-methyl ribonucleotide
  modified_base 33: mod_base = OTHER; note = 2'-O-methyl ribonucleotide
  modified_base 34: mod_base = OTHER; note = 2'-O-methyl ribonucleotide
  modified_base 35: mod_base = OTHER; note = 2'-O-methyl ribonucleotide
  modified_base 36: mod_base = OTHER; note = 2'-O-methyl ribonucleotide
  modified_base 37: mod_base = OTHER; note = 2'-O-methyl ribonucleotide
  modified_base 38: mod_base = OTHER; note = 2'-O-methyl ribonucleotide
  modified_base 39: mod_base = OTHER; note = 2'-O-methyl ribonucleotide
  modified_base 40: mod_base = OTHER; note = 2'-O-methyl ribonucleotide
  modified_base 41: mod_base = OTHER; note = 2'-O-methyl ribonucleotide
  modified_base 42: mod_base = OTHER; note = 2'-O-methyl ribonucleotide
  modified_base 46: mod_base = OTHER; note = 2'-O-methyl ribonucleotide
  modified_base 48: mod_base = OTHER; note = 2'-O-methyl ribonucleotide
  modified_base 50: mod_base = OTHER; note = 2'-O-methyl ribonucleotide
  modified_base 52: mod_base = OTHER; note = 2'-O-methyl ribonucleotide
  modified_base 53: mod_base = OTHER; note = 2'-O-methyl ribonucleotide
  modified_base 54: mod_base = OTHER; note = 2'-O-methyl ribonucleotide
  modified_base 55: mod_base = OTHER; note = 2'-O-methyl ribonucleotide
  modified_base 56: mod_base = OTHER; note = 2'-O-methyl ribonucleotide
  modified_base 57: mod_base = OTHER; note = 2'-O-methyl ribonucleotide
  modified_base 60: mod_base = OTHER; note = 2'-O-methyl ribonucleotide
  modified_base 61: mod_base = OTHER; note = 2'-O-methyl ribonucleotide
  modified_base 66: mod_base = OTHER; note = 2'-O-methyl ribonucleotide
  modified_base 67: mod_base = OTHER; note = 2'-O-methyl ribonucleotide
  modified_base 70: mod_base = OTHER; note = 2'-O-methyl ribonucleotide
  modified_base 71: mod_base = OTHER; note = 2'-O-methyl ribonucleotide
  modified_base 72: mod_base = OTHER; note = 2'-O-methyl ribonucleotide
  modified_base 73: mod_base = OTHER; note = 2'-O-methyl ribonucleotide
  modified_base 74: mod_base = OTHER; note = 2'-O-methyl ribonucleotide
  modified_base 75: mod_base = OTHER; note = 2'-O-methyl ribonucleotide
  modified_base 76: mod_base = OTHER; note = 2'-O-methyl ribonucleotide
  modified_base 77: mod_base = OTHER; note = 2'-O-methyl ribonucleotide
  modified_base 78: mod_base = OTHER; note = 2'-O-methyl ribonucleotide
  modified_base 79: mod_base = OTHER; note = 2'-O-methyl ribonucleotide
  modified_base 80: mod_base = OTHER; note = 2'-O-methyl ribonucleotide
  modified_base 81: mod_base = OTHER; note = 2'-O-methyl ribonucleotide
  modified_base 83: mod_base = OTHER; note = 2'-O-methyl ribonucleotide
  modified_base 84: mod_base = OTHER; note = 2'-O-methyl ribonucleotide
  modified_base 85: mod_base = OTHER; note = 2'-O-methyl ribonucleotide
  modified_base 86: mod_base = OTHER; note = 2'-O-methyl ribonucleotide
  modified_base 87: mod_base = OTHER; note = 2'-O-methyl ribonucleotide
  modified_base 88: mod_base = OTHER; note = 2'-O-methyl ribonucleotide
  modified_base 89: mod_base = OTHER; note = 2'-O-methyl ribonucleotide
  modified_base 90: mod_base = OTHER; note = 2'-O-methyl ribonucleotide
  modified_base 91: mod_base = OTHER; note = 2'-O-methyl ribonucleotide
  modified_base 92: mod_base = OTHER; note = 2'-O-methyl ribonucleotide
  modified_base 93: mod_base = OTHER; note = 2'-O-methyl ribonucleotide
  modified_base 94: mod_base = OTHER; note = 2'-O-methyl ribonucleotide
  modified_base 95: mod_base = OTHER; note = 2'-O-methyl ribonucleotide
  modified_base 96: mod_base = OTHER; note = 2'-O-methyl ribonucleotide
  modified_base 97: mod_base = OTHER; note = 2'-O-methyl ribonucleotide
  modified_base 98: mod_base = OTHER; note = 2'-O-methyl ribonucleotide
  modified_base 99: mod_base = OTHER; note = 2'-O-methyl ribonucleotide
  modified_base 100: mod_base = OTHER; note = 2'-O-methyl ribonucleotide
  modified_base 9: mod_base = OTHER; note = nebularine
  modified_base 14: mod_base = OTHER; note = nebularine
  modified_base 42: mod_base = OTHER; note = nebularine
  modified_base 57: mod_base = OTHER; note = nebularine
  modified_base 1..3: mod_base = OTHER; note = phosphorothioate linkage
  modified_base 98..100: mod_base = OTHER; note = phosphorothioate linkage

SEQ ID NO: 2085 - RNA, 100 nt, synthetic construct; identical to SEQ ID NO: 1924
  source 1..100: mol_type = other RNA
  modified_base 1: mod_base = OTHER; note = 2'-O-methyl ribonucleotide
  modified_base 2: mod_base = OTHER; note = 2'-O-methyl ribonucleotide
  modified_base 3: mod_base = OTHER; note = 2'-O-methyl ribonucleotide
  modified_base 21: mod_base = OTHER; note = 2'-O-methyl ribonucleotide
  modified_base 28: mod_base = OTHER; note = 2'-O-methyl ribonucleotide
  modified_base 29: mod_base = OTHER; note = 2'-O-methyl ribonucleotide
  modified_base 30: mod_base = OTHER; note = 2'-O-methyl ribonucleotide
  modified_base 31: mod_base = OTHER; note = 2'-O-methyl ribonucleotide
  modified_base 32: mod_base = OTHER; note = 2'-O-methyl ribonucleotide
  modified_base 33: mod_base = OTHER; note = 2'-O-methyl ribonucleotide
  modified_base 34: mod_base = OTHER; note = 2'-O-methyl ribonucleotide
  modified_base 35: mod_base = OTHER; note = 2'-O-methyl ribonucleotide
  modified_base 36: mod_base = OTHER; note = 2'-O-methyl ribonucleotide
  modified_base 37: mod_base = OTHER; note = 2'-O-methyl ribonucleotide
  modified_base 38: mod_base = OTHER; note = 2'-O-methyl ribonucleotide
  modified_base 39: mod_base = OTHER; note = 2'-O-methyl ribonucleotide
  modified_base 40: mod_base = OTHER; note = 2'-O-methyl ribonucleotide
  modified_base 41: mod_base = OTHER; note = 2'-O-methyl ribonucleotide
  modified_base 42: mod_base = OTHER; note = 2'-O-methyl ribonucleotide
  modified_base 46: mod_base = OTHER; note = 2'-O-methyl ribonucleotide
  modified_base 48: mod_base = OTHER; note = 2'-O-methyl ribonucleotide
  modified_base 50: mod_base = OTHER; note = 2'-O-methyl ribonucleotide
  modified_base 52: mod_base = OTHER; note = 2'-O-methyl ribonucleotide
  modified_base 53: mod_base = OTHER; note = 2'-O-methyl ribonucleotide
  modified_base 54: mod_base = OTHER; note = 2'-O-methyl ribonucleotide
  modified_base 55: mod_base = OTHER; note = 2'-O-methyl ribonucleotide
  modified_base 56: mod_base = OTHER; note = 2'-O-methyl ribonucleotide
  modified_base 57: mod_base = OTHER; note = 2'-O-methyl ribonucleotide
  modified_base 60: mod_base = OTHER; note = 2'-O-methyl ribonucleotide
  modified_base 61: mod_base = OTHER; note = 2'-O-methyl ribonucleotide
  modified_base 66: mod_base = OTHER; note = 2'-O-methyl ribonucleotide
  modified_base 67: mod_base = OTHER; note = 2'-O-methyl ribonucleotide
  modified_base 70: mod_base = OTHER; note = 2'-O-methyl ribonucleotide
  modified_base 71: mod_base = OTHER; note = 2'-O-methyl ribonucleotide
  modified_base 72: mod_base = OTHER; note = 2'-O-methyl ribonucleotide
  modified_base 73: mod_base = OTHER; note = 2'-O-methyl ribonucleotide
  modified_base 74: mod_base = OTHER; note = 2'-O-methyl ribonucleotide
  modified_base 75: mod_base = OTHER; note = 2'-O-methyl ribonucleotide
  modified_base 76: mod_base = OTHER; note = 2'-O-methyl ribonucleotide
  modified_base 77: mod_base = OTHER; note = 2'-O-methyl ribonucleotide
  modified_base 78: mod_base = OTHER; note = 2'-O-methyl ribonucleotide
  modified_base 79: mod_base = OTHER; note = 2'-O-methyl ribonucleotide
  modified_base 80: mod_base = OTHER; note = 2'-O-methyl ribonucleotide
  modified_base 81: mod_base = OTHER; note = 2'-O-methyl ribonucleotide
  modified_base 83: mod_base = OTHER; note = 2'-O-methyl ribonucleotide
  modified_base 84: mod_base = OTHER; note = 2'-O-methyl ribonucleotide
  modified_base 85: mod_base = OTHER; note = 2'-O-methyl ribonucleotide
  modified_base 86: mod_base = OTHER; note = 2'-O-methyl ribonucleotide
  modified_base 87: mod_base = OTHER; note = 2'-O-methyl ribonucleotide
  modified_base 88: mod_base = OTHER; note = 2'-O-methyl ribonucleotide
  modified_base 89: mod_base = OTHER; note = 2'-O-methyl ribonucleotide
  modified_base 90: mod_base = OTHER; note = 2'-O-methyl ribonucleotide
  modified_base 91: mod_base = OTHER; note = 2'-O-methyl ribonucleotide
  modified_base 92: mod_base = OTHER; note = 2'-O-methyl ribonucleotide
  modified_base 93: mod_base = OTHER; note = 2'-O-methyl ribonucleotide
  modified_base 94: mod_base = OTHER; note = 2'-O-methyl ribonucleotide
  modified_base 95: mod_base = OTHER; note = 2'-O-methyl ribonucleotide
  modified_base 96: mod_base = OTHER; note = 2'-O-methyl ribonucleotide
  modified_base 97: mod_base = OTHER; note = 2'-O-methyl ribonucleotide
  modified_base 98: mod_base = OTHER; note = 2'-O-methyl ribonucleotide
  modified_base 99: mod_base = OTHER; note = 2'-O-methyl ribonucleotide
  modified_base 100: mod_base = OTHER; note = 2'-O-methyl ribonucleotide
  modified_base 9: mod_base = OTHER; note = nebularine
  modified_base 14: mod_base = OTHER; note = nebularine
  modified_base 57: mod_base = OTHER; note = nebularine
  modified_base 1..3: mod_base = OTHER; note = phosphorothioate linkage
  modified_base 98..100: mod_base = OTHER; note = phosphorothioate linkage

SEQ ID NO: 2086 - RNA, 100 nt, synthetic construct; identical to SEQ ID NO: 1925
  source 1..100: mol_type = other RNA
  modified_base 1: mod_base = OTHER; note = 2'-O-methyl ribonucleotide
  modified_base 2: mod_base = OTHER; note = 2'-O-methyl ribonucleotide
  modified_base 3: mod_base = OTHER; note = 2'-O-methyl ribonucleotide
  modified_base 21: mod_base = OTHER; note = 2'-O-methyl ribonucleotide
  modified_base 28: mod_base = OTHER; note = 2'-O-methyl ribonucleotide
  modified_base 29: mod_base = OTHER; note = 2'-O-methyl ribonucleotide
  modified_base 30: mod_base = OTHER; note = 2'-O-methyl ribonucleotide
  modified_base 31: mod_base = OTHER; note = 2'-O-methyl ribonucleotide
  modified_base 32: mod_base = OTHER; note = 2'-O-methyl ribonucleotide
  modified_base 33: mod_base = OTHER; note = 2'-O-methyl ribonucleotide
  modified_base 34: mod_base = OTHER; note = 2'-O-methyl ribonucleotide
  modified_base 35: mod_base = OTHER; note = 2'-O-methyl ribonucleotide
  modified_base 36: mod_base = OTHER; note = 2'-O-methyl ribonucleotide
  modified_base 37: mod_base = OTHER; note = 2'-O-methyl ribonucleotide
  modified_base 38: mod_base = OTHER; note = 2'-O-methyl ribonucleotide
  modified_base 39: mod_base = OTHER; note = 2'-O-methyl ribonucleotide
  modified_base 40: mod_base = OTHER; note = 2'-O-methyl ribonucleotide
  modified_base 41: mod_base = OTHER; note = 2'-O-methyl ribonucleotide
  modified_base 42: mod_base = OTHER; note = 2'-O-methyl ribonucleotide
  modified_base 46: mod_base = OTHER; note = 2'-O-methyl ribonucleotide
  modified_base 48: mod_base = OTHER; note = 2'-O-methyl ribonucleotide
  modified_base 50: mod_base = OTHER; note = 2'-O-methyl ribonucleotide
  modified_base 52: mod_base = OTHER; note = 2'-O-methyl ribonucleotide
  modified_base 53: mod_base = OTHER; note = 2'-O-methyl ribonucleotide
  modified_base 54: mod_base = OTHER; note = 2'-O-methyl ribonucleotide
  modified_base 55: mod_base = OTHER; note = 2'-O-methyl ribonucleotide
  modified_base 56: mod_base = OTHER; note = 2'-O-methyl ribonucleotide
  modified_base 57: mod_base = OTHER; note = 2'-O-methyl ribonucleotide
  modified_base 60: mod_base = OTHER; note = 2'-O-methyl ribonucleotide
  modified_base 61: mod_base = OTHER; note = 2'-O-methyl ribonucleotide
  modified_base 66: mod_base = OTHER; note = 2'-O-methyl ribonucleotide
  modified_base 67: mod_base = OTHER; note = 2'-O-methyl ribonucleotide
  modified_base 70: mod_base = OTHER; note = 2'-O-methyl ribonucleotide
  modified_base 71: mod_base = OTHER; note = 2'-O-methyl ribonucleotide
  modified_base 72: mod_base = OTHER; note = 2'-O-methyl ribonucleotide
  modified_base 73: mod_base = OTHER; note = 2'-O-methyl ribonucleotide
  modified_base 74: mod_base = OTHER; note = 2'-O-methyl ribonucleotide
  modified_base 75: mod_base = OTHER; note = 2'-O-methyl ribonucleotide
  modified_base 76: mod_base = OTHER; note = 2'-O-methyl ribonucleotide
  modified_base 77: mod_base = OTHER; note = 2'-O-methyl ribonucleotide
  modified_base 78: mod_base = OTHER; note = 2'-O-methyl ribonucleotide
  modified_base 79: mod_base = OTHER; note = 2'-O-methyl ribonucleotide
  modified_base 80: mod_base = OTHER; note = 2'-O-methyl ribonucleotide
  modified_base 81: mod_base = OTHER; note = 2'-O-methyl ribonucleotide
  modified_base 83: mod_base = OTHER; note = 2'-O-methyl ribonucleotide
  modified_base 84: mod_base = OTHER; note = 2'-O-methyl ribonucleotide
  modified_base 85: mod_base = OTHER; note = 2'-O-methyl ribonucleotide
  modified_base 86: mod_base = OTHER; note = 2'-O-methyl ribonucleotide
  modified_base 87: mod_base = OTHER; note = 2'-O-methyl ribonucleotide
  modified_base 88: mod_base = OTHER; note = 2'-O-methyl ribonucleotide
  modified_base 89: mod_base = OTHER; note = 2'-O-methyl ribonucleotide
  modified_base 90: mod_base = OTHER; note = 2'-O-methyl ribonucleotide
  modified_base 91: mod_base = OTHER; note = 2'-O-methyl ribonucleotide
  modified_base 92: mod_base = OTHER; note = 2'-O-methyl ribonucleotide
  modified_base 93: mod_base = OTHER; note = 2'-O-methyl ribonucleotide
  modified_base 94: mod_base = OTHER; note = 2'-O-methyl ribonucleotide
  modified_base 95: mod_base = OTHER; note = 2'-O-methyl ribonucleotide
  modified_base 96: mod_base = OTHER; note = 2'-O-methyl ribonucleotide
  modified_base 97: mod_base = OTHER; note = 2'-O-methyl ribonucleotide
  modified_base 98: mod_base = OTHER; note = 2'-O-methyl ribonucleotide
  modified_base 99: mod_base = OTHER; note = 2'-O-methyl ribonucleotide
  modified_base 100: mod_base = OTHER; note = 2'-O-methyl ribonucleotide
  modified_base 9: mod_base = OTHER; note = nebularine
  modified_base 14: mod_base = OTHER; note = nebularine
  modified_base 28: mod_base = OTHER; note = nebularine
  modified_base 1..3: mod_base = OTHER; note = phosphorothioate linkage
  modified_base 98..100: mod_base = OTHER; note = phosphorothioate linkage

SEQ ID NO: 2087 - RNA, 100 nt, synthetic construct; identical to SEQ ID NO: 1927
  source 1..100: mol_type = other RNA
  modified_base 1: mod_base = OTHER; note = 2'-O-methyl ribonucleotide
  modified_base 2: mod_base = OTHER; note = 2'-O-methyl ribonucleotide
  modified_base 3: mod_base = OTHER; note = 2'-O-methyl ribonucleotide
  modified_base 21: mod_base = OTHER; note = 2'-O-methyl ribonucleotide
  modified_base 28: mod_base = OTHER; note = 2'-O-methyl ribonucleotide
  modified_base 29: mod_base = OTHER; note = 2'-O-methyl ribonucleotide
  modified_base 30: mod_base = OTHER; note = 2'-O-methyl ribonucleotide
  modified_base 31: mod_base = OTHER; note = 2'-O-methyl ribonucleotide
  modified_base 32: mod_base = OTHER; note = 2'-O-methyl ribonucleotide
  modified_base 33: mod_base = OTHER; note = 2'-O-methyl ribonucleotide
  modified_base 34: mod_base = OTHER; note = 2'-O-methyl ribonucleotide
  modified_base 35: mod_base = OTHER; note = 2'-O-methyl ribonucleotide
  modified_base 36: mod_base = OTHER; note = 2'-O-methyl ribonucleotide
  modified_base 37: mod_base = OTHER; note = 2'-O-methyl ribonucleotide
  modified_base 38: mod_base = OTHER; note = 2'-O-methyl ribonucleotide
  modified_base 39: mod_base = OTHER; note = 2'-O-methyl ribonucleotide
  modified_base 40: mod_base = OTHER; note = 2'-O-methyl ribonucleotide
  modified_base 41: mod_base = OTHER; note = 2'-O-methyl ribonucleotide
  modified_base 42: mod_base = OTHER; note = 2'-O-methyl ribonucleotide
  modified_base 46: mod_base = OTHER; note = 2'-O-methyl ribonucleotide
  modified_base 48: mod_base = OTHER; note = 2'-O-methyl ribonucleotide
  modified_base 50: mod_base = OTHER; note = 2'-O-methyl ribonucleotide
  modified_base 52: mod_base = OTHER; note = 2'-O-methyl ribonucleotide
  modified_base 53: mod_base = OTHER; note = 2'-O-methyl ribonucleotide
  modified_base 54: mod_base = OTHER; note = 2'-O-methyl ribonucleotide
  modified_base 55: mod_base = OTHER; note = 2'-O-methyl ribonucleotide
  modified_base 56: mod_base = OTHER; note = 2'-O-methyl ribonucleotide
  modified_base 57: mod_base = OTHER; note = 2'-O-methyl ribonucleotide
  modified_base 60: mod_base = OTHER; note = 2'-O-methyl ribonucleotide
  modified_base 61: mod_base = OTHER; note = 2'-O-methyl ribonucleotide
  modified_base 66: mod_base = OTHER; note = 2'-O-methyl ribonucleotide
  modified_base 67: mod_base = OTHER; note = 2'-O-methyl ribonucleotide
  modified_base 70: mod_base = OTHER; note = 2'-O-methyl ribonucleotide
  modified_base 71: mod_base = OTHER; note = 2'-O-methyl ribonucleotide
  modified_base 72: mod_base = OTHER; note = 2'-O-methyl ribonucleotide
  modified_base 73: mod_base = OTHER; note = 2'-O-methyl ribonucleotide
  modified_base 74: mod_base = OTHER; note = 2'-O-methyl ribonucleotide
  modified_base 75: mod_base = OTHER; note = 2'-O-methyl ribonucleotide
  modified_base 76: mod_base = OTHER; note = 2'-O-methyl ribonucleotide
  modified_base 77: mod_base = OTHER; note = 2'-O-methyl ribonucleotide
  modified_base 78: mod_base = OTHER; note = 2'-O-methyl ribonucleotide
  modified_base 79: mod_base = OTHER; note = 2'-O-methyl ribonucleotide
  modified_base 80: mod_base = OTHER; note = 2'-O-methyl ribonucleotide
  modified_base 81: mod_base = OTHER; note = 2'-O-methyl ribonucleotide
  modified_base 83: mod_base = OTHER; note = 2'-O-methyl ribonucleotide
  modified_base 84: mod_base = OTHER; note = 2'-O-methyl ribonucleotide
  modified_base 85: mod_base = OTHER; note = 2'-O-methyl ribonucleotide
  modified_base 86: mod_base = OTHER; note = 2'-O-methyl ribonucleotide
  modified_base 87: mod_base = OTHER; note = 2'-O-methyl ribonucleotide
  modified_base 88: mod_base = OTHER; note = 2'-O-methyl ribonucleotide
  modified_base 89: mod_base = OTHER; note = 2'-O-methyl ribonucleotide
  modified_base 90: mod_base = OTHER; note = 2'-O-methyl ribonucleotide
  modified_base 91: mod_base = OTHER; note = 2'-O-methyl ribonucleotide
  modified_base 92: mod_base = OTHER; note = 2'-O-methyl ribonucleotide
  modified_base 93: mod_base = OTHER; note = 2'-O-methyl ribonucleotide
  modified_base 94: mod_base = OTHER; note = 2'-O-methyl ribonucleotide
  modified_base 95: mod_base = OTHER; note = 2'-O-methyl ribonucleotide
  modified_base 96: mod_base = OTHER; note = 2'-O-methyl ribonucleotide
  modified_base 97: mod_base = OTHER; note = 2'-O-methyl ribonucleotide
  modified_base 98: mod_base = OTHER; note = 2'-O-methyl ribonucleotide
  modified_base 99: mod_base = OTHER; note = 2'-O-methyl ribonucleotide
  modified_base 100: mod_base = OTHER; note = 2'-O-methyl ribonucleotide
  modified_base 9: mod_base = OTHER; note = nebularine
  modified_base 14: mod_base = OTHER; note = nebularine
  modified_base 34: mod_base = OTHER; note = nebularine
  modified_base 42: mod_base = OTHER; note = nebularine
  modified_base 1..3: mod_base = OTHER; note = phosphorothioate linkage
  modified_base 98..100: mod_base = OTHER; note = phosphorothioate linkage

SEQ ID NO: 2088 - RNA, 100 nt, synthetic construct; identical to SEQ ID NO: 1928
  source 1..100: mol_type = other RNA
  modified_base 1: mod_base = OTHER; note = 2'-O-methyl ribonucleotide
  modified_base 2: mod_base = OTHER; note = 2'-O-methyl ribonucleotide
  modified_base 3: mod_base = OTHER; note = 2'-O-methyl ribonucleotide
  modified_base 21: mod_base = OTHER; note = 2'-O-methyl ribonucleotide
  modified_base 28: mod_base = OTHER; note = 2'-O-methyl ribonucleotide
  modified_base 29: mod_base = OTHER; note = 2'-O-methyl ribonucleotide
  modified_base 30: mod_base = OTHER; note = 2'-O-methyl ribonucleotide
  modified_base 31: mod_base = OTHER; note = 2'-O-methyl ribonucleotide
  modified_base 32: mod_base = OTHER; note = 2'-O-methyl ribonucleotide
  modified_base 33: mod_base = OTHER; note = 2'-O-methyl ribonucleotide
  modified_base 34: mod_base = OTHER; note = 2'-O-methyl ribonucleotide
  modified_base 35: mod_base = OTHER; note = 2'-O-methyl ribonucleotide
  modified_base 36: mod_base = OTHER; note = 2'-O-methyl ribonucleotide
  modified_base 37: mod_base = OTHER; note = 2'-O-methyl ribonucleotide
  modified_base 38: mod_base = OTHER; note = 2'-O-methyl ribonucleotide
  modified_base 39: mod_base = OTHER; note = 2'-O-methyl ribonucleotide
  modified_base 40: mod_base = OTHER; note = 2'-O-methyl ribonucleotide
  modified_base 41: mod_base = OTHER; note = 2'-O-methyl ribonucleotide
  modified_base 42: mod_base = OTHER; note = 2'-O-methyl ribonucleotide
  modified_base 46: mod_base = OTHER; note = 2'-O-methyl ribonucleotide
  modified_base 48: mod_base = OTHER; note = 2'-O-methyl ribonucleotide
  modified_base 50: mod_base = OTHER; note = 2'-O-methyl ribonucleotide
  modified_base 52: mod_base = OTHER; note = 2'-O-methyl ribonucleotide
  modified_base 53: mod_base = OTHER; note = 2'-O-methyl ribonucleotide
  modified_base 54: mod_base = OTHER; note = 2'-O-methyl ribonucleotide
  modified_base 55: mod_base = OTHER; note = 2'-O-methyl ribonucleotide
  modified_base 56: mod_base = OTHER; note = 2'-O-methyl ribonucleotide
  modified_base 57: mod_base = OTHER; note = 2'-O-methyl ribonucleotide
  modified_base 60: mod_base = OTHER; note = 2'-O-methyl ribonucleotide
  modified_base 61: mod_base = OTHER; note = 2'-O-methyl ribonucleotide
  modified_base 66: mod_base = OTHER; note = 2'-O-methyl ribonucleotide
  modified_base 67: mod_base = OTHER; note = 2'-O-methyl ribonucleotide
  modified_base 70: mod_base = OTHER; note = 2'-O-methyl ribonucleotide
  modified_base 71: mod_base = OTHER; note = 2'-O-methyl ribonucleotide
  modified_base 72: mod_base = OTHER; note = 2'-O-methyl ribonucleotide
  modified_base 73: mod_base = OTHER; note = 2'-O-methyl ribonucleotide
  modified_base 74: mod_base = OTHER; note = 2'-O-methyl ribonucleotide
  modified_base 75: mod_base = OTHER; note = 2'-O-methyl ribonucleotide
  modified_base 76: mod_base = OTHER; note = 2'-O-methyl ribonucleotide
  modified_base 77: mod_base = OTHER; note = 2'-O-methyl ribonucleotide
  modified_base 78: mod_base = OTHER; note = 2'-O-methyl ribonucleotide
  modified_base 79: mod_base = OTHER; note = 2'-O-methyl ribonucleotide
  modified_base 80: mod_base = OTHER; note = 2'-O-methyl ribonucleotide
  modified_base 81: mod_base = OTHER; note = 2'-O-methyl ribonucleotide
  modified_base 83: mod_base = OTHER; note = 2'-O-methyl ribonucleotide
  modified_base 84: mod_base = OTHER; note = 2'-O-methyl ribonucleotide
  modified_base 85: mod_base = OTHER; note = 2'-O-methyl ribonucleotide
  modified_base 86: mod_base = OTHER; note = 2'-O-methyl ribonucleotide
  modified_base 87: mod_base = OTHER; note = 2'-O-methyl ribonucleotide
  modified_base 88: mod_base = OTHER; note = 2'-O-methyl ribonucleotide
  modified_base 89: mod_base = OTHER; note = 2'-O-methyl ribonucleotide
  modified_base 90: mod_base = OTHER; note = 2'-O-methyl ribonucleotide
  modified_base 91: mod_base = OTHER; note = 2'-O-methyl ribonucleotide
  modified_base 92: mod_base = OTHER; note = 2'-O-methyl ribonucleotide
  modified_base 93: mod_base = OTHER; note = 2'-O-methyl ribonucleotide
  modified_base 94: mod_base = OTHER; note = 2'-O-methyl ribonucleotide
  modified_base 95: mod_base = OTHER; note = 2'-O-methyl ribonucleotide
  modified_base 96: mod_base = OTHER; note = 2'-O-methyl ribonucleotide
  modified_base 97: mod_base = OTHER; note = 2'-O-methyl ribonucleotide
  modified_base 98: mod_base = OTHER; note = 2'-O-methyl ribonucleotide
  modified_base 99: mod_base = OTHER; note = 2'-O-methyl ribonucleotide
  modified_base 100: mod_base = OTHER; note = 2'-O-methyl ribonucleotide
  modified_base 14: mod_base = OTHER; note = nebularine
  modified_base 28: mod_base = OTHER; note = nebularine
  modified_base 34: mod_base = OTHER; note = nebularine
  modified_base 42: mod_base = OTHER; note = nebularine
  modified_base 57: mod_base = OTHER; note = nebularine
  modified_base 1..3: mod_base = OTHER; note = phosphorothioate linkage
  modified_base 98..100: mod_base = OTHER; note = phosphorothioate linkage

SEQ ID NO: 2089 - RNA, 100 nt, synthetic construct; identical to SEQ ID NO: 1930
  source 1..100: mol_type = other RNA
  modified_base 1: mod_base = OTHER; note = 2'-O-methyl ribonucleotide
  modified_base 2: mod_base = OTHER; note = 2'-O-methyl ribonucleotide
  modified_base 3: mod_base = OTHER; note = 2'-O-methyl ribonucleotide
  modified_base 21: mod_base = OTHER; note = 2'-O-methyl ribonucleotide
  modified_base 28: mod_base = OTHER; note = 2'-O-methyl ribonucleotide
  modified_base 29: mod_base = OTHER; note = 2'-O-methyl ribonucleotide
  modified_base 30: mod_base = OTHER; note = 2'-O-methyl ribonucleotide
  modified_base 31: mod_base = OTHER; note = 2'-O-methyl ribonucleotide
  modified_base 32: mod_base = OTHER; note = 2'-O-methyl ribonucleotide
  modified_base 33: mod_base = OTHER; note = 2'-O-methyl ribonucleotide
  modified_base 34: mod_base = OTHER; note = 2'-O-methyl ribonucleotide
  modified_base 35: mod_base = OTHER; note = 2'-O-methyl ribonucleotide
  modified_base 36: mod_base = OTHER; note = 2'-O-methyl ribonucleotide
  modified_base 37: mod_base = OTHER; note = 2'-O-methyl ribonucleotide
  modified_base 38: mod_base = OTHER; note = 2'-O-methyl ribonucleotide
  modified_base 39: mod_base = OTHER; note = 2'-O-methyl ribonucleotide
  modified_base 40: mod_base = OTHER; note = 2'-O-methyl ribonucleotide
  modified_base 41: mod_base = OTHER; note = 2'-O-methyl ribonucleotide
  modified_base 42: mod_base = OTHER; note = 2'-O-methyl ribonucleotide
  modified_base 46: mod_base = OTHER; note = 2'-O-methyl ribonucleotide
  modified_base 48: mod_base = OTHER; note = 2'-O-methyl ribonucleotide
  modified_base 50: mod_base = OTHER; note = 2'-O-methyl ribonucleotide
  modified_base 52: mod_base = OTHER; note = 2'-O-methyl ribonucleotide
  modified_base 53: mod_base = OTHER; note = 2'-O-methyl ribonucleotide
  modified_base 54: mod_base = OTHER; note = 2'-O-methyl ribonucleotide
  modified_base 55: mod_base = OTHER; note = 2'-O-methyl ribonucleotide
  modified_base 56: mod_base = OTHER; note = 2'-O-methyl ribonucleotide
  modified_base 57: mod_base = OTHER; note = 2'-O-methyl ribonucleotide
  modified_base 60: mod_base = OTHER; note = 2'-O-methyl ribonucleotide
  modified_base 61: mod_base = OTHER; note = 2'-O-methyl ribonucleotide
  modified_base 66: mod_base = OTHER; note = 2'-O-methyl ribonucleotide
  modified_base 67: mod_base = OTHER; note = 2'-O-methyl ribonucleotide
  modified_base 70: mod_base = OTHER; note = 2'-O-methyl ribonucleotide
  modified_base 71: mod_base = OTHER; note = 2'-O-methyl ribonucleotide
  modified_base 72: mod_base = OTHER; note = 2'-O-methyl ribonucleotide
  modified_base 73: mod_base = OTHER; note = 2'-O-methyl ribonucleotide
  modified_base 74: mod_base = OTHER; note = 2'-O-methyl ribonucleotide
  modified_base 75: mod_base = OTHER; note = 2'-O-methyl ribonucleotide
  modified_base 76: mod_base = OTHER; note = 2'-O-methyl ribonucleotide
  modified_base 77: mod_base = OTHER; note = 2'-O-methyl ribonucleotide
  modified_base 78: mod_base = OTHER; note = 2'-O-methyl ribonucleotide
  modified_base 79: mod_base = OTHER; note = 2'-O-methyl ribonucleotide
  modified_base 80: mod_base = OTHER; note = 2'-O-methyl ribonucleotide
  modified_base 81: mod_base = OTHER; note = 2'-O-methyl ribonucleotide
  modified_base 83: mod_base = OTHER; note = 2'-O-methyl ribonucleotide
  modified_base 84: mod_base = OTHER; note = 2'-O-methyl ribonucleotide
  modified_base 85: mod_base = OTHER; note = 2'-O-methyl ribonucleotide
  modified_base 86: mod_base = OTHER; note = 2'-O-methyl ribonucleotide
  modified_base 87: mod_base = OTHER; note = 2'-O-methyl ribonucleotide
  modified_base 88: mod_base = OTHER; note = 2'-O-methyl ribonucleotide
  modified_base 89: mod_base = OTHER; note = 2'-O-methyl ribonucleotide
  modified_base 90: mod_base = OTHER; note = 2'-O-methyl ribonucleotide
  modified_base 91: mod_base = OTHER; note = 2'-O-methyl ribonucleotide
  modified_base 92: mod_base = OTHER; note = 2'-O-methyl ribonucleotide
  modified_base 93: mod_base = OTHER; note = 2'-O-methyl ribonucleotide
  modified_base 94: mod_base = OTHER; note = 2'-O-methyl ribonucleotide
  modified_base 95: mod_base = OTHER; note = 2'-O-methyl ribonucleotide
  modified_base 96: mod_base = OTHER; note = 2'-O-methyl ribonucleotide
  modified_base 97: mod_base = OTHER; note = 2'-O-methyl ribonucleotide
  modified_base 98: mod_base = OTHER; note = 2'-O-methyl ribonucleotide
  modified_base 99: mod_base = OTHER; note = 2'-O-methyl ribonucleotide
  modified_base 100: mod_base = OTHER; note = 2'-O-methyl ribonucleotide
  modified_base 14: mod_base = OTHER; note = nebularine
  modified_base 42: mod_base = OTHER; note = nebularine
  modified_base 57: mod_base = OTHER; note = nebularine
  modified_base 1..3: mod_base = OTHER; note = phosphorothioate linkage
  modified_base 98..100: mod_base = OTHER; note = phosphorothioate linkage

SEQ ID NO: 2090 - RNA, 100 nt, synthetic construct; identical to SEQ ID NO: 1931
  source 1..100: mol_type = other RNA
  modified_base 1: mod_base = OTHER; note = 2'-O-methyl ribonucleotide
  modified_base 2: mod_base = OTHER; note = 2'-O-methyl ribonucleotide
  modified_base 3: mod_base = OTHER; note = 2'-O-methyl ribonucleotide
  modified_base 21: mod_base = OTHER; note = 2'-O-methyl ribonucleotide
  modified_base 28: mod_base = OTHER; note = 2'-O-methyl ribonucleotide
  modified_base 29: mod_base = OTHER; note = 2'-O-methyl ribonucleotide
  modified_base 30: mod_base = OTHER; note = 2'-O-methyl ribonucleotide
  modified_base 31: mod_base = OTHER; note = 2'-O-methyl ribonucleotide
  modified_base 32: mod_base = OTHER; note = 2'-O-methyl ribonucleotide
  modified_base 33: mod_base = OTHER; note = 2'-O-methyl ribonucleotide
  modified_base 34: mod_base = OTHER; note = 2'-O-methyl ribonucleotide
  modified_base 35: mod_base = OTHER; note = 2'-O-methyl ribonucleotide
  modified_base 36: mod_base = OTHER; note = 2'-O-methyl ribonucleotide
  modified_base 37: mod_base = OTHER; note = 2'-O-methyl ribonucleotide
  modified_base 38: mod_base = OTHER; note = 2'-O-methyl ribonucleotide
  modified_base 39: mod_base = OTHER; note = 2'-O-methyl ribonucleotide
  modified_base 40: mod_base = OTHER; note = 2'-O-methyl ribonucleotide
  modified_base 41: mod_base = OTHER; note = 2'-O-methyl ribonucleotide
  modified_base 42: mod_base = OTHER; note = 2'-O-methyl ribonucleotide
  modified_base 46: mod_base = OTHER; note = 2'-O-methyl ribonucleotide
  modified_base 48: mod_base = OTHER; note = 2'-O-methyl ribonucleotide
  modified_base 50: mod_base = OTHER; note = 2'-O-methyl ribonucleotide
  modified_base 52: mod_base = OTHER; note = 2'-O-methyl ribonucleotide
  modified_base 53: mod_base = OTHER; note = 2'-O-methyl ribonucleotide
  modified_base 54: mod_base = OTHER; note = 2'-O-methyl ribonucleotide
  modified_base 55: mod_base = OTHER; note = 2'-O-methyl ribonucleotide
  modified_base 56: mod_base = OTHER; note = 2'-O-methyl ribonucleotide
  modified_base 57: mod_base = OTHER; note = 2'-O-methyl ribonucleotide
  modified_base 60: mod_base = OTHER; note = 2'-O-methyl ribonucleotide
  modified_base 61: mod_base = OTHER; note = 2'-O-methyl ribonucleotide
  modified_base 66: mod_base = OTHER; note = 2'-O-methyl ribonucleotide
  modified_base 67: mod_base = OTHER; note = 2'-O-methyl ribonucleotide
  modified_base 70: mod_base = OTHER; note = 2'-O-methyl ribonucleotide
  modified_base 71: mod_base = OTHER; note = 2'-O-methyl ribonucleotide
  modified_base 72: mod_base = OTHER; note = 2'-O-methyl ribonucleotide
  modified_base 73: mod_base = OTHER; note = 2'-O-methyl ribonucleotide
  modified_base 74: mod_base = OTHER; note = 2'-O-methyl ribonucleotide
  modified_base 75: mod_base = OTHER; note = 2'-O-methyl ribonucleotide
  modified_base 76: mod_base = OTHER; note = 2'-O-methyl ribonucleotide
  modified_base 77: mod_base = OTHER; note = 2'-O-methyl ribonucleotide
  modified_base 78: mod_base = OTHER; note = 2'-O-methyl ribonucleotide
  modified_base 79: mod_base = OTHER; note = 2'-O-methyl ribonucleotide
  modified_base 80: mod_base = OTHER; note = 2'-O-methyl ribonucleotide
  modified_base 81: mod_base = OTHER; note = 2'-O-methyl ribonucleotide
  modified_base 83: mod_base = OTHER; note = 2'-O-methyl ribonucleotide
  modified_base 84: mod_base = OTHER; note = 2'-O-methyl ribonucleotide
  modified_base 85: mod_base = OTHER; note = 2'-O-methyl ribonucleotide
  modified_base 86: mod_base = OTHER; note = 2'-O-methyl ribonucleotide
  modified_base 87: mod_base = OTHER; note = 2'-O-methyl ribonucleotide
  modified_base 88: mod_base = OTHER; note = 2'-O-methyl ribonucleotide
  modified_base 89: mod_base = OTHER; note = 2'-O-methyl ribonucleotide
  modified_base 90: mod_base = OTHER; note = 2'-O-methyl ribonucleotide
  modified_base 91: mod_base = OTHER; note = 2'-O-methyl ribonucleotide
  modified_base 92: mod_base = OTHER; note = 2'-O-methyl ribonucleotide
  modified_base 93: mod_base = OTHER; note = 2'-O-methyl ribonucleotide
  modified_base 94: mod_base = OTHER; note = 2'-O-methyl ribonucleotide
  modified_base 95: mod_base = OTHER; note = 2'-O-methyl ribonucleotide
  modified_base 96: mod_base = OTHER; note = 2'-O-methyl ribonucleotide
  modified_base 97: mod_base = OTHER; note = 2'-O-methyl ribonucleotide
  modified_base 98: mod_base = OTHER; note = 2'-O-methyl ribonucleotide
  modified_base 99: mod_base = OTHER; note = 2'-O-methyl ribonucleotide
  modified_base 100: mod_base = OTHER; note = 2'-O-methyl ribonucleotide
  modified_base 14: mod_base = OTHER; note = nebularine
  modified_base 28: mod_base = OTHER; note = nebularine
  modified_base 1..3: mod_base = OTHER; note = phosphorothioate linkage
  modified_base 98..100: mod_base = OTHER; note = phosphorothioate linkage

SEQ ID NO: 2091 - RNA, 100 nt, synthetic construct; identical to SEQ ID NO: 1932
  source 1..100: mol_type = other RNA
  modified_base 1: mod_base = OTHER; note = 2'-O-methyl ribonucleotide
  modified_base 2: mod_base = OTHER; note = 2'-O-methyl ribonucleotide
  modified_base 3: mod_base = OTHER; note = 2'-O-methyl ribonucleotide
  modified_base 21: mod_base = OTHER; note = 2'-O-methyl ribonucleotide
  modified_base 28: mod_base = OTHER; note = 2'-O-methyl ribonucleotide
  modified_base 29: mod_base = OTHER; note = 2'-O-methyl ribonucleotide
  modified_base 30: mod_base = OTHER; note = 2'-O-methyl ribonucleotide
  modified_base 31: mod_base = OTHER; note = 2'-O-methyl ribonucleotide
  modified_base 32: mod_base = OTHER; note = 2'-O-methyl ribonucleotide
  modified_base 33: mod_base = OTHER; note = 2'-O-methyl ribonucleotide
  modified_base 34: mod_base = OTHER; note = 2'-O-methyl ribonucleotide
  modified_base 35: mod_base = OTHER; note = 2'-O-methyl ribonucleotide
  modified_base 36: mod_base = OTHER; note = 2'-O-methyl ribonucleotide
  modified_base 37: mod_base = OTHER; note = 2'-O-methyl ribonucleotide
  modified_base 38: mod_base = OTHER; note = 2'-O-methyl ribonucleotide
  modified_base 39: mod_base = OTHER; note = 2'-O-methyl ribonucleotide
  modified_base 40: mod_base = OTHER; note = 2'-O-methyl ribonucleotide
  modified_base 41: mod_base = OTHER; note = 2'-O-methyl ribonucleotide
  modified_base 42: mod_base = OTHER; note = 2'-O-methyl ribonucleotide
  modified_base 46: mod_base = OTHER; note = 2'-O-methyl ribonucleotide
  modified_base 48: mod_base = OTHER; note = 2'-O-methyl ribonucleotide
  modified_base 50: mod_base = OTHER; note = 2'-O-methyl ribonucleotide
  modified_base 52: mod_base = OTHER; note = 2'-O-methyl ribonucleotide
  modified_base 53: mod_base = OTHER; note = 2'-O-methyl ribonucleotide
  modified_base 54: mod_base = OTHER; note = 2'-O-methyl ribonucleotide
  modified_base 55: mod_base = OTHER; note = 2'-O-methyl ribonucleotide
  modified_base 56: mod_base = OTHER; note = 2'-O-methyl ribonucleotide
  modified_base 57: mod_base = OTHER; note = 2'-O-methyl ribonucleotide
  modified_base 60: mod_base = OTHER; note = 2'-O-methyl ribonucleotide
  modified_base 61: mod_base = OTHER; note = 2'-O-methyl ribonucleotide
  modified_base 66: mod_base = OTHER; note = 2'-O-methyl ribonucleotide
  modified_base 67: mod_base = OTHER; note = 2'-O-methyl ribonucleotide
  modified_base 70: mod_base = OTHER; note = 2'-O-methyl ribonucleotide
  modified_base 71: mod_base = OTHER; note = 2'-O-methyl ribonucleotide
  modified_base 72: mod_base = OTHER; note = 2'-O-methyl ribonucleotide
  modified_base 73: mod_base = OTHER; note = 2'-O-methyl ribonucleotide
  modified_base 74: mod_base = OTHER; note = 2'-O-methyl ribonucleotide
  modified_base 75: mod_base = OTHER; note = 2'-O-methyl ribonucleotide
  modified_base 76: mod_base = OTHER; note = 2'-O-methyl ribonucleotide
  modified_base 77: mod_base = OTHER; note = 2'-O-methyl ribonucleotide
  modified_base 78: mod_base = OTHER; note = 2'-O-methyl ribonucleotide
  modified_base 79: mod_base = OTHER; note = 2'-O-methyl ribonucleotide
  modified_base 80: mod_base = OTHER; note = 2'-O-methyl ribonucleotide
  modified_base 81: mod_base = OTHER; note = 2'-O-methyl ribonucleotide
  modified_base 83: mod_base = OTHER; note = 2'-O-methyl ribonucleotide
  modified_base 84: mod_base = OTHER; note = 2'-O-methyl ribonucleotide
  modified_base 85: mod_base = OTHER; note = 2'-O-methyl ribonucleotide
  modified_base 86: mod_base = OTHER; note = 2'-O-methyl ribonucleotide
  modified_base 87: mod_base = OTHER; note = 2'-O-methyl ribonucleotide
  modified_base 88: mod_base = OTHER; note = 2'-O-methyl ribonucleotide
  modified_base 89: mod_base = OTHER; note = 2'-O-methyl ribonucleotide
  modified_base 90: mod_base = OTHER; note = 2'-O-methyl ribonucleotide
  modified_base 91: mod_base = OTHER; note = 2'-O-methyl ribonucleotide
  modified_base 92: mod_base = OTHER; note = 2'-O-methyl ribonucleotide
  modified_base 93: mod_base = OTHER; note = 2'-O-methyl ribonucleotide
  modified_base 94: mod_base = OTHER; note = 2'-O-methyl ribonucleotide
  modified_base 95: mod_base = OTHER; note = 2'-O-methyl ribonucleotide
  modified_base 96: mod_base = OTHER; note = 2'-O-methyl ribonucleotide
  modified_base 97: mod_base = OTHER; note = 2'-O-methyl ribonucleotide
  modified_base 98: mod_base = OTHER; note = 2'-O-methyl ribonucleotide
  modified_base 99: mod_base = OTHER; note = 2'-O-methyl ribonucleotide
  modified_base 100: mod_base = OTHER; note = 2'-O-methyl ribonucleotide
  modified_base 14: mod_base = OTHER; note = nebularine
  modified_base 42: mod_base = OTHER; note = nebularine
  modified_base 1..3: mod_base = OTHER; note = phosphorothioate linkage
  modified_base 98..100: mod_base = OTHER; note = phosphorothioate linkage

SEQ ID NO: 2092 - RNA, 100 nt, synthetic construct; identical to SEQ ID NO: 1933
  source 1..100: mol_type = other RNA
  modified_base 1: mod_base = OTHER; note = 2'-O-methyl ribonucleotide
  modified_base 2: mod_base = OTHER; note = 2'-O-methyl ribonucleotide
  modified_base 3: mod_base = OTHER; note = 2'-O-methyl ribonucleotide
  modified_base 21: mod_base = OTHER; note = 2'-O-methyl ribonucleotide
  modified_base 28: mod_base = OTHER; note = 2'-O-methyl ribonucleotide
  modified_base 29: mod_base = OTHER; note = 2'-O-methyl ribonucleotide
  modified_base 30: mod_base = OTHER; note = 2'-O-methyl ribonucleotide
  modified_base 31: mod_base = OTHER; note = 2'-O-methyl ribonucleotide
  modified_base 32: mod_base = OTHER; note = 2'-O-methyl ribonucleotide
  modified_base 33: mod_base = OTHER; note = 2'-O-methyl ribonucleotide
  modified_base 34: mod_base = OTHER; note = 2'-O-methyl ribonucleotide
  modified_base 35: mod_base = OTHER; note = 2'-O-methyl ribonucleotide
  modified_base 36: mod_base = OTHER; note = 2'-O-methyl ribonucleotide
  modified_base 37: mod_base = OTHER; note = 2'-O-methyl ribonucleotide
  modified_base 38: mod_base = OTHER; note = 2'-O-methyl ribonucleotide
  modified_base 39: mod_base = OTHER; note = 2'-O-methyl ribonucleotide
  modified_base 40: mod_base = OTHER; note = 2'-O-methyl ribonucleotide
  modified_base 41: mod_base = OTHER; note = 2'-O-methyl ribonucleotide
  modified_base 42: mod_base = OTHER; note = 2'-O-methyl ribonucleotide
  modified_base 46: mod_base = OTHER; note = 2'-O-methyl ribonucleotide
  modified_base 48: mod_base = OTHER; note = 2'-O-methyl ribonucleotide
  modified_base 50: mod_base = OTHER; note = 2'-O-methyl ribonucleotide
  modified_base 52: mod_base = OTHER; note = 2'-O-methyl ribonucleotide
  modified_base 53: mod_base = OTHER; note = 2'-O-methyl ribonucleotide
  modified_base 54: mod_base = OTHER; note = 2'-O-methyl ribonucleotide
  modified_base 55: mod_base = OTHER; note = 2'-O-methyl ribonucleotide
  modified_base 56: mod_base = OTHER; note = 2'-O-methyl ribonucleotide
  modified_base 57: mod_base = OTHER; note = 2'-O-methyl ribonucleotide
  modified_base 60: mod_base = OTHER; note = 2'-O-methyl ribonucleotide
  modified_base 61: mod_base = OTHER; note = 2'-O-methyl ribonucleotide
  modified_base 66: mod_base = OTHER; note = 2'-O-methyl ribonucleotide
  modified_base 67: mod_base = OTHER; note = 2'-O-methyl ribonucleotide
  modified_base 70: mod_base = OTHER; note = 2'-O-methyl ribonucleotide
  modified_base 71: mod_base = OTHER; note = 2'-O-methyl ribonucleotide
  modified_base 72: mod_base = OTHER; note = 2'-O-methyl ribonucleotide
  modified_base 73: mod_base = OTHER; note = 2'-O-methyl ribonucleotide
  modified_base 74: mod_base = OTHER; note = 2'-O-methyl ribonucleotide
  modified_base 75: mod_base = OTHER; note = 2'-O-methyl ribonucleotide
  modified_base 76: mod_base = OTHER; note = 2'-O-methyl ribonucleotide
  modified_base 77: mod_base = OTHER; note = 2'-O-methyl ribonucleotide
  modified_base 78: mod_base = OTHER; note = 2'-O-methyl ribonucleotide
  modified_base 79: mod_base = OTHER; note = 2'-O-methyl ribonucleotide
  modified_base 80: mod_base = OTHER; note = 2'-O-methyl ribonucleotide
  modified_base 81: mod_base = OTHER; note = 2'-O-methyl ribonucleotide
  modified_base 83: mod_base = OTHER; note = 2'-O-methyl ribonucleotide
  modified_base 84: mod_base = OTHER; note = 2'-O-methyl ribonucleotide
  modified_base 85: mod_base = OTHER; note = 2'-O-methyl ribonucleotide
  modified_base 86: mod_base = OTHER; note = 2'-O-methyl ribonucleotide
  modified_base 87: mod_base = OTHER; note = 2'-O-methyl ribonucleotide
  modified_base 88: mod_base = OTHER; note = 2'-O-methyl ribonucleotide
  modified_base 89: mod_base = OTHER; note = 2'-O-methyl ribonucleotide
  modified_base 90: mod_base = OTHER; note = 2'-O-methyl ribonucleotide
  modified_base 91: mod_base = OTHER; note = 2'-O-methyl ribonucleotide
  modified_base 92: mod_base = OTHER; note = 2'-O-methyl ribonucleotide
  modified_base 93: mod_base = OTHER; note = 2'-O-methyl ribonucleotide
  modified_base 94: mod_base = OTHER; note = 2'-O-methyl ribonucleotide
  modified_base 95: mod_base = OTHER; note = 2'-O-methyl ribonucleotide
  modified_base 96: mod_base = OTHER; note = 2'-O-methyl ribonucleotide
  modified_base 97: mod_base = OTHER; note = 2'-O-methyl ribonucleotide
  modified_base 98: mod_base = OTHER; note = 2'-O-methyl ribonucleotide
  modified_base 99: mod_base = OTHER; note = 2'-O-methyl ribonucleotide
  modified_base 100: mod_base = OTHER; note = 2'-O-methyl ribonucleotide
  modified_base 14: mod_base = OTHER; note = nebularine
  modified_base 34: mod_base = OTHER; note = nebularine
  modified_base 42: mod_base = OTHER; note = nebularine
  modified_base 1..3: mod_base = OTHER; note = phosphorothioate linkage
  modified_base 98..100: mod_base = OTHER; note = phosphorothioate linkage

SEQ ID NO: 2093 - RNA, 100 nt, synthetic construct; identical to SEQ ID NO: 1934
  source 1..100: mol_type = other RNA
  modified_base 1: mod_base = OTHER; note = 2'-O-methyl ribonucleotide
  modified_base 2: mod_base = OTHER; note = 2'-O-methyl ribonucleotide
  modified_base 3: mod_base = OTHER; note = 2'-O-methyl ribonucleotide
  modified_base 21: mod_base = OTHER; note = 2'-O-methyl ribonucleotide
  modified_base 28: mod_base = OTHER; note = 2'-O-methyl ribonucleotide
  modified_base 29: mod_base = OTHER; note = 2'-O-methyl ribonucleotide
  modified_base 30: mod_base = OTHER; note = 2'-O-methyl ribonucleotide
  modified_base 31: mod_base = OTHER; note = 2'-O-methyl ribonucleotide
  modified_base 32: mod_base = OTHER; note = 2'-O-methyl ribonucleotide
  modified_base 33: mod_base = OTHER; note = 2'-O-methyl ribonucleotide
  modified_base 34: mod_base = OTHER; note = 2'-O-methyl ribonucleotide
  modified_base 35: mod_base = OTHER; note = 2'-O-methyl ribonucleotide
  modified_base 36: mod_base = OTHER; note = 2'-O-methyl ribonucleotide
  modified_base 37: mod_base = OTHER; note = 2'-O-methyl ribonucleotide
  modified_base 38: mod_base = OTHER; note = 2'-O-methyl ribonucleotide
  modified_base 39: mod_base = OTHER; note = 2'-O-methyl ribonucleotide
  modified_base 40: mod_base = OTHER; note = 2'-O-methyl ribonucleotide
  modified_base 41: mod_base = OTHER; note = 2'-O-methyl ribonucleotide
  modified_base 42: mod_base = OTHER; note = 2'-O-methyl ribonucleotide
  modified_base 46: mod_base = OTHER; note = 2'-O-methyl ribonucleotide
  modified_base 48: mod_base = OTHER; note = 2'-O-methyl ribonucleotide
  modified_base 50: mod_base = OTHER; note = 2'-O-methyl ribonucleotide
  modified_base 52: mod_base = OTHER; note = 2'-O-methyl ribonucleotide
  modified_base 53: mod_base = OTHER; note = 2'-O-methyl ribonucleotide
  modified_base 54: mod_base = OTHER; note = 2'-O-methyl ribonucleotide
  modified_base 55: mod_base = OTHER; note = 2'-O-methyl ribonucleotide
  modified_base 56: mod_base = OTHER; note = 2'-O-methyl ribonucleotide
  modified_base 57: mod_base = OTHER; note = 2'-O-methyl ribonucleotide
  modified_base 60: mod_base = OTHER; note = 2'-O-methyl ribonucleotide
  modified_base 61: mod_base = OTHER; note = 2'-O-methyl ribonucleotide
  modified_base 66: mod_base = OTHER; note = 2'-O-methyl ribonucleotide
  modified_base 67: mod_base = OTHER; note = 2'-O-methyl ribonucleotide
  modified_base 70: mod_base = OTHER; note = 2'-O-methyl ribonucleotide
  modified_base 71: mod_base = OTHER; note = 2'-O-methyl ribonucleotide
  modified_base 72: mod_base = OTHER; note = 2'-O-methyl ribonucleotide
  modified_base 73: mod_base = OTHER; note = 2'-O-methyl ribonucleotide
  modified_base 74: mod_base = OTHER; note = 2'-O-methyl ribonucleotide
  modified_base 75: mod_base = OTHER; note = 2'-O-methyl ribonucleotide
  modified_base 76: mod_base = OTHER; note = 2'-O-methyl ribonucleotide
  modified_base 77: mod_base = OTHER; note = 2'-O-methyl ribonucleotide
  modified_base 78: mod_base = OTHER; note = 2'-O-methyl ribonucleotide
  modified_base 79: mod_base = OTHER; note = 2'-O-methyl ribonucleotide
  modified_base 80: mod_base = OTHER; note = 2'-O-methyl ribonucleotide
  modified_base 81: mod_base = OTHER; note = 2'-O-methyl ribonucleotide
  modified_base 83: mod_base = OTHER; note = 2'-O-methyl ribonucleotide
  modified_base 84: mod_base = OTHER; note = 2'-O-methyl ribonucleotide
  modified_base 85: mod_base = OTHER; note = 2'-O-methyl ribonucleotide
  modified_base 86: mod_base = OTHER; note = 2'-O-methyl ribonucleotide
  modified_base 87: mod_base = OTHER; note = 2'-O-methyl ribonucleotide
  modified_base 88: mod_base = OTHER; note = 2'-O-methyl ribonucleotide
  modified_base 89: mod_base = OTHER; note = 2'-O-methyl ribonucleotide
  modified_base 90: mod_base = OTHER; note = 2'-O-methyl ribonucleotide
  modified_base 91: mod_base = OTHER; note = 2'-O-methyl ribonucleotide
  modified_base 92: mod_base = OTHER; note = 2'-O-methyl ribonucleotide
  modified_base 93: mod_base = OTHER; note = 2'-O-methyl ribonucleotide
  modified_base 94: mod_base = OTHER; note = 2'-O-methyl ribonucleotide
  modified_base 95: mod_base = OTHER; note = 2'-O-methyl ribonucleotide
  modified_base 96: mod_base = OTHER; note = 2'-O-methyl ribonucleotide
  modified_base 97: mod_base = OTHER; note = 2'-O-methyl ribonucleotide
  modified_base 98: mod_base = OTHER; note = 2'-O-methyl ribonucleotide
  modified_base 99: mod_base = OTHER; note = 2'-O-methyl ribonucleotide
  modified_base 100: mod_base = OTHER; note = 2'-O-methyl ribonucleotide
  modified_base 9: mod_base = OTHER; note = nebularine
  modified_base 28: mod_base = OTHER; note = nebularine
  modified_base 34: mod_base = OTHER; note = nebularine
  modified_base 42: mod_base = OTHER; note = nebularine
  modified_base 57: mod_base = OTHER; note = nebularine
  modified_base 1..3: mod_base = OTHER; note = phosphorothioate linkage
  modified_base 98..100: mod_base = OTHER; note = phosphorothioate linkage

SEQ ID NO: 2094 - RNA, 100 nt, synthetic construct; identical to SEQ ID NO: 1935
  source 1..100: mol_type = other RNA
  modified_base 1: mod_base = OTHER; note = 2'-O-methyl ribonucleotide
  modified_base 2: mod_base = OTHER; note = 2'-O-methyl ribonucleotide
  modified_base 3: mod_base = OTHER; note = 2'-O-methyl ribonucleotide
  modified_base 21: mod_base = OTHER; note = 2'-O-methyl ribonucleotide
  modified_base 28: mod_base = OTHER; note = 2'-O-methyl ribonucleotide
  modified_base 29: mod_base = OTHER; note = 2'-O-methyl ribonucleotide
  modified_base 30: mod_base = OTHER; note = 2'-O-methyl ribonucleotide
  modified_base 31: mod_base = OTHER; note = 2'-O-methyl ribonucleotide
  modified_base 32: mod_base = OTHER; note = 2'-O-methyl ribonucleotide
  modified_base 33: mod_base = OTHER; note = 2'-O-methyl ribonucleotide
  modified_base 34: mod_base = OTHER; note = 2'-O-methyl ribonucleotide
  modified_base 35: mod_base = OTHER; note = 2'-O-methyl ribonucleotide
  modified_base 36: mod_base = OTHER; note = 2'-O-methyl ribonucleotide
  modified_base 37: mod_base = OTHER; note = 2'-O-methyl ribonucleotide
  modified_base 38: mod_base = OTHER; note = 2'-O-methyl ribonucleotide
  modified_base 39: mod_base = OTHER; note = 2'-O-methyl ribonucleotide
  modified_base 40: mod_base = OTHER; note = 2'-O-methyl ribonucleotide
  modified_base 41: mod_base = OTHER; note = 2'-O-methyl ribonucleotide
  modified_base 42: mod_base = OTHER; note = 2'-O-methyl ribonucleotide
  modified_base 46: mod_base = OTHER; note = 2'-O-methyl ribonucleotide
  modified_base 48: mod_base = OTHER; note = 2'-O-methyl ribonucleotide
  modified_base 50: mod_base = OTHER; note = 2'-O-methyl ribonucleotide
  modified_base 52: mod_base = OTHER; note = 2'-O-methyl ribonucleotide
  modified_base 53: mod_base = OTHER; note = 2'-O-methyl ribonucleotide
  modified_base 54: mod_base = OTHER; note = 2'-O-methyl ribonucleotide
  modified_base 55: mod_base = OTHER; note = 2'-O-methyl ribonucleotide
  modified_base 56: mod_base = OTHER; note = 2'-O-methyl ribonucleotide
  modified_base 57: mod_base = OTHER; note = 2'-O-methyl ribonucleotide
  modified_base 60: mod_base = OTHER; note = 2'-O-methyl ribonucleotide
  modified_base 61: mod_base = OTHER; note = 2'-O-methyl ribonucleotide
  modified_base 66: mod_base = OTHER; note = 2'-O-methyl ribonucleotide
  modified_base 67: mod_base = OTHER; note = 2'-O-methyl ribonucleotide
  modified_base 70: mod_base = OTHER; note = 2'-O-methyl ribonucleotide
  modified_base 71: mod_base = OTHER; note = 2'-O-methyl ribonucleotide
  modified_base 72: mod_base = OTHER; note = 2'-O-methyl ribonucleotide
  modified_base 73: mod_base = OTHER; note = 2'-O-methyl ribonucleotide
  modified_base 74: mod_base = OTHER; note = 2'-O-methyl ribonucleotide
  modified_base 75: mod_base = OTHER; note = 2'-O-methyl ribonucleotide
  modified_base 76: mod_base = OTHER; note = 2'-O-methyl ribonucleotide
  modified_base 77: mod_base = OTHER; note = 2'-O-methyl ribonucleotide
  modified_base 78: mod_base = OTHER; note = 2'-O-methyl ribonucleotide
  modified_base 79: mod_base = OTHER; note = 2'-O-methyl ribonucleotide
  modified_base 80: mod_base = OTHER; note = 2'-O-methyl ribonucleotide
  modified_base 81: mod_base = OTHER; note = 2'-O-methyl ribonucleotide
  modified_base 83: mod_base = OTHER; note = 2'-O-methyl ribonucleotide
  modified_base 84: mod_base = OTHER; note = 2'-O-methyl ribonucleotide
  modified_base 85: mod_base = OTHER; note = 2'-O-methyl ribonucleotide
  modified_base 86: mod_base = OTHER; note = 2'-O-methyl ribonucleotide
  modified_base 87: mod_base = OTHER; note = 2'-O-methyl ribonucleotide
  modified_base 88: mod_base = OTHER; note = 2'-O-methyl ribonucleotide
  modified_base 89: mod_base = OTHER; note = 2'-O-methyl ribonucleotide
  modified_base 90: mod_base = OTHER; note = 2'-O-methyl ribonucleotide
  modified_base 91: mod_base = OTHER; note = 2'-O-methyl ribonucleotide
  modified_base 92: mod_base = OTHER; note = 2'-O-methyl ribonucleotide
  modified_base 93: mod_base = OTHER; note = 2'-O-methyl ribonucleotide
  modified_base 94: mod_base = OTHER; note = 2'-O-methyl ribonucleotide
  modified_base 95: mod_base = OTHER; note = 2'-O-methyl ribonucleotide
  modified_base 96: mod_base = OTHER; note = 2'-O-methyl ribonucleotide
  modified_base 97: mod_base = OTHER; note = 2'-O-methyl ribonucleotide
  modified_base 98: mod_base = OTHER; note = 2'-O-methyl ribonucleotide
  modified_base 99: mod_base = OTHER; note = 2'-O-methyl ribonucleotide
  modified_base 100: mod_base = OTHER; note = 2'-O-methyl ribonucleotide
  modified_base 9: mod_base = OTHER; note = nebularine
  modified_base 34: mod_base = OTHER; note = nebularine
  modified_base 42: mod_base = OTHER; note = nebularine
  modified_base 57: mod_base = OTHER; note = nebularine
  modified_base 1..3: mod_base = OTHER; note = phosphorothioate linkage
  modified_base 98..100: mod_base = OTHER; note = phosphorothioate linkage

SEQ ID NO: 2095 - RNA, 100 nt, synthetic construct; identical to SEQ ID NO: 1936
  source 1..100: mol_type = other RNA
  modified_base 1: mod_base = OTHER; note = 2'-O-methyl ribonucleotide
  modified_base 2: mod_base = OTHER; note = 2'-O-methyl ribonucleotide
  modified_base 3: mod_base = OTHER; note = 2'-O-methyl ribonucleotide
  modified_base 21: mod_base = OTHER; note = 2'-O-methyl ribonucleotide
  modified_base 28: mod_base = OTHER; note = 2'-O-methyl ribonucleotide
  modified_base 29: mod_base = OTHER; note = 2'-O-methyl ribonucleotide
  modified_base 30: mod_base = OTHER; note = 2'-O-methyl ribonucleotide
  modified_base 31: mod_base = OTHER; note = 2'-O-methyl ribonucleotide
  modified_base 32: mod_base = OTHER; note = 2'-O-methyl ribonucleotide
  modified_base 33: mod_base = OTHER; note = 2'-O-methyl ribonucleotide
  modified_base 34: mod_base = OTHER; note = 2'-O-methyl ribonucleotide
  modified_base 35: mod_base = OTHER; note = 2'-O-methyl ribonucleotide
  modified_base 36: mod_base = OTHER; note = 2'-O-methyl ribonucleotide
  modified_base 37: mod_base = OTHER; note = 2'-O-methyl ribonucleotide
  modified_base 38: mod_base = OTHER; note = 2'-O-methyl ribonucleotide
  modified_base 39: mod_base = OTHER; note = 2'-O-methyl ribonucleotide
  modified_base 40: mod_base = OTHER; note = 2'-O-methyl ribonucleotide
  modified_base 41: mod_base = OTHER; note = 2'-O-methyl ribonucleotide
  modified_base 42: mod_base = OTHER; note = 2'-O-methyl ribonucleotide
  modified_base 46: mod_base = OTHER; note = 2'-O-methyl ribonucleotide
  modified_base 48: mod_base = OTHER; note = 2'-O-methyl ribonucleotide
  modified_base 50: mod_base = OTHER; note = 2'-O-methyl ribonucleotide
  modified_base 52: mod_base = OTHER; note = 2'-O-methyl ribonucleotide
  modified_base 53: mod_base = OTHER; note = 2'-O-methyl ribonucleotide
  modified_base 54: mod_base = OTHER; note = 2'-O-methyl ribonucleotide
  modified_base 55: mod_base = OTHER; note = 2'-O-methyl ribonucleotide
  modified_base 56: mod_base = OTHER; note = 2'-O-methyl ribonucleotide
  modified_base 57: mod_base = OTHER; note = 2'-O-methyl ribonucleotide
  modified_base 60: mod_base = OTHER; note = 2'-O-methyl ribonucleotide
  modified_base 61: mod_base = OTHER; note = 2'-O-methyl ribonucleotide
  modified_base 66: mod_base = OTHER; note = 2'-O-methyl ribonucleotide
  modified_base 67: mod_base = OTHER; note = 2'-O-methyl ribonucleotide
  modified_base 70: mod_base = OTHER; note = 2'-O-methyl ribonucleotide
  modified_base 71: mod_base = OTHER; note = 2'-O-methyl ribonucleotide
  modified_base 72: mod_base = OTHER; note = 2'-O-methyl ribonucleotide
  modified_base 73: mod_base = OTHER; note = 2'-O-methyl ribonucleotide
  modified_base 74: mod_base = OTHER; note = 2'-O-methyl ribonucleotide
  modified_base 75: mod_base = OTHER; note = 2'-O-methyl ribonucleotide
  modified_base 76: mod_base = OTHER; note = 2'-O-methyl ribonucleotide
  modified_base 77: mod_base = OTHER; note = 2'-O-methyl ribonucleotide
  modified_base 78: mod_base = OTHER; note = 2'-O-methyl ribonucleotide
  modified_base 79: mod_base = OTHER; note = 2'-O-methyl ribonucleotide
  modified_base 80: mod_base = OTHER; note = 2'-O-methyl ribonucleotide
  modified_base 81: mod_base = OTHER; note = 2'-O-methyl ribonucleotide
  modified_base 83: mod_base = OTHER; note = 2'-O-methyl ribonucleotide
  modified_base 84: mod_base = OTHER; note = 2'-O-methyl ribonucleotide
  modified_base 85: mod_base = OTHER; note = 2'-O-methyl ribonucleotide
  modified_base 86: mod_base = OTHER; note = 2'-O-methyl ribonucleotide
  modified_base 87: mod_base = OTHER; note = 2'-O-methyl ribonucleotide
  modified_base 88: mod_base = OTHER; note = 2'-O-methyl ribonucleotide
  modified_base 89: mod_base = OTHER; note = 2'-O-methyl ribonucleotide
  modified_base 90: mod_base = OTHER; note = 2'-O-methyl ribonucleotide
  modified_base 91: mod_base = OTHER; note = 2'-O-methyl ribonucleotide
  modified_base 92: mod_base = OTHER; note = 2'-O-methyl ribonucleotide
  modified_base 93: mod_base = OTHER; note = 2'-O-methyl ribonucleotide
  modified_base 94: mod_base = OTHER; note = 2'-O-methyl ribonucleotide
  modified_base 95: mod_base = OTHER; note = 2'-O-methyl ribonucleotide
  modified_base 96: mod_base = OTHER; note = 2'-O-methyl ribonucleotide
  modified_base 97: mod_base = OTHER; note = 2'-O-methyl ribonucleotide
  modified_base 98: mod_base = OTHER; note = 2'-O-methyl ribonucleotide
  modified_base 99: mod_base = OTHER; note = 2'-O-methyl ribonucleotide
  modified_base 100: mod_base = OTHER; note = 2'-O-methyl ribonucleotide
  modified_base 9: mod_base = OTHER; note = nebularine
  modified_base 42: mod_base = OTHER; note = nebularine
  modified_base 57: mod_base = OTHER; note = nebularine
  modified_base 1..3: mod_base = OTHER; note = phosphorothioate linkage
  modified_base 98..100: mod_base = OTHER; note = phosphorothioate linkage

SEQ ID NO: 2096 - RNA, 100 nt, synthetic construct; identical to SEQ ID NO: 1937
  source 1..100: mol_type = other RNA
  modified_base 1: mod_base = OTHER; note = 2'-O-methyl ribonucleotide
  modified_base 2: mod_base = OTHER; note = 2'-O-methyl ribonucleotide
  modified_base 3: mod_base = OTHER; note = 2'-O-methyl ribonucleotide
  modified_base 21: mod_base = OTHER; note = 2'-O-methyl ribonucleotide
  modified_base 28: mod_base = OTHER; note = 2'-O-methyl ribonucleotide
  modified_base 29: mod_base = OTHER; note = 2'-O-methyl ribonucleotide
  modified_base 30: mod_base = OTHER; note = 2'-O-methyl ribonucleotide
  modified_base 31: mod_base = OTHER; note = 2'-O-methyl ribonucleotide
  modified_base 32: mod_base = OTHER; note = 2'-O-methyl ribonucleotide
  modified_base 33: mod_base = OTHER; note = 2'-O-methyl ribonucleotide
  modified_base 34: mod_base = OTHER; note = 2'-O-methyl ribonucleotide
  modified_base 35: mod_base = OTHER; note = 2'-O-methyl ribonucleotide
  modified_base 36: mod_base = OTHER; note = 2'-O-methyl ribonucleotide
  modified_base 37: mod_base = OTHER; note = 2'-O-methyl ribonucleotide
  modified_base 38: mod_base = OTHER; note = 2'-O-methyl ribonucleotide
  modified_base 39: mod_base = OTHER; note = 2'-O-methyl ribonucleotide
  modified_base 40: mod_base = OTHER; note = 2'-O-methyl ribonucleotide
  modified_base 41: mod_base = OTHER; note = 2'-O-methyl ribonucleotide
  modified_base 42: mod_base = OTHER; note = 2'-O-methyl ribonucleotide
  modified_base 46: mod_base = OTHER; note = 2'-O-methyl ribonucleotide
  modified_base 48: mod_base = OTHER; note = 2'-O-methyl ribonucleotide
  modified_base 50: mod_base = OTHER; note = 2'-O-methyl ribonucleotide
  modified_base 52: mod_base = OTHER; note = 2'-O-methyl ribonucleotide
  modified_base 53: mod_base = OTHER; note = 2'-O-methyl ribonucleotide
  modified_base 54: mod_base = OTHER; note = 2'-O-methyl ribonucleotide
  modified_base 55: mod_base = OTHER; note = 2'-O-methyl ribonucleotide
  modified_base 56: mod_base = OTHER; note = 2'-O-methyl ribonucleotide
  modified_base 57: mod_base = OTHER; note = 2'-O-methyl ribonucleotide
  modified_base 60: mod_base = OTHER; note = 2'-O-methyl ribonucleotide
  modified_base 61: mod_base = OTHER; note = 2'-O-methyl ribonucleotide
  modified_base 66: mod_base = OTHER; note = 2'-O-methyl ribonucleotide
  modified_base 67: mod_base = OTHER; note = 2'-O-methyl ribonucleotide
  modified_base 70: mod_base = OTHER; note = 2'-O-methyl ribonucleotide
  modified_base 71: mod_base = OTHER; note = 2'-O-methyl ribonucleotide
  modified_base 72: mod_base = OTHER; note = 2'-O-methyl ribonucleotide
  modified_base 73: mod_base = OTHER; note = 2'-O-methyl ribonucleotide
  modified_base 74: mod_base = OTHER; note = 2'-O-methyl ribonucleotide
  modified_base 75: mod_base = OTHER; note = 2'-O-methyl ribonucleotide
  modified_base 76: mod_base = OTHER; note = 2'-O-methyl ribonucleotide
  modified_base 77: mod_base = OTHER; note = 2'-O-methyl ribonucleotide
  modified_base 78: mod_base = OTHER; note = 2'-O-methyl ribonucleotide
  modified_base 79: mod_base = OTHER; note = 2'-O-methyl ribonucleotide
  modified_base 80: mod_base = OTHER; note = 2'-O-methyl ribonucleotide
  modified_base 81: mod_base = OTHER; note = 2'-O-methyl ribonucleotide
  modified_base 83: mod_base = OTHER; note = 2'-O-methyl ribonucleotide
  modified_base 84: mod_base = OTHER; note = 2'-O-methyl ribonucleotide
  modified_base 85: mod_base = OTHER; note = 2'-O-methyl ribonucleotide
  modified_base 86: mod_base = OTHER; note = 2'-O-methyl ribonucleotide
  modified_base 87: mod_base = OTHER; note = 2'-O-methyl ribonucleotide
  modified_base 88: mod_base = OTHER; note = 2'-O-methyl ribonucleotide
  modified_base 89: mod_base = OTHER; note = 2'-O-methyl ribonucleotide
  modified_base 90: mod_base = OTHER; note = 2'-O-methyl ribonucleotide
  modified_base 91: mod_base = OTHER; note = 2'-O-methyl ribonucleotide
  modified_base 92: mod_base = OTHER; note = 2'-O-methyl ribonucleotide
  modified_base 93: mod_base = OTHER; note = 2'-O-methyl ribonucleotide
  modified_base 94: mod_base = OTHER; note = 2'-O-methyl ribonucleotide
  modified_base 95: mod_base = OTHER; note = 2'-O-methyl ribonucleotide
  modified_base 96: mod_base = OTHER; note = 2'-O-methyl ribonucleotide
  modified_base 97: mod_base = OTHER; note = 2'-O-methyl ribonucleotide
  modified_base 98: mod_base = OTHER; note = 2'-O-methyl ribonucleotide
  modified_base 99: mod_base = OTHER; note = 2'-O-methyl ribonucleotide
  modified_base 100: mod_base = OTHER; note = 2'-O-methyl ribonucleotide
  modified_base 9: mod_base = OTHER; note = nebularine
  modified_base 28: mod_base = OTHER; note = nebularine
  modified_base 1..3: mod_base = OTHER; note = phosphorothioate linkage
  modified_base 98..100: mod_base = OTHER; note = phosphorothioate linkage

SEQ ID NO: 2097 - RNA, 100 nt, synthetic construct; identical to SEQ ID NO: 1938
  source 1..100: mol_type = other RNA
  modified_base 1: mod_base = OTHER; note = 2'-O-methyl ribonucleotide
  modified_base 2: mod_base = OTHER; note = 2'-O-methyl ribonucleotide
  modified_base 3: mod_base = OTHER; note = 2'-O-methyl ribonucleotide
  modified_base 21: mod_base = OTHER; note = 2'-O-methyl ribonucleotide
  modified_base 28: mod_base = OTHER; note = 2'-O-methyl ribonucleotide
  modified_base 29: mod_base = OTHER; note = 2'-O-methyl ribonucleotide
  modified_base 30: mod_base = OTHER; note = 2'-O-methyl ribonucleotide
  modified_base 31: mod_base = OTHER; note = 2'-O-methyl ribonucleotide
  modified_base 32: mod_base = OTHER; note = 2'-O-methyl ribonucleotide
  modified_base 33: mod_base = OTHER; note = 2'-O-methyl ribonucleotide
  modified_base 34: mod_base = OTHER; note = 2'-O-methyl ribonucleotide
  modified_base 35: mod_base = OTHER; note = 2'-O-methyl ribonucleotide
  modified_base 36: mod_base = OTHER; note = 2'-O-methyl ribonucleotide
  modified_base 37: mod_base = OTHER; note = 2'-O-methyl ribonucleotide
  modified_base 38: mod_base = OTHER; note = 2'-O-methyl ribonucleotide
  modified_base 39: mod_base = OTHER; note = 2'-O-methyl ribonucleotide
  modified_base 40: mod_base = OTHER; note = 2'-O-methyl ribonucleotide
  modified_base 41: mod_base = OTHER; note = 2'-O-methyl ribonucleotide
  modified_base 42: mod_base = OTHER; note = 2'-O-methyl ribonucleotide
  modified_base 46: mod_base = OTHER; note = 2'-O-methyl ribonucleotide
  modified_base 48: mod_base = OTHER; note = 2'-O-methyl ribonucleotide
  modified_base 50: mod_base = OTHER; note = 2'-O-methyl ribonucleotide
  modified_base 52: mod_base = OTHER; note = 2'-O-methyl ribonucleotide
  modified_base 53: mod_base = OTHER; note = 2'-O-methyl ribonucleotide
  modified_base 54: mod_base = OTHER; note = 2'-O-methyl ribonucleotide
  modified_base 55: mod_base = OTHER; note = 2'-O-methyl ribonucleotide
  modified_base 56: mod_base = OTHER; note = 2'-O-methyl ribonucleotide
  modified_base 57: mod_base = OTHER; note = 2'-O-methyl ribonucleotide
  modified_base 60: mod_base = OTHER; note = 2'-O-methyl ribonucleotide
  modified_base 61: mod_base = OTHER; note = 2'-O-methyl ribonucleotide
  modified_base 66: mod_base = OTHER; note = 2'-O-methyl ribonucleotide
  modified_base 67: mod_base = OTHER; note = 2'-O-methyl ribonucleotide
  modified_base 70: mod_base = OTHER; note = 2'-O-methyl ribonucleotide
  modified_base 71: mod_base = OTHER; note = 2'-O-methyl ribonucleotide
  modified_base 72: mod_base = OTHER; note = 2'-O-methyl ribonucleotide
  modified_base 73: mod_base = OTHER; note = 2'-O-methyl ribonucleotide
  modified_base 74: mod_base = OTHER; note = 2'-O-methyl ribonucleotide
  modified_base 75: mod_base = OTHER; note = 2'-O-methyl ribonucleotide
  modified_base 76: mod_base = OTHER; note = 2'-O-methyl ribonucleotide
  modified_base 77: mod_base = OTHER; note = 2'-O-methyl ribonucleotide
  modified_base 78: mod_base = OTHER; note = 2'-O-methyl ribonucleotide
  modified_base 79: mod_base = OTHER; note = 2'-O-methyl ribonucleotide
  modified_base 80: mod_base = OTHER; note = 2'-O-methyl ribonucleotide
  modified_base 81: mod_base = OTHER; note = 2'-O-methyl ribonucleotide
  modified_base 83: mod_base = OTHER; note = 2'-O-methyl ribonucleotide
  modified_base 84: mod_base = OTHER; note = 2'-O-methyl ribonucleotide
  modified_base 85: mod_base = OTHER; note = 2'-O-methyl ribonucleotide
  modified_base 86: mod_base = OTHER; note = 2'-O-methyl ribonucleotide
  modified_base 87: mod_base = OTHER; note = 2'-O-methyl ribonucleotide
  modified_base 88: mod_base = OTHER; note = 2'-O-methyl ribonucleotide
  modified_base 89: mod_base = OTHER; note = 2'-O-methyl ribonucleotide
  modified_base 90: mod_base = OTHER; note = 2'-O-methyl ribonucleotide
  modified_base 91: mod_base = OTHER; note = 2'-O-methyl ribonucleotide
  modified_base 92: mod_base = OTHER; note = 2'-O-methyl ribonucleotide
  modified_base 93: mod_base = OTHER; note = 2'-O-methyl ribonucleotide
  modified_base 94: mod_base = OTHER; note = 2'-O-methyl ribonucleotide
  modified_base 95: mod_base = OTHER; note = 2'-O-methyl ribonucleotide
  modified_base 96: mod_base = OTHER; note = 2'-O-methyl ribonucleotide
  modified_base 97: mod_base = OTHER; note = 2'-O-methyl ribonucleotide
  modified_base 98: mod_base = OTHER; note = 2'-O-methyl ribonucleotide
  modified_base 99: mod_base = OTHER; note = 2'-O-methyl ribonucleotide
  modified_base 100: mod_base = OTHER; note = 2'-O-methyl ribonucleotide
  modified_base 9: mod_base = OTHER; note = nebularine
  modified_base 42: mod_base = OTHER; note = nebularine
  modified_base 1..3: mod_base = OTHER; note = phosphorothioate linkage
  modified_base 98..100: mod_base = OTHER; note = phosphorothioate linkage

SEQ ID NO: 2098 - RNA, 100 nt, synthetic construct; identical to SEQ ID NO: 1939
  source 1..100: mol_type = other RNA
  modified_base 1: mod_base = OTHER; note = 2'-O-methyl ribonucleotide
  modified_base 2: mod_base = OTHER; note = 2'-O-methyl ribonucleotide
  modified_base 3: mod_base = OTHER; note = 2'-O-methyl ribonucleotide
  modified_base 21: mod_base = OTHER; note = 2'-O-methyl ribonucleotide
  modified_base 28: mod_base = OTHER; note = 2'-O-methyl ribonucleotide
  modified_base 29: mod_base = OTHER; note = 2'-O-methyl ribonucleotide
  modified_base 30: mod_base = OTHER; note = 2'-O-methyl ribonucleotide
  modified_base 31: mod_base = OTHER; note = 2'-O-methyl ribonucleotide
  modified_base 32: mod_base = OTHER; note = 2'-O-methyl ribonucleotide
  modified_base 33: mod_base = OTHER; note = 2'-O-methyl ribonucleotide
  modified_base 34: mod_base = OTHER; note = 2'-O-methyl ribonucleotide
  modified_base 35: mod_base = OTHER; note = 2'-O-methyl ribonucleotide
  modified_base 36: mod_base = OTHER; note = 2'-O-methyl ribonucleotide
  modified_base 37: mod_base = OTHER; note = 2'-O-methyl ribonucleotide
  modified_base 38: mod_base = OTHER; note = 2'-O-methyl ribonucleotide
  modified_base 39: mod_base = OTHER; note = 2'-O-methyl ribonucleotide
  modified_base 40: mod_base = OTHER; note = 2'-O-methyl ribonucleotide
  modified_base 41: mod_base = OTHER; note = 2'-O-methyl ribonucleotide
  modified_base 42: mod_base = OTHER; note = 2'-O-methyl ribonucleotide
  modified_base 46: mod_base = OTHER; note = 2'-O-methyl ribonucleotide
  modified_base 48: mod_base = OTHER; note = 2'-O-methyl ribonucleotide
  modified_base 50: mod_base = OTHER; note = 2'-O-methyl ribonucleotide
  modified_base 52: mod_base = OTHER; note = 2'-O-methyl ribonucleotide
  modified_base 53: mod_base = OTHER; note = 2'-O-methyl ribonucleotide
  modified_base 54: mod_base = OTHER; note = 2'-O-methyl ribonucleotide
  modified_base 55: mod_base = OTHER; note = 2'-O-methyl ribonucleotide
  modified_base 56: mod_base = OTHER; note = 2'-O-methyl ribonucleotide
  modified_base 57: mod_base = OTHER; note = 2'-O-methyl ribonucleotide
  modified_base 60: mod_base = OTHER; note = 2'-O-methyl ribonucleotide
  modified_base 61: mod_base = OTHER; note = 2'-O-methyl ribonucleotide
  modified_base 66: mod_base = OTHER; note = 2'-O-methyl ribonucleotide
  modified_base 67: mod_base = OTHER; note = 2'-O-methyl ribonucleotide
  modified_base 70: mod_base = OTHER; note = 2'-O-methyl ribonucleotide
  modified_base 71: mod_base = OTHER; note = 2'-O-methyl ribonucleotide
  modified_base 72: mod_base = OTHER; note = 2'-O-methyl ribonucleotide
  modified_base 73: mod_base = OTHER; note = 2'-O-methyl ribonucleotide
  modified_base 74: mod_base = OTHER; note = 2'-O-methyl ribonucleotide
  modified_base 75: mod_base = OTHER; note = 2'-O-methyl ribonucleotide
  modified_base 76: mod_base = OTHER; note = 2'-O-methyl ribonucleotide
  modified_base 77: mod_base = OTHER; note = 2'-O-methyl ribonucleotide
  modified_base 78: mod_base = OTHER; note = 2'-O-methyl ribonucleotide
  modified_base 79: mod_base = OTHER; note = 2'-O-methyl ribonucleotide
  modified_base 80: mod_base = OTHER; note = 2'-O-methyl ribonucleotide
  modified_base 81: mod_base = OTHER; note = 2'-O-methyl ribonucleotide
  modified_base 83: mod_base = OTHER; note = 2'-O-methyl ribonucleotide
  modified_base 84: mod_base = OTHER; note = 2'-O-methyl ribonucleotide
  modified_base 85: mod_base = OTHER; note = 2'-O-methyl ribonucleotide
  modified_base 86: mod_base = OTHER; note = 2'-O-methyl ribonucleotide
  modified_base 87: mod_base = OTHER; note = 2'-O-methyl ribonucleotide
  modified_base 88: mod_base = OTHER; note = 2'-O-methyl ribonucleotide
  modified_base 89: mod_base = OTHER; note = 2'-O-methyl ribonucleotide
  modified_base 90: mod_base = OTHER; note = 2'-O-methyl ribonucleotide
  modified_base 91: mod_base = OTHER; note = 2'-O-methyl ribonucleotide
  modified_base 92: mod_base = OTHER; note = 2'-O-methyl ribonucleotide
  modified_base 93: mod_base = OTHER; note = 2'-O-methyl ribonucleotide
  modified_base 94: mod_base = OTHER; note = 2'-O-methyl ribonucleotide
  modified_base 95: mod_base = OTHER; note = 2'-O-methyl ribonucleotide
  modified_base 96: mod_base = OTHER; note = 2'-O-methyl ribonucleotide
  modified_base 97: mod_base = OTHER; note = 2'-O-methyl ribonucleotide
  modified_base 98: mod_base = OTHER; note = 2'-O-methyl ribonucleotide
  modified_base 99: mod_base = OTHER; note = 2'-O-methyl ribonucleotide
  modified_base 100: mod_base = OTHER; note = 2'-O-methyl ribonucleotide
  modified_base 9: mod_base = OTHER; note = nebularine
  modified_base 34: mod_base = OTHER; note = nebularine
  modified_base 42: mod_base = OTHER; note = nebularine
  modified_base 1..3: mod_base = OTHER; note = phosphorothioate linkage
  modified_base 98..100: mod_base = OTHER; note = phosphorothioate linkage

SEQ ID NO: 2099 - RNA, 100 nt, synthetic construct; identical to SEQ ID NO: 1940
  source 1..100: mol_type = other RNA
  modified_base 1: mod_base = OTHER; note = 2'-O-methyl ribonucleotide
  modified_base 2: mod_base = OTHER; note = 2'-O-methyl ribonucleotide
  modified_base 3: mod_base = OTHER; note = 2'-O-methyl ribonucleotide
  modified_base 21: mod_base = OTHER; note = 2'-O-methyl ribonucleotide
  modified_base 28: mod_base = OTHER; note = 2'-O-methyl ribonucleotide
  modified_base 29: mod_base = OTHER; note = 2'-O-methyl ribonucleotide
  modified_base 30: mod_base = OTHER; note = 2'-O-methyl ribonucleotide
  modified_base 31: mod_base = OTHER; note = 2'-O-methyl ribonucleotide
  modified_base 32: mod_base = OTHER; note = 2'-O-methyl ribonucleotide
  modified_base 33: mod_base = OTHER; note = 2'-O-methyl ribonucleotide
  modified_base 34: mod_base = OTHER; note = 2'-O-methyl ribonucleotide
  modified_base 35: mod_base = OTHER; note = 2'-O-methyl ribonucleotide
  modified_base 36: mod_base = OTHER; note = 2'-O-methyl ribonucleotide
  modified_base 37: mod_base = OTHER; note = 2'-O-methyl ribonucleotide
  modified_base 38: mod_base = OTHER; note = 2'-O-methyl ribonucleotide
  modified_base 39: mod_base = OTHER; note = 2'-O-methyl ribonucleotide
  modified_base 40: mod_base = OTHER; note = 2'-O-methyl ribonucleotide
  modified_base 41: mod_base = OTHER; note = 2'-O-methyl ribonucleotide
  modified_base 42: mod_base = OTHER; note = 2'-O-methyl ribonucleotide
  modified_base 46: mod_base = OTHER; note = 2'-O-methyl ribonucleotide
  modified_base 48: mod_base = OTHER; note = 2'-O-methyl ribonucleotide
  modified_base 50: mod_base = OTHER; note = 2'-O-methyl ribonucleotide
  modified_base 52: mod_base = OTHER; note = 2'-O-methyl ribonucleotide
  modified_base 53: mod_base = OTHER; note = 2'-O-methyl ribonucleotide
  modified_base 54: mod_base = OTHER; note = 2'-O-methyl ribonucleotide
  modified_base 55: mod_base = OTHER; note = 2'-O-methyl ribonucleotide
  modified_base 56: mod_base = OTHER; note = 2'-O-methyl ribonucleotide
  modified_base 57: mod_base = OTHER; note = 2'-O-methyl ribonucleotide
  modified_base 60: mod_base = OTHER; note = 2'-O-methyl ribonucleotide
  modified_base 61: mod_base = OTHER; note = 2'-O-methyl ribonucleotide
  modified_base 66: mod_base = OTHER; note = 2'-O-methyl ribonucleotide
  modified_base 67: mod_base = OTHER; note = 2'-O-methyl ribonucleotide
  modified_base 70: mod_base = OTHER; note = 2'-O-methyl ribonucleotide
  modified_base 71: mod_base = OTHER; note = 2'-O-methyl ribonucleotide
  modified_base 72: mod_base = OTHER; note = 2'-O-methyl ribonucleotide
  modified_base 73: mod_base = OTHER; note = 2'-O-methyl ribonucleotide
  modified_base 74: mod_base = OTHER; note = 2'-O-methyl ribonucleotide
  modified_base 75: mod_base = OTHER; note = 2'-O-methyl ribonucleotide
  modified_base 76: mod_base = OTHER; note = 2'-O-methyl ribonucleotide
  modified_base 77: mod_base = OTHER; note = 2'-O-methyl ribonucleotide
  modified_base 78: mod_base = OTHER; note = 2'-O-methyl ribonucleotide
  modified_base 79: mod_base = OTHER; note = 2'-O-methyl ribonucleotide
  modified_base 80: mod_base = OTHER; note = 2'-O-methyl ribonucleotide
  modified_base 81: mod_base = OTHER; note = 2'-O-methyl ribonucleotide
  modified_base 83: mod_base = OTHER; note = 2'-O-methyl ribonucleotide
  modified_base 84: mod_base = OTHER; note = 2'-O-methyl ribonucleotide
  modified_base 85: mod_base = OTHER; note = 2'-O-methyl ribonucleotide
  modified_base 86: mod_base = OTHER; note = 2'-O-methyl ribonucleotide
  modified_base 87: mod_base = OTHER; note = 2'-O-methyl ribonucleotide
  modified_base 88: mod_base = OTHER; note = 2'-O-methyl ribonucleotide
  modified_base 89: mod_base = OTHER; note = 2'-O-methyl ribonucleotide
  modified_base 90: mod_base = OTHER; note = 2'-O-methyl ribonucleotide
  modified_base 91: mod_base = OTHER; note = 2'-O-methyl ribonucleotide
  modified_base 92: mod_base = OTHER; note = 2'-O-methyl ribonucleotide
  modified_base 93: mod_base = OTHER; note = 2'-O-methyl ribonucleotide
  modified_base 94: mod_base = OTHER; note = 2'-O-methyl ribonucleotide
  modified_base 95: mod_base = OTHER; note = 2'-O-methyl ribonucleotide
  modified_base 96: mod_base = OTHER; note = 2'-O-methyl ribonucleotide
  modified_base 97: mod_base = OTHER; note = 2'-O-methyl ribonucleotide
  modified_base 98: mod_base = OTHER; note = 2'-O-methyl ribonucleotide
  modified_base 99: mod_base = OTHER; note = 2'-O-methyl ribonucleotide
  modified_base 100: mod_base = OTHER; note = 2'-O-methyl ribonucleotide
  modified_base 9: mod_base = OTHER; note = nebularine
  modified_base 34: mod_base = OTHER; note = nebularine
  modified_base 1..3: mod_base = OTHER; note = phosphorothioate linkage
  modified_base 98..100: mod_base = OTHER; note = phosphorothioate linkage

SEQ ID NO: 2100 - DNA, 100 bp, synthetic construct; identical to SEQ ID NO: 1941
  source 1..100: mol_type = other DNA
  modified_base 1: mod_base = OTHER; note = 2'-O-methyl ribonucleotide
  modified_base 2: mod_base = OTHER; note = 2'-O-methyl ribonucleotide
  modified_base 3: mod_base = OTHER; note = 2'-O-methyl ribonucleotide
  modified_base 21: mod_base = OTHER; note = 2'-O-methyl ribonucleotide
  modified_base 28: mod_base = OTHER; note = 2'-O-methyl ribonucleotide
  modified_base 29: mod_base = OTHER; note = 2'-O-methyl ribonucleotide
  modified_base 30: mod_base = OTHER; note = 2'-O-methyl ribonucleotide
  modified_base 31: mod_base = OTHER; note = 2'-O-methyl ribonucleotide
  modified_base 32: mod_base = OTHER; note = 2'-O-methyl ribonucleotide
  modified_base 33: mod_base = OTHER; note = 2'-O-methyl ribonucleotide
  modified_base 34: mod_base = OTHER; note = 2'-O-methyl ribonucleotide
  modified_base 35: mod_base = OTHER; note = 2'-O-methyl ribonucleotide
  modified_base 36: mod_base = OTHER; note = 2'-O-methyl ribonucleotide
  modified_base 37: mod_base = OTHER; note = 2'-O-methyl ribonucleotide
  modified_base 38: mod_base = OTHER; note = 2'-O-methyl ribonucleotide
  modified_base 39: mod_base = OTHER; note = 2'-O-methyl ribonucleotide
  modified_base 40: mod_base = OTHER; note = 2'-O-methyl ribonucleotide
  modified_base 41: mod_base = OTHER; note = 2'-O-methyl ribonucleotide
  modified_base 42: mod_base = OTHER; note = 2'-O-methyl ribonucleotide
  modified_base 46: mod_base = OTHER; note = 2'-O-methyl ribonucleotide
  modified_base 48: mod_base = OTHER; note = 2'-O-methyl ribonucleotide
  modified_base 50: mod_base = OTHER; note = 2'-O-methyl ribonucleotide
  modified_base 52: mod_base = OTHER; note = 2'-O-methyl ribonucleotide
  modified_base 53: mod_base = OTHER; note = 2'-O-methyl ribonucleotide
  modified_base 54: mod_base = OTHER; note = 2'-O-methyl ribonucleotide
  modified_base 55: mod_base = OTHER; note = 2'-O-methyl ribonucleotide
  modified_base 56: mod_base = OTHER; note = 2'-O-methyl ribonucleotide
  modified_base 57: mod_base = OTHER; note = 2'-O-methyl ribonucleotide
  modified_base 60: mod_base = OTHER; note = 2'-O-methyl ribonucleotide
  modified_base 61: mod_base = OTHER; note = 2'-O-methyl ribonucleotide
  modified_base 66: mod_base = OTHER; note = 2'-O-methyl ribonucleotide
  modified_base 67: mod_base = OTHER; note = 2'-O-methyl ribonucleotide
  modified_base 70: mod_base = OTHER; note = 2'-O-methyl ribonucleotide
  modified_base 71: mod_base = OTHER; note = 2'-O-methyl ribonucleotide
  modified_base 72: mod_base = OTHER; note = 2'-O-methyl ribonucleotide
  modified_base 73: mod_base = OTHER; note = 2'-O-methyl ribonucleotide
  modified_base 74: mod_base = OTHER; note = 2'-O-methyl ribonucleotide
  modified_base 75: mod_base = OTHER; note = 2'-O-methyl ribonucleotide
  modified_base 76: mod_base = OTHER; note = 2'-O-methyl ribonucleotide
  modified_base 77: mod_base = OTHER; note = 2'-O-methyl ribonucleotide
  modified_base 78: mod_base = OTHER; note = 2'-O-methyl ribonucleotide
  modified_base 79: mod_base = OTHER; note = 2'-O-methyl ribonucleotide
  modified_base 80: mod_base = OTHER; note = 2'-O-methyl ribonucleotide
  modified_base 81: mod_base = OTHER; note = 2'-O-methyl ribonucleotide
  modified_base 83: mod_base = OTHER; note = 2'-O-methyl ribonucleotide
  modified_base 84: mod_base = OTHER; note = 2'-O-methyl ribonucleotide
  modified_base 85: mod_base = OTHER; note = 2'-O-methyl ribonucleotide
  modified_base 86: mod_base = OTHER; note = 2'-O-methyl ribonucleotide
  modified_base 87: mod_base = OTHER; note = 2'-O-methyl ribonucleotide
  modified_base 88: mod_base = OTHER; note = 2'-O-methyl ribonucleotide
  modified_base 89: mod_base = OTHER; note = 2'-O-methyl ribonucleotide
  modified_base 90: mod_base = OTHER; note = 2'-O-methyl ribonucleotide
  modified_base 91: mod_base = OTHER; note = 2'-O-methyl ribonucleotide
  modified_base 92: mod_base = OTHER; note = 2'-O-methyl ribonucleotide
  modified_base 93: mod_base = OTHER; note = 2'-O-methyl ribonucleotide
  modified_base 94: mod_base = OTHER; note = 2'-O-methyl ribonucleotide
  modified_base 95: mod_base = OTHER; note = 2'-O-methyl ribonucleotide
  modified_base 96: mod_base = OTHER; note = 2'-O-methyl ribonucleotide
  modified_base 97: mod_base = OTHER; note = 2'-O-methyl ribonucleotide
  modified_base 98: mod_base = OTHER; note = 2'-O-methyl ribonucleotide
  modified_base 99: mod_base = OTHER; note = 2'-O-methyl ribonucleotide
  modified_base 100: mod_base = OTHER; note = 2'-O-methyl ribonucleotide
  modified_base 9: mod_base = OTHER; note = nebularine
  modified_base 14: mod_base = OTHER; note = nebularine
  modified_base 1..3: mod_base = OTHER; note = phosphorothioate linkage
  modified_base 98..100: mod_base = OTHER; note = phosphorothioate linkage
  misc_feature 1: note = RNA
  misc_feature 2: note = RNA
  misc_feature 3: note = RNA
  misc_feature 4: note = RNA
  misc_feature 5: note = RNA
  misc_feature 6: note = RNA
  misc_feature 7: note = RNA
  misc_feature 8: note = RNA
  misc_feature 10: note = RNA
  misc_feature 11: note = RNA
  misc_feature 12: note = RNA
  misc_feature 13: note = RNA
  misc_feature 15: note = RNA
  misc_feature 16: note = RNA
  misc_feature 17: note = RNA
  misc_feature 18: note = RNA
  misc_feature 19: note = RNA
  misc_feature 20: note = RNA
  misc_feature 21: note = RNA
  misc_feature 22: note = RNA
  misc_feature 23: note = RNA
  misc_feature 24: note = RNA
  misc_feature 25: note = RNA
  misc_feature 26: note = RNA
  misc_feature 27: note = RNA
  misc_feature 28: note = RNA
  misc_feature 29: note = RNA
  misc_feature 30: note = RNA
  misc_feature 31: note = RNA
  misc_feature 32: note = RNA
  misc_feature 33: note = RNA
  misc_feature 34: note = RNA
  misc_feature 35: note = RNA
  misc_feature 36: note = RNA
  misc_feature 37: note = RNA
  misc_feature 38: note = RNA
  misc_feature 39: note = RNA
  misc_feature 40: note = RNA
  misc_feature 41: note = RNA
  misc_feature 42: note = RNA
  misc_feature 43: note = RNA
  misc_feature 44: note = RNA
  misc_feature 45: note = RNA
  misc_feature 46: note = RNA
  misc_feature 47: note = RNA
  misc_feature 48: note = RNA
  misc_feature 49: note = RNA
  misc_feature 50: note = RNA
  misc_feature 51: note = RNA
  misc_feature 52: note = RNA
  misc_feature 53: note = RNA
  misc_feature 54: note = RNA
  misc_feature 55: note = RNA
  misc_feature 56: note = RNA
  misc_feature 57: note = RNA
  misc_feature 58: note = RNA
  misc_feature 59: note = RNA
  misc_feature 60: note = RNA
  misc_feature 61: note = RNA
  misc_feature 62: note = RNA
  misc_feature 63: note = RNA
  misc_feature 64: note = RNA
  misc_feature 65: note = RNA
  misc_feature 66: note = RNA
  misc_feature 67: note = RNA
  misc_feature 68: note = RNA
  misc_feature 69: note = RNA
  misc_feature 70: note = RNA
  misc_feature 71: note = RNA
  misc_feature 72: note = RNA
  misc_feature 73: note = RNA
  misc_feature 74: note = RNA
  misc_feature 75: note = RNA
  misc_feature 76: note = RNA
  misc_feature 77: note = RNA
  misc_feature 78: note = RNA
  misc_feature 79: note = RNA
  misc_feature 80: note = RNA
  misc_feature 81: note = RNA
  misc_feature 82: note = RNA
  misc_feature 83: note = RNA
  misc_feature 84: note = RNA
  misc_feature 85: note = RNA
  misc_feature 86: note = RNA
  misc_feature 87: note = RNA
  misc_feature 88: note = RNA
  misc_feature 89: note = RNA
  misc_feature 90: note = RNA
  misc_feature 91: note = RNA
  misc_feature 92: note = RNA
  misc_feature 93: note = RNA
  misc_feature 94: note = RNA
  misc_feature 95: note = RNA
  misc_feature 96: note = RNA
  misc_feature 97: note = RNA
  misc_feature 98: note = RNA
  misc_feature 99: note = RNA
  misc_feature 100: note = RNA
  misc_feature 9: note = DNA
  misc_feature 14: note = DNA

SEQ ID NO: 2101 - DNA, 100 bp, synthetic construct; identical to SEQ ID NO: 1942
  source 1..100: mol_type = other DNA
  modified_base 1: mod_base = OTHER; note = 2'-O-methyl ribonucleotide
  modified_base 2: mod_base = OTHER; note = 2'-O-methyl ribonucleotide
  modified_base 3: mod_base = OTHER; note = 2'-O-methyl ribonucleotide
  modified_base 21: mod_base = OTHER; note = 2'-O-methyl ribonucleotide
  modified_base 28: mod_base = OTHER; note = 2'-O-methyl ribonucleotide
  modified_base 29: mod_base = OTHER; note = 2'-O-methyl ribonucleotide
  modified_base 30: mod_base = OTHER; note = 2'-O-methyl ribonucleotide
  modified_base 31: mod_base = OTHER; note = 2'-O-methyl ribonucleotide
  modified_base 32: mod_base = OTHER; note = 2'-O-methyl ribonucleotide
  modified_base 33: mod_base = OTHER; note = 2'-O-methyl ribonucleotide
  modified_base 34: mod_base = OTHER; note = 2'-O-methyl ribonucleotide
  modified_base 35: mod_base = OTHER; note = 2'-O-methyl ribonucleotide
  modified_base 36: mod_base = OTHER; note = 2'-O-methyl ribonucleotide
  modified_base 37: mod_base = OTHER; note = 2'-O-methyl ribonucleotide
  modified_base 38: mod_base = OTHER; note = 2'-O-methyl ribonucleotide
  modified_base 39: mod_base = OTHER; note = 2'-O-methyl ribonucleotide
  modified_base 40: mod_base = OTHER; note = 2'-O-methyl ribonucleotide
  modified_base 41: mod_base = OTHER; note = 2'-O-methyl ribonucleotide
  modified_base 42: mod_base = OTHER; note = 2'-O-methyl ribonucleotide
  modified_base 46: mod_base = OTHER; note = 2'-O-methyl ribonucleotide
  modified_base 48: mod_base = OTHER; note = 2'-O-methyl ribonucleotide
  modified_base 50: mod_base = OTHER; note = 2'-O-methyl ribonucleotide
  modified_base 52: mod_base = OTHER; note = 2'-O-methyl ribonucleotide
  modified_base 53: mod_base = OTHER; note = 2'-O-methyl ribonucleotide
  modified_base 54: mod_base = OTHER; note = 2'-O-methyl ribonucleotide
  modified_base 55: mod_base = OTHER; note = 2'-O-methyl ribonucleotide
  modified_base 56: mod_base = OTHER; note = 2'-O-methyl ribonucleotide
  modified_base 57: mod_base = OTHER; note = 2'-O-methyl ribonucleotide
  modified_base 60: mod_base = OTHER; note = 2'-O-methyl ribonucleotide
  modified_base 61: mod_base = OTHER; note = 2'-O-methyl ribonucleotide
  modified_base 66: mod_base = OTHER; note = 2'-O-methyl ribonucleotide
  modified_base 67: mod_base = OTHER; note = 2'-O-methyl ribonucleotide
  modified_base 70: mod_base = OTHER; note = 2'-O-methyl ribonucleotide
  modified_base 71: mod_base = OTHER; note = 2'-O-methyl ribonucleotide
  modified_base 72: mod_base = OTHER; note = 2'-O-methyl ribonucleotide
  modified_base 73: mod_base = OTHER; note = 2'-O-methyl ribonucleotide
  modified_base 74: mod_base = OTHER; note = 2'-O-methyl ribonucleotide
  modified_base 75: mod_base = OTHER; note = 2'-O-methyl ribonucleotide
  modified_base 76: mod_base = OTHER; note = 2'-O-methyl ribonucleotide
  modified_base 77: mod_base = OTHER; note = 2'-O-methyl ribonucleotide
  modified_base 78: mod_base = OTHER; note = 2'-O-methyl ribonucleotide
  modified_base 79: mod_base = OTHER; note = 2'-O-methyl ribonucleotide
  modified_base 80: mod_base = OTHER; note = 2'-O-methyl ribonucleotide
  modified_base 81: mod_base = OTHER; note = 2'-O-methyl ribonucleotide
  modified_base 83: mod_base = OTHER; note = 2'-O-methyl ribonucleotide
  modified_base 84: mod_base = OTHER; note = 2'-O-methyl ribonucleotide
  modified_base 85: mod_base = OTHER; note = 2'-O-methyl ribonucleotide
  modified_base 86: mod_base = OTHER; note = 2'-O-methyl ribonucleotide
  modified_base 87: mod_base = OTHER; note = 2'-O-methyl ribonucleotide
  modified_base 88: mod_base = OTHER; note = 2'-O-methyl ribonucleotide
  modified_base 89: mod_base = OTHER; note = 2'-O-methyl ribonucleotide
  modified_base 90: mod_base = OTHER; note = 2'-O-methyl ribonucleotide
  modified_base 91: mod_base = OTHER; note = 2'-O-methyl ribonucleotide
  modified_base 92: mod_base = OTHER; note = 2'-O-methyl ribonucleotide
  modified_base 93: mod_base = OTHER; note = 2'-O-methyl ribonucleotide
  modified_base 94: mod_base = OTHER; note = 2'-O-methyl ribonucleotide
  modified_base 95: mod_base = OTHER; note = 2'-O-methyl ribonucleotide
  modified_base 96: mod_base = OTHER; note = 2'-O-methyl ribonucleotide
  modified_base 97: mod_base = OTHER; note = 2'-O-methyl ribonucleotide
  modified_base 98: mod_base = OTHER; note = 2'-O-methyl ribonucleotide
  modified_base 99: mod_base = OTHER; note = 2'-O-methyl ribonucleotide
  modified_base 100: mod_base = OTHER; note = 2'-O-methyl ribonucleotide
  modified_base 9: mod_base = OTHER; note = nebularine
  modified_base 1..3: mod_base = OTHER; note = phosphorothioate linkage
  modified_base 98..100: mod_base = OTHER; note = phosphorothioate linkage
  misc_feature 1: note = RNA
  misc_feature 2: note = RNA
  misc_feature 3: note = RNA
  misc_feature 4: note = RNA
  misc_feature 5: note = RNA
  misc_feature 6: note = RNA
  misc_feature 7: note = RNA
  misc_feature 8: note = RNA
  misc_feature 10: note = RNA
  misc_feature 11: note = RNA
  misc_feature 12: note = RNA
  misc_feature 13: note = RNA
  misc_feature 14: note = RNA
  misc_feature 15: note = RNA
  misc_feature 16: note = RNA
  misc_feature 17: note = RNA
  misc_feature 18: note = RNA
  misc_feature 19: note = RNA
  misc_feature 20: note = RNA
  misc_feature 21: note = RNA
  misc_feature 22: note = RNA
  misc_feature 23: note = RNA
  misc_feature 24: note = RNA
  misc_feature 25: note = RNA
  misc_feature 26: note = RNA
  misc_feature 27: note = RNA
  misc_feature 28: note = RNA
  misc_feature 29: note = RNA
  misc_feature 30: note = RNA
  misc_feature 31: note = RNA
  misc_feature 32: note = RNA
  misc_feature 33: note = RNA
  misc_feature 34: note = RNA
  misc_feature 35: note = RNA
  misc_feature 36: note = RNA
  misc_feature 37: note = RNA
  misc_feature 38: note = RNA
  misc_feature 39: note = RNA
  misc_feature 40: note = RNA
  misc_feature 41: note = RNA
  misc_feature 42: note = RNA
  misc_feature 43: note = RNA
  misc_feature 44: note = RNA
  misc_feature 45: note = RNA
  misc_feature 46: note = RNA
  misc_feature 47: note = RNA
  misc_feature 48: note = RNA
  misc_feature 49: note = RNA
  misc_feature 50: note = RNA
  misc_feature 51: note = RNA
  misc_feature 52: note = RNA
  misc_feature 53: note = RNA
  misc_feature 54: note = RNA
  misc_feature 55: note = RNA
  misc_feature 56: note = RNA
  misc_feature 57: note = RNA
  misc_feature 58: note = RNA
  misc_feature 59: note = RNA
  misc_feature 60: note = RNA
  misc_feature 61: note = RNA
  misc_feature 62: note = RNA
  misc_feature 63: note = RNA
  misc_feature 64: note = RNA
  misc_feature 65: note = RNA
  misc_feature 66: note = RNA
  misc_feature 67: note = RNA
  misc_feature 68: note = RNA
  misc_feature 69: note = RNA
  misc_feature 70: note = RNA
  misc_feature 71: note = RNA
  misc_feature 72: note = RNA
  misc_feature 73: note = RNA
  misc_feature 74: note = RNA
  misc_feature 75: note = RNA
  misc_feature 76: note = RNA
  misc_feature 77: note = RNA
  misc_feature 78: note = RNA
  misc_feature 79: note = RNA
  misc_feature 80: note = RNA
  misc_feature 81: note = RNA
  misc_feature 82: note = RNA
  misc_feature 83: note = RNA
  misc_feature 84: note = RNA
  misc_feature 85: note = RNA
  misc_feature 86: note = RNA
  misc_feature 87: note = RNA
  misc_feature 88: note = RNA
  misc_feature 89: note = RNA
  misc_feature 90: note = RNA
  misc_feature 91: note = RNA
  misc_feature 92: note = RNA
  misc_feature 93: note = RNA
  misc_feature 94: note = RNA
  misc_feature 95: note = RNA
  misc_feature 96: note = RNA
  misc_feature 97: note = RNA
  misc_feature 98: note = RNA
  misc_feature 99: note = RNA
  misc_feature 100: note = RNA
  misc_feature 9: note = DNA

SEQ ID NO: 2102 - DNA, 100 bp, synthetic construct; identical to SEQ ID NO: 1943
  source 1..100: mol_type = other DNA
  modified_base 1: mod_base = OTHER; note = 2'-O-methyl ribonucleotide
  modified_base 2: mod_base = OTHER; note = 2'-O-methyl ribonucleotide
  modified_base 3: mod_base = OTHER; note = 2'-O-methyl ribonucleotide
  modified_base 21: mod_base = OTHER; note = 2'-O-methyl ribonucleotide
  modified_base 28: mod_base = OTHER; note = 2'-O-methyl ribonucleotide
  modified_base 29: mod_base = OTHER; note = 2'-O-methyl ribonucleotide
  modified_base 30: mod_base = OTHER; note = 2'-O-methyl ribonucleotide
  modified_base 31: mod_base = OTHER; note = 2'-O-methyl ribonucleotide
  modified_base 32: mod_base = OTHER; note = 2'-O-methyl ribonucleotide
  modified_base 33: mod_base = OTHER; note = 2'-O-methyl ribonucleotide
  modified_base 34: mod_base = OTHER; note = 2'-O-methyl ribonucleotide
  modified_base 35: mod_base = OTHER; note = 2'-O-methyl ribonucleotide
  modified_base 36: mod_base = OTHER; note = 2'-O-methyl ribonucleotide
  modified_base 37: mod_base = OTHER; note = 2'-O-methyl ribonucleotide
  modified_base 38: mod_base = OTHER; note = 2'-O-methyl ribonucleotide
  modified_base 39: mod_base = OTHER; note = 2'-O-methyl ribonucleotide
  modified_base 40: mod_base = OTHER; note = 2'-O-methyl ribonucleotide
  modified_base 41: mod_base = OTHER; note = 2'-O-methyl ribonucleotide
  modified_base 42: mod_base = OTHER; note = 2'-O-methyl ribonucleotide
  modified_base 46: mod_base = OTHER; note = 2'-O-methyl ribonucleotide
  modified_base 48: mod_base = OTHER; note = 2'-O-methyl ribonucleotide
  modified_base 50: mod_base = OTHER; note = 2'-O-methyl ribonucleotide
  modified_base 52: mod_base = OTHER; note = 2'-O-methyl ribonucleotide
  modified_base 53: mod_base = OTHER; note = 2'-O-methyl ribonucleotide
  modified_base 54: mod_base = OTHER; note = 2'-O-methyl ribonucleotide
  modified_base 55: mod_base = OTHER; note = 2'-O-methyl ribonucleotide
  modified_base 56: mod_base = OTHER; note = 2'-O-methyl ribonucleotide
  modified_base 57: mod_base = OTHER; note = 2'-O-methyl ribonucleotide
  modified_base 60: mod_base = OTHER; note = 2'-O-methyl ribonucleotide
  modified_base 61: mod_base = OTHER; note = 2'-O-methyl ribonucleotide
  modified_base 66: mod_base = OTHER; note = 2'-O-methyl ribonucleotide
  modified_base 67: mod_base = OTHER; note = 2'-O-methyl ribonucleotide
  modified_base 70: mod_base = OTHER; note = 2'-O-methyl ribonucleotide
  modified_base 71: mod_base = OTHER; note = 2'-O-methyl ribonucleotide
  modified_base 72: mod_base = OTHER; note = 2'-O-methyl ribonucleotide
  modified_base 73: mod_base = OTHER; note = 2'-O-methyl ribonucleotide
  modified_base 74: mod_base = OTHER; note = 2'-O-methyl ribonucleotide
  modified_base 75: mod_base = OTHER; note = 2'-O-methyl ribonucleotide
  modified_base 76: mod_base = OTHER; note = 2'-O-methyl ribonucleotide
  modified_base 77: mod_base = OTHER; note = 2'-O-methyl ribonucleotide
  modified_base 78: mod_base = OTHER; note = 2'-O-methyl ribonucleotide
  modified_base 79: mod_base = OTHER; note = 2'-O-methyl ribonucleotide
  modified_base 80: mod_base = OTHER; note = 2'-O-methyl ribonucleotide
  modified_base 81: mod_base = OTHER; note = 2'-O-methyl ribonucleotide
  modified_base 83: mod_base = OTHER; note = 2'-O-methyl ribonucleotide
  modified_base 84: mod_base = OTHER; note = 2'-O-methyl ribonucleotide
  modified_base 85: mod_base = OTHER; note = 2'-O-methyl ribonucleotide
  modified_base 86: mod_base = OTHER; note = 2'-O-methyl ribonucleotide
  modified_base 87: mod_base = OTHER; note = 2'-O-methyl ribonucleotide
  modified_base 88: mod_base = OTHER; note = 2'-O-methyl ribonucleotide
  modified_base 89: mod_base = OTHER; note = 2'-O-methyl ribonucleotide
  modified_base 90: mod_base = OTHER; note = 2'-O-methyl ribonucleotide
  modified_base 91: mod_base = OTHER; note = 2'-O-methyl ribonucleotide
  modified_base 92: mod_base = OTHER; note = 2'-O-methyl ribonucleotide
  modified_base 93: mod_base = OTHER; note = 2'-O-methyl ribonucleotide
  modified_base 94: mod_base = OTHER; note = 2'-O-methyl ribonucleotide
  modified_base 95: mod_base = OTHER; note = 2'-O-methyl ribonucleotide
  modified_base 96: mod_base = OTHER; note = 2'-O-methyl ribonucleotide
  modified_base 97: mod_base = OTHER; note = 2'-O-methyl ribonucleotide
  modified_base 98: mod_base = OTHER; note = 2'-O-methyl ribonucleotide
  modified_base 99: mod_base = OTHER; note = 2'-O-methyl ribonucleotide
  modified_base 100: mod_base = OTHER; note = 2'-O-methyl ribonucleotide
  modified_base 14: mod_base = OTHER; note = nebularine
  modified_base 1..3: mod_base = OTHER; note = phosphorothioate linkage
  modified_base 98..100: mod_base = OTHER; note = phosphorothioate linkage
  misc_feature 1: note = RNA
  misc_feature 2: note = RNA
  misc_feature 3: note = RNA
  misc_feature 4: note = RNA
  misc_feature 5: note = RNA
  misc_feature 6: note = RNA
  misc_feature 7: note = RNA
  misc_feature 8: note = RNA
  misc_feature 9: note = RNA
  misc_feature 10: note = RNA
  misc_feature 11: note = RNA
  misc_feature 12: note = RNA
  misc_feature 13: note = RNA
  misc_feature 15: note = RNA
  misc_feature 16: note = RNA
  misc_feature 17: note = RNA
  misc_feature 18: note = RNA
  misc_feature 19: note = RNA
  misc_feature 20: note = RNA
  misc_feature 21: note = RNA
  misc_feature 22: note = RNA
  misc_feature 23: note = RNA
  misc_feature 24: note = RNA
  misc_feature 25: note = RNA
  misc_feature 26: note = RNA
  misc_feature 27: note = RNA
  misc_feature 28: note = RNA
  misc_feature 29: note = RNA
  misc_feature 30: note = RNA
  misc_feature 31: note = RNA
  misc_feature 32: note = RNA
  misc_feature 33: note = RNA
  misc_feature 34: note = RNA
  misc_feature 35: note = RNA
  misc_feature 36: note = RNA
  misc_feature 37: note = RNA
  misc_feature 38: note = RNA
  misc_feature 39: note = RNA
  misc_feature 40: note = RNA
  misc_feature 41: note = RNA
  misc_feature 42: note = RNA
  misc_feature 43: note = RNA
  misc_feature 44: note = RNA
  misc_feature 45: note = RNA
  misc_feature 46: note = RNA
  misc_feature 47: note = RNA
  misc_feature 48: note = RNA
  misc_feature 49: note = RNA
  misc_feature 50: note = RNA
  misc_feature 51: note = RNA
  misc_feature 52: note = RNA
  misc_feature 53: note = RNA
  misc_feature 54: note = RNA
  misc_feature 55: note = RNA
  misc_feature 56: note = RNA
  misc_feature 57: note = RNA
  misc_feature 58: note = RNA
  misc_feature 59: note = RNA
  misc_feature 60: note = RNA
  misc_feature 61: note = RNA
  misc_feature 62: note = RNA
  misc_feature 63: note = RNA
  misc_feature 64: note = RNA
  misc_feature 65: note = RNA
  misc_feature 66: note = RNA
  misc_feature 67: note = RNA
  misc_feature 68: note = RNA
  misc_feature 69: note = RNA
  misc_feature 70: note = RNA
  misc_feature 71: note = RNA
  misc_feature 72: note = RNA
  misc_feature 73: note = RNA
  misc_feature 74: note = RNA
  misc_feature 75: note = RNA
  misc_feature 76: note = RNA
  misc_feature 77: note = RNA
  misc_feature 78: note = RNA
  misc_feature 79: note = RNA
  misc_feature 80: note = RNA
  misc_feature 81: note = RNA
  misc_feature 82: note = RNA
  misc_feature 83: note = RNA
  misc_feature 84: note = RNA
  misc_feature 85: note = RNA
  misc_feature 86: note = RNA
  misc_feature 87: note = RNA
  misc_feature 88: note = RNA
  misc_feature 89: note = RNA
  misc_feature 90: note = RNA
  misc_feature 91: note = RNA
  misc_feature 92: note = RNA
  misc_feature 93: note = RNA
  misc_feature 94: note = RNA
  misc_feature 95: note = RNA
  misc_feature 96: note = RNA
  misc_feature 97: note = RNA
  misc_feature 98: note = RNA
  misc_feature 99: note = RNA
  misc_feature 100: note = RNA
  misc_feature 14: note = DNA

SEQ ID NO: 2103 - DNA, 100 bp, synthetic construct; identical to SEQ ID NO: 1944
  source 1..100: mol_type = other DNA
  modified_base 1: mod_base = OTHER; note = 2'-O-methyl ribonucleotide
  modified_base 2: mod_base = OTHER; note = 2'-O-methyl ribonucleotide
  modified_base 3: mod_base = OTHER; note = 2'-O-methyl ribonucleotide
  modified_base 21: mod_base = OTHER; note = 2'-O-methyl ribonucleotide
  modified_base 28: mod_base = OTHER; note = 2'-O-methyl ribonucleotide
  modified_base 29: mod_base = OTHER; note = 2'-O-methyl ribonucleotide
  modified_base 30: mod_base = OTHER; note = 2'-O-methyl ribonucleotide
  modified_base 31: mod_base = OTHER; note = 2'-O-methyl ribonucleotide
  modified_base 32: mod_base = OTHER; note = 2'-O-methyl ribonucleotide
  modified_base 33: mod_base = OTHER; note = 2'-O-methyl ribonucleotide
  modified_base 35: mod_base = OTHER; note = 2'-O-methyl ribonucleotide
  modified_base 36: mod_base = OTHER; note = 2'-O-methyl ribonucleotide
  modified_base 37: mod_base = OTHER; note = 2'-O-methyl ribonucleotide
  modified_base 38: mod_base = OTHER; note = 2'-O-methyl ribonucleotide
  modified_base 39: mod_base = OTHER; note = 2'-O-methyl ribonucleotide
  modified_base 40: mod_base = OTHER; note = 2'-O-methyl ribonucleotide
  modified_base 41: mod_base = OTHER; note = 2'-O-methyl ribonucleotide
  modified_base 42: mod_base = OTHER; note = 2'-O-methyl ribonucleotide
  modified_base 46: mod_base = OTHER; note = 2'-O-methyl ribonucleotide
  modified_base 48: mod_base = OTHER; note = 2'-O-methyl ribonucleotide
  modified_base 50: mod_base = OTHER; note = 2'-O-methyl ribonucleotide
  modified_base 52: mod_base = OTHER; note = 2'-O-methyl ribonucleotide
  modified_base 53: mod_base = OTHER; note = 2'-O-methyl ribonucleotide
  modified_base 54: mod_base = OTHER; note = 2'-O-methyl ribonucleotide
  modified_base 55: mod_base = OTHER; note = 2'-O-methyl ribonucleotide
  modified_base 56: mod_base = OTHER; note = 2'-O-methyl ribonucleotide
  modified_base 57: mod_base = OTHER; note = 2'-O-methyl ribonucleotide
  modified_base 60: mod_base = OTHER; note = 2'-O-methyl ribonucleotide
  modified_base 61: mod_base = OTHER; note = 2'-O-methyl ribonucleotide
  modified_base 66: mod_base = OTHER; note = 2'-O-methyl ribonucleotide
  modified_base 67: mod_base = OTHER; note = 2'-O-methyl ribonucleotide
  modified_base 70: mod_base = OTHER; note = 2'-O-methyl ribonucleotide
  modified_base 71: mod_base = OTHER; note = 2'-O-methyl ribonucleotide
  modified_base 72: mod_base = OTHER; note = 2'-O-methyl ribonucleotide
  modified_base 73: mod_base = OTHER; note = 2'-O-methyl ribonucleotide
  modified_base 74: mod_base = OTHER; note = 2'-O-methyl ribonucleotide
  modified_base 75: mod_base = OTHER; note = 2'-O-methyl ribonucleotide
  modified_base 76: mod_base = OTHER; note = 2'-O-methyl ribonucleotide
  modified_base 77: mod_base = OTHER; note = 2'-O-methyl ribonucleotide
  modified_base 78: mod_base = OTHER; note = 2'-O-methyl ribonucleotide
  modified_base 79: mod_base = OTHER; note = 2'-O-methyl ribonucleotide
  modified_base 80: mod_base = OTHER; note = 2'-O-methyl ribonucleotide
  modified_base 81: mod_base = OTHER; note = 2'-O-methyl ribonucleotide
  modified_base 83: mod_base = OTHER; note = 2'-O-methyl ribonucleotide
  modified_base 84: mod_base = OTHER; note = 2'-O-methyl ribonucleotide
  modified_base 85: mod_base = OTHER; note = 2'-O-methyl ribonucleotide
  modified_base 86: mod_base = OTHER; note = 2'-O-methyl ribonucleotide
  modified_base 87: mod_base = OTHER; note = 2'-O-methyl ribonucleotide
  modified_base 88: mod_base = OTHER; note = 2'-O-methyl ribonucleotide
  modified_base 89: mod_base = OTHER; note = 2'-O-methyl ribonucleotide
  modified_base 90: mod_base = OTHER; note = 2'-O-methyl ribonucleotide
  modified_base 91: mod_base = OTHER; note = 2'-O-methyl ribonucleotide
  modified_base 92: mod_base = OTHER; note = 2'-O-methyl ribonucleotide
  modified_base 93: mod_base = OTHER; note = 2'-O-methyl ribonucleotide
  modified_base 94: mod_base = OTHER; note = 2'-O-methyl ribonucleotide
  modified_base 95: mod_base = OTHER; note = 2'-O-methyl ribonucleotide
  modified_base 96: mod_base = OTHER; note = 2'-O-methyl ribonucleotide
  modified_base 97: mod_base = OTHER; note = 2'-O-methyl ribonucleotide
  modified_base 98: mod_base = OTHER; note = 2'-O-methyl ribonucleotide
  modified_base 99: mod_base = OTHER; note = 2'-O-methyl ribonucleotide
  modified_base 100: mod_base = OTHER; note = 2'-O-methyl ribonucleotide
  modified_base 34: mod_base = OTHER; note = nebularine
  modified_base 1..3: mod_base = OTHER; note = phosphorothioate linkage
  modified_base 98..100: mod_base = OTHER; note = phosphorothioate linkage
  misc_feature 1: note = RNA
  misc_feature 2: note = RNA
  misc_feature 3: note = RNA
  misc_feature 4: note = RNA
  misc_feature 5: note = RNA
  misc_feature 6: note = RNA
  misc_feature 7: note = RNA
  misc_feature 8: note = RNA
  misc_feature 9: note = RNA
  misc_feature 10: note = RNA
  misc_feature 11: note = RNA
  misc_feature 12: note = RNA
  misc_feature 13: note = RNA
  misc_feature 14: note = RNA
  misc_feature 15: note = RNA
  misc_feature 16: note = RNA
  misc_feature 17: note = RNA
  misc_feature 18: note = RNA
  misc_feature 19: note = RNA
  misc_feature 20: note = RNA
  misc_feature 21: note = RNA
  misc_feature 22: note = RNA
  misc_feature 23: note = RNA
  misc_feature 24: note = RNA
  misc_feature 25: note = RNA
  misc_feature 26: note = RNA
  misc_feature 27: note = RNA
  misc_feature 28: note = RNA
  misc_feature 29: note = RNA
  misc_feature 30: note = RNA
  misc_feature 31: note = RNA
  misc_feature 32: note = RNA
  misc_feature 33: note = RNA
  misc_feature 35: note = RNA
  misc_feature 36: note = RNA
  misc_feature 37: note = RNA
  misc_feature 38: note = RNA
  misc_feature 39: note = RNA
  misc_feature 40: note = RNA
  misc_feature 41: note = RNA
  misc_feature 42: note = RNA
  misc_feature 43: note = RNA
  misc_feature 44: note = RNA
  misc_feature 45: note = RNA
  misc_feature 46: note = RNA
  misc_feature 47: note = RNA
  misc_feature 48: note = RNA
  misc_feature 49: note = RNA
  misc_feature 50: note = RNA
  misc_feature 51: note = RNA
  misc_feature 52: note = RNA
  misc_feature 53: note = RNA
  misc_feature 54: note = RNA
  misc_feature 55: note = RNA
  misc_feature 56: note = RNA
  misc_feature 57: note = RNA
  misc_feature 58: note = RNA
  misc_feature 59: note = RNA
  misc_feature 60: note = RNA
  misc_feature 61: note = RNA
  misc_feature 62: note = RNA
  misc_feature 63: note = RNA
  misc_feature 64: note = RNA
  misc_feature 65: note = RNA
  misc_feature 66: note = RNA
  misc_feature 67: note = RNA
  misc_feature 68: note = RNA
  misc_feature 69: note = RNA
  misc_feature 70: note = RNA
  misc_feature 71: note = RNA
  misc_feature 72: note = RNA
  misc_feature 73: note = RNA
  misc_feature 74: note = RNA
  misc_feature 75: note = RNA
  misc_feature 76: note = RNA
  misc_feature 77: note = RNA
  misc_feature 78: note = RNA
  misc_feature 79: note = RNA
  misc_feature 80: note = RNA
  misc_feature 81: note = RNA
  misc_feature 82: note = RNA
  misc_feature 83: note = RNA
  misc_feature 84: note = RNA
  misc_feature 85: note = RNA
  misc_feature 86: note = RNA
  misc_feature 87: note = RNA
  misc_feature 88: note = RNA
  misc_feature 89: note = RNA
  misc_feature 90: note = RNA
  misc_feature 91: note = RNA
  misc_feature 92: note = RNA
  misc_feature 93: note = RNA
  misc_feature 94: note = RNA
  misc_feature 95: note = RNA
  misc_feature 96: note = RNA
  misc_feature 97: note = RNA
  misc_feature 98: note = RNA
  misc_feature 99: note = RNA
  misc_feature 100: note = RNA
  misc_feature 34: note = DNA

SEQ ID NO: 2104 - DNA, 100 bp, synthetic construct; identical to SEQ ID NO: 1945
  source 1..100: mol_type = other DNA
  modified_base 1: mod_base = OTHER; note = 2'-O-methyl ribonucleotide
  modified_base 2: mod_base = OTHER; note = 2'-O-methyl ribonucleotide
  modified_base 3: mod_base = OTHER; note = 2'-O-methyl ribonucleotide
  modified_base 21: mod_base = OTHER; note = 2'-O-methyl ribonucleotide
  modified_base 28: mod_base = OTHER; note = 2'-O-methyl ribonucleotide
  modified_base 29: mod_base = OTHER; note = 2'-O-methyl ribonucleotide
  modified_base 30: mod_base = OTHER; note = 2'-O-methyl ribonucleotide
  modified_base 31: mod_base = OTHER; note = 2'-O-methyl ribonucleotide
  modified_base 32: mod_base = OTHER; note = 2'-O-methyl ribonucleotide
  modified_base 33: mod_base = OTHER; note = 2'-O-methyl ribonucleotide
  modified_base 35: mod_base = OTHER; note = 2'-O-methyl ribonucleotide
  modified_base 36: mod_base = OTHER; note = 2'-O-methyl ribonucleotide
  modified_base 37: mod_base = OTHER; note = 2'-O-methyl ribonucleotide
  modified_base 38: mod_base = OTHER; note = 2'-O-methyl ribonucleotide
  modified_base 39: mod_base = OTHER; note = 2'-O-methyl ribonucleotide
  modified_base 40: mod_base = OTHER; note = 2'-O-methyl ribonucleotide
  modified_base 41: mod_base = OTHER; note = 2'-O-methyl ribonucleotide
  modified_base 42: mod_base = OTHER; note = 2'-O-methyl ribonucleotide
  modified_base 46: mod_base = OTHER; note = 2'-O-methyl ribonucleotide
  modified_base 48: mod_base = OTHER; note = 2'-O-methyl ribonucleotide
  modified_base 50: mod_base = OTHER; note = 2'-O-methyl ribonucleotide
  modified_base 52: mod_base = OTHER; note = 2'-O-methyl ribonucleotide
  modified_base 53: mod_base = OTHER; note = 2'-O-methyl ribonucleotide
  modified_base 54: mod_base = OTHER; note = 2'-O-methyl ribonucleotide
  modified_base 55: mod_base = OTHER; note = 2'-O-methyl ribonucleotide
  modified_base 56: mod_base = OTHER; note = 2'-O-methyl ribonucleotide
  modified_base 60: mod_base = OTHER; note = 2'-O-methyl ribonucleotide
  modified_base 61: mod_base = OTHER; note = 2'-O-methyl ribonucleotide
  modified_base 66: mod_base = OTHER; note = 2'-O-methyl ribonucleotide
  modified_base 67: mod_base = OTHER; note = 2'-O-methyl ribonucleotide
  modified_base 70: mod_base = OTHER; note = 2'-O-methyl ribonucleotide
  modified_base 71: mod_base = OTHER; note = 2'-O-methyl ribonucleotide
  modified_base 72: mod_base = OTHER; note = 2'-O-methyl ribonucleotide
  modified_base 73: mod_base = OTHER; note = 2'-O-methyl ribonucleotide
  modified_base 74: mod_base = OTHER; note = 2'-O-methyl ribonucleotide
  modified_base 75: mod_base = OTHER; note = 2'-O-methyl ribonucleotide
  modified_base 76: mod_base = OTHER; note = 2'-O-methyl ribonucleotide
  modified_base 77: mod_base = OTHER; note = 2'-O-methyl ribonucleotide
  modified_base 78: mod_base = OTHER; note = 2'-O-methyl ribonucleotide
  modified_base 79: mod_base = OTHER; note = 2'-O-methyl ribonucleotide
  modified_base 80: mod_base = OTHER; note = 2'-O-methyl ribonucleotide
  modified_base 81: mod_base = OTHER; note = 2'-O-methyl ribonucleotide
  modified_base 83: mod_base = OTHER; note = 2'-O-methyl ribonucleotide
  modified_base 84: mod_base = OTHER; note = 2'-O-methyl ribonucleotide
  modified_base 85: mod_base = OTHER; note = 2'-O-methyl ribonucleotide
  modified_base 86: mod_base = OTHER; note = 2'-O-methyl ribonucleotide
  modified_base 87: mod_base = OTHER; note = 2'-O-methyl ribonucleotide
  modified_base 88: mod_base = OTHER; note = 2'-O-methyl ribonucleotide
  modified_base 89: mod_base = OTHER; note = 2'-O-methyl ribonucleotide
  modified_base 90: mod_base = OTHER; note = 2'-O-methyl ribonucleotide
  modified_base 91: mod_base = OTHER; note = 2'-O-methyl ribonucleotide
  modified_base 92: mod_base = OTHER; note = 2'-O-methyl ribonucleotide
  modified_base 93: mod_base = OTHER; note = 2'-O-methyl ribonucleotide
  modified_base 94: mod_base = OTHER; note = 2'-O-methyl ribonucleotide
  modified_base 95: mod_base = OTHER; note = 2'-O-methyl ribonucleotide
  modified_base 96: mod_base = OTHER; note = 2'-O-methyl ribonucleotide
  modified_base 97: mod_base = OTHER; note = 2'-O-methyl ribonucleotide
  modified_base 98: mod_base = OTHER; note = 2'-O-methyl ribonucleotide
  modified_base 99: mod_base = OTHER; note = 2'-O-methyl ribonucleotide
  modified_base 100: mod_base = OTHER; note = 2'-O-methyl ribonucleotide
  modified_base 34: mod_base = OTHER; note = nebularine
  modified_base 57: mod_base = OTHER; note = nebularine
  modified_base 1..3: mod_base = OTHER; note = phosphorothioate linkage
  modified_base 98..100: mod_base = OTHER; note = phosphorothioate linkage
  misc_feature 1: note = RNA
  misc_feature 2: note = RNA
  misc_feature 3: note = RNA
  misc_feature 4: note = RNA
  misc_feature 5: note = RNA
  misc_feature 6: note = RNA
  misc_feature 7: note = RNA
  misc_feature 8: note = RNA
  misc_feature 9: note = RNA
  misc_feature 10: note = RNA
  misc_feature 11: note = RNA
  misc_feature 12: note = RNA
  misc_feature 13: note = RNA
  misc_feature 14: note = RNA
  misc_feature 15: note = RNA
  misc_feature 16: note = RNA
  misc_feature 17: note = RNA
  misc_feature 18: note = RNA
  misc_feature 19: note = RNA
  misc_feature 20: note = RNA
  misc_feature 21: note = RNA
  misc_feature 22: note = RNA
  misc_feature 23: note = RNA
  misc_feature 24: note = RNA
  misc_feature 25: note = RNA
  misc_feature 26: note = RNA
  misc_feature 27: note = RNA
  misc_feature 28: note = RNA
  misc_feature 29: note = RNA
  misc_feature 30: note = RNA
  misc_feature 31: note = RNA
  misc_feature 32: note = RNA
  misc_feature 33: note = RNA
  misc_feature 35: note = RNA
  misc_feature 36: note = RNA
  misc_feature 37: note = RNA
  misc_feature 38: note = RNA
  misc_feature 39: note = RNA
  misc_feature 40: note = RNA
  misc_feature 41: note = RNA
  misc_feature 42: note = RNA
  misc_feature 43: note = RNA
  misc_feature 44: note = RNA
  misc_feature 45: note = RNA
  misc_feature 46: note = RNA
  misc_feature 47: note = RNA
  misc_feature 48: note = RNA
  misc_feature 49: note = RNA
  misc_feature 50: note = RNA
  misc_feature 51: note = RNA
  misc_feature 52: note = RNA
  misc_feature 53: note = RNA
  misc_feature 54: note = RNA
  misc_feature 55: note = RNA
  misc_feature 56: note = RNA
  misc_feature 58: note = RNA
  misc_feature 59: note = RNA
  misc_feature 60: note = RNA
  misc_feature 61: note = RNA
  misc_feature 62: note = RNA
  misc_feature 63: note = RNA
  misc_feature 64: note = RNA
  misc_feature 65: note = RNA
  misc_feature 66: note = RNA
  misc_feature 67: note = RNA
  misc_feature 68: note = RNA
  misc_feature 69: note = RNA
  misc_feature 70: note = RNA
  misc_feature 71: note = RNA
  misc_feature 72: note = RNA
  misc_feature 73: note = RNA
  misc_feature 74: note = RNA
  misc_feature 75: note = RNA
  misc_feature 76: note = RNA
  misc_feature 77: note = RNA
  misc_feature 78: note = RNA
  misc_feature 79: note = RNA
  misc_feature 80: note = RNA
  misc_feature 81: note = RNA
  misc_feature 82: note = RNA
  misc_feature 83: note = RNA
  misc_feature 84: note = RNA
  misc_feature 85: note = RNA
  misc_feature 86: note = RNA
  misc_feature 87: note = RNA
  misc_feature 88: note = RNA
  misc_feature 89: note = RNA
  misc_feature 90: note = RNA
  misc_feature 91: note = RNA
  misc_feature 92: note = RNA
  misc_feature 93: note = RNA
  misc_feature 94: note = RNA
  misc_feature 95: note = RNA
  misc_feature 96: note = RNA
  misc_feature 97: note = RNA
  misc_feature 98: note = RNA
  misc_feature 99: note = RNA
  misc_feature 100: note = RNA
  misc_feature 34: note = DNA
  misc_feature 57: note = DNA

SEQ ID NO: 2105 - DNA, 100 bp, synthetic construct; identical to SEQ ID NO: 1946
  source 1..100: mol_type = other DNA
  modified_base 1: mod_base = OTHER; note = 2'-O-methyl ribonucleotide
  modified_base 2: mod_base = OTHER; note = 2'-O-methyl ribonucleotide
  modified_base 3: mod_base = OTHER; note = 2'-O-methyl ribonucleotide
  modified_base 21: mod_base = OTHER; note = 2'-O-methyl ribonucleotide
  modified_base 28: mod_base = OTHER; note = 2'-O-methyl ribonucleotide
  modified_base 29: mod_base = OTHER; note = 2'-O-methyl ribonucleotide
  modified_base 30: mod_base = OTHER; note = 2'-O-methyl ribonucleotide
  modified_base 31: mod_base = OTHER; note = 2'-O-methyl ribonucleotide
  modified_base 32: mod_base = OTHER; note = 2'-O-methyl ribonucleotide
  modified_base 33: mod_base = OTHER; note = 2'-O-methyl ribonucleotide
  modified_base 34: mod_base = OTHER; note = 2'-O-methyl ribonucleotide
  modified_base 35: mod_base = OTHER; note = 2'-O-methyl ribonucleotide
  modified_base 36: mod_base = OTHER; note = 2'-O-methyl ribonucleotide
  modified_base 37: mod_base = OTHER; note = 2'-O-methyl ribonucleotide
  modified_base 38: mod_base = OTHER; note = 2'-O-methyl ribonucleotide
  modified_base 39: mod_base = OTHER; note = 2'-O-methyl ribonucleotide
  modified_base 40: mod_base = OTHER; note = 2'-O-methyl ribonucleotide
  modified_base 41: mod_base = OTHER; note = 2'-O-methyl ribonucleotide
  modified_base 42: mod_base = OTHER; note = 2'-O-methyl ribonucleotide
  modified_base 46: mod_base = OTHER; note = 2'-O-methyl ribonucleotide
  modified_base 48: mod_base = OTHER; note = 2'-O-methyl ribonucleotide
  modified_base 50: mod_base = OTHER; note = 2'-O-methyl ribonucleotide
  modified_base 52: mod_base = OTHER; note = 2'-O-methyl ribonucleotide
  modified_base 53: mod_base = OTHER; note = 2'-O-methyl ribonucleotide
  modified_base 54: mod_base = OTHER; note = 2'-O-methyl ribonucleotide
  modified_base 55: mod_base = OTHER; note = 2'-O-methyl ribonucleotide
  modified_base 56: mod_base = OTHER; note = 2'-O-methyl ribonucleotide
  modified_base 60: mod_base = OTHER; note = 2'-O-methyl ribonucleotide
  modified_base 61: mod_base = OTHER; note = 2'-O-methyl ribonucleotide
  modified_base 66: mod_base = OTHER; note = 2'-O-methyl ribonucleotide
  modified_base 67: mod_base = OTHER; note = 2'-O-methyl ribonucleotide
  modified_base 70: mod_base = OTHER; note = 2'-O-methyl ribonucleotide
  modified_base 71: mod_base = OTHER; note = 2'-O-methyl ribonucleotide
  modified_base 72: mod_base = OTHER; note = 2'-O-methyl ribonucleotide
  modified_base 73: mod_base = OTHER; note = 2'-O-methyl ribonucleotide
  modified_base 74: mod_base = OTHER; note = 2'-O-methyl ribonucleotide
  modified_base 75: mod_base = OTHER; note = 2'-O-methyl ribonucleotide
  modified_base 76: mod_base = OTHER; note = 2'-O-methyl ribonucleotide
  modified_base 77: mod_base = OTHER; note = 2'-O-methyl ribonucleotide
  modified_base 78: mod_base = OTHER; note = 2'-O-methyl ribonucleotide
  modified_base 79: mod_base = OTHER; note = 2'-O-methyl ribonucleotide
  modified_base 80: mod_base = OTHER; note = 2'-O-methyl ribonucleotide
  modified_base 81: mod_base = OTHER; note = 2'-O-methyl ribonucleotide
  modified_base 83: mod_base = OTHER; note = 2'-O-methyl ribonucleotide
  modified_base 84: mod_base = OTHER; note = 2'-O-methyl ribonucleotide
  modified_base 85: mod_base = OTHER; note = 2'-O-methyl ribonucleotide
  modified_base 86: mod_base = OTHER; note = 2'-O-methyl ribonucleotide
  modified_base 87: mod_base = OTHER; note = 2'-O-methyl ribonucleotide
  modified_base 88: mod_base = OTHER; note = 2'-O-methyl ribonucleotide
  modified_base 89: mod_base = OTHER; note = 2'-O-methyl ribonucleotide
  modified_base 90: mod_base = OTHER; note = 2'-O-methyl ribonucleotide
  modified_base 91: mod_base = OTHER; note = 2'-O-methyl ribonucleotide
  modified_base 92: mod_base = OTHER; note = 2'-O-methyl ribonucleotide
  modified_base 93: mod_base = OTHER; note = 2'-O-methyl ribonucleotide
  modified_base 94: mod_base = OTHER; note = 2'-O-methyl ribonucleotide
  modified_base 95: mod_base = OTHER; note = 2'-O-methyl ribonucleotide
  modified_base 96: mod_base = OTHER; note = 2'-O-methyl ribonucleotide
  modified_base 97: mod_base = OTHER; note = 2'-O-methyl ribonucleotide
  modified_base 98: mod_base = OTHER; note = 2'-O-methyl ribonucleotide
  modified_base 99: mod_base = OTHER; note = 2'-O-methyl ribonucleotide
  modified_base 100: mod_base = OTHER; note = 2'-O-methyl ribonucleotide
  modified_base 57: mod_base = OTHER; note = nebularine
  modified_base 1..3: mod_base = OTHER; note = phosphorothioate linkage
  modified_base 98..100: mod_base = OTHER; note = phosphorothioate linkage
  misc_feature 1: note = RNA
  misc_feature 2: note = RNA
  misc_feature 3: note = RNA
  misc_feature 4: note = RNA
  misc_feature 5: note = RNA
  misc_feature 6: note = RNA
  misc_feature 7: note = RNA
  misc_feature 8: note = RNA
  misc_feature 9: note = RNA
  misc_feature 10: note = RNA
  misc_feature 11: note = RNA
  misc_feature 12: note = RNA
  misc_feature 13: note = RNA
  misc_feature 14: note = RNA
  misc_feature 15: note = RNA
  misc_feature 16: note = RNA
  misc_feature 17: note = RNA
  misc_feature 18: note = RNA
  misc_feature 19: note = RNA
  misc_feature 20: note = RNA
  misc_feature 21: note = RNA
  misc_feature 22: note = RNA
  misc_feature 23: note = RNA
  misc_feature 24: note = RNA
  misc_feature 25: note = RNA
  misc_feature 26: note = RNA
  misc_feature 27: note = RNA
  misc_feature 28: note = RNA
  misc_feature 29: note = RNA
  misc_feature 30: note = RNA
  misc_feature 31: note = RNA
  misc_feature 32: note = RNA
  misc_feature 33: note = RNA
  misc_feature 34: note = RNA
  misc_feature 35: note = RNA
  misc_feature 36: note = RNA
  misc_feature 37: note = RNA
  misc_feature 38: note = RNA
  misc_feature 39: note = RNA
  misc_feature 40: note = RNA
  misc_feature 41: note = RNA
  misc_feature 42: note = RNA
  misc_feature 43: note = RNA
  misc_feature 44: note = RNA
  misc_feature 45: note = RNA
  misc_feature 46: note = RNA
  misc_feature 47: note = RNA
  misc_feature 48: note = RNA
  misc_feature 49: note = RNA
  misc_feature 50: note = RNA
  misc_feature 51: note = RNA
  misc_feature 52: note = RNA
  misc_feature 53: note = RNA
  misc_feature 54: note = RNA
  misc_feature 55: note = RNA
  misc_feature 56: note = RNA
  misc_feature 58: note = RNA
  misc_feature 59: note = RNA
  misc_feature 60: note = RNA
  misc_feature 61: note = RNA
  misc_feature 62: note = RNA
  misc_feature 63: note = RNA
  misc_feature 64: note = RNA
  misc_feature 65: note = RNA
  misc_feature 66: note = RNA
  misc_feature 67: note = RNA
  misc_feature 68: note = RNA
  misc_feature 69: note = RNA
  misc_feature 70: note = RNA
  misc_feature 71: note = RNA
  misc_feature 72: note = RNA
  misc_feature 73: note = RNA
  misc_feature 74: note = RNA
  misc_feature 75: note = RNA
  misc_feature 76: note = RNA
  misc_feature 77: note = RNA
  misc_feature 78: note = RNA
  misc_feature 79: note = RNA
  misc_feature 80: note = RNA
  misc_feature 81: note = RNA
  misc_feature 82: note = RNA
  misc_feature 83: note = RNA
  misc_feature 84: note = RNA
  misc_feature 85: note = RNA
  misc_feature 86: note = RNA
  misc_feature 87: note = RNA
  misc_feature 88: note = RNA
  misc_feature 89: note = RNA
  misc_feature 90: note = RNA
  misc_feature 91: note = RNA
  misc_feature 92: note = RNA
  misc_feature 93: note = RNA
  misc_feature 94: note = RNA
  misc_feature 95: note = RNA
  misc_feature 96: note = RNA
  misc_feature 97: note = RNA
  misc_feature 98: note = RNA
  misc_feature 99: note = RNA
  misc_feature 100: note = RNA
  misc_feature 57: note = DNA

SEQ ID NO: 2106 - DNA, 100 bp, synthetic construct; identical to SEQ ID NO: 1947
  source 1..100: mol_type = other DNA
  modified_base 1: mod_base = OTHER; note = 2'-O-methyl ribonucleotide
  modified_base 2: mod_base = OTHER; note = 2'-O-methyl ribonucleotide
  modified_base 3: mod_base = OTHER; note = 2'-O-methyl ribonucleotide
  modified_base 21: mod_base = OTHER; note = 2'-O-methyl ribonucleotide
  modified_base 28: mod_base = OTHER; note = 2'-O-methyl ribonucleotide
  modified_base 29: mod_base = OTHER; note = 2'-O-methyl ribonucleotide
  modified_base 30: mod_base = OTHER; note = 2'-O-methyl ribonucleotide
  modified_base 31: mod_base = OTHER; note = 2'-O-methyl ribonucleotide
  modified_base 32: mod_base = OTHER; note = 2'-O-methyl ribonucleotide
  modified_base 33: mod_base = OTHER; note = 2'-O-methyl ribonucleotide
  modified_base 34: mod_base = OTHER; note = 2'-O-methyl ribonucleotide
  modified_base 35: mod_base = OTHER; note = 2'-O-methyl ribonucleotide
  modified_base 36: mod_base = OTHER; note = 2'-O-methyl ribonucleotide
  modified_base 37: mod_base = OTHER; note = 2'-O-methyl ribonucleotide
  modified_base 38: mod_base = OTHER; note = 2'-O-methyl ribonucleotide
  modified_base 39: mod_base = OTHER; note = 2'-O-methyl ribonucleotide
  modified_base 40: mod_base = OTHER; note = 2'-O-methyl ribonucleotide
  modified_base 41: mod_base = OTHER; note = 2'-O-methyl ribonucleotide
  modified_base 42: mod_base = OTHER; note = 2'-O-methyl ribonucleotide
  modified_base 46: mod_base = OTHER; note = 2'-O-methyl ribonucleotide
  modified_base 48: mod_base = OTHER; note = 2'-O-methyl ribonucleotide
  modified_base 50: mod_base = OTHER; note = 2'-O-methyl ribonucleotide
  modified_base 52: mod_base = OTHER; note = 2'-O-methyl ribonucleotide
  modified_base 53: mod_base = OTHER; note = 2'-O-methyl ribonucleotide
  modified_base 54: mod_base = OTHER; note = 2'-O-methyl ribonucleotide
  modified_base 55: mod_base = OTHER; note = 2'-O-methyl ribonucleotide
  modified_base 56: mod_base = OTHER; note = 2'-O-methyl ribonucleotide
  modified_base 57: mod_base = OTHER; note = 2'-O-methyl ribonucleotide
  modified_base 60: mod_base = OTHER; note = 2'-O-methyl ribonucleotide
  modified_base 61: mod_base = OTHER; note = 2'-O-methyl ribonucleotide
  modified_base 66: mod_base = OTHER; note = 2'-O-methyl ribonucleotide
  modified_base 67: mod_base = OTHER; note = 2'-O-methyl ribonucleotide
  modified_base 70: mod_base = OTHER; note = 2'-O-methyl ribonucleotide
  modified_base 71: mod_base = OTHER; note = 2'-O-methyl ribonucleotide
  modified_base 72: mod_base = OTHER; note = 2'-O-methyl ribonucleotide
  modified_base 73: mod_base = OTHER; note = 2'-O-methyl ribonucleotide
  modified_base 74: mod_base = OTHER; note = 2'-O-methyl ribonucleotide
  modified_base 75: mod_base = OTHER; note = 2'-O-methyl ribonucleotide
  modified_base 76: mod_base = OTHER; note = 2'-O-methyl ribonucleotide
  modified_base 77: mod_base = OTHER; note = 2'-O-methyl ribonucleotide
  modified_base 78: mod_base = OTHER; note = 2'-O-methyl ribonucleotide
  modified_base 79: mod_base = OTHER; note = 2'-O-methyl ribonucleotide
  modified_base 80: mod_base = OTHER; note = 2'-O-methyl ribonucleotide
  modified_base 81: mod_base = OTHER; note = 2'-O-methyl ribonucleotide
  modified_base 83: mod_base = OTHER; note = 2'-O-methyl ribonucleotide
  modified_base 84: mod_base = OTHER; note = 2'-O-methyl ribonucleotide
  modified_base 85: mod_base = OTHER; note = 2'-O-methyl ribonucleotide
  modified_base 86: mod_base = OTHER; note = 2'-O-methyl ribonucleotide
  modified_base 87: mod_base = OTHER; note = 2'-O-methyl ribonucleotide
  modified_base 88: mod_base = OTHER; note = 2'-O-methyl ribonucleotide
  modified_base 89: mod_base = OTHER; note = 2'-O-methyl ribonucleotide
  modified_base 90: mod_base = OTHER; note = 2'-O-methyl ribonucleotide
  modified_base 91: mod_base = OTHER; note = 2'-O-methyl ribonucleotide
  modified_base 92: mod_base = OTHER; note = 2'-O-methyl ribonucleotide
  modified_base 93: mod_base = OTHER; note = 2'-O-methyl ribonucleotide
  modified_base 94: mod_base = OTHER; note = 2'-O-methyl ribonucleotide
  modified_base 95: mod_base = OTHER; note = 2'-O-methyl ribonucleotide
  modified_base 96: mod_base = OTHER; note = 2'-O-methyl ribonucleotide
  modified_base 97: mod_base = OTHER; note = 2'-O-methyl ribonucleotide
  modified_base 98: mod_base = OTHER; note = 2'-O-methyl ribonucleotide
  modified_base 99: mod_base = OTHER; note = 2'-O-methyl ribonucleotide
  modified_base 100: mod_base = OTHER; note = 2'-O-methyl ribonucleotide
  modified_base 65: mod_base = OTHER; note = nebularine
  modified_base 1..3: mod_base = OTHER; note = phosphorothioate linkage
  modified_base 98..100: mod_base = OTHER; note = phosphorothioate linkage
  misc_feature 1: note = RNA
  misc_feature 2: note = RNA
  misc_feature 3: note = RNA
  misc_feature 4: note = RNA
  misc_feature 5: note = RNA
  misc_feature 6: note = RNA
  misc_feature 7: note = RNA
  misc_feature 8: note = RNA
  misc_feature 9: note = RNA
  misc_feature 10: note = RNA
  misc_feature 11: note = RNA
  misc_feature 12: note = RNA
  misc_feature 13: note = RNA
  misc_feature 14: note = RNA
  misc_feature 15: note = RNA
  misc_feature 16: note = RNA
  misc_feature 17: note = RNA
  misc_feature 18: note = RNA
  misc_feature 19: note = RNA
  misc_feature 20: note = RNA
  misc_feature 21: note = RNA
  misc_feature 22: note = RNA
  misc_feature 23: note = RNA
  misc_feature 24: note = RNA
  misc_feature 25: note = RNA
  misc_feature 26: note = RNA
  misc_feature 27: note = RNA
  misc_feature 28: note = RNA
  misc_feature 29: note = RNA
  misc_feature 30: note = RNA
  misc_feature 31: note = RNA
  misc_feature 32: note = RNA
  misc_feature 33: note = RNA
  misc_feature 34: note = RNA
  misc_feature 35: note = RNA
  misc_feature 36: note = RNA
  misc_feature 37: note = RNA
  misc_feature 38: note = RNA
  misc_feature 39: note = RNA
  misc_feature 40: note = RNA
  misc_feature 41: note = RNA
  misc_feature 42: note = RNA
  misc_feature 43: note = RNA
  misc_feature 44: note = RNA
  misc_feature 45: note = RNA
  misc_feature 46: note = RNA
  misc_feature 47: note = RNA
  misc_feature 48: note = RNA
  misc_feature 49: note = RNA
  misc_feature 50: note = RNA
  misc_feature 51: note = RNA
  misc_feature 52: note = RNA
  misc_feature 53: note = RNA
  misc_feature 54: note = RNA
  misc_feature 55: note = RNA
  misc_feature 56: note = RNA
  misc_feature 57: note = RNA
  misc_feature 58: note = RNA
  misc_feature 59: note = RNA
  misc_feature 60: note = RNA
  misc_feature 61: note = RNA
  misc_feature 62: note = RNA
  misc_feature 63: note = RNA
  misc_feature 64: note = RNA
  misc_feature 66: note = RNA
  misc_feature 67: note = RNA
  misc_feature 68: note = RNA
  misc_feature 69: note = RNA
  misc_feature 70: note = RNA
  misc_feature 71: note = RNA
  misc_feature 72: note = RNA
  misc_feature 73: note = RNA
  misc_feature 74: note = RNA
  misc_feature 75: note = RNA
  misc_feature 76: note = RNA
  misc_feature 77: note = RNA
  misc_feature 78: note = RNA
  misc_feature 79: note = RNA
  misc_feature 80: note = RNA
  misc_feature 81: note = RNA
  misc_feature 82: note = RNA
  misc_feature 83: note = RNA
  misc_feature 84: note = RNA
  misc_feature 85: note = RNA
  misc_feature 86: note = RNA
  misc_feature 87: note = RNA
  misc_feature 88: note = RNA
  misc_feature 89: note = RNA
  misc_feature 90: note = RNA
  misc_feature 91: note = RNA
  misc_feature 92: note = RNA
  misc_feature 93: note = RNA
  misc_feature 94: note = RNA
  misc_feature 95: note = RNA
  misc_feature 96: note = RNA
  misc_feature 97: note = RNA
  misc_feature 98: note = RNA
  misc_feature 99: note = RNA
  misc_feature 100: note = RNA
  misc_feature 65: note = DNA

SEQ ID NO: 2107 - DNA, 100 bp, synthetic construct; identical to SEQ ID NO: 1948
  source 1..100: mol_type = other DNA
  modified_base 1: mod_base = OTHER; note = 2'-O-methyl ribonucleotide
  modified_base 2: mod_base = OTHER; note = 2'-O-methyl ribonucleotide
  modified_base 3: mod_base = OTHER; note = 2'-O-methyl ribonucleotide
  modified_base 21: mod_base = OTHER; note = 2'-O-methyl ribonucleotide
  modified_base 28: mod_base = OTHER; note = 2'-O-methyl ribonucleotide
  modified_base 29: mod_base = OTHER; note = 2'-O-methyl ribonucleotide
  modified_base 30: mod_base = OTHER; note = 2'-O-methyl ribonucleotide
  modified_base 31: mod_base = OTHER; note = 2'-O-methyl ribonucleotide
  modified_base 32: mod_base = OTHER; note = 2'-O-methyl ribonucleotide
  modified_base 33: mod_base = OTHER; note = 2'-O-methyl ribonucleotide
  modified_base 35: mod_base = OTHER; note = 2'-O-methyl ribonucleotide
  modified_base 36: mod_base = OTHER; note = 2'-O-methyl ribonucleotide
  modified_base 37: mod_base = OTHER; note = 2'-O-methyl ribonucleotide
  modified_base 38: mod_base = OTHER; note = 2'-O-methyl ribonucleotide
  modified_base 39: mod_base = OTHER; note = 2'-O-methyl ribonucleotide
  modified_base 40: mod_base = OTHER; note = 2'-O-methyl ribonucleotide
  modified_base 41: mod_base = OTHER; note = 2'-O-methyl ribonucleotide
  modified_base 42: mod_base = OTHER; note = 2'-O-methyl ribonucleotide
  modified_base 46: mod_base = OTHER; note = 2'-O-methyl ribonucleotide
  modified_base 48: mod_base = OTHER; note = 2'-O-methyl ribonucleotide
  modified_base 50: mod_base = OTHER; note = 2'-O-methyl ribonucleotide
  modified_base 52: mod_base = OTHER; note = 2'-O-methyl ribonucleotide
  modified_base 53: mod_base = OTHER; note = 2'-O-methyl ribonucleotide
  modified_base 54: mod_base = OTHER; note = 2'-O-methyl ribonucleotide
  modified_base 55: mod_base = OTHER; note = 2'-O-methyl ribonucleotide
  modified_base 56: mod_base = OTHER; note = 2'-O-methyl ribonucleotide
  modified_base 60: mod_base = OTHER; note = 2'-O-methyl ribonucleotide
  modified_base 61: mod_base = OTHER; note = 2'-O-methyl ribonucleotide
  modified_base 66: mod_base = OTHER; note = 2'-O-methyl ribonucleotide
  modified_base 67: mod_base = OTHER; note = 2'-O-methyl ribonucleotide
  modified_base 70: mod_base = OTHER; note = 2'-O-methyl ribonucleotide
  modified_base 71: mod_base = OTHER; note = 2'-O-methyl ribonucleotide
  modified_base 72: mod_base = OTHER; note = 2'-O-methyl ribonucleotide
  modified_base 73: mod_base = OTHER; note = 2'-O-methyl ribonucleotide
  modified_base 74: mod_base = OTHER; note = 2'-O-methyl ribonucleotide
  modified_base 75: mod_base = OTHER; note = 2'-O-methyl ribonucleotide
  modified_base 76: mod_base = OTHER; note = 2'-O-methyl ribonucleotide
  modified_base 77: mod_base = OTHER; note = 2'-O-methyl ribonucleotide
  modified_base 78: mod_base = OTHER; note = 2'-O-methyl ribonucleotide
  modified_base 79: mod_base = OTHER; note = 2'-O-methyl ribonucleotide
  modified_base 80: mod_base = OTHER; note = 2'-O-methyl ribonucleotide
  modified_base 81: mod_base = OTHER; note = 2'-O-methyl ribonucleotide
  modified_base 83: mod_base = OTHER; note = 2'-O-methyl ribonucleotide
  modified_base 84: mod_base = OTHER; note = 2'-O-methyl ribonucleotide
  modified_base 85: mod_base = OTHER; note = 2'-O-methyl ribonucleotide
  modified_base 86: mod_base = OTHER; note = 2'-O-methyl ribonucleotide
  modified_base 87: mod_base = OTHER; note = 2'-O-methyl ribonucleotide
  modified_base 88: mod_base = OTHER; note = 2'-O-methyl ribonucleotide
  modified_base 89: mod_base = OTHER; note = 2'-O-methyl ribonucleotide
  modified_base 90: mod_base = OTHER; note = 2'-O-methyl ribonucleotide
  modified_base 91: mod_base = OTHER; note = 2'-O-methyl ribonucleotide
  modified_base 92: mod_base = OTHER; note = 2'-O-methyl ribonucleotide
  modified_base 93: mod_base = OTHER; note = 2'-O-methyl ribonucleotide
  modified_base 94: mod_base = OTHER; note = 2'-O-methyl ribonucleotide
  modified_base 95: mod_base = OTHER; note = 2'-O-methyl ribonucleotide
  modified_base 96: mod_base = OTHER; note = 2'-O-methyl ribonucleotide
  modified_base 97: mod_base = OTHER; note = 2'-O-methyl ribonucleotide
  modified_base 98: mod_base = OTHER; note = 2'-O-methyl ribonucleotide
  modified_base 99: mod_base = OTHER; note = 2'-O-methyl ribonucleotide
  modified_base 100: mod_base = OTHER; note = 2'-O-methyl ribonucleotide
  modified_base 34: mod_base = OTHER; note = nebularine
  modified_base 57: mod_base = OTHER; note = nebularine
  modified_base 65: mod_base = OTHER; note = nebularine
  modified_base 1..3: mod_base = OTHER; note = phosphorothioate linkage
  modified_base 98..100: mod_base = OTHER; note = phosphorothioate linkage
  misc_feature 1: note = RNA
  misc_feature 2: note = RNA
  misc_feature 3: note = RNA
  misc_feature 4: note = RNA
  misc_feature 5: note = RNA
  misc_feature 6: note = RNA
  misc_feature 7: note = RNA
  misc_feature 8: note = RNA
  misc_feature 9: note = RNA
  misc_feature 10: note = RNA
  misc_feature 11: note = RNA
  misc_feature 12: note = RNA
  misc_feature 13: note = RNA
  misc_feature 14: note = RNA
  misc_feature 15: note = RNA
  misc_feature 16: note = RNA
  misc_feature 17: note = RNA
  misc_feature 18: note = RNA
  misc_feature 19: note = RNA
  misc_feature 20: note = RNA
  misc_feature 21: note = RNA
  misc_feature 22: note = RNA
  misc_feature 23: note = RNA
  misc_feature 24: note = RNA
  misc_feature 25: note = RNA
  misc_feature 26: note = RNA
  misc_feature 27: note = RNA
  misc_feature 28: note = RNA
  misc_feature 29: note = RNA
  misc_feature 30: note = RNA
  misc_feature 31: note = RNA
  misc_feature 32: note = RNA
  misc_feature 33: note = RNA
  misc_feature 35: note = RNA
  misc_feature 36: note = RNA
  misc_feature 37: note = RNA
  misc_feature 38: note = RNA
  misc_feature 39: note = RNA
  misc_feature 40: note = RNA
  misc_feature 41: note = RNA
  misc_feature 42: note = RNA
  misc_feature 43: note = RNA
  misc_feature 44: note = RNA
  misc_feature 45: note = RNA
  misc_feature 46: note = RNA
  misc_feature 47: note = RNA
  misc_feature 48: note = RNA
  misc_feature 49: note = RNA
  misc_feature 50: note = RNA
  misc_feature 51: note = RNA
  misc_feature 52: note = RNA
  misc_feature 53: note = RNA
  misc_feature 54: note = RNA
  misc_feature 55: note = RNA
  misc_feature 56: note = RNA
  misc_feature 58: note = RNA
  misc_feature 59: note = RNA
  misc_feature 60: note = RNA
  misc_feature 61: note = RNA
  misc_feature 62: note = RNA
  misc_feature 63: note = RNA
  misc_feature 64: note = RNA
  misc_feature 66: note = RNA
  misc_feature 67: note = RNA
  misc_feature 68: note = RNA
  misc_feature 69: note = RNA
  misc_feature 70: note = RNA
  misc_feature 71: note = RNA
  misc_feature 72: note = RNA
  misc_feature 73: note = RNA
  misc_feature 74: note = RNA
  misc_feature 75: note = RNA
  misc_feature 76: note = RNA
  misc_feature 77: note = RNA
  misc_feature 78: note = RNA
  misc_feature 79: note = RNA
  misc_feature 80: note = RNA
  misc_feature 81: note = RNA
  misc_feature 82: note = RNA
  misc_feature 83: note = RNA
  misc_feature 84: note = RNA
  misc_feature 85: note = RNA
  misc_feature 86: note = RNA
  misc_feature 87: note = RNA
  misc_feature 88: note = RNA
  misc_feature 89: note = RNA
  misc_feature 90: note = RNA
  misc_feature 91: note = RNA
  misc_feature 92: note = RNA
  misc_feature 93: note = RNA
  misc_feature 94: note = RNA
  misc_feature 95: note = RNA
  misc_feature 96: note = RNA
  misc_feature 97: note = RNA
  misc_feature 98: note = RNA
  misc_feature 99: note = RNA
  misc_feature 100: note = RNA
  misc_feature 34: note = DNA
  misc_feature 57: note = DNA
  misc_feature 65: note = DNA

SEQ ID NO: 2108 - DNA, 100 bp, synthetic construct; identical to SEQ ID NO: 1949
  source 1..100: mol_type = other DNA
  modified_base 1: mod_base = OTHER; note = 2'-O-methyl ribonucleotide
  modified_base 2: mod_base = OTHER; note = 2'-O-methyl ribonucleotide
  modified_base 3: mod_base = OTHER; note = 2'-O-methyl ribonucleotide
  modified_base 21: mod_base = OTHER; note = 2'-O-methyl ribonucleotide
  modified_base 29: mod_base = OTHER; note = 2'-O-methyl ribonucleotide
  modified_base 30: mod_base = OTHER; note = 2'-O-methyl ribonucleotide
  modified_base 31: mod_base = OTHER; note = 2'-O-methyl ribonucleotide
  modified_base 32: mod_base = OTHER; note = 2'-O-methyl ribonucleotide
  modified_base 33: mod_base = OTHER; note = 2'-O-methyl ribonucleotide
  modified_base 35: mod_base = OTHER; note = 2'-O-methyl ribonucleotide
  modified_base 36: mod_base = OTHER; note = 2'-O-methyl ribonucleotide
  modified_base 37: mod_base = OTHER; note = 2'-O-methyl ribonucleotide
  modified_base 38: mod_base = OTHER; note = 2'-O-methyl ribonucleotide
  modified_base 39: mod_base = OTHER; note = 2'-O-methyl ribonucleotide
  modified_base 40: mod_base = OTHER; note = 2'-O-methyl ribonucleotide
  modified_base 41: mod_base = OTHER; note = 2'-O-methyl ribonucleotide
  modified_base 46: mod_base = OTHER; note = 2'-O-methyl ribonucleotide
  modified_base 48: mod_base = OTHER; note = 2'-O-methyl ribonucleotide
  modified_base 50: mod_base = OTHER; note = 2'-O-methyl ribonucleotide
  modified_base 52: mod_base = OTHER; note = 2'-O-methyl ribonucleotide
  modified_base 53: mod_base = OTHER; note = 2'-O-methyl ribonucleotide
  modified_base 54: mod_base = OTHER; note = 2'-O-methyl ribonucleotide
  modified_base 55: mod_base = OTHER; note = 2'-O-methyl ribonucleotide
  modified_base 56: mod_base = OTHER; note = 2'-O-methyl ribonucleotide
  modified_base 60: mod_base = OTHER; note = 2'-O-methyl ribonucleotide
  modified_base 61: mod_base = OTHER; note = 2'-O-methyl ribonucleotide
  modified_base 66: mod_base = OTHER; note = 2'-O-methyl ribonucleotide
  modified_base 67: mod_base = OTHER; note = 2'-O-methyl ribonucleotide
  modified_base 70: mod_base = OTHER; note = 2'-O-methyl ribonucleotide
  modified_base 71: mod_base = OTHER; note = 2'-O-methyl ribonucleotide
  modified_base 72: mod_base = OTHER; note = 2'-O-methyl ribonucleotide
  modified_base 73: mod_base = OTHER; note = 2'-O-methyl ribonucleotide
  modified_base 74: mod_base = OTHER; note = 2'-O-methyl ribonucleotide
  modified_base 75: mod_base = OTHER; note = 2'-O-methyl ribonucleotide
  modified_base 76: mod_base = OTHER; note = 2'-O-methyl ribonucleotide
  modified_base 77: mod_base = OTHER; note = 2'-O-methyl ribonucleotide
  modified_base 78: mod_base = OTHER; note = 2'-O-methyl ribonucleotide
  modified_base 79: mod_base = OTHER; note = 2'-O-methyl ribonucleotide
  modified_base 80: mod_base = OTHER; note = 2'-O-methyl ribonucleotide
  modified_base 81: mod_base = OTHER; note = 2'-O-methyl ribonucleotide
  modified_base 83: mod_base = OTHER; note = 2'-O-methyl ribonucleotide
  modified_base 84: mod_base = OTHER; note = 2'-O-methyl ribonucleotide
  modified_base 85: mod_base = OTHER; note = 2'-O-methyl ribonucleotide
  modified_base 86: mod_base = OTHER; note = 2'-O-methyl ribonucleotide
  modified_base 87: mod_base = OTHER; note = 2'-O-methyl ribonucleotide
  modified_base 88: mod_base = OTHER; note = 2'-O-methyl ribonucleotide
  modified_base 89: mod_base = OTHER; note = 2'-O-methyl ribonucleotide
  modified_base 90: mod_base = OTHER; note = 2'-O-methyl ribonucleotide
  modified_base 91: mod_base = OTHER; note = 2'-O-methyl ribonucleotide
  modified_base 92: mod_base = OTHER; note = 2'-O-methyl ribonucleotide
  modified_base 93: mod_base = OTHER; note = 2'-O-methyl ribonucleotide
  modified_base 94: mod_base = OTHER; note = 2'-O-methyl ribonucleotide
  modified_base 95: mod_base = OTHER; note = 2'-O-methyl ribonucleotide
  modified_base 96: mod_base = OTHER; note = 2'-O-methyl ribonucleotide
  modified_base 97: mod_base = OTHER; note = 2'-O-methyl ribonucleotide
  modified_base 98: mod_base = OTHER; note = 2'-O-methyl ribonucleotide
  modified_base 99: mod_base = OTHER; note = 2'-O-methyl ribonucleotide
  modified_base 100: mod_base = OTHER; note = 2'-O-methyl ribonucleotide
  modified_base 28: mod_base = OTHER; note = nebularine
  modified_base 34: mod_base = OTHER; note = nebularine
  modified_base 42: mod_base = OTHER; note = nebularine
  modified_base 57: mod_base = OTHER; note = nebularine
  modified_base 65: mod_base = OTHER; note = nebularine
  modified_base 1..3: mod_base = OTHER; note = phosphorothioate linkage
  modified_base 98..100: mod_base = OTHER; note = phosphorothioate linkage
  misc_feature 1: note = RNA
  misc_feature 2: note = RNA
  misc_feature 3: note = RNA
  misc_feature 4: note = RNA
  misc_feature 5: note = RNA
  misc_feature 6: note = RNA
  misc_feature 7: note = RNA
  misc_feature 8: note = RNA
  misc_feature 9: note = RNA
  misc_feature 10: note = RNA
  misc_feature 11: note = RNA
  misc_feature 12: note = RNA
  misc_feature 13: note = RNA
  misc_feature 14: note = RNA
  misc_feature 15: note = RNA
  misc_feature 16: note = RNA
  misc_feature 17: note = RNA
  misc_feature 18: note = RNA
  misc_feature 19: note = RNA
  misc_feature 20: note = RNA
  misc_feature 21: note = RNA
  misc_feature 22: note = RNA
  misc_feature 23: note = RNA
  misc_feature 24: note = RNA
  misc_feature 25: note = RNA
  misc_feature 26: note = RNA
  misc_feature 27: note = RNA
  misc_feature 29: note = RNA
  misc_feature 30: note = RNA
  misc_feature 31: note = RNA
  misc_feature 32: note = RNA
  misc_feature 33: note = RNA
  misc_feature 35: note = RNA
  misc_feature 36: note = RNA
  misc_feature 37: note = RNA
  misc_feature 38: note = RNA
  misc_feature 39: note = RNA
  misc_feature 40: note = RNA
  misc_feature 41: note = RNA
  misc_feature 43: note = RNA
  misc_feature 44: note = RNA
  misc_feature 45: note = RNA
  misc_feature 46: note = RNA
  misc_feature 47: note = RNA
  misc_feature 48: note = RNA
  misc_feature 49: note = RNA
  misc_feature 50: note = RNA
  misc_feature 51: note = RNA
  misc_feature 52: note = RNA
  misc_feature 53: note = RNA
  misc_feature 54: note = RNA
  misc_feature 55: note = RNA
  misc_feature 56: note = RNA
  misc_feature 58: note = RNA
  misc_feature 59: note = RNA
  misc_feature 60: note = RNA
  misc_feature 61: note = RNA
  misc_feature 62: note = RNA
  misc_feature 63: note = RNA
  misc_feature 64: note = RNA
  misc_feature 66: note = RNA
  misc_feature 67: note = RNA
  misc_feature 68: note = RNA
  misc_feature 69: note = RNA
  misc_feature 70: note = RNA
  misc_feature 71: note = RNA
  misc_feature 72: note = RNA
  misc_feature 73: note = RNA
  misc_feature 74: note = RNA
  misc_feature 75: note = RNA
  misc_feature 76: note = RNA
  misc_feature 77: note = RNA
  misc_feature 78: note = RNA
  misc_feature 79: note = RNA
  misc_feature 80: note = RNA
  misc_feature 81: note = RNA
  misc_feature 82: note = RNA
  misc_feature 83: note = RNA
  misc_feature 84: note = RNA
  misc_feature 85: note = RNA
  misc_feature 86: note = RNA
  misc_feature 87: note = RNA
  misc_feature 88: note = RNA
  misc_feature 89: note = RNA
  misc_feature 90: note = RNA
  misc_feature 91: note = RNA
  misc_feature 92: note = RNA
  misc_feature 93: note = RNA
  misc_feature 94: note = RNA
  misc_feature 95: note = RNA
  misc_feature 96: note = RNA
  misc_feature 97: note = RNA
  misc_feature 98: note = RNA
  misc_feature 99: note = RNA
  misc_feature 100: note = RNA
  misc_feature 28: note = DNA
  misc_feature 34: note = DNA
  misc_feature 42: note = DNA
  misc_feature 57: note = DNA
  misc_feature 65: note = DNA

SEQ ID NO: 2109 - RNA, 100 nt, synthetic construct
  source 1..100: mol_type = other RNA
  modified_base 1: mod_base = OTHER; note = 2'-O-methyl ribonucleotide
  modified_base 2: mod_base = OTHER; note = 2'-O-methyl ribonucleotide
  modified_base 3: mod_base = OTHER; note = 2'-O-methyl ribonucleotide
  modified_base 29: mod_base = OTHER; note = 2'-O-methyl ribonucleotide
  modified_base 30: mod_base = OTHER; note = 2'-O-methyl ribonucleotide
  modified_base 31: mod_base = OTHER; note = 2'-O-methyl ribonucleotide
  modified_base 32: mod_base = OTHER; note = 2'-O-methyl ribonucleotide
  modified_base 33: mod_base = OTHER; note = 2'-O-methyl ribonucleotide
  modified_base 34: mod_base = OTHER; note = 2'-O-methyl ribonucleotide
  modified_base 35: mod_base = OTHER; note = 2'-O-methyl ribonucleotide
  modified_base 36: mod_base = OTHER; note = 2'-O-methyl ribonucleotide
  modified_base 37: mod_base = OTHER; note = 2'-O-methyl ribonucleotide
  modified_base 38: mod_base = OTHER; note = 2'-O-methyl ribonucleotide
  modified_base 39: mod_base = OTHER; note = 2'-O-methyl ribonucleotide
  modified_base 40: mod_base = OTHER; note = 2'-O-methyl ribonucleotide
  modified_base 69: mod_base = OTHER; note = 2'-O-methyl ribonucleotide
  modified_base 70: mod_base = OTHER; note = 2'-O-methyl ribonucleotide
  modified_base 71: mod_base = OTHER; note = 2'-O-methyl ribonucleotide
  modified_base 72: mod_base = OTHER; note = 2'-O-methyl ribonucleotide
  modified_base 73: mod_base = OTHER; note = 2'-O-methyl ribonucleotide
  modified_base 74: mod_base = OTHER; note = 2'-O-methyl ribonucleotide
  modified_base 75: mod_base = OTHER; note = 2'-O-methyl ribonucleotide
  modified_base 76: mod_base = OTHER; note = 2'-O-methyl ribonucleotide
  modified_base 77: mod_base = OTHER; note = 2'-O-methyl ribonucleotide
  modified_base 78: mod_base = OTHER; note = 2'-O-methyl ribonucleotide
  modified_base 79: mod_base = OTHER; note = 2'-O-methyl ribonucleotide
  modified_base 80: mod_base = OTHER; note = 2'-O-methyl ribonucleotide
  modified_base 81: mod_base = OTHER; note = 2'-O-methyl ribonucleotide
  modified_base 82: mod_base = OTHER; note = 2'-O-methyl ribonucleotide
  modified_base 83: mod_base = OTHER; note = 2'-O-methyl ribonucleotide
  modified_base 84: mod_base = OTHER; note = 2'-O-methyl ribonucleotide
  modified_base 85: mod_base = OTHER; note = 2'-O-methyl ribonucleotide
  modified_base 86: mod_base = OTHER; note = 2'-O-methyl ribonucleotide
  modified_base 87: mod_base = OTHER; note = 2'-O-methyl ribonucleotide
  modified_base 88: mod_base = OTHER; note = 2'-O-methyl ribonucleotide
  modified_base 89: mod_base = OTHER; note = 2'-O-methyl ribonucleotide
  modified_base 90: mod_base = OTHER; note = 2'-O-methyl ribonucleotide
  modified_base 91: mod_base = OTHER; note = 2'-O-methyl ribonucleotide
  modified_base 92: mod_base = OTHER; note = 2'-O-methyl ribonucleotide
  modified_base 93: mod_base = OTHER; note = 2'-O-methyl ribonucleotide
  modified_base 94: mod_base = OTHER; note = 2'-O-methyl ribonucleotide
  modified_base 95: mod_base = OTHER; note = 2'-O-methyl ribonucleotide
  modified_base 96: mod_base = OTHER; note = 2'-O-methyl ribonucleotide
  modified_base 97: mod_base = OTHER; note = 2'-O-methyl ribonucleotide
  modified_base 98: mod_base = OTHER; note = 2'-O-methyl ribonucleotide
  modified_base 99: mod_base = OTHER; note = 2'-O-methyl ribonucleotide
  modified_base 100: mod_base = OTHER; note = 2'-O-methyl ribonucleotide
  modified_base 98: mod_base = OTHER; note = nebularine
  modified_base 99: mod_base = OTHER; note = nebularine
  modified_base 100: mod_base = OTHER; note = nebularine
  modified_base 1..4: mod_base = OTHER; note = phosphorothioate linkage
  modified_base 97..100: mod_base = OTHER; note = phosphorothioate linkage
caggttccatgggatgctctgttttagagctagaaatagcaagttaaaataaggctagtccgttatcaacttgaaaaagtggcaccgagtcggtgctnnn

SEQ ID NO: 2110 - RNA, 100 nt, synthetic construct; identical to SEQ ID NO: 2109
  source 1..100: mol_type = other RNA
  modified_base 1: mod_base = OTHER; note = 2'-O-methyl ribonucleotide
  modified_base 2: mod_base = OTHER; note = 2'-O-methyl ribonucleotide
  modified_base 3: mod_base = OTHER; note = 2'-O-methyl ribonucleotide
  modified_base 21: mod_base = OTHER; note = 2'-O-methyl ribonucleotide
  modified_base 28: mod_base = OTHER; note = 2'-O-methyl ribonucleotide
  modified_base 29: mod_base = OTHER; note = 2'-O-methyl ribonucleotide
  modified_base 30: mod_base = OTHER; note = 2'-O-methyl ribonucleotide
  modified_base 31: mod_base = OTHER; note = 2'-O-methyl ribonucleotide
  modified_base 32: mod_base = OTHER; note = 2'-O-methyl ribonucleotide
  modified_base 34: mod_base = OTHER; note = 2'-O-methyl ribonucleotide
  modified_base 35: mod_base = OTHER; note = 2'-O-methyl ribonucleotide
  modified_base 36: mod_base = OTHER; note = 2'-O-methyl ribonucleotide
  modified_base 37: mod_base = OTHER; note = 2'-O-methyl ribonucleotide
  modified_base 38: mod_base = OTHER; note = 2'-O-methyl ribonucleotide
  modified_base 39: mod_base = OTHER; note = 2'-O-methyl ribonucleotide
  modified_base 40: mod_base = OTHER; note = 2'-O-methyl ribonucleotide
  modified_base 41: mod_base = OTHER; note = 2'-O-methyl ribonucleotide
  modified_base 42: mod_base = OTHER; note = 2'-O-methyl ribonucleotide
  modified_base 46: mod_base = OTHER; note = 2'-O-methyl ribonucleotide
  modified_base 48: mod_base = OTHER; note = 2'-O-methyl ribonucleotide
  modified_base 50: mod_base = OTHER; note = 2'-O-methyl ribonucleotide
  modified_base 52: mod_base = OTHER; note = 2'-O-methyl ribonucleotide
  modified_base 53: mod_base = OTHER; note = 2'-O-methyl ribonucleotide
  modified_base 54: mod_base = OTHER; note = 2'-O-methyl ribonucleotide
  modified_base 57: mod_base = OTHER; note = 2'-O-methyl ribonucleotide
  modified_base 61: mod_base = OTHER; note = 2'-O-methyl ribonucleotide
  modified_base 66: mod_base = OTHER; note = 2'-O-methyl ribonucleotide
  modified_base 67: mod_base = OTHER; note = 2'-O-methyl ribonucleotide
  modified_base 70: mod_base = OTHER; note = 2'-O-methyl ribonucleotide
  modified_base 71: mod_base = OTHER; note = 2'-O-methyl ribonucleotide
  modified_base 72: mod_base = OTHER; note = 2'-O-methyl ribonucleotide
  modified_base 74: mod_base = OTHER; note = 2'-O-methyl ribonucleotide
  modified_base 75: mod_base = OTHER; note = 2'-O-methyl ribonucleotide
  modified_base 76: mod_base = OTHER; note = 2'-O-methyl ribonucleotide
  modified_base 77: mod_base = OTHER; note = 2'-O-methyl ribonucleotide
  modified_base 78: mod_base = OTHER; note = 2'-O-methyl ribonucleotide
  modified_base 79: mod_base = OTHER; note = 2'-O-methyl ribonucleotide
  modified_base 80: mod_base = OTHER; note = 2'-O-methyl ribonucleotide
  modified_base 82: mod_base = OTHER; note = 2'-O-methyl ribonucleotide
  modified_base 83: mod_base = OTHER; note = 2'-O-methyl ribonucleotide
  modified_base 84: mod_base = OTHER; note = 2'-O-methyl ribonucleotide
  modified_base 85: mod_base = OTHER; note = 2'-O-methyl ribonucleotide
  modified_base 86: mod_base = OTHER; note = 2'-O-methyl ribonucleotide
  modified_base 87: mod_base = OTHER; note = 2'-O-methyl ribonucleotide
  modified_base 89: mod_base = OTHER; note = 2'-O-methyl ribonucleotide
  modified_base 92: mod_base = OTHER; note = 2'-O-methyl ribonucleotide
  modified_base 93: mod_base = OTHER; note = 2'-O-methyl ribonucleotide
  modified_base 94: mod_base = OTHER; note = 2'-O-methyl ribonucleotide
  modified_base 95: mod_base = OTHER; note = 2'-O-methyl ribonucleotide
  modified_base 96: mod_base = OTHER; note = 2'-O-methyl ribonucleotide
  modified_base 97: mod_base = OTHER; note = 2'-O-methyl ribonucleotide
  modified_base 98: mod_base = OTHER; note = 2'-O-methyl ribonucleotide
  modified_base 99: mod_base = OTHER; note = 2'-O-methyl ribonucleotide
  modified_base 100: mod_base = OTHER; note = 2'-O-methyl ribonucleotide
  modified_base 98: mod_base = OTHER; note = nebularine
  modified_base 99: mod_base = OTHER; note = nebularine
  modified_base 100: mod_base = OTHER; note = nebularine
  modified_base 1..4: mod_base = OTHER; note = phosphorothioate linkage
  modified_base 97..100: mod_base = OTHER; note = phosphorothioate linkage

SEQ ID NO: 2111 - RNA, 100 nt, synthetic construct
  source 1..100: mol_type = other RNA
  modified_base 1: mod_base = OTHER; note = 2'-O-methyl ribonucleotide
  modified_base 2: mod_base = OTHER; note = 2'-O-methyl ribonucleotide
  modified_base 3: mod_base = OTHER; note = 2'-O-methyl ribonucleotide
  modified_base 29: mod_base = OTHER; note = 2'-O-methyl ribonucleotide
  modified_base 30: mod_base = OTHER; note = 2'-O-methyl ribonucleotide
  modified_base 31: mod_base = OTHER; note = 2'-O-methyl ribonucleotide
  modified_base 32: mod_base = OTHER; note = 2'-O-methyl ribonucleotide
  modified_base 33: mod_base = OTHER; note = 2'-O-methyl ribonucleotide
  modified_base 34: mod_base = OTHER; note = 2'-O-methyl ribonucleotide
  modified_base 35: mod_base = OTHER; note = 2'-O-methyl ribonucleotide
  modified_base 36: mod_base = OTHER; note = 2'-O-methyl ribonucleotide
  modified_base 37: mod_base = OTHER; note = 2'-O-methyl ribonucleotide
  modified_base 38: mod_base = OTHER; note = 2'-O-methyl ribonucleotide
  modified_base 39: mod_base = OTHER; note = 2'-O-methyl ribonucleotide
  modified_base 40: mod_base = OTHER; note = 2'-O-methyl ribonucleotide
  modified_base 69: mod_base = OTHER; note = 2'-O-methyl ribonucleotide
  modified_base 70: mod_base = OTHER; note = 2'-O-methyl ribonucleotide
  modified_base 71: mod_base = OTHER; note = 2'-O-methyl ribonucleotide
  modified_base 72: mod_base = OTHER; note = 2'-O-methyl ribonucleotide
  modified_base 73: mod_base = OTHER; note = 2'-O-methyl ribonucleotide
  modified_base 74: mod_base = OTHER; note = 2'-O-methyl ribonucleotide
  modified_base 75: mod_base = OTHER; note = 2'-O-methyl ribonucleotide
  modified_base 76: mod_base = OTHER; note = 2'-O-methyl ribonucleotide
  modified_base 77: mod_base = OTHER; note = 2'-O-methyl ribonucleotide
  modified_base 78: mod_base = OTHER; note = 2'-O-methyl ribonucleotide
  modified_base 79: mod_base = OTHER; note = 2'-O-methyl ribonucleotide
  modified_base 80: mod_base = OTHER; note = 2'-O-methyl ribonucleotide
  modified_base 81: mod_base = OTHER; note = 2'-O-methyl ribonucleotide
  modified_base 82: mod_base = OTHER; note = 2'-O-methyl ribonucleotide
  modified_base 83: mod_base = OTHER; note = 2'-O-methyl ribonucleotide
  modified_base 84: mod_base = OTHER; note = 2'-O-methyl ribonucleotide
  modified_base 85: mod_base = OTHER; note = 2'-O-methyl ribonucleotide
  modified_base 86: mod_base = OTHER; note = 2'-O-methyl ribonucleotide
  modified_base 87: mod_base = OTHER; note = 2'-O-methyl ribonucleotide
  modified_base 88: mod_base = OTHER; note = 2'-O-methyl ribonucleotide
  modified_base 89: mod_base = OTHER; note = 2'-O-methyl ribonucleotide
  modified_base 90: mod_base = OTHER; note = 2'-O-methyl ribonucleotide
  modified_base 91: mod_base = OTHER; note = 2'-O-methyl ribonucleotide
  modified_base 92: mod_base = OTHER; note = 2'-O-methyl ribonucleotide
  modified_base 93: mod_base = OTHER; note = 2'-O-methyl ribonucleotide
  modified_base 94: mod_base = OTHER; note = 2'-O-methyl ribonucleotide
  modified_base 95: mod_base = OTHER; note = 2'-O-methyl ribonucleotide
  modified_base 96: mod_base = OTHER; note = 2'-O-methyl ribonucleotide
  modified_base 97: mod_base = OTHER; note = 2'-O-methyl ribonucleotide
  modified_base 98: mod_base = OTHER; note = 2'-O-methyl ribonucleotide
  modified_base 99: mod_base = OTHER; note = 2'-O-methyl ribonucleotide
  modified_base 100: mod_base = OTHER; note = 2'-O-methyl ribonucleotide
  modified_base 99: mod_base = OTHER; note = nebularine
  modified_base 100: mod_base = OTHER; note = nebularine
  modified_base 1..4: mod_base = OTHER; note = phosphorothioate linkage
  modified_base 97..100: mod_base = OTHER; note = phosphorothioate linkage
caggttccatgggatgctctgttttagagctagaaatagcaagttaaaataaggctagtccgttatcaacttgaaaaagtggcaccgagtcggtgcttnn

SEQ ID NO: 2112 - RNA, 100 nt, synthetic construct; identical to SEQ ID NO: 2111
  source 1..100: mol_type = other RNA
  modified_base 1: mod_base = OTHER; note = 2'-O-methyl ribonucleotide
  modified_base 2: mod_base = OTHER; note = 2'-O-methyl ribonucleotide
  modified_base 3: mod_base = OTHER; note = 2'-O-methyl ribonucleotide
  modified_base 21: mod_base = OTHER; note = 2'-O-methyl ribonucleotide
  modified_base 28: mod_base = OTHER; note = 2'-O-methyl ribonucleotide
  modified_base 29: mod_base = OTHER; note = 2'-O-methyl ribonucleotide
  modified_base 30: mod_base = OTHER; note = 2'-O-methyl ribonucleotide
  modified_base 31: mod_base = OTHER; note = 2'-O-methyl ribonucleotide
  modified_base 32: mod_base = OTHER; note = 2'-O-methyl ribonucleotide
  modified_base 34: mod_base = OTHER; note = 2'-O-methyl ribonucleotide
  modified_base 35: mod_base = OTHER; note = 2'-O-methyl ribonucleotide
  modified_base 36: mod_base = OTHER; note = 2'-O-methyl ribonucleotide
  modified_base 37: mod_base = OTHER; note = 2'-O-methyl ribonucleotide
  modified_base 38: mod_base = OTHER; note = 2'-O-methyl ribonucleotide
  modified_base 39: mod_base = OTHER; note = 2'-O-methyl ribonucleotide
  modified_base 40: mod_base = OTHER; note = 2'-O-methyl ribonucleotide
  modified_base 41: mod_base = OTHER; note = 2'-O-methyl ribonucleotide
  modified_base 42: mod_base = OTHER; note = 2'-O-methyl ribonucleotide
  modified_base 46: mod_base = OTHER; note = 2'-O-methyl ribonucleotide
  modified_base 48: mod_base = OTHER; note = 2'-O-methyl ribonucleotide
  modified_base 50: mod_base = OTHER; note = 2'-O-methyl ribonucleotide
  modified_base 52: mod_base = OTHER; note = 2'-O-methyl ribonucleotide
  modified_base 53: mod_base = OTHER; note = 2'-O-methyl ribonucleotide
  modified_base 54: mod_base = OTHER; note = 2'-O-methyl ribonucleotide
  modified_base 57: mod_base = OTHER; note = 2'-O-methyl ribonucleotide
  modified_base 61: mod_base = OTHER; note = 2'-O-methyl ribonucleotide
  modified_base 66: mod_base = OTHER; note = 2'-O-methyl ribonucleotide
  modified_base 67: mod_base = OTHER; note = 2'-O-methyl ribonucleotide
  modified_base 70: mod_base = OTHER; note = 2'-O-methyl ribonucleotide
  modified_base 71: mod_base = OTHER; note = 2'-O-methyl ribonucleotide
  modified_base 72: mod_base = OTHER; note = 2'-O-methyl ribonucleotide
  modified_base 74: mod_base = OTHER; note = 2'-O-methyl ribonucleotide
  modified_base 75: mod_base = OTHER; note = 2'-O-methyl ribonucleotide
  modified_base 76: mod_base = OTHER; note = 2'-O-methyl ribonucleotide
  modified_base 77: mod_base = OTHER; note = 2'-O-methyl ribonucleotide
  modified_base 78: mod_base = OTHER; note = 2'-O-methyl ribonucleotide
  modified_base 79: mod_base = OTHER; note = 2'-O-methyl ribonucleotide
  modified_base 80: mod_base = OTHER; note = 2'-O-methyl ribonucleotide
  modified_base 82: mod_base = OTHER; note = 2'-O-methyl ribonucleotide
  modified_base 83: mod_base = OTHER; note = 2'-O-methyl ribonucleotide
  modified_base 84: mod_base = OTHER; note = 2'-O-methyl ribonucleotide
  modified_base 85: mod_base = OTHER; note = 2'-O-methyl ribonucleotide
  modified_base 86: mod_base = OTHER; note = 2'-O-methyl ribonucleotide
  modified_base 87: mod_base = OTHER; note = 2'-O-methyl ribonucleotide
  modified_base 89: mod_base = OTHER; note = 2'-O-methyl ribonucleotide
  modified_base 92: mod_base = OTHER; note = 2'-O-methyl ribonucleotide
  modified_base 93: mod_base = OTHER; note = 2'-O-methyl ribonucleotide
  modified_base 94: mod_base = OTHER; note = 2'-O-methyl ribonucleotide
  modified_base 95: mod_base = OTHER; note = 2'-O-methyl ribonucleotide
  modified_base 96: mod_base = OTHER; note = 2'-O-methyl ribonucleotide
  modified_base 97: mod_base = OTHER; note = 2'-O-methyl ribonucleotide
  modified_base 98: mod_base = OTHER; note = 2'-O-methyl ribonucleotide
  modified_base 99: mod_base = OTHER; note = 2'-O-methyl ribonucleotide
  modified_base 100: mod_base = OTHER; note = 2'-O-methyl ribonucleotide
  modified_base 99: mod_base = OTHER; note = nebularine
  modified_base 100: mod_base = OTHER; note = nebularine
  modified_base 1..4: mod_base = OTHER; note = phosphorothioate linkage
  modified_base 97..100: mod_base = OTHER; note = phosphorothioate linkage

SEQ ID NO: 2113 - RNA, 100 nt, synthetic construct
  source 1..100: mol_type = other RNA
  modified_base 1: mod_base = OTHER; note = 2'-O-methyl ribonucleotide
  modified_base 2: mod_base = OTHER; note = 2'-O-methyl ribonucleotide
  modified_base 3: mod_base = OTHER; note = 2'-O-methyl ribonucleotide
  modified_base 29: mod_base = OTHER; note = 2'-O-methyl ribonucleotide
  modified_base 30: mod_base = OTHER; note = 2'-O-methyl ribonucleotide
  modified_base 31: mod_base = OTHER; note = 2'-O-methyl ribonucleotide
  modified_base 32: mod_base = OTHER; note = 2'-O-methyl ribonucleotide
  modified_base 33: mod_base = OTHER; note = 2'-O-methyl ribonucleotide
  modified_base 34: mod_base = OTHER; note = 2'-O-methyl ribonucleotide
  modified_base 35: mod_base = OTHER; note = 2'-O-methyl ribonucleotide
  modified_base 36: mod_base = OTHER; note = 2'-O-methyl ribonucleotide
  modified_base 37: mod_base = OTHER; note = 2'-O-methyl ribonucleotide
  modified_base 38: mod_base = OTHER; note = 2'-O-methyl ribonucleotide
  modified_base 39: mod_base = OTHER; note = 2'-O-methyl ribonucleotide
  modified_base 40: mod_base = OTHER; note = 2'-O-methyl ribonucleotide
  modified_base 69: mod_base = OTHER; note = 2'-O-methyl ribonucleotide
  modified_base 70: mod_base = OTHER; note = 2'-O-methyl ribonucleotide
  modified_base 71: mod_base = OTHER; note = 2'-O-methyl ribonucleotide
  modified_base 72: mod_base = OTHER; note = 2'-O-methyl ribonucleotide
  modified_base 73: mod_base = OTHER; note = 2'-O-methyl ribonucleotide
  modified_base 74: mod_base = OTHER; note = 2'-O-methyl ribonucleotide
  modified_base 75: mod_base = OTHER; note = 2'-O-methyl ribonucleotide
  modified_base 76: mod_base = OTHER; note = 2'-O-methyl ribonucleotide
  modified_base 77: mod_base = OTHER; note = 2'-O-methyl ribonucleotide
  modified_base 78: mod_base = OTHER; note = 2'-O-methyl ribonucleotide
  modified_base 79: mod_base = OTHER; note = 2'-O-methyl ribonucleotide
  modified_base 80: mod_base = OTHER; note = 2'-O-methyl ribonucleotide
  modified_base 81: mod_base = OTHER; note = 2'-O-methyl ribonucleotide
  modified_base 82: mod_base = OTHER; note = 2'-O-methyl ribonucleotide
  modified_base 83: mod_base = OTHER; note = 2'-O-methyl ribonucleotide
  modified_base 84: mod_base = OTHER; note = 2'-O-methyl ribonucleotide
  modified_base 85: mod_base = OTHER; note = 2'-O-methyl ribonucleotide
  modified_base 86: mod_base = OTHER; note = 2'-O-methyl ribonucleotide
  modified_base 87: mod_base = OTHER; note = 2'-O-methyl ribonucleotide
  modified_base 88: mod_base = OTHER; note = 2'-O-methyl ribonucleotide
  modified_base 89: mod_base = OTHER; note = 2'-O-methyl ribonucleotide
  modified_base 90: mod_base = OTHER; note = 2'-O-methyl ribonucleotide
  modified_base 91: mod_base = OTHER; note = 2'-O-methyl ribonucleotide
  modified_base 92: mod_base = OTHER; note = 2'-O-methyl ribonucleotide
  modified_base 93: mod_base = OTHER; note = 2'-O-methyl ribonucleotide
  modified_base 94: mod_base = OTHER; note = 2'-O-methyl ribonucleotide
  modified_base 95: mod_base = OTHER; note = 2'-O-methyl ribonucleotide
  modified_base 96: mod_base = OTHER; note = 2'-O-methyl ribonucleotide
  modified_base 97: mod_base = OTHER; note = 2'-O-methyl ribonucleotide
  modified_base 98: mod_base = OTHER; note = 2'-O-methyl ribonucleotide
  modified_base 99: mod_base = OTHER; note = 2'-O-methyl ribonucleotide
  modified_base 100: mod_base = OTHER; note = 2'-O-methyl ribonucleotide
  modified_base 100: mod_base = OTHER; note = nebularine
  modified_base 1..4: mod_base = OTHER; note = phosphorothioate linkage
  modified_base 97..100: mod_base = OTHER; note = phosphorothioate linkage
caggttccatgggatgctctgttttagagctagaaatagcaagttaaaataaggctagtccgttatcaacttgaaaaagtggcaccgagtcggtgctttn

SEQ ID NO: 2114 - RNA, 100 nt, synthetic construct; identical to SEQ ID NO: 2113
  source 1..100: mol_type = other RNA
  modified_base 1: mod_base = OTHER; note = 2'-O-methyl ribonucleotide
  modified_base 2: mod_base = OTHER; note = 2'-O-methyl ribonucleotide
  modified_base 3: mod_base = OTHER; note = 2'-O-methyl ribonucleotide
  modified_base 21: mod_base = OTHER; note = 2'-O-methyl ribonucleotide
  modified_base 28: mod_base = OTHER; note = 2'-O-methyl ribonucleotide
  modified_base 29: mod_base = OTHER; note = 2'-O-methyl ribonucleotide
  modified_base 30: mod_base = OTHER; note = 2'-O-methyl ribonucleotide
  modified_base 31: mod_base = OTHER; note = 2'-O-methyl ribonucleotide
  modified_base 32: mod_base = OTHER; note = 2'-O-methyl ribonucleotide
  modified_base 34: mod_base = OTHER; note = 2'-O-methyl ribonucleotide
  modified_base 35: mod_base = OTHER; note = 2'-O-methyl ribonucleotide
  modified_base 36: mod_base = OTHER; note = 2'-O-methyl ribonucleotide
  modified_base 37: mod_base = OTHER; note = 2'-O-methyl ribonucleotide
  modified_base 38: mod_base = OTHER; note = 2'-O-methyl ribonucleotide
  modified_base 39: mod_base = OTHER; note = 2'-O-methyl ribonucleotide
  modified_base 40: mod_base = OTHER; note = 2'-O-methyl ribonucleotide
  modified_base 41: mod_base = OTHER; note = 2'-O-methyl ribonucleotide
  modified_base 42: mod_base = OTHER; note = 2'-O-methyl ribonucleotide
  modified_base 46: mod_base = OTHER; note = 2'-O-methyl ribonucleotide
  modified_base 48: mod_base = OTHER; note = 2'-O-methyl ribonucleotide
  modified_base 50: mod_base = OTHER; note = 2'-O-methyl ribonucleotide
  modified_base 52: mod_base = OTHER; note = 2'-O-methyl ribonucleotide
  modified_base 53: mod_base = OTHER; note = 2'-O-methyl ribonucleotide
  modified_base 54: mod_base = OTHER; note = 2'-O-methyl ribonucleotide
  modified_base 57: mod_base = OTHER; note = 2'-O-methyl ribonucleotide
  modified_base 61: mod_base = OTHER; note = 2'-O-methyl ribonucleotide
  modified_base 66: mod_base = OTHER; note = 2'-O-methyl ribonucleotide
  modified_base 67: mod_base = OTHER; note = 2'-O-methyl ribonucleotide
  modified_base 70: mod_base = OTHER; note = 2'-O-methyl ribonucleotide
  modified_base 71: mod_base = OTHER; note = 2'-O-methyl ribonucleotide
  modified_base 72: mod_base = OTHER; note = 2'-O-methyl ribonucleotide
  modified_base 74: mod_base = OTHER; note = 2'-O-methyl ribonucleotide
  modified_base 75: mod_base = OTHER; note = 2'-O-methyl ribonucleotide
  modified_base 76: mod_base = OTHER; note = 2'-O-methyl ribonucleotide
  modified_base 77: mod_base = OTHER; note = 2'-O-methyl ribonucleotide
  modified_base 78: mod_base = OTHER; note = 2'-O-methyl ribonucleotide
  modified_base 79: mod_base = OTHER; note = 2'-O-methyl ribonucleotide
  modified_base 80: mod_base = OTHER; note = 2'-O-methyl ribonucleotide
  modified_base 82: mod_base = OTHER; note = 2'-O-methyl ribonucleotide
  modified_base 83: mod_base = OTHER; note = 2'-O-methyl ribonucleotide
  modified_base 84: mod_base = OTHER; note = 2'-O-methyl ribonucleotide
  modified_base 85: mod_base = OTHER; note = 2'-O-methyl ribonucleotide
  modified_base 86: mod_base = OTHER; note = 2'-O-methyl ribonucleotide
  modified_base 87: mod_base = OTHER; note = 2'-O-methyl ribonucleotide
  modified_base 89: mod_base = OTHER; note = 2'-O-methyl ribonucleotide
  modified_base 92: mod_base = OTHER; note = 2'-O-methyl ribonucleotide
  modified_base 93: mod_base = OTHER; note = 2'-O-methyl ribonucleotide
  modified_base 94: mod_base = OTHER; note = 2'-O-methyl ribonucleotide
  modified_base 95: mod_base = OTHER; note = 2'-O-methyl ribonucleotide
  modified_base 96: mod_base = OTHER; note = 2'-O-methyl ribonucleotide
  modified_base 97: mod_base = OTHER; note = 2'-O-methyl ribonucleotide
  modified_base 98: mod_base = OTHER; note = 2'-O-methyl ribonucleotide
  modified_base 99: mod_base = OTHER; note = 2'-O-methyl ribonucleotide
  modified_base 100: mod_base = OTHER; note = 2'-O-methyl ribonucleotide
  modified_base 100: mod_base = OTHER; note = nebularine
  modified_base 1..4: mod_base = OTHER; note = phosphorothioate linkage
  modified_base 97..100: mod_base = OTHER; note = phosphorothioate linkage

SEQ ID NO: 2115 - DNA, 100 bp, synthetic construct
  source 1..100: mol_type = other DNA
  modified_base 1: mod_base = OTHER; note = 2'-O-methyl ribonucleotide
  modified_base 2: mod_base = OTHER; note = 2'-O-methyl ribonucleotide
  modified_base 3: mod_base = OTHER; note = 2'-O-methyl ribonucleotide
  modified_base 29: mod_base = OTHER; note = 2'-O-methyl ribonucleotide
  modified_base 30: mod_base = OTHER; note = 2'-O-methyl ribonucleotide
  modified_base 31: mod_base = OTHER; note = 2'-O-methyl ribonucleotide
  modified_base 32: mod_base = OTHER; note = 2'-O-methyl ribonucleotide
  modified_base 33: mod_base = OTHER; note = 2'-O-methyl ribonucleotide
  modified_base 34: mod_base = OTHER; note = 2'-O-methyl ribonucleotide
  modified_base 35: mod_base = OTHER; note = 2'-O-methyl ribonucleotide
  modified_base 36: mod_base = OTHER; note = 2'-O-methyl ribonucleotide
  modified_base 37: mod_base = OTHER; note = 2'-O-methyl ribonucleotide
  modified_base 38: mod_base = OTHER; note = 2'-O-methyl ribonucleotide
  modified_base 39: mod_base = OTHER; note = 2'-O-methyl ribonucleotide
  modified_base 40: mod_base = OTHER; note = 2'-O-methyl ribonucleotide
  modified_base 69: mod_base = OTHER; note = 2'-O-methyl ribonucleotide
  modified_base 70: mod_base = OTHER; note = 2'-O-methyl ribonucleotide
  modified_base 71: mod_base = OTHER; note = 2'-O-methyl ribonucleotide
  modified_base 72: mod_base = OTHER; note = 2'-O-methyl ribonucleotide
  modified_base 73: mod_base = OTHER; note = 2'-O-methyl ribonucleotide
  modified_base 74: mod_base = OTHER; note = 2'-O-methyl ribonucleotide
  modified_base 75: mod_base = OTHER; note = 2'-O-methyl ribonucleotide
  modified_base 76: mod_base = OTHER; note = 2'-O-methyl ribonucleotide
  modified_base 77: mod_base = OTHER; note = 2'-O-methyl ribonucleotide
  modified_base 78: mod_base = OTHER; note = 2'-O-methyl ribonucleotide
  modified_base 79: mod_base = OTHER; note = 2'-O-methyl ribonucleotide
  modified_base 80: mod_base = OTHER; note = 2'-O-methyl ribonucleotide
  modified_base 81: mod_base = OTHER; note = 2'-O-methyl ribonucleotide
  modified_base 82: mod_base = OTHER; note = 2'-O-methyl ribonucleotide
  modified_base 83: mod_base = OTHER; note = 2'-O-methyl ribonucleotide
  modified_base 84: mod_base = OTHER; note = 2'-O-methyl ribonucleotide
  modified_base 85: mod_base = OTHER; note = 2'-O-methyl ribonucleotide
  modified_base 86: mod_base = OTHER; note = 2'-O-methyl ribonucleotide
  modified_base 87: mod_base = OTHER; note = 2'-O-methyl ribonucleotide
  modified_base 88: mod_base = OTHER; note = 2'-O-methyl ribonucleotide
  modified_base 89: mod_base = OTHER; note = 2'-O-methyl ribonucleotide
  modified_base 90: mod_base = OTHER; note = 2'-O-methyl ribonucleotide
  modified_base 91: mod_base = OTHER; note = 2'-O-methyl ribonucleotide
  modified_base 92: mod_base = OTHER; note = 2'-O-methyl ribonucleotide
  modified_base 93: mod_base = OTHER; note = 2'-O-methyl ribonucleotide
  modified_base 94: mod_base = OTHER; note = 2'-O-methyl ribonucleotide
  modified_base 95: mod_base = OTHER; note = 2'-O-methyl ribonucleotide
  modified_base 96: mod_base = OTHER; note = 2'-O-methyl ribonucleotide
  modified_base 97: mod_base = OTHER; note = 2'-O-methyl ribonucleotide
  modified_base 98: mod_base = OTHER; note = nebularine
  modified_base 99: mod_base = OTHER; note = nebularine
  modified_base 100: mod_base = OTHER; note = nebularine
  modified_base 1..4: mod_base = OTHER; note = phosphorothioate linkage
  modified_base 97..100: mod_base = OTHER; note = phosphorothioate linkage
  misc_feature 1: note = RNA
  misc_feature 2: note = RNA
  misc_feature 3: note = RNA
  misc_feature 4: note = RNA
  misc_feature 5: note = RNA
  misc_feature 6: note = RNA
  misc_feature 7: note = RNA
  misc_feature 8: note = RNA
  misc_feature 9: note = RNA
  misc_feature 10: note = RNA
  misc_feature 11: note = RNA
  misc_feature 12: note = RNA
  misc_feature 13: note = RNA
  misc_feature 14: note = RNA
  misc_feature 15: note = RNA
  misc_feature 16: note = RNA
  misc_feature 17: note = RNA
  misc_feature 18: note = RNA
  misc_feature 19: note = RNA
  misc_feature 20: note = RNA
  misc_feature 21: note = RNA
  misc_feature 22: note = RNA
  misc_feature 23: note = RNA
  misc_feature 24: note = RNA
  misc_feature 25: note = RNA
  misc_feature 26: note = RNA
  misc_feature 27: note = RNA
  misc_feature 28: note = RNA
  misc_feature 29: note = RNA
  misc_feature 30: note = RNA
  misc_feature 31: note = RNA
  misc_feature 32: note = RNA
  misc_feature 33: note = RNA
  misc_feature 34: note = RNA
  misc_feature 35: note = RNA
  misc_feature 36: note = RNA
  misc_feature 37: note = RNA
  misc_feature 38: note = RNA
  misc_feature 39: note = RNA
  misc_feature 40: note = RNA
  misc_feature 41: note = RNA
  misc_feature 42: note = RNA
  misc_feature 43: note = RNA
  misc_feature 44: note = RNA
  misc_feature 45: note = RNA
  misc_feature 46: note = RNA
  misc_feature 47: note = RNA
  misc_feature 48: note = RNA
  misc_feature 49: note = RNA
  misc_feature 50: note = RNA
  misc_feature 51: note = RNA
  misc_feature 52: note = RNA
  misc_feature 53: note = RNA
  misc_feature 54: note = RNA
  misc_feature 55: note = RNA
  misc_feature 56: note = RNA
  misc_feature 57: note = RNA
  misc_feature 58: note = RNA
  misc_feature 59: note = RNA
  misc_feature 60: note = RNA
  misc_feature 61: note = RNA
  misc_feature 62: note = RNA
  misc_feature 63: note = RNA
  misc_feature 64: note = RNA
  misc_feature 65: note = RNA
  misc_feature 66: note = RNA
  misc_feature 67: note = RNA
  misc_feature 68: note = RNA
  misc_feature 69: note = RNA
  misc_feature 70: note = RNA
  misc_feature 71: note = RNA
  misc_feature 72: note = RNA
  misc_feature 73: note = RNA
  misc_feature 74: note = RNA
  misc_feature 75: note = RNA
  misc_feature 76: note = RNA
  misc_feature 77: note = RNA
  misc_feature 78: note = RNA
  misc_feature 79: note = RNA
  misc_feature 80: note = RNA
  misc_feature 81: note = RNA
  misc_feature 82: note = RNA
  misc_feature 83: note = RNA
  misc_feature 84: note = RNA
  misc_feature 85: note = RNA
  misc_feature 86: note = RNA
  misc_feature 87: note = RNA
  misc_feature 88: note = RNA
  misc_feature 89: note = RNA
  misc_feature 90: note = RNA
  misc_feature 91: note = RNA
  misc_feature 92: note = RNA
  misc_feature 93: note = RNA
  misc_feature 94: note = RNA
  misc_feature 95: note = RNA
  misc_feature 96: note = RNA
  misc_feature 97: note = RNA
  misc_feature 98: note = DNA
  misc_feature 99: note = DNA
  misc_feature 100: note = DNA
caggttccatgggatgctctgttttagagctagaaatagcaagttaaaataaggctagtccgttatcaacttgaaaaagtggcaccgagtcggtgctnnn

SEQ ID NO: 2116 - DNA, 100 bp, synthetic construct; identical to SEQ ID NO: 2115
  source 1..100: mol_type = other DNA
  modified_base 1: mod_base = OTHER; note = 2'-O-methyl ribonucleotide
  modified_base 2: mod_base = OTHER; note = 2'-O-methyl ribonucleotide
  modified_base 3: mod_base = OTHER; note = 2'-O-methyl ribonucleotide
  modified_base 21: mod_base = OTHER; note = 2'-O-methyl ribonucleotide
  modified_base 28: mod_base = OTHER; note = 2'-O-methyl ribonucleotide
  modified_base 29: mod_base = OTHER; note = 2'-O-methyl ribonucleotide
  modified_base 30: mod_base = OTHER; note = 2'-O-methyl ribonucleotide
  modified_base 31: mod_base = OTHER; note = 2'-O-methyl ribonucleotide
  modified_base 32: mod_base = OTHER; note = 2'-O-methyl ribonucleotide
  modified_base 34: mod_base = OTHER; note = 2'-O-methyl ribonucleotide
  modified_base 35: mod_base = OTHER; note = 2'-O-methyl ribonucleotide
  modified_base 36: mod_base = OTHER; note = 2'-O-methyl ribonucleotide
  modified_base 37: mod_base = OTHER; note = 2'-O-methyl ribonucleotide
  modified_base 38: mod_base = OTHER; note = 2'-O-methyl ribonucleotide
  modified_base 39: mod_base = OTHER; note = 2'-O-methyl ribonucleotide
  modified_base 40: mod_base = OTHER; note = 2'-O-methyl ribonucleotide
  modified_base 41: mod_base = OTHER; note = 2'-O-methyl ribonucleotide
  modified_base 42: mod_base = OTHER; note = 2'-O-methyl ribonucleotide
  modified_base 46: mod_base = OTHER; note = 2'-O-methyl ribonucleotide
  modified_base 48: mod_base = OTHER; note = 2'-O-methyl ribonucleotide
  modified_base 50: mod_base = OTHER; note = 2'-O-methyl ribonucleotide
  modified_base 52: mod_base = OTHER; note = 2'-O-methyl ribonucleotide
  modified_base 53: mod_base = OTHER; note = 2'-O-methyl ribonucleotide
  modified_base 54: mod_base = OTHER; note = 2'-O-methyl ribonucleotide
  modified_base 57: mod_base = OTHER; note = 2'-O-methyl ribonucleotide
  modified_base 61: mod_base = OTHER; note = 2'-O-methyl ribonucleotide
  modified_base 66: mod_base = OTHER; note = 2'-O-methyl ribonucleotide
  modified_base 67: mod_base = OTHER; note = 2'-O-methyl ribonucleotide
  modified_base 70: mod_base = OTHER; note = 2'-O-methyl ribonucleotide
  modified_base 71: mod_base = OTHER; note = 2'-O-methyl ribonucleotide
  modified_base 72: mod_base = OTHER; note = 2'-O-methyl ribonucleotide
  modified_base 74: mod_base = OTHER; note = 2'-O-methyl ribonucleotide
  modified_base 75: mod_base = OTHER; note = 2'-O-methyl ribonucleotide
  modified_base 76: mod_base = OTHER; note = 2'-O-methyl ribonucleotide
  modified_base 77: mod_base = OTHER; note = 2'-O-methyl ribonucleotide
  modified_base 78: mod_base = OTHER; note = 2'-O-methyl ribonucleotide
  modified_base 79: mod_base = OTHER; note = 2'-O-methyl ribonucleotide
  modified_base 80: mod_base = OTHER; note = 2'-O-methyl ribonucleotide
  modified_base 82: mod_base = OTHER; note = 2'-O-methyl ribonucleotide
  modified_base 83: mod_base = OTHER; note = 2'-O-methyl ribonucleotide
  modified_base 84: mod_base = OTHER; note = 2'-O-methyl ribonucleotide
  modified_base 85: mod_base = OTHER; note = 2'-O-methyl ribonucleotide
  modified_base 86: mod_base = OTHER; note = 2'-O-methyl ribonucleotide
  modified_base 87: mod_base = OTHER; note = 2'-O-methyl ribonucleotide
  modified_base 89: mod_base = OTHER; note = 2'-O-methyl ribonucleotide
  modified_base 92: mod_base = OTHER; note = 2'-O-methyl ribonucleotide
  modified_base 93: mod_base = OTHER; note = 2'-O-methyl ribonucleotide
  modified_base 94: mod_base = OTHER; note = 2'-O-methyl ribonucleotide
  modified_base 95: mod_base = OTHER; note = 2'-O-methyl ribonucleotide
  modified_base 96: mod_base = OTHER; note = 2'-O-methyl ribonucleotide
  modified_base 97: mod_base = OTHER; note = 2'-O-methyl ribonucleotide
  modified_base 98: mod_base = OTHER; note = nebularine
  modified_base 99: mod_base = OTHER; note = nebularine
  modified_base 100: mod_base = OTHER; note = nebularine
  modified_base 1..4: mod_base = OTHER; note = phosphorothioate linkage
  modified_base 97..100: mod_base = OTHER; note = phosphorothioate linkage
  misc_feature 1: note = RNA
  misc_feature 2: note = RNA
  misc_feature 3: note = RNA
  misc_feature 4: note = RNA
  misc_feature 5: note = RNA
  misc_feature 6: note = RNA
  misc_feature 7: note = RNA
  misc_feature 8: note = RNA
  misc_feature 9: note = RNA
  misc_feature 10: note = RNA
  misc_feature 11: note = RNA
  misc_feature 12: note = RNA
  misc_feature 13: note = RNA
  misc_feature 14: note = RNA
  misc_feature 15: note = RNA
  misc_feature 16: note = RNA
  misc_feature 17: note = RNA
  misc_feature 18: note = RNA
  misc_feature 19: note = RNA
  misc_feature 20: note = RNA
  misc_feature 21: note = RNA
  misc_feature 22: note = RNA
  misc_feature 23: note = RNA
  misc_feature 24: note = RNA
  misc_feature 25: note = RNA
  misc_feature 26: note = RNA
  misc_feature 27: note = RNA
  misc_feature 28: note = RNA
  misc_feature 29: note = RNA
  misc_feature 30: note = RNA
  misc_feature 31: note = RNA
  misc_feature 32: note = RNA
  misc_feature 33: note = RNA
  misc_feature 34: note = RNA
  misc_feature 35: note = RNA
  misc_feature 36: note = RNA
  misc_feature 37: note = RNA
  misc_feature 38: note = RNA
  misc_feature 39: note = RNA
  misc_feature 40: note = RNA
  misc_feature 41: note = RNA
  misc_feature 42: note = RNA
  misc_feature 43: note = RNA
  misc_feature 44: note = RNA
  misc_feature 45: note = RNA
  misc_feature 46: note = RNA
  misc_feature 47: note = RNA
  misc_feature 48: note = RNA
  misc_feature 49: note = RNA
  misc_feature 50: note = RNA
  misc_feature 51: note = RNA
  misc_feature 52: note = RNA
  misc_feature 53: note = RNA
  misc_feature 54: note = RNA
  misc_feature 55: note = RNA
  misc_feature 56: note = RNA
  misc_feature 57: note = RNA
  misc_feature 58: note = RNA
  misc_feature 59: note = RNA
  misc_feature 60: note = RNA
  misc_feature 61: note = RNA
  misc_feature 62: note = RNA
  misc_feature 63: note = RNA
  misc_feature 64: note = RNA
  misc_feature 65: note = RNA
  misc_feature 66: note = RNA
  misc_feature 67: note = RNA
  misc_feature 68: note = RNA
  misc_feature 69: note = RNA
  misc_feature 70: note = RNA
  misc_feature 71: note = RNA
  misc_feature 72: note = RNA
  misc_feature 73: note = RNA
  misc_feature 74: note = RNA
  misc_feature 75: note = RNA
  misc_feature 76: note = RNA
  misc_feature 77: note = RNA
  misc_feature 78: note = RNA
  misc_feature 79: note = RNA
  misc_feature 80: note = RNA
  misc_feature 81: note = RNA
  misc_feature 82: note = RNA
  misc_feature 83: note = RNA
  misc_feature 84: note = RNA
  misc_feature 85: note = RNA
  misc_feature 86: note = RNA
  misc_feature 87: note = RNA
  misc_feature 88: note = RNA
  misc_feature 89: note = RNA
  misc_feature 90: note = RNA
  misc_feature 91: note = RNA
  misc_feature 92: note = RNA
  misc_feature 93: note = RNA
  misc_feature 94: note = RNA
  misc_feature 95: note = RNA
  misc_feature 96: note = RNA
  misc_feature 97: note = RNA
  misc_feature 98: note = DNA
  misc_feature 99: note = DNA
  misc_feature 100: note = DNA

SEQ ID NO: 2117 - DNA, 100 bp, synthetic construct
  source 1..100: mol_type = other DNA
  modified_base 1: mod_base = OTHER; note = 2'-O-methyl ribonucleotide
  modified_base 2: mod_base = OTHER; note = 2'-O-methyl ribonucleotide
  modified_base 3: mod_base = OTHER; note = 2'-O-methyl ribonucleotide
  modified_base 29: mod_base = OTHER; note = 2'-O-methyl ribonucleotide
  modified_base 30: mod_base = OTHER; note = 2'-O-methyl ribonucleotide
  modified_base 31: mod_base = OTHER; note = 2'-O-methyl ribonucleotide
  modified_base 32: mod_base = OTHER; note = 2'-O-methyl ribonucleotide
  modified_base 33: mod_base = OTHER; note = 2'-O-methyl ribonucleotide
  modified_base 34: mod_base = OTHER; note = 2'-O-methyl ribonucleotide
  modified_base 35: mod_base = OTHER; note = 2'-O-methyl ribonucleotide
  modified_base 36: mod_base = OTHER; note = 2'-O-methyl ribonucleotide
  modified_base 37: mod_base = OTHER; note = 2'-O-methyl ribonucleotide
  modified_base 38: mod_base = OTHER; note = 2'-O-methyl ribonucleotide
  modified_base 39: mod_base = OTHER; note = 2'-O-methyl ribonucleotide
  modified_base 40: mod_base = OTHER; note = 2'-O-methyl ribonucleotide
  modified_base 69: mod_base = OTHER; note = 2'-O-methyl ribonucleotide
  modified_base 70: mod_base = OTHER; note = 2'-O-methyl ribonucleotide
  modified_base 71: mod_base = OTHER; note = 2'-O-methyl ribonucleotide
  modified_base 72: mod_base = OTHER; note = 2'-O-methyl ribonucleotide
  modified_base 73: mod_base = OTHER; note = 2'-O-methyl ribonucleotide
  modified_base 74: mod_base = OTHER; note = 2'-O-methyl ribonucleotide
  modified_base 75: mod_base = OTHER; note = 2'-O-methyl ribonucleotide
  modified_base 76: mod_base = OTHER; note = 2'-O-methyl ribonucleotide
  modified_base 77: mod_base = OTHER; note = 2'-O-methyl ribonucleotide
  modified_base 78: mod_base = OTHER; note = 2'-O-methyl ribonucleotide
  modified_base 79: mod_base = OTHER; note = 2'-O-methyl ribonucleotide
  modified_base 80: mod_base = OTHER; note = 2'-O-methyl ribonucleotide
  modified_base 81: mod_base = OTHER; note = 2'-O-methyl ribonucleotide
  modified_base 82: mod_base = OTHER; note = 2'-O-methyl ribonucleotide
  modified_base 83: mod_base = OTHER; note = 2'-O-methyl ribonucleotide
  modified_base 84: mod_base = OTHER; note = 2'-O-methyl ribonucleotide
  modified_base 85: mod_base = OTHER; note = 2'-O-methyl ribonucleotide
  modified_base 86: mod_base = OTHER; note = 2'-O-methyl ribonucleotide
  modified_base 87: mod_base = OTHER; note = 2'-O-methyl ribonucleotide
  modified_base 88: mod_base = OTHER; note = 2'-O-methyl ribonucleotide
  modified_base 89: mod_base = OTHER; note = 2'-O-methyl ribonucleotide
  modified_base 90: mod_base = OTHER; note = 2'-O-methyl ribonucleotide
  modified_base 91: mod_base = OTHER; note = 2'-O-methyl ribonucleotide
  modified_base 92: mod_base = OTHER; note = 2'-O-methyl ribonucleotide
  modified_base 93: mod_base = OTHER; note = 2'-O-methyl ribonucleotide
  modified_base 94: mod_base = OTHER; note = 2'-O-methyl ribonucleotide
  modified_base 95: mod_base = OTHER; note = 2'-O-methyl ribonucleotide
  modified_base 96: mod_base = OTHER; note = 2'-O-methyl ribonucleotide
  modified_base 97: mod_base = OTHER; note = 2'-O-methyl ribonucleotide
  modified_base 98: mod_base = OTHER; note = 2'-O-methyl ribonucleotide
  modified_base 99: mod_base = OTHER; note = nebularine
  modified_base 100: mod_base = OTHER; note = nebularine
  modified_base 1..4: mod_base = OTHER; note = phosphorothioate linkage
  modified_base 97..100: mod_base = OTHER; note = phosphorothioate linkage
  misc_feature 1: note = RNA
  misc_feature 2: note = RNA
  misc_feature 3: note = RNA
  misc_feature 4: note = RNA
  misc_feature 5: note = RNA
  misc_feature 6: note = RNA
  misc_feature 7: note = RNA
  misc_feature 8: note = RNA
  misc_feature 9: note = RNA
  misc_feature 10: note = RNA
  misc_feature 11: note = RNA
  misc_feature 12: note = RNA
  misc_feature 13: note = RNA
  misc_feature 14: note = RNA
  misc_feature 15: note = RNA
  misc_feature 16: note = RNA
  misc_feature 17: note = RNA
  misc_feature 18: note = RNA
  misc_feature 19: note = RNA
  misc_feature 20: note = RNA
  misc_feature 21: note = RNA
  misc_feature 22: note = RNA
  misc_feature 23: note = RNA
  misc_feature 24: note = RNA
  misc_feature 25: note = RNA
  misc_feature 26: note = RNA
  misc_feature 27: note = RNA
  misc_feature 28: note = RNA
  misc_feature 29: note = RNA
  misc_feature 30: note = RNA
  misc_feature 31: note = RNA
  misc_feature 32: note = RNA
  misc_feature 33: note = RNA
  misc_feature 34: note = RNA
  misc_feature 35: note = RNA
  misc_feature 36: note = RNA
  misc_feature 37: note = RNA
  misc_feature 38: note = RNA
  misc_feature 39: note = RNA
  misc_feature 40: note = RNA
  misc_feature 41: note = RNA
  misc_feature 42: note = RNA
  misc_feature 43: note = RNA
  misc_feature 44: note = RNA
  misc_feature 45: note = RNA
  misc_feature 46: note = RNA
  misc_feature 47: note = RNA
  misc_feature 48: note = RNA
  misc_feature 49: note = RNA
  misc_feature 50: note = RNA
  misc_feature 51: note = RNA
  misc_feature 52: note = RNA
  misc_feature 53: note = RNA
  misc_feature 54: note = RNA
  misc_feature 55: note = RNA
  misc_feature 56: note = RNA
  misc_feature 57: note = RNA
  misc_feature 58: note = RNA
  misc_feature 59: note = RNA
  misc_feature 60: note = RNA
  misc_feature 61: note = RNA
  misc_feature 62: note = RNA
  misc_feature 63: note = RNA
  misc_feature 64: note = RNA
  misc_feature 65: note = RNA
  misc_feature 66: note = RNA
  misc_feature 67: note = RNA
  misc_feature 68: note = RNA
  misc_feature 69: note = RNA
  misc_feature 70: note = RNA
  misc_feature 71: note = RNA
  misc_feature 72: note = RNA
  misc_feature 73: note = RNA
  misc_feature 74: note = RNA
  misc_feature 75: note = RNA
  misc_feature 76: note = RNA
  misc_feature 77: note = RNA
  misc_feature 78: note = RNA
  misc_feature 79: note = RNA
  misc_feature 80: note = RNA
  misc_feature 81: note = RNA
  misc_feature 82: note = RNA
  misc_feature 83: note = RNA
  misc_feature 84: note = RNA
  misc_feature 85: note = RNA
  misc_feature 86: note = RNA
  misc_feature 87: note = RNA
  misc_feature 88: note = RNA
  misc_feature 89: note = RNA
  misc_feature 90: note = RNA
  misc_feature 91: note = RNA
  misc_feature 92: note = RNA
  misc_feature 93: note = RNA
  misc_feature 94: note = RNA
  misc_feature 95: note = RNA
  misc_feature 96: note = RNA
  misc_feature 97: note = RNA
  misc_feature 98: note = RNA
  misc_feature 99: note = DNA
  misc_feature 100: note = DNA
caggttccatgggatgctctgttttagagctagaaatagcaagttaaaataaggctagtccgttatcaacttgaaaaagtggcaccgagtcggtgcttnn

SEQ ID NO: 2118 - DNA, 100 bp, synthetic construct; identical to SEQ ID NO: 2117
  source 1..100: mol_type = other DNA
  modified_base 1: mod_base = OTHER; note = 2'-O-methyl ribonucleotide
  modified_base 2: mod_base = OTHER; note = 2'-O-methyl ribonucleotide
  modified_base 3: mod_base = OTHER; note = 2'-O-methyl ribonucleotide
  modified_base 21: mod_base = OTHER; note = 2'-O-methyl ribonucleotide
  modified_base 28: mod_base = OTHER; note = 2'-O-methyl ribonucleotide
  modified_base 29: mod_base = OTHER; note = 2'-O-methyl ribonucleotide
  modified_base 30: mod_base = OTHER; note = 2'-O-methyl ribonucleotide
  modified_base 31: mod_base = OTHER; note = 2'-O-methyl ribonucleotide
  modified_base 32: mod_base = OTHER; note = 2'-O-methyl ribonucleotide
  modified_base 34: mod_base = OTHER; note = 2'-O-methyl ribonucleotide
  modified_base 35: mod_base = OTHER; note = 2'-O-methyl ribonucleotide
  modified_base 36: mod_base = OTHER; note = 2'-O-methyl ribonucleotide
  modified_base 37: mod_base = OTHER; note = 2'-O-methyl ribonucleotide
  modified_base 38: mod_base = OTHER; note = 2'-O-methyl ribonucleotide
  modified_base 39: mod_base = OTHER; note = 2'-O-methyl ribonucleotide
  modified_base 40: mod_base = OTHER; note = 2'-O-methyl ribonucleotide
  modified_base 41: mod_base = OTHER; note = 2'-O-methyl ribonucleotide
  modified_base 42: mod_base = OTHER; note = 2'-O-methyl ribonucleotide
  modified_base 46: mod_base = OTHER; note = 2'-O-methyl ribonucleotide
  modified_base 48: mod_base = OTHER; note = 2'-O-methyl ribonucleotide
  modified_base 50: mod_base = OTHER; note = 2'-O-methyl ribonucleotide
  modified_base 52: mod_base = OTHER; note = 2'-O-methyl ribonucleotide
  modified_base 53: mod_base = OTHER; note = 2'-O-methyl ribonucleotide
  modified_base 54: mod_base = OTHER; note = 2'-O-methyl ribonucleotide
  modified_base 57: mod_base = OTHER; note = 2'-O-methyl ribonucleotide
  modified_base 61: mod_base = OTHER; note = 2'-O-methyl ribonucleotide
  modified_base 66: mod_base = OTHER; note = 2'-O-methyl ribonucleotide
  modified_base 67: mod_base = OTHER; note = 2'-O-methyl ribonucleotide
  modified_base 70: mod_base = OTHER; note = 2'-O-methyl ribonucleotide
  modified_base 71: mod_base = OTHER; note = 2'-O-methyl ribonucleotide
  modified_base 72: mod_base = OTHER; note = 2'-O-methyl ribonucleotide
  modified_base 74: mod_base = OTHER; note = 2'-O-methyl ribonucleotide
  modified_base 75: mod_base = OTHER; note = 2'-O-methyl ribonucleotide
  modified_base 76: mod_base = OTHER; note = 2'-O-methyl ribonucleotide
  modified_base 77: mod_base = OTHER; note = 2'-O-methyl ribonucleotide
  modified_base 78: mod_base = OTHER; note = 2'-O-methyl ribonucleotide
  modified_base 79: mod_base = OTHER; note = 2'-O-methyl ribonucleotide
  modified_base 80: mod_base = OTHER; note = 2'-O-methyl ribonucleotide
  modified_base 82: mod_base = OTHER; note = 2'-O-methyl ribonucleotide
  modified_base 83: mod_base = OTHER; note = 2'-O-methyl ribonucleotide
  modified_base 84: mod_base = OTHER; note = 2'-O-methyl ribonucleotide
  modified_base 85: mod_base = OTHER; note = 2'-O-methyl ribonucleotide
  modified_base 86: mod_base = OTHER; note = 2'-O-methyl ribonucleotide
  modified_base 87: mod_base = OTHER; note = 2'-O-methyl ribonucleotide
  modified_base 89: mod_base = OTHER; note = 2'-O-methyl ribonucleotide
  modified_base 92: mod_base = OTHER; note = 2'-O-methyl ribonucleotide
  modified_base 93: mod_base = OTHER; note = 2'-O-methyl ribonucleotide
  modified_base 94: mod_base = OTHER; note = 2'-O-methyl ribonucleotide
  modified_base 95: mod_base = OTHER; note = 2'-O-methyl ribonucleotide
  modified_base 96: mod_base = OTHER; note = 2'-O-methyl ribonucleotide
  modified_base 97: mod_base = OTHER; note = 2'-O-methyl ribonucleotide
  modified_base 98: mod_base = OTHER; note = 2'-O-methyl ribonucleotide
  modified_base 99: mod_base = OTHER; note = nebularine
  modified_base 100: mod_base = OTHER; note = nebularine
  modified_base 1..4: mod_base = OTHER; note = phosphorothioate linkage
  modified_base 97..100: mod_base = OTHER; note = phosphorothioate linkage
  misc_feature 1: note = RNA
  misc_feature 2: note = RNA
  misc_feature 3: note = RNA
  misc_feature 4: note = RNA
  misc_feature 5: note = RNA
  misc_feature 6: note = RNA
  misc_feature 7: note = RNA
  misc_feature 8: note = RNA
  misc_feature 9: note = RNA
  misc_feature 10: note = RNA
  misc_feature 11: note = RNA
  misc_feature 12: note = RNA
  misc_feature 13: note = RNA
  misc_feature 14: note = RNA
  misc_feature 15: note = RNA
  misc_feature 16: note = RNA
  misc_feature 17: note = RNA
  misc_feature 18: note = RNA
  misc_feature 19: note = RNA
  misc_feature 20: note = RNA
  misc_feature 21: note = RNA
  misc_feature 22: note = RNA
  misc_feature 23: note = RNA
  misc_feature 24: note = RNA
  misc_feature 25: note = RNA
  misc_feature 26: note = RNA
  misc_feature 27: note = RNA
  misc_feature 28: note = RNA
  misc_feature 29: note = RNA
  misc_feature 30: note = RNA
  misc_feature 31: note = RNA
  misc_feature 32: note = RNA
  misc_feature 33: note = RNA
  misc_feature 34: note = RNA
  misc_feature 35: note = RNA
  misc_feature 36: note = RNA
  misc_feature 37: note = RNA
  misc_feature 38: note = RNA
  misc_feature 39: note = RNA
  misc_feature 40: note = RNA
  misc_feature 41: note = RNA
  misc_feature 42: note = RNA
  misc_feature 43: note = RNA
  misc_feature 44: note = RNA
  misc_feature 45: note = RNA
  misc_feature 46: note = RNA
  misc_feature 47: note = RNA
  misc_feature 48: note = RNA
  misc_feature 49: note = RNA
  misc_feature 50: note = RNA
  misc_feature 51: note = RNA
  misc_feature 52: note = RNA
  misc_feature 53: note = RNA
  misc_feature 54: note = RNA
  misc_feature 55: note = RNA
  misc_feature 56: note = RNA
  misc_feature 57: note = RNA
  misc_feature 58: note = RNA
  misc_feature 59: note = RNA
  misc_feature 60: note = RNA
  misc_feature 61: note = RNA
  misc_feature 62: note = RNA
  misc_feature 63: note = RNA
  misc_feature 64: note = RNA
  misc_feature 65: note = RNA
  misc_feature 66: note = RNA
  misc_feature 67: note = RNA
  misc_feature 68: note = RNA
  misc_feature 69: note = RNA
  misc_feature 70: note = RNA
  misc_feature 71: note = RNA
  misc_feature 72: note = RNA
  misc_feature 73: note = RNA
  misc_feature 74: note = RNA
  misc_feature 75: note = RNA
  misc_feature 76: note = RNA
  misc_feature 77: note = RNA
  misc_feature 78: note = RNA
  misc_feature 79: note = RNA
  misc_feature 80: note = RNA
  misc_feature 81: note = RNA
  misc_feature 82: note = RNA
  misc_feature 83: note = RNA
  misc_feature 84: note = RNA
  misc_feature 85: note = RNA
  misc_feature 86: note = RNA
  misc_feature 87: note = RNA
  misc_feature 88: note = RNA
  misc_feature 89: note = RNA
  misc_feature 90: note = RNA
  misc_feature 91: note = RNA
  misc_feature 92: note = RNA
  misc_feature 93: note = RNA
  misc_feature 94: note = RNA
  misc_feature 95: note = RNA
  misc_feature 96: note = RNA
  misc_feature 97: note = RNA
  misc_feature 98: note = RNA
  misc_feature 99: note = DNA
  misc_feature 100: note = DNA

SEQ ID NO: 2119 - DNA, 100 bp, synthetic construct
  source 1..100: mol_type = other DNA
  modified_base 1: mod_base = OTHER; note = 2'-O-methyl ribonucleotide
  modified_base 2: mod_base = OTHER; note = 2'-O-methyl ribonucleotide
  modified_base 3: mod_base = OTHER; note = 2'-O-methyl ribonucleotide
  modified_base 29: mod_base = OTHER; note = 2'-O-methyl ribonucleotide
  modified_base 30: mod_base = OTHER; note = 2'-O-methyl ribonucleotide
  modified_base 31: mod_base = OTHER; note = 2'-O-methyl ribonucleotide
  modified_base 32: mod_base = OTHER; note = 2'-O-methyl ribonucleotide
  modified_base 33: mod_base = OTHER; note = 2'-O-methyl ribonucleotide
  modified_base 34: mod_base = OTHER; note = 2'-O-methyl ribonucleotide
  modified_base 35: mod_base = OTHER; note = 2'-O-methyl ribonucleotide
  modified_base 36: mod_base = OTHER; note = 2'-O-methyl ribonucleotide
  modified_base 37: mod_base = OTHER; note = 2'-O-methyl ribonucleotide
  modified_base 38: mod_base = OTHER; note = 2'-O-methyl ribonucleotide
  modified_base 39: mod_base = OTHER; note = 2'-O-methyl ribonucleotide
  modified_base 40: mod_base = OTHER; note = 2'-O-methyl ribonucleotide
  modified_base 69: mod_base = OTHER; note = 2'-O-methyl ribonucleotide
  modified_base 70: mod_base = OTHER; note = 2'-O-methyl ribonucleotide
  modified_base 71: mod_base = OTHER; note = 2'-O-methyl ribonucleotide
  modified_base 72: mod_base = OTHER; note = 2'-O-methyl ribonucleotide
  modified_base 73: mod_base = OTHER; note = 2'-O-methyl ribonucleotide
  modified_base 74: mod_base = OTHER; note = 2'-O-methyl ribonucleotide
  modified_base 75: mod_base = OTHER; note = 2'-O-methyl ribonucleotide
  modified_base 76: mod_base = OTHER; note = 2'-O-methyl ribonucleotide
  modified_base 77: mod_base = OTHER; note = 2'-O-methyl ribonucleotide
  modified_base 78: mod_base = OTHER; note = 2'-O-methyl ribonucleotide
  modified_base 79: mod_base = OTHER; note = 2'-O-methyl ribonucleotide
  modified_base 80: mod_base = OTHER; note = 2'-O-methyl ribonucleotide
  modified_base 81: mod_base = OTHER; note = 2'-O-methyl ribonucleotide
  modified_base 82: mod_base = OTHER; note = 2'-O-methyl ribonucleotide
  modified_base 83: mod_base = OTHER; note = 2'-O-methyl ribonucleotide
  modified_base 84: mod_base = OTHER; note = 2'-O-methyl ribonucleotide
  modified_base 85: mod_base = OTHER; note = 2'-O-methyl ribonucleotide
  modified_base 86: mod_base = OTHER; note = 2'-O-methyl ribonucleotide
  modified_base 87: mod_base = OTHER; note = 2'-O-methyl ribonucleotide
  modified_base 88: mod_base = OTHER; note = 2'-O-methyl ribonucleotide
  modified_base 89: mod_base = OTHER; note = 2'-O-methyl ribonucleotide
  modified_base 90: mod_base = OTHER; note = 2'-O-methyl ribonucleotide
  modified_base 91: mod_base = OTHER; note = 2'-O-methyl ribonucleotide
  modified_base 92: mod_base = OTHER; note = 2'-O-methyl ribonucleotide
  modified_base 93: mod_base = OTHER; note = 2'-O-methyl ribonucleotide
  modified_base 94: mod_base = OTHER; note = 2'-O-methyl ribonucleotide
  modified_base 95: mod_base = OTHER; note = 2'-O-methyl ribonucleotide
  modified_base 96: mod_base = OTHER; note = 2'-O-methyl ribonucleotide
  modified_base 97: mod_base = OTHER; note = 2'-O-methyl ribonucleotide
  modified_base 98: mod_base = OTHER; note = 2'-O-methyl ribonucleotide
  modified_base 99: mod_base = OTHER; note = 2'-O-methyl ribonucleotide
  modified_base 100: mod_base = OTHER; note = nebularine
  modified_base 1..4: mod_base = OTHER; note = phosphorothioate linkage
  modified_base 97..100: mod_base = OTHER; note = phosphorothioate linkage
  misc_feature 1: note = RNA
  misc_feature 2: note = RNA
  misc_feature 3: note = RNA
  misc_feature 4: note = RNA
  misc_feature 5: note = RNA
  misc_feature 6: note = RNA
  misc_feature 7: note = RNA
  misc_feature 8: note = RNA
  misc_feature 9: note = RNA
  misc_feature 10: note = RNA
  misc_feature 11: note = RNA
  misc_feature 12: note = RNA
  misc_feature 13: note = RNA
  misc_feature 14: note = RNA
  misc_feature 15: note = RNA
  misc_feature 16: note = RNA
  misc_feature 17: note = RNA
  misc_feature 18: note = RNA
  misc_feature 19: note = RNA
  misc_feature 20: note = RNA
  misc_feature 21: note = RNA
  misc_feature 22: note = RNA
  misc_feature 23: note = RNA
  misc_feature 24: note = RNA
  misc_feature 25: note = RNA
  misc_feature 26: note = RNA
  misc_feature 27: note = RNA
  misc_feature 28: note = RNA
  misc_feature 29: note = RNA
  misc_feature 30: note = RNA
  misc_feature 31: note = RNA
  misc_feature 32: note = RNA
  misc_feature 33: note = RNA
  misc_feature 34: note = RNA
  misc_feature 35: note = RNA
  misc_feature 36: note = RNA
  misc_feature 37: note = RNA
  misc_feature 38: note = RNA
  misc_feature 39: note = RNA
  misc_feature 40: note = RNA
  misc_feature 41: note = RNA
  misc_feature 42: note = RNA
  misc_feature 43: note = RNA
  misc_feature 44: note = RNA
  misc_feature 45: note = RNA
  misc_feature 46: note = RNA
  misc_feature 47: note = RNA
  misc_feature 48: note = RNA
  misc_feature 49: note = RNA
  misc_feature 50: note = RNA
  misc_feature 51: note = RNA
  misc_feature 52: note = RNA
  misc_feature 53: note = RNA
  misc_feature 54: note = RNA
  misc_feature 55: note = RNA
  misc_feature 56: note = RNA
  misc_feature 57: note = RNA
  misc_feature 58: note = RNA
  misc_feature 59: note = RNA
  misc_feature 60: note = RNA
  misc_feature 61: note = RNA
  misc_feature 62: note = RNA
  misc_feature 63: note = RNA
  misc_feature 64: note = RNA
  misc_feature 65: note = RNA
  misc_feature 66: note = RNA
  misc_feature 67: note = RNA
  misc_feature 68: note = RNA
  misc_feature 69: note = RNA
  misc_feature 70: note = RNA
  misc_feature 71: note = RNA
  misc_feature 72: note = RNA
  misc_feature 73: note = RNA
  misc_feature 74: note = RNA
  misc_feature 75: note = RNA
  misc_feature 76: note = RNA
  misc_feature 77: note = RNA
  misc_feature 78: note = RNA
  misc_feature 79: note = RNA
  misc_feature 80: note = RNA
  misc_feature 81: note = RNA
  misc_feature 82: note = RNA
  misc_feature 83: note = RNA
  misc_feature 84: note = RNA
  misc_feature 85: note = RNA
  misc_feature 86: note = RNA
  misc_feature 87: note = RNA
  misc_feature 88: note = RNA
  misc_feature 89: note = RNA
  misc_feature 90: note = RNA
  misc_feature 91: note = RNA
  misc_feature 92: note = RNA
  misc_feature 93: note = RNA
  misc_feature 94: note = RNA
  misc_feature 95: note = RNA
  misc_feature 96: note = RNA
  misc_feature 97: note = RNA
  misc_feature 98: note = RNA
  misc_feature 99: note = RNA
  misc_feature 100: note = DNA
caggttccatgggatgctctgttttagagctagaaatagcaagttaaaataaggctagtccgttatcaacttgaaaaagtggcaccgagtcggtgctttn

SEQ ID NO: 2120 - DNA, 100 bp, synthetic construct; identical to SEQ ID NO: 2119
  source 1..100: mol_type = other DNA
  modified_base 1: mod_base = OTHER; note = 2'-O-methyl ribonucleotide
  modified_base 2: mod_base = OTHER; note = 2'-O-methyl ribonucleotide
  modified_base 3: mod_base = OTHER; note = 2'-O-methyl ribonucleotide
  modified_base 21: mod_base = OTHER; note = 2'-O-methyl ribonucleotide
  modified_base 28: mod_base = OTHER; note = 2'-O-methyl ribonucleotide
  modified_base 29: mod_base = OTHER; note = 2'-O-methyl ribonucleotide
  modified_base 30: mod_base = OTHER; note = 2'-O-methyl ribonucleotide
  modified_base 31: mod_base = OTHER; note = 2'-O-methyl ribonucleotide
  modified_base 32: mod_base = OTHER; note = 2'-O-methyl ribonucleotide
  modified_base 34: mod_base = OTHER; note = 2'-O-methyl ribonucleotide
  modified_base 35: mod_base = OTHER; note = 2'-O-methyl ribonucleotide
  modified_base 36: mod_base = OTHER; note = 2'-O-methyl ribonucleotide
  modified_base 37: mod_base = OTHER; note = 2'-O-methyl ribonucleotide
  modified_base 38: mod_base = OTHER; note = 2'-O-methyl ribonucleotide
  modified_base 39: mod_base = OTHER; note = 2'-O-methyl ribonucleotide
  modified_base 40: mod_base = OTHER; note = 2'-O-methyl ribonucleotide
  modified_base 41: mod_base = OTHER; note = 2'-O-methyl ribonucleotide
  modified_base 42: mod_base = OTHER; note = 2'-O-methyl ribonucleotide
  modified_base 46: mod_base = OTHER; note = 2'-O-methyl ribonucleotide
  modified_base 48: mod_base = OTHER; note = 2'-O-methyl ribonucleotide
  modified_base 50: mod_base = OTHER; note = 2'-O-methyl ribonucleotide
  modified_base 52: mod_base = OTHER; note = 2'-O-methyl ribonucleotide
  modified_base 53: mod_base = OTHER; note = 2'-O-methyl ribonucleotide
  modified_base 54: mod_base = OTHER; note = 2'-O-methyl ribonucleotide
  modified_base 57: mod_base = OTHER; note = 2'-O-methyl ribonucleotide
  modified_base 61: mod_base = OTHER; note = 2'-O-methyl ribonucleotide
  modified_base 66: mod_base = OTHER; note = 2'-O-methyl ribonucleotide
  modified_base 67: mod_base = OTHER; note = 2'-O-methyl ribonucleotide
  modified_base 70: mod_base = OTHER; note = 2'-O-methyl ribonucleotide
  modified_base 71: mod_base = OTHER; note = 2'-O-methyl ribonucleotide
  modified_base 72: mod_base = OTHER; note = 2'-O-methyl ribonucleotide
  modified_base 74: mod_base = OTHER; note = 2'-O-methyl ribonucleotide
  modified_base 75: mod_base = OTHER; note = 2'-O-methyl ribonucleotide
  modified_base 76: mod_base = OTHER; note = 2'-O-methyl ribonucleotide
  modified_base 77: mod_base = OTHER; note = 2'-O-methyl ribonucleotide
  modified_base 78: mod_base = OTHER; note = 2'-O-methyl ribonucleotide
  modified_base 79: mod_base = OTHER; note = 2'-O-methyl ribonucleotide
  modified_base 80: mod_base = OTHER; note = 2'-O-methyl ribonucleotide
  modified_base 82: mod_base = OTHER; note = 2'-O-methyl ribonucleotide
  modified_base 83: mod_base = OTHER; note = 2'-O-methyl ribonucleotide
  modified_base 84: mod_base = OTHER; note = 2'-O-methyl ribonucleotide
  modified_base 85: mod_base = OTHER; note = 2'-O-methyl ribonucleotide
  modified_base 86: mod_base = OTHER; note = 2'-O-methyl ribonucleotide
  modified_base 87: mod_base = OTHER; note = 2'-O-methyl ribonucleotide
  modified_base 89: mod_base = OTHER; note = 2'-O-methyl ribonucleotide
  modified_base 92: mod_base = OTHER; note = 2'-O-methyl ribonucleotide
  modified_base 93: mod_base = OTHER; note = 2'-O-methyl ribonucleotide
  modified_base 94: mod_base = OTHER; note = 2'-O-methyl ribonucleotide
  modified_base 95: mod_base = OTHER; note = 2'-O-methyl ribonucleotide
  modified_base 96: mod_base = OTHER; note = 2'-O-methyl ribonucleotide
  modified_base 97: mod_base = OTHER; note = 2'-O-methyl ribonucleotide
  modified_base 98: mod_base = OTHER; note = 2'-O-methyl ribonucleotide
  modified_base 99: mod_base = OTHER; note = 2'-O-methyl ribonucleotide
  modified_base 100: mod_base = OTHER; note = nebularine
  modified_base 1..4: mod_base = OTHER; note = phosphorothioate linkage
  modified_base 97..100: mod_base = OTHER; note = phosphorothioate linkage
  misc_feature 1: note = RNA
  misc_feature 2: note = RNA
  misc_feature 3: note = RNA
  misc_feature 4: note = RNA
  misc_feature 5: note = RNA
  misc_feature 6: note = RNA
  misc_feature 7: note = RNA
  misc_feature 8: note = RNA
  misc_feature 9: note = RNA
  misc_feature 10: note = RNA
  misc_feature 11: note = RNA
  misc_feature 12: note = RNA
  misc_feature 13: note = RNA
  misc_feature 14: note = RNA
  misc_feature 15: note = RNA
  misc_feature 16: note = RNA
  misc_feature 17: note = RNA
  misc_feature 18: note = RNA
  misc_feature 19: note = RNA
  misc_feature 20: note = RNA
  misc_feature 21: note = RNA
  misc_feature 22: note = RNA
  misc_feature 23: note = RNA
  misc_feature 24: note = RNA
  misc_feature 25: note = RNA
  misc_feature 26: note = RNA
  misc_feature 27: note = RNA
  misc_feature 28: note = RNA
  misc_feature 29: note = RNA
  misc_feature 30: note = RNA
  misc_feature 31: note = RNA
  misc_feature 32: note = RNA
  misc_feature 33: note = RNA
  misc_feature 34: note = RNA
  misc_feature 35: note = RNA
  misc_feature 36: note = RNA
  misc_feature 37: note = RNA
  misc_feature 38: note = RNA
  misc_feature 39: note = RNA
  misc_feature 40: note = RNA
  misc_feature 41: note = RNA
  misc_feature 42: note = RNA
  misc_feature 43: note = RNA
  misc_feature 44: note = RNA
  misc_feature 45: note = RNA
  misc_feature 46: note = RNA
  misc_feature 47: note = RNA
  misc_feature 48: note = RNA
  misc_feature 49: note = RNA
  misc_feature 50: note = RNA
  misc_feature 51: note = RNA
  misc_feature 52: note = RNA
  misc_feature 53: note = RNA
  misc_feature 54: note = RNA
  misc_feature 55: note = RNA
  misc_feature 56: note = RNA
  misc_feature 57: note = RNA
  misc_feature 58: note = RNA
  misc_feature 59: note = RNA
  misc_feature 60: note = RNA
  misc_feature 61: note = RNA
  misc_feature 62: note = RNA
  misc_feature 63: note = RNA
  misc_feature 64: note = RNA
  misc_feature 65: note = RNA
  misc_feature 66: note = RNA
  misc_feature 67: note = RNA
  misc_feature 68: note = RNA
  misc_feature 69: note = RNA
  misc_feature 70: note = RNA
  misc_feature 71: note = RNA
  misc_feature 72: note = RNA
  misc_feature 73: note = RNA
  misc_feature 74: note = RNA
  misc_feature 75: note = RNA
  misc_feature 76: note = RNA
  misc_feature 77: note = RNA
  misc_feature 78: note = RNA
  misc_feature 79: note = RNA
  misc_feature 80: note = RNA
  misc_feature 81: note = RNA
  misc_feature 82: note = RNA
  misc_feature 83: note = RNA
  misc_feature 84: note = RNA
  misc_feature 85: note = RNA
  misc_feature 86: note = RNA
  misc_feature 87: note = RNA
  misc_feature 88: note = RNA
  misc_feature 89: note = RNA
  misc_feature 90: note = RNA
  misc_feature 91: note = RNA
  misc_feature 92: note = RNA
  misc_feature 93: note = RNA
  misc_feature 94: note = RNA
  misc_feature 95: note = RNA
  misc_feature 96: note = RNA
  misc_feature 97: note = RNA
  misc_feature 98: note = RNA
  misc_feature 99: note = RNA
  misc_feature 100: note = DNA

SEQ ID NO: 2121 - DNA, 103 bp, synthetic construct; identical to SEQ ID NO: 1797
  source 1..103: mol_type = other DNA
  modified_base 1: mod_base = OTHER; note = 2'-O-methyl ribonucleotide
  modified_base 2: mod_base = OTHER; note = 2'-O-methyl ribonucleotide
  modified_base 3: mod_base = OTHER; note = 2'-O-methyl ribonucleotide
  modified_base 29: mod_base = OTHER; note = 2'-O-methyl ribonucleotide
  modified_base 30: mod_base = OTHER; note = 2'-O-methyl ribonucleotide
  modified_base 31: mod_base = OTHER; note = 2'-O-methyl ribonucleotide
  modified_base 32: mod_base = OTHER; note = 2'-O-methyl ribonucleotide
  modified_base 33: mod_base = OTHER; note = 2'-O-methyl ribonucleotide
  modified_base 34: mod_base = OTHER; note = 2'-O-methyl ribonucleotide
  modified_base 35: mod_base = OTHER; note = 2'-O-methyl ribonucleotide
  modified_base 36: mod_base = OTHER; note = 2'-O-methyl ribonucleotide
  modified_base 37: mod_base = OTHER; note = 2'-O-methyl ribonucleotide
  modified_base 38: mod_base = OTHER; note = 2'-O-methyl ribonucleotide
  modified_base 39: mod_base = OTHER; note = 2'-O-methyl ribonucleotide
  modified_base 40: mod_base = OTHER; note = 2'-O-methyl ribonucleotide
  modified_base 69: mod_base = OTHER; note = 2'-O-methyl ribonucleotide
  modified_base 70: mod_base = OTHER; note = 2'-O-methyl ribonucleotide
  modified_base 71: mod_base = OTHER; note = 2'-O-methyl ribonucleotide
  modified_base 72: mod_base = OTHER; note = 2'-O-methyl ribonucleotide
  modified_base 73: mod_base = OTHER; note = 2'-O-methyl ribonucleotide
  modified_base 74: mod_base = OTHER; note = 2'-O-methyl ribonucleotide
  modified_base 75: mod_base = OTHER; note = 2'-O-methyl ribonucleotide
  modified_base 76: mod_base = OTHER; note = 2'-O-methyl ribonucleotide
  modified_base 77: mod_base = OTHER; note = 2'-O-methyl ribonucleotide
  modified_base 78: mod_base = OTHER; note = 2'-O-methyl ribonucleotide
  modified_base 79: mod_base = OTHER; note = 2'-O-methyl ribonucleotide
  modified_base 80: mod_base = OTHER; note = 2'-O-methyl ribonucleotide
  modified_base 81: mod_base = OTHER; note = 2'-O-methyl ribonucleotide
  modified_base 82: mod_base = OTHER; note = 2'-O-methyl ribonucleotide
  modified_base 83: mod_base = OTHER; note = 2'-O-methyl ribonucleotide
  modified_base 84: mod_base = OTHER; note = 2'-O-methyl ribonucleotide
  modified_base 85: mod_base = OTHER; note = 2'-O-methyl ribonucleotide
  modified_base 86: mod_base = OTHER; note = 2'-O-methyl ribonucleotide
  modified_base 87: mod_base = OTHER; note = 2'-O-methyl ribonucleotide
  modified_base 88: mod_base = OTHER; note = 2'-O-methyl ribonucleotide
  modified_base 89: mod_base = OTHER; note = 2'-O-methyl ribonucleotide
  modified_base 90: mod_base = OTHER; note = 2'-O-methyl ribonucleotide
  modified_base 91: mod_base = OTHER; note = 2'-O-methyl ribonucleotide
  modified_base 92: mod_base = OTHER; note = 2'-O-methyl ribonucleotide
  modified_base 93: mod_base = OTHER; note = 2'-O-methyl ribonucleotide
  modified_base 94: mod_base = OTHER; note = 2'-O-methyl ribonucleotide
  modified_base 95: mod_base = OTHER; note = 2'-O-methyl ribonucleotide
  modified_base 96: mod_base = OTHER; note = 2'-O-methyl ribonucleotide
  modified_base 97: mod_base = OTHER; note = 2'-O-methyl ribonucleotide
  modified_base 98: mod_base = OTHER; note = 2'-O-methyl ribonucleotide
  modified_base 99: mod_base = OTHER; note = 2'-O-methyl ribonucleotide
  modified_base 100: mod_base = OTHER; note = 2'-O-methyl ribonucleotide
  modified_base 101: mod_base = OTHER; note = nebularine
  modified_base 102: mod_base = OTHER; note = nebularine
  modified_base 103: mod_base = OTHER; note = nebularine
  modified_base 1..4: mod_base = OTHER; note = phosphorothioate linkage
  modified_base 97..100: mod_base = OTHER; note = phosphorothioate linkage
  misc_feature 1: note = RNA
  misc_feature 2: note = RNA
  misc_feature 3: note = RNA
  misc_feature 4: note = RNA
  misc_feature 5: note = RNA
  misc_feature 6: note = RNA
  misc_feature 7: note = RNA
  misc_feature 8: note = RNA
  misc_feature 9: note = RNA
  misc_feature 10: note = RNA
  misc_feature 11: note = RNA
  misc_feature 12: note = RNA
  misc_feature 13: note = RNA
  misc_feature 14: note = RNA
  misc_feature 15: note = RNA
  misc_feature 16: note = RNA
  misc_feature 17: note = RNA
  misc_feature 18: note = RNA
  misc_feature 19: note = RNA
  misc_feature 20: note = RNA
  misc_feature 21: note = RNA
  misc_feature 22: note = RNA
  misc_feature 23: note = RNA
  misc_feature 24: note = RNA
  misc_feature 25: note = RNA
  misc_feature 26: note = RNA
  misc_feature 27: note = RNA
  misc_feature 28: note = RNA
  misc_feature 29: note = RNA
  misc_feature 30: note = RNA
  misc_feature 31: note = RNA
  misc_feature 32: note = RNA
  misc_feature 33: note = RNA
  misc_feature 34: note = RNA
  misc_feature 35: note = RNA
  misc_feature 36: note = RNA
  misc_feature 37: note = RNA
  misc_feature 38: note = RNA
  misc_feature 39: note = RNA
  misc_feature 40: note = RNA
  misc_feature 41: note = RNA
  misc_feature 42: note = RNA
  misc_feature 43: note = RNA
  misc_feature 44: note = RNA
  misc_feature 45: note = RNA
  misc_feature 46: note = RNA
  misc_feature 47: note = RNA
  misc_feature 48: note = RNA
  misc_feature 49: note = RNA
  misc_feature 50: note = RNA
  misc_feature 51: note = RNA
  misc_feature 52: note = RNA
  misc_feature 53: note = RNA
  misc_feature 54: note = RNA
  misc_feature 55: note = RNA
  misc_feature 56: note = RNA
  misc_feature 57: note = RNA
  misc_feature 58: note = RNA
  misc_feature 59: note = RNA
  misc_feature 60: note = RNA
  misc_feature 61: note = RNA
  misc_feature 62: note = RNA
  misc_feature 63: note = RNA
  misc_feature 64: note = RNA
  misc_feature 65: note = RNA
  misc_feature 66: note = RNA
  misc_feature 67: note = RNA
  misc_feature 68: note = RNA
  misc_feature 69: note = RNA
  misc_feature 70: note = RNA
  misc_feature 71: note = RNA
  misc_feature 72: note = RNA
  misc_feature 73: note = RNA
  misc_feature 74: note = RNA
  misc_feature 75: note = RNA
  misc_feature 76: note = RNA
  misc_feature 77: note = RNA
  misc_feature 78: note = RNA
  misc_feature 79: note = RNA
  misc_feature 80: note = RNA
  misc_feature 81: note = RNA
  misc_feature 82: note = RNA
  misc_feature 83: note = RNA
  misc_feature 84: note = RNA
  misc_feature 85: note = RNA
  misc_feature 86: note = RNA
  misc_feature 87: note = RNA
  misc_feature 88: note = RNA
  misc_feature 89: note = RNA
  misc_feature 90: note = RNA
  misc_feature 91: note = RNA
  misc_feature 92: note = RNA
  misc_feature 93: note = RNA
  misc_feature 94: note = RNA
  misc_feature 95: note = RNA
  misc_feature 96: note = RNA
  misc_feature 97: note = RNA
  misc_feature 98: note = RNA
  misc_feature 99: note = RNA
  misc_feature 100: note = RNA
  misc_feature 101: note = DNA
  misc_feature 102: note = DNA
  misc_feature 103: note = DNA

SEQ ID NO: 2122 - RNA, 100 nt, synthetic construct; identical to SEQ ID NO: 287
  source 1..100: mol_type = other RNA
  modified_base 1: mod_base = OTHER; note = 2'-O-methyl ribonucleotide
  modified_base 2: mod_base = OTHER; note = 2'-O-methyl ribonucleotide
  modified_base 3: mod_base = OTHER; note = 2'-O-methyl ribonucleotide
  modified_base 21: mod_base = OTHER; note = 2'-O-methyl ribonucleotide
  modified_base 28: mod_base = OTHER; note = 2'-O-methyl ribonucleotide
  modified_base 29: mod_base = OTHER; note = 2'-O-methyl ribonucleotide
  modified_base 30: mod_base = OTHER; note = 2'-O-methyl ribonucleotide
  modified_base 31: mod_base = OTHER; note = 2'-O-methyl ribonucleotide
  modified_base 32: mod_base = OTHER; note = 2'-O-methyl ribonucleotide
  modified_base 33: mod_base = OTHER; note = 2'-O-methyl ribonucleotide
  modified_base 34: mod_base = OTHER; note = 2'-O-methyl ribonucleotide
  modified_base 35: mod_base = OTHER; note = 2'-O-methyl ribonucleotide
  modified_base 36: mod_base = OTHER; note = 2'-O-methyl ribonucleotide
  modified_base 37: mod_base = OTHER; note = 2'-O-methyl ribonucleotide
  modified_base 38: mod_base = OTHER; note = 2'-O-methyl ribonucleotide
  modified_base 39: mod_base = OTHER; note = 2'-O-methyl ribonucleotide
  modified_base 40: mod_base = OTHER; note = 2'-O-methyl ribonucleotide
  modified_base 41: mod_base = OTHER; note = 2'-O-methyl ribonucleotide
  modified_base 42: mod_base = OTHER; note = 2'-O-methyl ribonucleotide
  modified_base 46: mod_base = OTHER; note = 2'-O-methyl ribonucleotide
  modified_base 48: mod_base = OTHER; note = 2'-O-methyl ribonucleotide
  modified_base 50: mod_base = OTHER; note = 2'-O-methyl ribonucleotide
  modified_base 52: mod_base = OTHER; note = 2'-O-methyl ribonucleotide
  modified_base 53: mod_base = OTHER; note = 2'-O-methyl ribonucleotide
  modified_base 54: mod_base = OTHER; note = 2'-O-methyl ribonucleotide
  modified_base 55: mod_base = OTHER; note = 2'-O-methyl ribonucleotide
  modified_base 56: mod_base = OTHER; note = 2'-O-methyl ribonucleotide
  modified_base 57: mod_base = OTHER; note = 2'-O-methyl ribonucleotide
  modified_base 60: mod_base = OTHER; note = 2'-O-methyl ribonucleotide
  modified_base 61: mod_base = OTHER; note = 2'-O-methyl ribonucleotide
  modified_base 66: mod_base = OTHER; note = 2'-O-methyl ribonucleotide
  modified_base 67: mod_base = OTHER; note = 2'-O-methyl ribonucleotide
  modified_base 70: mod_base = OTHER; note = 2'-O-methyl ribonucleotide
  modified_base 71: mod_base = OTHER; note = 2'-O-methyl ribonucleotide
  modified_base 72: mod_base = OTHER; note = 2'-O-methyl ribonucleotide
  modified_base 73: mod_base = OTHER; note = 2'-O-methyl ribonucleotide
  modified_base 74: mod_base = OTHER; note = 2'-O-methyl ribonucleotide
  modified_base 75: mod_base = OTHER; note = 2'-O-methyl ribonucleotide
  modified_base 76: mod_base = OTHER; note = 2'-O-methyl ribonucleotide
  modified_base 77: mod_base = OTHER; note = 2'-O-methyl ribonucleotide
  modified_base 78: mod_base = OTHER; note = 2'-O-methyl ribonucleotide
  modified_base 79: mod_base = OTHER; note = 2'-O-methyl ribonucleotide
  modified_base 80: mod_base = OTHER; note = 2'-O-methyl ribonucleotide
  modified_base 81: mod_base = OTHER; note = 2'-O-methyl ribonucleotide
  modified_base 83: mod_base = OTHER; note = 2'-O-methyl ribonucleotide
  modified_base 84: mod_base = OTHER; note = 2'-O-methyl ribonucleotide
  modified_base 85: mod_base = OTHER; note = 2'-O-methyl ribonucleotide
  modified_base 86: mod_base = OTHER; note = 2'-O-methyl ribonucleotide
  modified_base 87: mod_base = OTHER; note = 2'-O-methyl ribonucleotide
  modified_base 88: mod_base = OTHER; note = 2'-O-methyl ribonucleotide
  modified_base 89: mod_base = OTHER; note = 2'-O-methyl ribonucleotide
  modified_base 90: mod_base = OTHER; note = 2'-O-methyl ribonucleotide
  modified_base 91: mod_base = OTHER; note = 2'-O-methyl ribonucleotide
  modified_base 92: mod_base = OTHER; note = 2'-O-methyl ribonucleotide
  modified_base 93: mod_base = OTHER; note = 2'-O-methyl ribonucleotide
  modified_base 94: mod_base = OTHER; note = 2'-O-methyl ribonucleotide
  modified_base 95: mod_base = OTHER; note = 2'-O-methyl ribonucleotide
  modified_base 96: mod_base = OTHER; note = 2'-O-methyl ribonucleotide
  modified_base 97: mod_base = OTHER; note = 2'-O-methyl ribonucleotide
  modified_base 98: mod_base = OTHER; note = 2'-O-methyl ribonucleotide
  modified_base 99: mod_base = OTHER; note = 2'-O-methyl ribonucleotide
  modified_base 100: mod_base = OTHER; note = 2'-O-methyl ribonucleotide
  modified_base 1..4: mod_base = OTHER; note = phosphorothioate linkage
  modified_base 45..46: mod_base = OTHER; note = phosphorothioate linkage
  modified_base 64..65: mod_base = OTHER; note = phosphorothioate linkage
  modified_base 97..100: mod_base = OTHER; note = phosphorothioate linkage

SEQ ID NO: 2123 - RNA, 100 nt, synthetic construct
  source 1..100: mol_type = other RNA
  modified_base 1: mod_base = OTHER; note = 2'-O-methyl ribonucleotide
  modified_base 2: mod_base = OTHER; note = 2'-O-methyl ribonucleotide
  modified_base 3: mod_base = OTHER; note = 2'-O-methyl ribonucleotide
  modified_base 98: mod_base = OTHER; note = 2'-O-methyl ribonucleotide
  modified_base 99: mod_base = OTHER; note = 2'-O-methyl ribonucleotide
  modified_base 100: mod_base = OTHER; note = 2'-O-methyl ribonucleotide
  modified_base 1..4: mod_base = OTHER; note = phosphorothioate linkage
  modified_base 97..100: mod_base = OTHER; note = phosphorothioate linkage
gcaaatcttgattttggctcgttttagagctagaaatagcaagttaaaataaggctagtccgttatcaacttgaaaaagtggcaccgagtcggtgctttt

SEQ ID NO: 2124 - RNA, 100 nt, synthetic construct
  source 1..100: mol_type = other RNA
  modified_base 1: mod_base = OTHER; note = 2'-O-methyl ribonucleotide
  modified_base 2: mod_base = OTHER; note = 2'-O-methyl ribonucleotide
  modified_base 3: mod_base = OTHER; note = 2'-O-methyl ribonucleotide
  modified_base 98: mod_base = OTHER; note = 2'-O-methyl ribonucleotide
  modified_base 99: mod_base = OTHER; note = 2'-O-methyl ribonucleotide
  modified_base 100: mod_base = OTHER; note = 2'-O-methyl ribonucleotide
  modified_base 1..4: mod_base = OTHER; note = phosphorothioate linkage
  modified_base 97..100: mod_base = OTHER; note = phosphorothioate linkage
gatgtaaaaattttagccaagttttagagctagaaatagcaagttaaaataaggctagtccgttatcaacttgaaaaagtggcaccgagtcggtgctttt

SEQ ID NO: 2125 - RNA, 100 nt, synthetic construct
  source 1..100: mol_type = other RNA
  modified_base 1: mod_base = OTHER; note = 2'-O-methyl ribonucleotide
  modified_base 2: mod_base = OTHER; note = 2'-O-methyl ribonucleotide
  modified_base 3: mod_base = OTHER; note = 2'-O-methyl ribonucleotide
  modified_base 98: mod_base = OTHER; note = 2'-O-methyl ribonucleotide
  modified_base 99: mod_base = OTHER; note = 2'-O-methyl ribonucleotide
  modified_base 100: mod_base = OTHER; note = 2'-O-methyl ribonucleotide
  modified_base 1..4: mod_base = OTHER; note = phosphorothioate linkage
  modified_base 97..100: mod_base = OTHER; note = phosphorothioate linkage
atgaaaaacttgagagttgcgttttagagctagaaatagcaagttaaaataaggctagtccgttatcaacttgaaaaagtggcaccgagtcggtgctttt

SEQ ID NO: 2126 - RNA, 100 nt, synthetic construct
  source 1..100: mol_type = other RNA
  modified_base 1: mod_base = OTHER; note = 2'-O-methyl ribonucleotide
  modified_base 2: mod_base = OTHER; note = 2'-O-methyl ribonucleotide
  modified_base 3: mod_base = OTHER; note = 2'-O-methyl ribonucleotide
  modified_base 98: mod_base = OTHER; note = 2'-O-methyl ribonucleotide
  modified_base 99: mod_base = OTHER; note = 2'-O-methyl ribonucleotide
  modified_base 100: mod_base = OTHER; note = 2'-O-methyl ribonucleotide
  modified_base 1..4: mod_base = OTHER; note = phosphorothioate linkage
  modified_base 97..100: mod_base = OTHER; note = phosphorothioate linkage
acttgggatcacaaagcaaagttttagagctagaaatagcaagttaaaataaggctagtccgttatcaacttgaaaaagtggcaccgagtcggtgctttt

SEQ ID NO: 2127 - RNA, 100 nt, synthetic construct
  source 1..100: mol_type = other RNA
  modified_base 1: mod_base = OTHER; note = 2'-O-methyl ribonucleotide
  modified_base 2: mod_base = OTHER; note = 2'-O-methyl ribonucleotide
  modified_base 3: mod_base = OTHER; note = 2'-O-methyl ribonucleotide
  modified_base 98: mod_base = OTHER; note = 2'-O-methyl ribonucleotide
  modified_base 99: mod_base = OTHER; note = 2'-O-methyl ribonucleotide
  modified_base 100: mod_base = OTHER; note = 2'-O-methyl ribonucleotide
  modified_base 1..4: mod_base = OTHER; note = phosphorothioate linkage
  modified_base 97..100: mod_base = OTHER; note = phosphorothioate linkage
aagatttggtgttttctactgttttagagctagaaatagcaagttaaaataaggctagtccgttatcaacttgaaaaagtggcaccgagtcggtgctttt

SEQ ID NO: 2128 - RNA, 100 nt, synthetic construct
  source 1..100: mol_type = other RNA
  modified_base 1: mod_base = OTHER; note = 2'-O-methyl ribonucleotide
  modified_base 2: mod_base = OTHER; note = 2'-O-methyl ribonucleotide
  modified_base 3: mod_base = OTHER; note = 2'-O-methyl ribonucleotide
  modified_base 98: mod_base = OTHER; note = 2'-O-methyl ribonucleotide
  modified_base 99: mod_base = OTHER; note = 2'-O-methyl ribonucleotide
  modified_base 100: mod_base = OTHER; note = 2'-O-methyl ribonucleotide
  modified_base 1..4: mod_base = OTHER; note = phosphorothioate linkage
  modified_base 97..100: mod_base = OTHER; note = phosphorothioate linkage
aaggagtacccggggctgcagttttagagctagaaatagcaagttaaaataaggctagtccgttatcaacttgaaaaagtggcaccgagtcggtgctttt

SEQ ID NO: 2129 - RNA, 100 nt, synthetic construct
  source 1..100: mol_type = other RNA
  modified_base 1: mod_base = OTHER; note = 2'-O-methyl ribonucleotide
  modified_base 2: mod_base = OTHER; note = 2'-O-methyl ribonucleotide
  modified_base 3: mod_base = OTHER; note = 2'-O-methyl ribonucleotide
  modified_base 98: mod_base = OTHER; note = 2'-O-methyl ribonucleotide
  modified_base 99: mod_base = OTHER; note = 2'-O-methyl ribonucleotide
  modified_base 100: mod_base = OTHER; note = 2'-O-methyl ribonucleotide
  modified_base 1..4: mod_base = OTHER; note = phosphorothioate linkage
  modified_base 97..100: mod_base = OTHER; note = phosphorothioate linkage
cagaggccaggagcgccagggttttagagctagaaatagcaagttaaaataaggctagtccgttatcaacttgaaaaagtggcaccgagtcggtgctttt

SEQ ID NO: 2130 - RNA, 100 nt, synthetic construct
  source 1..100: mol_type = other RNA
  modified_base 1: mod_base = OTHER; note = 2'-O-methyl ribonucleotide
  modified_base 2: mod_base = OTHER; note = 2'-O-methyl ribonucleotide
  modified_base 3: mod_base = OTHER; note = 2'-O-methyl ribonucleotide
  modified_base 98: mod_base = OTHER; note = 2'-O-methyl ribonucleotide
  modified_base 99: mod_base = OTHER; note = 2'-O-methyl ribonucleotide
  modified_base 100: mod_base = OTHER; note = 2'-O-methyl ribonucleotide
  modified_base 1..4: mod_base = OTHER; note = phosphorothioate linkage
  modified_base 97..100: mod_base = OTHER; note = phosphorothioate linkage
agaggccaggagcgccaggagttttagagctagaaatagcaagttaaaataaggctagtccgttatcaacttgaaaaagtggcaccgagtcggtgctttt

SEQ ID NO: 2131 - RNA, 100 nt, synthetic construct
  source 1..100: mol_type = other RNA
  modified_base 1: mod_base = OTHER; note = 2'-O-methyl ribonucleotide
  modified_base 2: mod_base = OTHER; note = 2'-O-methyl ribonucleotide
  modified_base 3: mod_base = OTHER; note = 2'-O-methyl ribonucleotide
  modified_base 98: mod_base = OTHER; note = 2'-O-methyl ribonucleotide
  modified_base 99: mod_base = OTHER; note = 2'-O-methyl ribonucleotide
  modified_base 100: mod_base = OTHER; note = 2'-O-methyl ribonucleotide
  modified_base 1..4: mod_base = OTHER; note = phosphorothioate linkage
  modified_base 97..100: mod_base = OTHER; note = phosphorothioate linkage
ctcggcctctgaagctcctggttttagagctagaaatagcaagttaaaataaggctagtccgttatcaacttgaaaaagtggcaccgagtcggtgctttt

SEQ ID NO: 2132 - DNA, 100 bp, synthetic construct
  source 1..100: mol_type = other DNA
  modified_base 1: mod_base = OTHER; note = 2'-O-methyl ribonucleotide
  modified_base 2: mod_base = OTHER; note = 2'-O-methyl ribonucleotide
  modified_base 3: mod_base = OTHER; note = 2'-O-methyl ribonucleotide
  modified_base 21: mod_base = OTHER; note = 2'-O-methyl ribonucleotide
  modified_base 28: mod_base = OTHER; note = 2'-O-methyl ribonucleotide
  modified_base 29: mod_base = OTHER; note = 2'-O-methyl ribonucleotide
  modified_base 30: mod_base = OTHER; note = 2'-O-methyl ribonucleotide
  modified_base 31: mod_base = OTHER; note = 2'-O-methyl ribonucleotide
  modified_base 32: mod_base = OTHER; note = 2'-O-methyl ribonucleotide
  modified_base 33: mod_base = OTHER; note = 2'-O-methyl ribonucleotide
  modified_base 34: mod_base = OTHER; note = 2'-O-methyl ribonucleotide
  modified_base 35: mod_base = OTHER; note = 2'-O-methyl ribonucleotide
  modified_base 36: mod_base = OTHER; note = 2'-O-methyl ribonucleotide
  modified_base 37: mod_base = OTHER; note = 2'-O-methyl ribonucleotide
  modified_base 38: mod_base = OTHER; note = 2'-O-methyl ribonucleotide
  modified_base 39: mod_base = OTHER; note = 2'-O-methyl ribonucleotide
  modified_base 40: mod_base = OTHER; note = 2'-O-methyl ribonucleotide
  modified_base 41: mod_base = OTHER; note = 2'-O-methyl ribonucleotide
  modified_base 42: mod_base = OTHER; note = 2'-O-methyl ribonucleotide
  modified_base 46: mod_base = OTHER; note = 2'-O-methyl ribonucleotide
  modified_base 48: mod_base = OTHER; note = 2'-O-methyl ribonucleotide
  modified_base 50: mod_base = OTHER; note = 2'-O-methyl ribonucleotide
  modified_base 52: mod_base = OTHER; note = 2'-O-methyl ribonucleotide
  modified_base 53: mod_base = OTHER; note = 2'-O-methyl ribonucleotide
  modified_base 54: mod_base = OTHER; note = 2'-O-methyl ribonucleotide
  modified_base 55: mod_base = OTHER; note = 2'-O-methyl ribonucleotide
  modified_base 56: mod_base = OTHER; note = 2'-O-methyl ribonucleotide
  modified_base 57: mod_base = OTHER; note = 2'-O-methyl ribonucleotide
  modified_base 60: mod_base = OTHER; note = 2'-O-methyl ribonucleotide
  modified_base 61: mod_base = OTHER; note = 2'-O-methyl ribonucleotide
  modified_base 66: mod_base = OTHER; note = 2'-O-methyl ribonucleotide
  modified_base 67: mod_base = OTHER; note = 2'-O-methyl ribonucleotide
  modified_base 70: mod_base = OTHER; note = 2'-O-methyl ribonucleotide
  modified_base 71: mod_base = OTHER; note = 2'-O-methyl ribonucleotide
  modified_base 72: mod_base = OTHER; note = 2'-O-methyl ribonucleotide
  modified_base 73: mod_base = OTHER; note = 2'-O-methyl ribonucleotide
  modified_base 74: mod_base = OTHER; note = 2'-O-methyl ribonucleotide
  modified_base 75: mod_base = OTHER; note = 2'-O-methyl ribonucleotide
  modified_base 76: mod_base = OTHER; note = 2'-O-methyl ribonucleotide
  modified_base 77: mod_base = OTHER; note = 2'-O-methyl ribonucleotide
  modified_base 78: mod_base = OTHER; note = 2'-O-methyl ribonucleotide
  modified_base 79: mod_base = OTHER; note = 2'-O-methyl ribonucleotide
  modified_base 80: mod_base = OTHER; note = 2'-O-methyl ribonucleotide
  modified_base 81: mod_base = OTHER; note = 2'-O-methyl ribonucleotide
  modified_base 83: mod_base = OTHER; note = 2'-O-methyl ribonucleotide
  modified_base 84: mod_base = OTHER; note = 2'-O-methyl ribonucleotide
  modified_base 85: mod_base = OTHER; note = 2'-O-methyl ribonucleotide
  modified_base 86: mod_base = OTHER; note = 2'-O-methyl ribonucleotide
  modified_base 87: mod_base = OTHER; note = 2'-O-methyl ribonucleotide
  modified_base 88: mod_base = OTHER; note = 2'-O-methyl ribonucleotide
  modified_base 89: mod_base = OTHER; note = 2'-O-methyl ribonucleotide
  modified_base 90: mod_base = OTHER; note = 2'-O-methyl ribonucleotide
  modified_base 91: mod_base = OTHER; note = 2'-O-methyl ribonucleotide
  modified_base 92: mod_base = OTHER; note = 2'-O-methyl ribonucleotide
  modified_base 93: mod_base = OTHER; note = 2'-O-methyl ribonucleotide
  modified_base 94: mod_base = OTHER; note = 2'-O-methyl ribonucleotide
  modified_base 95: mod_base = OTHER; note = 2'-O-methyl ribonucleotide
  modified_base 96: mod_base = OTHER; note = 2'-O-methyl ribonucleotide
  modified_base 97: mod_base = OTHER; note = 2'-O-methyl ribonucleotide
  modified_base 98: mod_base = OTHER; note = 2'-O-methyl ribonucleotide
  modified_base 99: mod_base = OTHER; note = 2'-O-methyl ribonucleotide
  modified_base 100: mod_base = OTHER; note = 2'-O-methyl ribonucleotide
  modified_base 5: mod_base = OTHER; note = deoxyuridine
  modified_base 15: mod_base = OTHER; note = deoxyuridine
  modified_base 1..4: mod_base = OTHER; note = phosphorothioate linkage
  modified_base 97..100: mod_base = OTHER; note = phosphorothioate linkage
  misc_feature 1: note = RNA
  misc_feature 2: note = RNA
  misc_feature 3: note = RNA
  misc_feature 4: note = RNA
  misc_feature 6: note = RNA
  misc_feature 8: note = RNA
  misc_feature 10: note = RNA
  misc_feature 12: note = RNA
  misc_feature 14: note = RNA
  misc_feature 16: note = RNA
  misc_feature 18: note = RNA
  misc_feature 20: note = RNA
  misc_feature 21: note = RNA
  misc_feature 22: note = RNA
  misc_feature 23: note = RNA
  misc_feature 24: note = RNA
  misc_feature 25: note = RNA
  misc_feature 26: note = RNA
  misc_feature 27: note = RNA
  misc_feature 28: note = RNA
  misc_feature 29: note = RNA
  misc_feature 30: note = RNA
  misc_feature 31: note = RNA
  misc_feature 32: note = RNA
  misc_feature 33: note = RNA
  misc_feature 34: note = RNA
  misc_feature 35: note = RNA
  misc_feature 36: note = RNA
  misc_feature 37: note = RNA
  misc_feature 38: note = RNA
  misc_feature 39: note = RNA
  misc_feature 40: note = RNA
  misc_feature 41: note = RNA
  misc_feature 42: note = RNA
  misc_feature 43: note = RNA
  misc_feature 44: note = RNA
  misc_feature 45: note = RNA
  misc_feature 46: note = RNA
  misc_feature 47: note = RNA
  misc_feature 48: note = RNA
  misc_feature 49: note = RNA
  misc_feature 50: note = RNA
  misc_feature 51: note = RNA
  misc_feature 52: note = RNA
  misc_feature 53: note = RNA
  misc_feature 54: note = RNA
  misc_feature 55: note = RNA
  misc_feature 56: note = RNA
  misc_feature 57: note = RNA
  misc_feature 58: note = RNA
  misc_feature 59: note = RNA
  misc_feature 60: note = RNA
  misc_feature 61: note = RNA
  misc_feature 62: note = RNA
  misc_feature 63: note = RNA
  misc_feature 64: note = RNA
  misc_feature 65: note = RNA
  misc_feature 66: note = RNA
  misc_feature 67: note = RNA
  misc_feature 68: note = RNA
  misc_feature 69: note = RNA
  misc_feature 70: note = RNA
  misc_feature 71: note = RNA
  misc_feature 72: note = RNA
  misc_feature 73: note = RNA
  misc_feature 74: note = RNA
  misc_feature 75: note = RNA
  misc_feature 76: note = RNA
  misc_feature 77: note = RNA
  misc_feature 78: note = RNA
  misc_feature 79: note = RNA
  misc_feature 80: note = RNA
  misc_feature 81: note = RNA
  misc_feature 82: note = RNA
  misc_feature 83: note = RNA
  misc_feature 84: note = RNA
  misc_feature 85: note = RNA
  misc_feature 86: note = RNA
  misc_feature 87: note = RNA
  misc_feature 88: note = RNA
  misc_feature 89: note = RNA
  misc_feature 90: note = RNA
  misc_feature 91: note = RNA
  misc_feature 92: note = RNA
  misc_feature 93: note = RNA
  misc_feature 94: note = RNA
  misc_feature 95: note = RNA
  misc_feature 96: note = RNA
  misc_feature 97: note = RNA
  misc_feature 98: note = RNA
  misc_feature 99: note = RNA
  misc_feature 100: note = RNA
  misc_feature 5: note = DNA
  misc_feature 7: note = DNA
  misc_feature 9: note = DNA
  misc_feature 11: note = DNA
  misc_feature 13: note = DNA
  misc_feature 15: note = DNA
  misc_feature 17: note = DNA
  misc_feature 19: note = DNA
caggttccatgggatgctctgttttagagctagaaatagcaagttaaaataaggctagtccgttatcaacttgaaaaagtggcaccgagtcggtgctttt

SEQ ID NO: 2133 - DNA, 100 bp, synthetic construct; identical to SEQ ID NO: 2132
  source 1..100: mol_type = other DNA
  modified_base 1: mod_base = OTHER; note = 2'-O-methyl ribonucleotide
  modified_base 2: mod_base = OTHER; note = 2'-O-methyl ribonucleotide
  modified_base 3: mod_base = OTHER; note = 2'-O-methyl ribonucleotide
  modified_base 21: mod_base = OTHER; note = 2'-O-methyl ribonucleotide
  modified_base 28: mod_base = OTHER; note = 2'-O-methyl ribonucleotide
  modified_base 29: mod_base = OTHER; note = 2'-O-methyl ribonucleotide
  modified_base 30: mod_base = OTHER; note = 2'-O-methyl ribonucleotide
  modified_base 31: mod_base = OTHER; note = 2'-O-methyl ribonucleotide
  modified_base 32: mod_base = OTHER; note = 2'-O-methyl ribonucleotide
  modified_base 33: mod_base = OTHER; note = 2'-O-methyl ribonucleotide
  modified_base 34: mod_base = OTHER; note = 2'-O-methyl ribonucleotide
  modified_base 35: mod_base = OTHER; note = 2'-O-methyl ribonucleotide
  modified_base 36: mod_base = OTHER; note = 2'-O-methyl ribonucleotide
  modified_base 37: mod_base = OTHER; note = 2'-O-methyl ribonucleotide
  modified_base 38: mod_base = OTHER; note = 2'-O-methyl ribonucleotide
  modified_base 39: mod_base = OTHER; note = 2'-O-methyl ribonucleotide
  modified_base 40: mod_base = OTHER; note = 2'-O-methyl ribonucleotide
  modified_base 41: mod_base = OTHER; note = 2'-O-methyl ribonucleotide
  modified_base 42: mod_base = OTHER; note = 2'-O-methyl ribonucleotide
  modified_base 46: mod_base = OTHER; note = 2'-O-methyl ribonucleotide
  modified_base 48: mod_base = OTHER; note = 2'-O-methyl ribonucleotide
  modified_base 50: mod_base = OTHER; note = 2'-O-methyl ribonucleotide
  modified_base 52: mod_base = OTHER; note = 2'-O-methyl ribonucleotide
  modified_base 53: mod_base = OTHER; note = 2'-O-methyl ribonucleotide
  modified_base 54: mod_base = OTHER; note = 2'-O-methyl ribonucleotide
  modified_base 55: mod_base = OTHER; note = 2'-O-methyl ribonucleotide
  modified_base 56: mod_base = OTHER; note = 2'-O-methyl ribonucleotide
  modified_base 57: mod_base = OTHER; note = 2'-O-methyl ribonucleotide
  modified_base 60: mod_base = OTHER; note = 2'-O-methyl ribonucleotide
  modified_base 61: mod_base = OTHER; note = 2'-O-methyl ribonucleotide
  modified_base 66: mod_base = OTHER; note = 2'-O-methyl ribonucleotide
  modified_base 67: mod_base = OTHER; note = 2'-O-methyl ribonucleotide
  modified_base 70: mod_base = OTHER; note = 2'-O-methyl ribonucleotide
  modified_base 71: mod_base = OTHER; note = 2'-O-methyl ribonucleotide
  modified_base 72: mod_base = OTHER; note = 2'-O-methyl ribonucleotide
  modified_base 73: mod_base = OTHER; note = 2'-O-methyl ribonucleotide
  modified_base 74: mod_base = OTHER; note = 2'-O-methyl ribonucleotide
  modified_base 75: mod_base = OTHER; note = 2'-O-methyl ribonucleotide
  modified_base 76: mod_base = OTHER; note = 2'-O-methyl ribonucleotide
  modified_base 77: mod_base = OTHER; note = 2'-O-methyl ribonucleotide
  modified_base 78: mod_base = OTHER; note = 2'-O-methyl ribonucleotide
  modified_base 79: mod_base = OTHER; note = 2'-O-methyl ribonucleotide
  modified_base 80: mod_base = OTHER; note = 2'-O-methyl ribonucleotide
  modified_base 81: mod_base = OTHER; note = 2'-O-methyl ribonucleotide
  modified_base 83: mod_base = OTHER; note = 2'-O-methyl ribonucleotide
  modified_base 84: mod_base = OTHER; note = 2'-O-methyl ribonucleotide
  modified_base 85: mod_base = OTHER; note = 2'-O-methyl ribonucleotide
  modified_base 86: mod_base = OTHER; note = 2'-O-methyl ribonucleotide
  modified_base 87: mod_base = OTHER; note = 2'-O-methyl ribonucleotide
  modified_base 88: mod_base = OTHER; note = 2'-O-methyl ribonucleotide
  modified_base 89: mod_base = OTHER; note = 2'-O-methyl ribonucleotide
  modified_base 90: mod_base = OTHER; note = 2'-O-methyl ribonucleotide
  modified_base 91: mod_base = OTHER; note = 2'-O-methyl ribonucleotide
  modified_base 92: mod_base = OTHER; note = 2'-O-methyl ribonucleotide
  modified_base 93: mod_base = OTHER; note = 2'-O-methyl ribonucleotide
  modified_base 94: mod_base = OTHER; note = 2'-O-methyl ribonucleotide
  modified_base 95: mod_base = OTHER; note = 2'-O-methyl ribonucleotide
  modified_base 96: mod_base = OTHER; note = 2'-O-methyl ribonucleotide
  modified_base 97: mod_base = OTHER; note = 2'-O-methyl ribonucleotide
  modified_base 98: mod_base = OTHER; note = 2'-O-methyl ribonucleotide
  modified_base 99: mod_base = OTHER; note = 2'-O-methyl ribonucleotide
  modified_base 100: mod_base = OTHER; note = 2'-O-methyl ribonucleotide
  modified_base 6: mod_base = OTHER; note = deoxyuridine
  modified_base 10: mod_base = OTHER; note = deoxyuridine
  modified_base 18: mod_base = OTHER; note = deoxyuridine
  modified_base 20: mod_base = OTHER; note = deoxyuridine
  modified_base 1..4: mod_base = OTHER; note = phosphorothioate linkage
  modified_base 97..100: mod_base = OTHER; note = phosphorothioate linkage
  misc_feature 1: note = RNA
  misc_feature 2: note = RNA
  misc_feature 3: note = RNA
  misc_feature 5: note = RNA
  misc_feature 7: note = RNA
  misc_feature 9: note = RNA
  misc_feature 11: note = RNA
  misc_feature 13: note = RNA
  misc_feature 15: note = RNA
  misc_feature 17: note = RNA
  misc_feature 19: note = RNA
  misc_feature 21: note = RNA
  misc_feature 22: note = RNA
  misc_feature 23: note = RNA
  misc_feature 24: note = RNA
  misc_feature 25: note = RNA
  misc_feature 26: note = RNA
  misc_feature 27: note = RNA
  misc_feature 28: note = RNA
  misc_feature 29: note = RNA
  misc_feature 30: note = RNA
  misc_feature 31: note = RNA
  misc_feature 32: note = RNA
  misc_feature 33: note = RNA
  misc_feature 34: note = RNA
  misc_feature 35: note = RNA
  misc_feature 36: note = RNA
  misc_feature 37: note = RNA
  misc_feature 38: note = RNA
  misc_feature 39: note = RNA
  misc_feature 40: note = RNA
  misc_feature 41: note = RNA
  misc_feature 42: note = RNA
  misc_feature 43: note = RNA
  misc_feature 44: note = RNA
  misc_feature 45: note = RNA
  misc_feature 46: note = RNA
  misc_feature 47: note = RNA
  misc_feature 48: note = RNA
  misc_feature 49: note = RNA
  misc_feature 50: note = RNA
  misc_feature 51: note = RNA
  misc_feature 52: note = RNA
  misc_feature 53: note = RNA
  misc_feature 54: note = RNA
  misc_feature 55: note = RNA
  misc_feature 56: note = RNA
  misc_feature 57: note = RNA
  misc_feature 58: note = RNA
  misc_feature 59: note = RNA
  misc_feature 60: note = RNA
  misc_feature 61: note = RNA
  misc_feature 62: note = RNA
  misc_feature 63: note = RNA
  misc_feature 64: note = RNA
  misc_feature 65: note = RNA
  misc_feature 66: note = RNA
  misc_feature 67: note = RNA
  misc_feature 68: note = RNA
  misc_feature 69: note = RNA
  misc_feature 70: note = RNA
  misc_feature 71: note = RNA
  misc_feature 72: note = RNA
  misc_feature 73: note = RNA
  misc_feature 74: note = RNA
  misc_feature 75: note = RNA
  misc_feature 76: note = RNA
  misc_feature 77: note = RNA
  misc_feature 78: note = RNA
  misc_feature 79: note = RNA
  misc_feature 80: note = RNA
  misc_feature 81: note = RNA
  misc_feature 82: note = RNA
  misc_feature 83: note = RNA
  misc_feature 84: note = RNA
  misc_feature 85: note = RNA
  misc_feature 86: note = RNA
  misc_feature 87: note = RNA
  misc_feature 88: note = RNA
  misc_feature 89: note = RNA
  misc_feature 90: note = RNA
  misc_feature 91: note = RNA
  misc_feature 92: note = RNA
  misc_feature 93: note = RNA
  misc_feature 94: note = RNA
  misc_feature 95: note = RNA
  misc_feature 96: note = RNA
  misc_feature 97: note = RNA
  misc_feature 98: note = RNA
  misc_feature 99: note = RNA
  misc_feature 100: note = RNA
  misc_feature 4: note = DNA
  misc_feature 6: note = DNA
  misc_feature 8: note = DNA
  misc_feature 10: note = DNA
  misc_feature 12: note = DNA
  misc_feature 14: note = DNA
  misc_feature 16: note = DNA
  misc_feature 18: note = DNA
  misc_feature 20: note = DNA

SEQ ID NO: 2134 - RNA, 99 nt, synthetic construct
  source 1..99: mol_type = other RNA
  modified_base 1: mod_base = OTHER; note = 2'-O-methyl ribonucleotide
  modified_base 2: mod_base = OTHER; note = 2'-O-methyl ribonucleotide
  modified_base 20: mod_base = OTHER; note = 2'-O-methyl ribonucleotide
  modified_base 27: mod_base = OTHER; note = 2'-O-methyl ribonucleotide
  modified_base 28: mod_base = OTHER; note = 2'-O-methyl ribonucleotide
  modified_base 29: mod_base = OTHER; note = 2'-O-methyl ribonucleotide
  modified_base 30: mod_base = OTHER; note = 2'-O-methyl ribonucleotide
  modified_base 31: mod_base = OTHER; note = 2'-O-methyl ribonucleotide
  modified_base 33: mod_base = OTHER; note = 2'-O-methyl ribonucleotide
  modified_base 34: mod_base = OTHER; note = 2'-O-methyl ribonucleotide
  modified_base 35: mod_base = OTHER; note = 2'-O-methyl ribonucleotide
  modified_base 36: mod_base = OTHER; note = 2'-O-methyl ribonucleotide
  modified_base 37: mod_base = OTHER; note = 2'-O-methyl ribonucleotide
  modified_base 38: mod_base = OTHER; note = 2'-O-methyl ribonucleotide
  modified_base 39: mod_base = OTHER; note = 2'-O-methyl ribonucleotide
  modified_base 40: mod_base = OTHER; note = 2'-O-methyl ribonucleotide
  modified_base 41: mod_base = OTHER; note = 2'-O-methyl ribonucleotide
  modified_base 45: mod_base = OTHER; note = 2'-O-methyl ribonucleotide
  modified_base 47: mod_base = OTHER; note = 2'-O-methyl ribonucleotide
  modified_base 49: mod_base = OTHER; note = 2'-O-methyl ribonucleotide
  modified_base 51: mod_base = OTHER; note = 2'-O-methyl ribonucleotide
  modified_base 52: mod_base = OTHER; note = 2'-O-methyl ribonucleotide
  modified_base 53: mod_base = OTHER; note = 2'-O-methyl ribonucleotide
  modified_base 54: mod_base = OTHER; note = 2'-O-methyl ribonucleotide
  modified_base 55: mod_base = OTHER; note = 2'-O-methyl ribonucleotide
  modified_base 56: mod_base = OTHER; note = 2'-O-methyl ribonucleotide
  modified_base 59: mod_base = OTHER; note = 2'-O-methyl ribonucleotide
  modified_base 60: mod_base = OTHER; note = 2'-O-methyl ribonucleotide
  modified_base 65: mod_base = OTHER; note = 2'-O-methyl ribonucleotide
  modified_base 66: mod_base = OTHER; note = 2'-O-methyl ribonucleotide
  modified_base 69: mod_base = OTHER; note = 2'-O-methyl ribonucleotide
  modified_base 70: mod_base = OTHER; note = 2'-O-methyl ribonucleotide
  modified_base 71: mod_base = OTHER; note = 2'-O-methyl ribonucleotide
  modified_base 73: mod_base = OTHER; note = 2'-O-methyl ribonucleotide
  modified_base 74: mod_base = OTHER; note = 2'-O-methyl ribonucleotide
  modified_base 75: mod_base = OTHER; note = 2'-O-methyl ribonucleotide
  modified_base 76: mod_base = OTHER; note = 2'-O-methyl ribonucleotide
  modified_base 77: mod_base = OTHER; note = 2'-O-methyl ribonucleotide
  modified_base 78: mod_base = OTHER; note = 2'-O-methyl ribonucleotide
  modified_base 79: mod_base = OTHER; note = 2'-O-methyl ribonucleotide
  modified_base 80: mod_base = OTHER; note = 2'-O-methyl ribonucleotide
  modified_base 82: mod_base = OTHER; note = 2'-O-methyl ribonucleotide
  modified_base 83: mod_base = OTHER; note = 2'-O-methyl ribonucleotide
  modified_base 84: mod_base = OTHER; note = 2'-O-methyl ribonucleotide
  modified_base 85: mod_base = OTHER; note = 2'-O-methyl ribonucleotide
  modified_base 86: mod_base = OTHER; note = 2'-O-methyl ribonucleotide
  modified_base 87: mod_base = OTHER; note = 2'-O-methyl ribonucleotide
  modified_base 88: mod_base = OTHER; note = 2'-O-methyl ribonucleotide
  modified_base 89: mod_base = OTHER; note = 2'-O-methyl ribonucleotide
  modified_base 90: mod_base = OTHER; note = 2'-O-methyl ribonucleotide
  modified_base 91: mod_base = OTHER; note = 2'-O-methyl ribonucleotide
  modified_base 92: mod_base = OTHER; note = 2'-O-methyl ribonucleotide
  modified_base 93: mod_base = OTHER; note = 2'-O-methyl ribonucleotide
  modified_base 94: mod_base = OTHER; note = 2'-O-methyl ribonucleotide
  modified_base 95: mod_base = OTHER; note = 2'-O-methyl ribonucleotide
  modified_base 96: mod_base = OTHER; note = 2'-O-methyl ribonucleotide
  modified_base 97: mod_base = OTHER; note = 2'-O-methyl ribonucleotide
  modified_base 98: mod_base = OTHER; note = 2'-O-methyl ribonucleotide
  modified_base 99: mod_base = OTHER; note = 2'-O-methyl ribonucleotide
  modified_base 1..3: mod_base = OTHER; note = phosphorothioate linkage
  modified_base 97..99: mod_base = OTHER; note = phosphorothioate linkage
cagctccaggcggtcctgggttttagagctagaaatagcaagttaaaataaggctagtccgttatcaacttgaaaaagtggcaccgagtcggtgctttt

SEQ ID NO: 2135 - RNA, 100 nt, synthetic construct; identical to SEQ ID NO: 339
  source 1..100: mol_type = other RNA
  modified_base 1: mod_base = OTHER; note = 2'-O-methyl ribonucleotide
  modified_base 2: mod_base = OTHER; note = 2'-O-methyl ribonucleotide
  modified_base 3: mod_base = OTHER; note = 2'-O-methyl ribonucleotide
  modified_base 21: mod_base = OTHER; note = 2'-O-methyl ribonucleotide
  modified_base 28: mod_base = OTHER; note = 2'-O-methyl ribonucleotide
  modified_base 29: mod_base = OTHER; note = 2'-O-methyl ribonucleotide
  modified_base 30: mod_base = OTHER; note = 2'-O-methyl ribonucleotide
  modified_base 31: mod_base = OTHER; note = 2'-O-methyl ribonucleotide
  modified_base 32: mod_base = OTHER; note = 2'-O-methyl ribonucleotide
  modified_base 34: mod_base = OTHER; note = 2'-O-methyl ribonucleotide
  modified_base 35: mod_base = OTHER; note = 2'-O-methyl ribonucleotide
  modified_base 36: mod_base = OTHER; note = 2'-O-methyl ribonucleotide
  modified_base 37: mod_base = OTHER; note = 2'-O-methyl ribonucleotide
  modified_base 38: mod_base = OTHER; note = 2'-O-methyl ribonucleotide
  modified_base 39: mod_base = OTHER; note = 2'-O-methyl ribonucleotide
  modified_base 40: mod_base = OTHER; note = 2'-O-methyl ribonucleotide
  modified_base 41: mod_base = OTHER; note = 2'-O-methyl ribonucleotide
  modified_base 42: mod_base = OTHER; note = 2'-O-methyl ribonucleotide
  modified_base 46: mod_base = OTHER; note = 2'-O-methyl ribonucleotide
  modified_base 48: mod_base = OTHER; note = 2'-O-methyl ribonucleotide
  modified_base 50: mod_base = OTHER; note = 2'-O-methyl ribonucleotide
  modified_base 52: mod_base = OTHER; note = 2'-O-methyl ribonucleotide
  modified_base 53: mod_base = OTHER; note = 2'-O-methyl ribonucleotide
  modified_base 54: mod_base = OTHER; note = 2'-O-methyl ribonucleotide
  modified_base 55: mod_base = OTHER; note = 2'-O-methyl ribonucleotide
  modified_base 56: mod_base = OTHER; note = 2'-O-methyl ribonucleotide
  modified_base 57: mod_base = OTHER; note = 2'-O-methyl ribonucleotide
  modified_base 60: mod_base = OTHER; note = 2'-O-methyl ribonucleotide
  modified_base 61: mod_base = OTHER; note = 2'-O-methyl ribonucleotide
  modified_base 66: mod_base = OTHER; note = 2'-O-methyl ribonucleotide
  modified_base 67: mod_base = OTHER; note = 2'-O-methyl ribonucleotide
  modified_base 70: mod_base = OTHER; note = 2'-O-methyl ribonucleotide
  modified_base 71: mod_base = OTHER; note = 2'-O-methyl ribonucleotide
  modified_base 72: mod_base = OTHER; note = 2'-O-methyl ribonucleotide
  modified_base 74: mod_base = OTHER; note = 2'-O-methyl ribonucleotide
  modified_base 75: mod_base = OTHER; note = 2'-O-methyl ribonucleotide
  modified_base 76: mod_base = OTHER; note = 2'-O-methyl ribonucleotide
  modified_base 77: mod_base = OTHER; note = 2'-O-methyl ribonucleotide
  modified_base 78: mod_base = OTHER; note = 2'-O-methyl ribonucleotide
  modified_base 79: mod_base = OTHER; note = 2'-O-methyl ribonucleotide
  modified_base 80: mod_base = OTHER; note = 2'-O-methyl ribonucleotide
  modified_base 81: mod_base = OTHER; note = 2'-O-methyl ribonucleotide
  modified_base 83: mod_base = OTHER; note = 2'-O-methyl ribonucleotide
  modified_base 84: mod_base = OTHER; note = 2'-O-methyl ribonucleotide
  modified_base 85: mod_base = OTHER; note = 2'-O-methyl ribonucleotide
  modified_base 86: mod_base = OTHER; note = 2'-O-methyl ribonucleotide
  modified_base 87: mod_base = OTHER; note = 2'-O-methyl ribonucleotide
  modified_base 88: mod_base = OTHER; note = 2'-O-methyl ribonucleotide
  modified_base 89: mod_base = OTHER; note = 2'-O-methyl ribonucleotide
  modified_base 90: mod_base = OTHER; note = 2'-O-methyl ribonucleotide
  modified_base 91: mod_base = OTHER; note = 2'-O-methyl ribonucleotide
  modified_base 92: mod_base = OTHER; note = 2'-O-methyl ribonucleotide
  modified_base 93: mod_base = OTHER; note = 2'-O-methyl ribonucleotide
  modified_base 94: mod_base = OTHER; note = 2'-O-methyl ribonucleotide
  modified_base 95: mod_base = OTHER; note = 2'-O-methyl ribonucleotide
  modified_base 96: mod_base = OTHER; note = 2'-O-methyl ribonucleotide
  modified_base 97: mod_base = OTHER; note = 2'-O-methyl ribonucleotide
  modified_base 98: mod_base = OTHER; note = 2'-O-methyl ribonucleotide
  modified_base 99: mod_base = OTHER; note = 2'-O-methyl ribonucleotide
  modified_base 100: mod_base = OTHER; note = 2'-O-methyl ribonucleotide
  modified_base 1..4: mod_base = OTHER; note = phosphorothioate linkage
  modified_base 98..100: mod_base = OTHER; note = phosphorothioate linkage

SEQ ID NO: 2136 - RNA, 4929 nt, synthetic construct
  source 1..4929: mol_type = other RNA
atgagcgaggtggagttcagccacgagtactggatgcggcacgccctgaccctggccaagcgggcccgggacgagcgggaggtgcccgtgggcgccgtgctggtgctgaacaaccgggtgatcggcgagggctggaaccgggccatcggcctgcacgaccccaccgcccacgccgagatcatggccctgcggcagggcggcctggtgatgcagaactaccggctgatcgacgccaccctgtacgtgaccttcgagccctgcgtgatgtgcgccggcgccatgatccacagccggatcggccgggtggtgttcggcgtgcggaacgccaagaccggcgccgccggcagcctgatggacgtgctgcaccaccccggcatgaaccaccgggtggagatcaccgagggcatcctggccgacgagtgcgccgccctgctgtgccggttcttccggatgccccggcgggtgttcaacgcccagaagaaggcccagagcagcaccgacaggaaataagagagaaaagaagagtaagaagaaatataagagccaccagcggcggcagcagcggcggcagcagcggcagcgagacacccggcaccagcgagagcgccacccccgagagcagcggcggcagcagcggcggcagcgacaagaagtacagcatcggcctggccatcggcaccaacagcgtgggctgggccgtgatcaccgacgagtacaaggtgcccagcaagaagttcaaggtgctgggcaacaccgaccggcacagcatcaagaagaacctgatcggcgccctgctgttcgacagcggcgagacagccgaggccacccggctgaagcggaccgcccggcggcggtacacccggcggaagaaccggatctgctacctgcaggagatcttcagcaacgagatggccaaggtggacgacagcttcttccaccggctggaggagagcttcctggtggaggaggacaagaagcacgagcggcaccccatcttcggcaacatcgtggacgaggtggcctaccacgagaagtaccccaccatctaccacctgcggaagaagctggtggacagcaccgacaaggccgacctgcggctgatctacctggccctggcccacatgatcaagttccggggccacttcctgatcgagggcgacctgaaccccgacaacagcgacgtggacaagctgttcatccagctggtgcagacctacaaccagctgttcgaggagaaccccatcaacgccagcggcgtggacgccaaggccatcctgagcgcccggctgagcaagagccggcggctggagaacctgatcgcccagctgcccggcgagaagaagaacggcctgttcggcaacctgatcgccctgagcctgggcctgacccccaacttcaagagcaacttcgacctggccgaggacgccaagctgcagctgagcaaggacacctacgacgacgacctggacaacctgctggcccagatcggcgaccagtacgccgacctgttcctggccgccaagaacctgagcgacgccatcctgctgagcgacatcctgcgggtgaacaccgagatcaccaaggcccccctgagcgccagcatgatcaagcggtacgacgagcaccaccaggacctgaccctgctgaaggccctggtgcggcagcagctgcccgagaagtacaaggagatcttcttcgaccagagcaagaacggctacgccggctacatcgacggcggcgccagccaggaggagttctacaagttcatcaagcccatcctggagaagatggacggcaccgaggagctgctggtgaagctgaaccgggaggacctgctgcggaagcagcggaccttcgacaacggcagcatcccccaccagatccacctgggcgagctgcacgccatcctgcggcggcaggaggacttctaccccttcctgaaggacaaccgggagaagatcgagaagatcctgaccttccggatcccctactacgtgggccccctggcccggggcaacagccggttcgcctggatgacccgcaagagcgaggagacaatcaccccctggaacttcgaggaggtggtggacaagggcgccagcgcccagagcttcatcgagcggatgaccaacttcgacaagaacctgcccaacgagaaggtgctgcccaagcacagcctgctgtacgagtacttcaccgtgtacaacgagctgaccaaggtgaagtacgtgaccgagggcatgcggaagcccgccttcctgagcggcgagcagaagaaggccatcgtggacctgctgttcaagaccaaccggaaggtgaccgtgaagcagctgaaggaggactacttcaagaagatcgagtgcttcgacagcgtggagatcagcggcgtggaggaccggttcaacgccagcctgggcacctaccacgacctgctgaagatcatcaaggacaaggacttcctggacaacgaggagaacgaggacatcctggaggacatcgtgctgaccctgaccctgttcgaggaccgggagatgatcgaggagcggctgaagacctacgcccacctgttcgacgacaaggtgatgaagcagctgaagcggcggcggtacaccggctggggccggctgagccggaagctgatcaacggcatccgggacaagcagagcggcaagaccatcctggacttcctcaagagcgacggcttcgccaaccggaacttcatgcagctgatccacgacgacagcctgaccttcaaggaggacatccagaaggcccaggtgagcggccagggcgacagcctgcacgagcacatcgccaacctggccggcagccccgccatcaagaagggcatcctgcagaccgtgaaggtggtggacgagctggtgaaggtgatgggccggcacaagcccgagaacatcgtgatcgagatggcccgggagaaccagaccacccagaagggccagaagaacagccgggagcggatgaagcggatcgaggagggcatcaaggagctgggcagccagatcctgaaggagcaccccgtggagaacacccagctgcagaacgagaagctgtacctgtactacctgcagaacggccgggacatgtacgtggaccaggagctggacatcaaccggctgagcgactacgacgtggaccacatcgtgccccagagcttcctgaaggacgacagcatcgacaacaaggtgctgacccggagcgacaagaaccggggcaagagcgacaacgtgcccagcgaggaggtggtgaagaagatgaagaactactggcggcagctgctgaacgccaagctgatcacccagcggaagttcgacaacctgaccaaggccgagcggggcggcctgagcgagctggacaaggccggcttcatcaagcggcagctggtggagacacggcagatcaccaagcacgtggcccagatcctggacagccggatgaacaccaagtacgacgagaacgacaagctgatccgggaggtgaaggtgatcaccctcaagagcaagctggtgagcgacttccggaaggacttccagttctacaaggtgcgggagatcaacaactaccaccacgcccacgacgcctacctgaacgccgtggtgggcaccgccctgatcaagaagtaccccaagctggagagcgagttcgtgtacggcgactacaaggtgtacgacgtgcggaagatgatcgccaagagcgagcaggagatcggcaaggccaccgccaagtacttcttctacagcaacatcatgaacttcttcaagaccgagatcaccctggccaacggcgagatccggaagcggcccctgatcgagacaaacggcgagacaggcgagatcgtgtgggacaagggccgggacttcgccaccgtgcggaaggtgctgagcatgccccaggtgaacatcgtgaagaagaccgaggtgcagaccggcggcttcagcaaggagagcatcctgcccaagcggaacagcgacaagctgatcgcccggaagaaggactgggaccccaagaagtacggcggcttcgacagccccaccgtggcctacagcgtgctggtggtggccaaggtggagaagggcaagagcaagaagctcaagagcgtgaaggagctgctgggcatcaccatcatggagcggagcagcttcgagaagaaccccatcgacttcctggaggccaagggctacaaggaggtgaagaaggacctgatcatcaagctgcccaagtacagcctgttcgagctggagaacggccggaagcggatgctggccagcgccggcgagctgcagaagggcaacgagctggccctgcccagcaagtacgtgaacttcctgtacctggccagccactacgagaagctgaagggcagccccgaggacaacgagcagaagcagctgttcgtggagcagcacaagcactacctggacgagatcatcgagcagatcagcgagttcagcaagcgggtgatcctggccgacgccaacctggacaaggtgctgagcgcctacaacaagcaccgggacaagcccatccgggagcaggccgagaacatcatccacctgttcaccctgaccaacctgggcgcccccgccgccttcaagtacttcgacaccaccatcgaccggaagcggtacaccagcaccaaggaggtgctggacgccaccctgatccaccagagcatcaccggcctgtacgagacacggatcgacctgagccagctgggcggcgacgagggcgccgacaagcggaccgccgacggcagcgagttcgagagccccaagaagaagcggaaggtgtgagcggccgcttaattaagctgccttctgcggggcttgccttctggccatgcccttcttctctcccttgcacctgtacctcttggtctttgaataaagcctgagtaggaagtctaga

SEQ ID NO: 2137 - protein, 1588 aa, synthetic construct
MSEVEFSHEYWMRHALTLAKRARDEREVPVGAVLVLNNRVIGEGWNRAIGLHDPTAHAEIMALRQGGLVMQNYRLIDATLYVTFEPCVMCAGAMIHSRIGRVVFGVRNAKTGAAGSLMDVLHHPGMNHRVEITEGILADECAALLCRFFRMPRRVFNAQKKAQSSTDSGGSSGGSSGSETPGTSESATPESSGGSSGGSDKKYSIGLAIGTNSVGWAVITDEYKVPSKKFKVLGNTDRHSIKKNLIGALLFDSGETAEATRLKRTARRRYTRRKNRICYLQEIFSNEMAKVDDSFFHRLEESFLVEEDKKHERHPIFGNIVDEVAYHEKYPTIYHLRKKLVDSTDKADLRLIYLALAHMIKFRGHFLIEGDLNPDNSDVDKLFIQLVQTYNQLFEENPINASGVDAKAILSARLSKSRRLENLIAQLPGEKKNGLFGNLIALSLGLTPNFKSNFDLAEDAKLQLSKDTYDDDLDNLLAQIGDQYADLFLAAKNLSDAILLSDILRVNTEITKAPLSASMIKRYDEHHQDLTLLKALVRQQLPEKYKEIFFDQSKNGYAGYIDGGASQEEFYKFIKPILEKMDGTEELLVKLNREDLLRKQRTFDNGSIPHQIHLGELHAILRRQEDFYPFLKDNREKIEKILTFRIPYYVGPLARGNSRFAWMTRKSEETITPWNFEEVVDKGASAQSFIERMTNFDKNLPNEKVLPKHSLLYEYFTVYNELTKVKYVTEGMRKPAFLSGEQKKAIVDLLFKTNRKVTVKQLKEDYFKKIECFDSVEISGVEDRFNASLGTYHDLLKIIKDKDFLDNEENEDILEDIVLTLTLFEDREMIEERLKTYAHLFDDKVMKQLKRRRYTGWGRLSRKLINGIRDKQSGKTILDFLKSDGFANRNFMQLIHDDSLTFKEDIQKAQVSGQGDSLHEHIANLAGSPAIKKGILQTVKVVDELVKVMGRHKPENIVIEMARENQTTQKGQKNSRERMKRIEEGIKELGSQILKEHPVENTQLQNEKLYLYYLQNGRDMYVDQELDINRLSDYDVDHIVPQSFLKDDSIDNKVLTRSDKNRGKSDNVPSEEVVKKMKNYWRQLLNAKLITQRKFDNLTKAERGGLSELDKAGFIKRQLVETRQITKHVAQILDSRMNTKYDENDKLIREVKVITLKSKLVSDFRKDFQFYKVREINNYHHAHDAYLNAVVGTALIKKYPKLESEFVYGDYKVYDVRKMIAKSEQEIGKATAKYFFYSNIMNFFKTEITLANGEIRKRPLIETNGETGEIVWDKGRDFATVRKVLSMPQVNIVKKTEVQTGGFSKESILPKRNSDKLIARKKDWDPKKYGGFDSPTVAYSVLVVAKVEKGKSKKLKSVKELLGITIMERSSFEKNPIDFLEAKGYKEVKKDLIIKLPKYSLFELENGRKRMLASAGELQKGNELALPSKYVNFLYLASHYEKLKGSPEDNEQKQLFVEQHKHYLDEIIEQISEFSKRVILADANLDKVLSAYNKHRDKPIREQAENIIHLFTLTNLGAPAAFKYFDTTIDRKRYTSTKEVLDATLIHQSITGLYETRIDLSQLGGDEGADKRTADGSEFESPKKKRKV

SEQ ID NO: 2138 - RNA, 47 nt, synthetic construct
  source 1..47: mol_type = other RNA
  modified_base 1: mod_base = OTHER; note = 2'-O-methyl ribonucleotide
  modified_base 7: mod_base = OTHER; note = N1-methyl pseudouridine
  modified_base 25: mod_base = OTHER; note = N1-methyl pseudouridine
  modified_base 35: mod_base = OTHER; note = N1-methyl pseudouridine
  modified_base 37: mod_base = OTHER; note = N1-methyl pseudouridine
aggaaataagagagaaaagaagagtaagaagaaatataagagccacc

SEQ ID NO: 2139 - RNA, 501 nt, synthetic construct
  source 1..501: mol_type = other RNA
  modified_base 2: mod_base = OTHER; note = N1-methyl pseudouridine
  modified_base 11: mod_base = OTHER; note = N1-methyl pseudouridine
  modified_base 16: mod_base = OTHER; note = N1-methyl pseudouridine
  modified_base 17: mod_base = OTHER; note = N1-methyl pseudouridine
  modified_base 28: mod_base = OTHER; note = N1-methyl pseudouridine
  modified_base 31: mod_base = OTHER; note = N1-methyl pseudouridine
  modified_base 35: mod_base = OTHER; note = N1-methyl pseudouridine
  modified_base 47: mod_base = OTHER; note = N1-methyl pseudouridine
  modified_base 53: mod_base = OTHER; note = N1-methyl pseudouridine
  modified_base 83: mod_base = OTHER; note = N1-methyl pseudouridine
  modified_base 89: mod_base = OTHER; note = N1-methyl pseudouridine
  modified_base 98: mod_base = OTHER; note = N1-methyl pseudouridine
  modified_base 101: mod_base = OTHER; note = N1-methyl pseudouridine
  modified_base 104: mod_base = OTHER; note = N1-methyl pseudouridine
  modified_base 107: mod_base = OTHER; note = N1-methyl pseudouridine
  modified_base 119: mod_base = OTHER; note = N1-methyl pseudouridine
  modified_base 122: mod_base = OTHER; note = N1-methyl pseudouridine
  modified_base 133: mod_base = OTHER; note = N1-methyl pseudouridine
  modified_base 146: mod_base = OTHER; note = N1-methyl pseudouridine
  modified_base 152: mod_base = OTHER; note = N1-methyl pseudouridine
  modified_base 179: mod_base = OTHER; note = N1-methyl pseudouridine
  modified_base 182: mod_base = OTHER; note = N1-methyl pseudouridine
  modified_base 188: mod_base = OTHER; note = N1-methyl pseudouridine
  modified_base 203: mod_base = OTHER; note = N1-methyl pseudouridine
  modified_base 206: mod_base = OTHER; note = N1-methyl pseudouridine
  modified_base 209: mod_base = OTHER; note = N1-methyl pseudouridine
  modified_base 217: mod_base = OTHER; note = N1-methyl pseudouridine
  modified_base 224: mod_base = OTHER; note = N1-methyl pseudouridine
  modified_base 227: mod_base = OTHER; note = N1-methyl pseudouridine
  modified_base 239: mod_base = OTHER; note = N1-methyl pseudouridine
  modified_base 241: mod_base = OTHER; note = N1-methyl pseudouridine
  modified_base 245: mod_base = OTHER; note = N1-methyl pseudouridine
  modified_base 250: mod_base = OTHER; note = N1-methyl pseudouridine
  modified_base 251: mod_base = OTHER; note = N1-methyl pseudouridine
  modified_base 259: mod_base = OTHER; note = N1-methyl pseudouridine
  modified_base 263: mod_base = OTHER; note = N1-methyl pseudouridine
  modified_base 266: mod_base = OTHER; note = N1-methyl pseudouridine
  modified_base 268: mod_base = OTHER; note = N1-methyl pseudouridine
  modified_base 281: mod_base = OTHER; note = N1-methyl pseudouridine
  modified_base 284: mod_base = OTHER; note = N1-methyl pseudouridine
  modified_base 296: mod_base = OTHER; note = N1-methyl pseudouridine
  modified_base 305: mod_base = OTHER; note = N1-methyl pseudouridine
  modified_base 308: mod_base = OTHER; note = N1-methyl pseudouridine
  modified_base 310: mod_base = OTHER; note = N1-methyl pseudouridine
  modified_base 311: mod_base = OTHER; note = N1-methyl pseudouridine
  modified_base 317: mod_base = OTHER; note = N1-methyl pseudouridine
  modified_base 350: mod_base = OTHER; note = N1-methyl pseudouridine
  modified_base 353: mod_base = OTHER; note = N1-methyl pseudouridine
  modified_base 359: mod_base = OTHER; note = N1-methyl pseudouridine
  modified_base 362: mod_base = OTHER; note = N1-methyl pseudouridine
  modified_base 377: mod_base = OTHER; note = N1-methyl pseudouridine
  modified_base 389: mod_base = OTHER; note = N1-methyl pseudouridine
  modified_base 395: mod_base = OTHER; note = N1-methyl pseudouridine
  modified_base 407: mod_base = OTHER; note = N1-methyl pseudouridine
  modified_base 410: mod_base = OTHER; note = N1-methyl pseudouridine
  modified_base 421: mod_base = OTHER; note = N1-methyl pseudouridine
  modified_base 431: mod_base = OTHER; note = N1-methyl pseudouridine
  modified_base 434: mod_base = OTHER; note = N1-methyl pseudouridine
  modified_base 436: mod_base = OTHER; note = N1-methyl pseudouridine
  modified_base 442: mod_base = OTHER; note = N1-methyl pseudouridine
  modified_base 443: mod_base = OTHER; note = N1-methyl pseudouridine
  modified_base 445: mod_base = OTHER; note = N1-methyl pseudouridine
  modified_base 446: mod_base = OTHER; note = N1-methyl pseudouridine
  modified_base 452: mod_base = OTHER; note = N1-methyl pseudouridine
  modified_base 464: mod_base = OTHER; note = N1-methyl pseudouridine
  modified_base 466: mod_base = OTHER; note = N1-methyl pseudouridine
  modified_base 467: mod_base = OTHER; note = N1-methyl pseudouridine
atgagcgaggtggagttcagccacgagtactggatgcggcacgccctgaccctggccaagcgggcccgggacgagcgggaggtgcccgtgggcgccgtgctggtgctgaacaaccgggtgatcggcgagggctggaaccgggccatcggcctgcacgaccccaccgcccacgccgagatcatggccctgcggcagggcggcctggtgatgcagaactaccggctgatcgacgccaccctgtacgtgaccttcgagccctgcgtgatgtgcgccggcgccatgatccacagccggatcggccgggtggtgttcggcgtgcggaacgccaagaccggcgccgccggcagcctgatggacgtgctgcaccaccccggcatgaaccaccgggtggagatcaccgagggcatcctggccgacgagtgcgccgccctgctgtgccggttcttccggatgccccggcgggtgttcaacgcccagaagaaggcccagagcagcaccgac

SEQ ID NO: 2140 - protein, 167 aa, synthetic construct
MSEVEFSHEYWMRHALTLAKRARDEREVPVGAVLVLNNRVIGEGWNRAIGLHDPTAHAEIMALRQGGLVMQNYRLIDATLYVTFEPCVMCAGAMIHSRIGRVVFGVRNAKTGAAGSLMDVLHHPGMNHRVEITEGILADECAALLCRFFRMPRRVFNAQKKAQSSTD

SEQ ID NO: 2141 - RNA, 96 nt, synthetic construct
  source 1..96: mol_type = other RNA
agcggcggcagcagcggcggcagcagcggcagcgagacacccggcaccagcgagagcgccacccccgagagcagcggcggcagcagcggcggcagc

SEQ ID NO: 2142 - RNA, 4101 nt, synthetic construct
  source 1..4101: mol_type = other RNA
  modified_base 10: mod_base = OTHER; note = N1-methyl pseudouridine
  modified_base 17: mod_base = OTHER; note = N1-methyl pseudouridine
  modified_base 23: mod_base = OTHER; note = N1-methyl pseudouridine
  modified_base 29: mod_base = OTHER; note = N1-methyl pseudouridine
  modified_base 44: mod_base = OTHER; note = N1-methyl pseudouridine
  modified_base 49: mod_base = OTHER; note = N1-methyl pseudouridine
  modified_base 56: mod_base = OTHER; note = N1-methyl pseudouridine
  modified_base 59: mod_base = OTHER; note = N1-methyl pseudouridine
  modified_base 70: mod_base = OTHER; note = N1-methyl pseudouridine
  modified_base 77: mod_base = OTHER; note = N1-methyl pseudouridine
  modified_base 91: mod_base = OTHER; note = N1-methyl pseudouridine
  modified_base 92: mod_base = OTHER; note = N1-methyl pseudouridine
  modified_base 98: mod_base = OTHER; note = N1-methyl pseudouridine
  modified_base 101: mod_base = OTHER; note = N1-methyl pseudouridine
  modified_base 125: mod_base = OTHER; note = N1-methyl pseudouridine
  modified_base 137: mod_base = OTHER; note = N1-methyl pseudouridine
  modified_base 140: mod_base = OTHER; note = N1-methyl pseudouridine
  modified_base 149: mod_base = OTHER; note = N1-methyl pseudouridine
  modified_base 152: mod_base = OTHER; note = N1-methyl pseudouridine
  modified_base 154: mod_base = OTHER; note = N1-methyl pseudouridine
  modified_base 155: mod_base = OTHER; note = N1-methyl pseudouridine
  modified_base 188: mod_base = OTHER; note = N1-methyl pseudouridine
  modified_base 211: mod_base = OTHER; note = N1-methyl pseudouridine
  modified_base 233: mod_base = OTHER; note = N1-methyl pseudouridine
  modified_base 235: mod_base = OTHER; note = N1-methyl pseudouridine
  modified_base 238: mod_base = OTHER; note = N1-methyl pseudouridine
  modified_base 242: mod_base = OTHER; note = N1-methyl pseudouridine
  modified_base 251: mod_base = OTHER; note = N1-methyl pseudouridine
  modified_base 253: mod_base = OTHER; note = N1-methyl pseudouridine
  modified_base 254: mod_base = OTHER; note = N1-methyl pseudouridine
  modified_base 266: mod_base = OTHER; note = N1-methyl pseudouridine
  modified_base 275: mod_base = OTHER; note = N1-methyl pseudouridine
  modified_base 286: mod_base = OTHER; note = N1-methyl pseudouridine
  modified_base 287: mod_base = OTHER; note = N1-methyl pseudouridine
  modified_base 289: mod_base = OTHER; note = N1-methyl pseudouridine
  modified_base 290: mod_base = OTHER; note = N1-methyl pseudouridine
  modified_base 299: mod_base = OTHER; note = N1-methyl pseudouridine
  modified_base 310: mod_base = OTHER; note = N1-methyl pseudouridine
  modified_base 311: mod_base = OTHER; note = N1-methyl pseudouridine
  modified_base 314: mod_base = OTHER; note = N1-methyl pseudouridine
  modified_base 317: mod_base = OTHER; note = N1-methyl pseudouridine
  modified_base 350: mod_base = OTHER; note = N1-methyl pseudouridine
  modified_base 352: mod_base = OTHER; note = N1-methyl pseudouridine
  modified_base 353: mod_base = OTHER; note = N1-methyl pseudouridine
  modified_base 362: mod_base = OTHER; note = N1-methyl pseudouridine
  modified_base 365: mod_base = OTHER; note = N1-methyl pseudouridine
  modified_base 374: mod_base = OTHER; note = N1-methyl pseudouridine
  modified_base 379: mod_base = OTHER; note = N1-methyl pseudouridine
  modified_base 391: mod_base = OTHER; note = N1-methyl pseudouridine
  modified_base 401: mod_base = OTHER; note = N1-methyl pseudouridine
  modified_base 403: mod_base = OTHER; note = N1-methyl pseudouridine
  modified_base 410: mod_base = OTHER; note = N1-methyl pseudouridine
  modified_base 422: mod_base = OTHER; note = N1-methyl pseudouridine
  modified_base 425: mod_base = OTHER; note = N1-methyl pseudouridine
  modified_base 449: mod_base = OTHER; note = N1-methyl pseudouridine
  modified_base 455: mod_base = OTHER; note = N1-methyl pseudouridine
  modified_base 458: mod_base = OTHER; note = N1-methyl pseudouridine
  modified_base 460: mod_base = OTHER; note = N1-methyl pseudouridine
  modified_base 464: mod_base = OTHER; note = N1-methyl pseudouridine
  modified_base 470: mod_base = OTHER; note = N1-methyl pseudouridine
  modified_base 479: mod_base = OTHER; note = N1-methyl pseudouridine
  modified_base 482: mod_base = OTHER; note = N1-methyl pseudouridine
  modified_base 487: mod_base = OTHER; note = N1-methyl pseudouridine
  modified_base 488: mod_base = OTHER; note = N1-methyl pseudouridine
  modified_base 499: mod_base = OTHER; note = N1-methyl pseudouridine
  modified_base 500: mod_base = OTHER; note = N1-methyl pseudouridine
  modified_base 503: mod_base = OTHER; note = N1-methyl pseudouridine
  modified_base 506: mod_base = OTHER; note = N1-methyl pseudouridine
  modified_base 518: mod_base = OTHER; note = N1-methyl pseudouridine
  modified_base 539: mod_base = OTHER; note = N1-methyl pseudouridine
  modified_base 548: mod_base = OTHER; note = N1-methyl pseudouridine
  modified_base 550: mod_base = OTHER; note = N1-methyl pseudouridine
  modified_base 551: mod_base = OTHER; note = N1-methyl pseudouridine
  modified_base 554: mod_base = OTHER; note = N1-methyl pseudouridine
  modified_base 560: mod_base = OTHER; note = N1-methyl pseudouridine
  modified_base 563: mod_base = OTHER; note = N1-methyl pseudouridine
  modified_base 571: mod_base = OTHER; note = N1-methyl pseudouridine
  modified_base 581: mod_base = OTHER; note = N1-methyl pseudouridine
  modified_base 583: mod_base = OTHER; note = N1-methyl pseudouridine
  modified_base 584: mod_base = OTHER; note = N1-methyl pseudouridine
  modified_base 599: mod_base = OTHER; note = N1-methyl pseudouridine
  modified_base 614: mod_base = OTHER; note = N1-methyl pseudouridine
  modified_base 629: mod_base = OTHER; note = N1-methyl pseudouridine
  modified_base 632: mod_base = OTHER; note = N1-methyl pseudouridine
  modified_base 644: mod_base = OTHER; note = N1-methyl pseudouridine
  modified_base 662: mod_base = OTHER; note = N1-methyl pseudouridine
  modified_base 671: mod_base = OTHER; note = N1-methyl pseudouridine
  modified_base 674: mod_base = OTHER; note = N1-methyl pseudouridine
  modified_base 683: mod_base = OTHER; note = N1-methyl pseudouridine
  modified_base 707: mod_base = OTHER; note = N1-methyl pseudouridine
  modified_base 709: mod_base = OTHER; note = N1-methyl pseudouridine
  modified_base 710: mod_base = OTHER; note = N1-methyl pseudouridine
  modified_base 719: mod_base = OTHER; note = N1-methyl pseudouridine
  modified_base 722: mod_base = OTHER; note = N1-methyl pseudouridine
  modified_base 728: mod_base = OTHER; note = N1-methyl pseudouridine
  modified_base 734: mod_base = OTHER; note = N1-methyl pseudouridine
  modified_base 740: mod_base = OTHER; note = N1-methyl pseudouridine
  modified_base 751: mod_base = OTHER; note = N1-methyl pseudouridine
  modified_base 752: mod_base = OTHER; note = N1-methyl pseudouridine
  modified_base 763: mod_base = OTHER; note = N1-methyl pseudouridine
  modified_base 764: mod_base = OTHER; note = N1-methyl pseudouridine
  modified_base 770: mod_base = OTHER; note = N1-methyl pseudouridine
  modified_base 788: mod_base = OTHER; note = N1-methyl pseudouridine
  modified_base 794: mod_base = OTHER; note = N1-methyl pseudouridine
  modified_base 808: mod_base = OTHER; note = N1-methyl pseudouridine
  modified_base 821: mod_base = OTHER; note = N1-methyl pseudouridine
  modified_base 830: mod_base = OTHER; note = N1-methyl pseudouridine
  modified_base 833: mod_base = OTHER; note = N1-methyl pseudouridine
  modified_base 842: mod_base = OTHER; note = N1-methyl pseudouridine
  modified_base 853: mod_base = OTHER; note = N1-methyl pseudouridine
  modified_base 863: mod_base = OTHER; note = N1-methyl pseudouridine
  modified_base 865: mod_base = OTHER; note = N1-methyl pseudouridine
  modified_base 866: mod_base = OTHER; note = N1-methyl pseudouridine
  modified_base 869: mod_base = OTHER; note = N1-methyl pseudouridine
  modified_base 884: mod_base = OTHER; note = N1-methyl pseudouridine
  modified_base 896: mod_base = OTHER; note = N1-methyl pseudouridine
  modified_base 899: mod_base = OTHER; note = N1-methyl pseudouridine
  modified_base 902: mod_base = OTHER; note = N1-methyl pseudouridine
  modified_base 911: mod_base = OTHER; note = N1-methyl pseudouridine
  modified_base 914: mod_base = OTHER; note = N1-methyl pseudouridine
  modified_base 920: mod_base = OTHER; note = N1-methyl pseudouridine
  modified_base 932: mod_base = OTHER; note = N1-methyl pseudouridine
  modified_base 947: mod_base = OTHER; note = N1-methyl pseudouridine
  modified_base 959: mod_base = OTHER; note = N1-methyl pseudouridine
  modified_base 962: mod_base = OTHER; note = N1-methyl pseudouridine
  modified_base 970: mod_base = OTHER; note = N1-methyl pseudouridine
  modified_base 992: mod_base = OTHER; note = N1-methyl pseudouridine
  modified_base 998: mod_base = OTHER; note = N1-methyl pseudouridine
  modified_base 1001: mod_base = OTHER; note = N1-methyl pseudouridine
  modified_base 1010: mod_base = OTHER; note = N1-methyl pseudouridine
  modified_base 1013: mod_base = OTHER; note = N1-methyl pseudouridine
  modified_base 1025: mod_base = OTHER; note = N1-methyl pseudouridine
  modified_base 1036: mod_base = OTHER; note = N1-methyl pseudouridine
  modified_base 1046: mod_base = OTHER; note = N1-methyl pseudouridine
  modified_base 1048: mod_base = OTHER; note = N1-methyl pseudouridine
  modified_base 1049: mod_base = OTHER; note = N1-methyl pseudouridine
  modified_base 1051: mod_base = OTHER; note = N1-methyl pseudouridine
  modified_base 1052: mod_base = OTHER; note = N1-methyl pseudouridine
  modified_base 1072: mod_base = OTHER; note = N1-methyl pseudouridine
  modified_base 1081: mod_base = OTHER; note = N1-methyl pseudouridine
  modified_base 1085: mod_base = OTHER; note = N1-methyl pseudouridine
  modified_base 1111: mod_base = OTHER; note = N1-methyl pseudouridine
  modified_base 1112: mod_base = OTHER; note = N1-methyl pseudouridine
  modified_base 1114: mod_base = OTHER; note = N1-methyl pseudouridine
  modified_base 1120: mod_base = OTHER; note = N1-methyl pseudouridine
  modified_base 1121: mod_base = OTHER; note = N1-methyl pseudouridine
  modified_base 1124: mod_base = OTHER; note = N1-methyl pseudouridine
  modified_base 1133: mod_base = OTHER; note = N1-methyl pseudouridine
  modified_base 1136: mod_base = OTHER; note = N1-methyl pseudouridine
  modified_base 1145: mod_base = OTHER; note = N1-methyl pseudouridine
  modified_base 1163: mod_base = OTHER; note = N1-methyl pseudouridine
  modified_base 1166: mod_base = OTHER; note = N1-methyl pseudouridine
  modified_base 1169: mod_base = OTHER; note = N1-methyl pseudouridine
  modified_base 1175: mod_base = OTHER; note = N1-methyl pseudouridine
  modified_base 1190: mod_base = OTHER; note = N1-methyl pseudouridine
  modified_base 1193: mod_base = OTHER; note = N1-methyl pseudouridine
  modified_base 1210: mod_base = OTHER; note = N1-methyl pseudouridine
  modified_base 1211: mod_base = OTHER; note = N1-methyl pseudouridine
  modified_base 1226: mod_base = OTHER; note = N1-methyl pseudouridine
  modified_base 1238: mod_base = OTHER; note = N1-methyl pseudouridine
  modified_base 1244: mod_base = OTHER; note = N1-methyl pseudouridine
  modified_base 1253: mod_base = OTHER; note = N1-methyl pseudouridine
  modified_base 1262: mod_base = OTHER; note = N1-methyl pseudouridine
  modified_base 1265: mod_base = OTHER; note = N1-methyl pseudouridine
  modified_base 1282: mod_base = OTHER; note = N1-methyl pseudouridine
  modified_base 1283: mod_base = OTHER; note = N1-methyl pseudouridine
  modified_base 1285: mod_base = OTHER; note = N1-methyl pseudouridine
  modified_base 1291: mod_base = OTHER; note = N1-methyl pseudouridine
  modified_base 1292: mod_base = OTHER; note = N1-methyl pseudouridine
  modified_base 1295: mod_base = OTHER; note = N1-methyl pseudouridine
  modified_base 1316: mod_base = OTHER; note = N1-methyl pseudouridine
  modified_base 1325: mod_base = OTHER; note = N1-methyl pseudouridine
  modified_base 1328: mod_base = OTHER; note = N1-methyl pseudouridine
  modified_base 1333: mod_base = OTHER; note = N1-methyl pseudouridine
  modified_base 1334: mod_base = OTHER; note = N1-methyl pseudouridine
  modified_base 1340: mod_base = OTHER; note = N1-methyl pseudouridine
  modified_base 1345: mod_base = OTHER; note = N1-methyl pseudouridine
  modified_base 1348: mod_base = OTHER; note = N1-methyl pseudouridine
  modified_base 1352: mod_base = OTHER; note = N1-methyl pseudouridine
  modified_base 1361: mod_base = OTHER; note = N1-methyl pseudouridine
  modified_base 1381: mod_base = OTHER; note = N1-methyl pseudouridine
  modified_base 1382: mod_base = OTHER; note = N1-methyl pseudouridine
  modified_base 1387: mod_base = OTHER; note = N1-methyl pseudouridine
  modified_base 1391: mod_base = OTHER; note = N1-methyl pseudouridine
  modified_base 1415: mod_base = OTHER; note = N1-methyl pseudouridine
  modified_base 1423: mod_base = OTHER; note = N1-methyl pseudouridine
  modified_base 1429: mod_base = OTHER; note = N1-methyl pseudouridine
  modified_base 1430: mod_base = OTHER; note = N1-methyl pseudouridine
  modified_base 1439: mod_base = OTHER; note = N1-methyl pseudouridine
  modified_base 1442: mod_base = OTHER; note = N1-methyl pseudouridine
  modified_base 1468: mod_base = OTHER; note = N1-methyl pseudouridine
  modified_base 1469: mod_base = OTHER; note = N1-methyl pseudouridine
  modified_base 1472: mod_base = OTHER; note = N1-methyl pseudouridine
  modified_base 1481: mod_base = OTHER; note = N1-methyl pseudouridine
  modified_base 1489: mod_base = OTHER; note = N1-methyl pseudouridine
  modified_base 1490: mod_base = OTHER; note = N1-methyl pseudouridine
  modified_base 1502: mod_base = OTHER; note = N1-methyl pseudouridine
  modified_base 1517: mod_base = OTHER; note = N1-methyl pseudouridine
  modified_base 1520: mod_base = OTHER; note = N1-methyl pseudouridine
  modified_base 1535: mod_base = OTHER; note = N1-methyl pseudouridine
  modified_base 1538: mod_base = OTHER; note = N1-methyl pseudouridine
  modified_base 1540: mod_base = OTHER; note = N1-methyl pseudouridine
  modified_base 1546: mod_base = OTHER; note = N1-methyl pseudouridine
  modified_base 1549: mod_base = OTHER; note = N1-methyl pseudouridine
  modified_base 1550: mod_base = OTHER; note = N1-methyl pseudouridine
  modified_base 1556: mod_base = OTHER; note = N1-methyl pseudouridine
  modified_base 1558: mod_base = OTHER; note = N1-methyl pseudouridine
  modified_base 1568: mod_base = OTHER; note = N1-methyl pseudouridine
  modified_base 1577: mod_base = OTHER; note = N1-methyl pseudouridine
  modified_base 1582: mod_base = OTHER; note = N1-methyl pseudouridine
  modified_base 1586: mod_base = OTHER; note = N1-methyl pseudouridine
  modified_base 1598: mod_base = OTHER; note = N1-methyl pseudouridine
  modified_base 1612: mod_base = OTHER; note = N1-methyl pseudouridine
  modified_base 1613: mod_base = OTHER; note = N1-methyl pseudouridine
  modified_base 1616: mod_base = OTHER; note = N1-methyl pseudouridine
  modified_base 1640: mod_base = OTHER; note = N1-methyl pseudouridine
  modified_base 1643: mod_base = OTHER; note = N1-methyl pseudouridine
  modified_base 1649: mod_base = OTHER; note = N1-methyl pseudouridine
  modified_base 1652: mod_base = OTHER; note = N1-methyl pseudouridine
  modified_base 1654: mod_base = OTHER; note = N1-methyl pseudouridine
  modified_base 1655: mod_base = OTHER; note = N1-methyl pseudouridine
  modified_base 1673: mod_base = OTHER; note = N1-methyl pseudouridine
  modified_base 1679: mod_base = OTHER; note = N1-methyl pseudouridine
  modified_base 1688: mod_base = OTHER; note = N1-methyl pseudouridine
  modified_base 1699: mod_base = OTHER; note = N1-methyl pseudouridine
  modified_base 1702: mod_base = OTHER; note = N1-methyl pseudouridine
  modified_base 1703: mod_base = OTHER; note = N1-methyl pseudouridine
  modified_base 1712: mod_base = OTHER; note = N1-methyl pseudouridine
  modified_base 1717: mod_base = OTHER; note = N1-methyl pseudouridine
  modified_base 1720: mod_base = OTHER; note = N1-methyl pseudouridine
  modified_base 1721: mod_base = OTHER; note = N1-methyl pseudouridine
  modified_base 1730: mod_base = OTHER; note = N1-methyl pseudouridine
  modified_base 1736: mod_base = OTHER; note = N1-methyl pseudouridine
  modified_base 1745: mod_base = OTHER; note = N1-methyl pseudouridine
  modified_base 1756: mod_base = OTHER; note = N1-methyl pseudouridine
  modified_base 1757: mod_base = OTHER; note = N1-methyl pseudouridine
  modified_base 1769: mod_base = OTHER; note = N1-methyl pseudouridine
  modified_base 1777: mod_base = OTHER; note = N1-methyl pseudouridine
  modified_base 1787: mod_base = OTHER; note = N1-methyl pseudouridine
  modified_base 1790: mod_base = OTHER; note = N1-methyl pseudouridine
  modified_base 1796: mod_base = OTHER; note = N1-methyl pseudouridine
  modified_base 1799: mod_base = OTHER; note = N1-methyl pseudouridine
  modified_base 1813: mod_base = OTHER; note = N1-methyl pseudouridine
  modified_base 1814: mod_base = OTHER; note = N1-methyl pseudouridine
  modified_base 1817: mod_base = OTHER; note = N1-methyl pseudouridine
  modified_base 1841: mod_base = OTHER; note = N1-methyl pseudouridine
  modified_base 1844: mod_base = OTHER; note = N1-methyl pseudouridine
  modified_base 1853: mod_base = OTHER; note = N1-methyl pseudouridine
  modified_base 1856: mod_base = OTHER; note = N1-methyl pseudouridine
  modified_base 1859: mod_base = OTHER; note = N1-methyl pseudouridine
  modified_base 1865: mod_base = OTHER; note = N1-methyl pseudouridine
  modified_base 1871: mod_base = OTHER; note = N1-methyl pseudouridine
  modified_base 1873: mod_base = OTHER; note = N1-methyl pseudouridine
  modified_base 1874: mod_base = OTHER; note = N1-methyl pseudouridine
  modified_base 1889: mod_base = OTHER; note = N1-methyl pseudouridine
  modified_base 1892: mod_base = OTHER; note = N1-methyl pseudouridine
  modified_base 1904: mod_base = OTHER; note = N1-methyl pseudouridine
  modified_base 1912: mod_base = OTHER; note = N1-methyl pseudouridine
  modified_base 1922: mod_base = OTHER; note = N1-methyl pseudouridine
  modified_base 1924: mod_base = OTHER; note = N1-methyl pseudouridine
  modified_base 1925: mod_base = OTHER; note = N1-methyl pseudouridine
  modified_base 1937: mod_base = OTHER; note = N1-methyl pseudouridine
  modified_base 1940: mod_base = OTHER; note = N1-methyl pseudouridine
  modified_base 1949: mod_base = OTHER; note = N1-methyl pseudouridine
  modified_base 1963: mod_base = OTHER; note = N1-methyl pseudouridine
  modified_base 1972: mod_base = OTHER; note = N1-methyl pseudouridine
  modified_base 1982: mod_base = OTHER; note = N1-methyl pseudouridine
  modified_base 1994: mod_base = OTHER; note = N1-methyl pseudouridine
  modified_base 1997: mod_base = OTHER; note = N1-methyl pseudouridine
  modified_base 2006: mod_base = OTHER; note = N1-methyl pseudouridine
  modified_base 2033: mod_base = OTHER; note = N1-methyl pseudouridine
  modified_base 2036: mod_base = OTHER; note = N1-methyl pseudouridine
  modified_base 2041: mod_base = OTHER; note = N1-methyl pseudouridine
  modified_base 2042: mod_base = OTHER; note = N1-methyl pseudouridine
  modified_base 2045: mod_base = OTHER; note = N1-methyl pseudouridine
  modified_base 2059: mod_base = OTHER; note = N1-methyl pseudouridine
  modified_base 2060: mod_base = OTHER; note = N1-methyl pseudouridine
  modified_base 2074: mod_base = OTHER; note = N1-methyl pseudouridine
  modified_base 2075: mod_base = OTHER; note = N1-methyl pseudouridine
  modified_base 2078: mod_base = OTHER; note = N1-methyl pseudouridine
  modified_base 2084: mod_base = OTHER; note = N1-methyl pseudouridine
  modified_base 2087: mod_base = OTHER; note = N1-methyl pseudouridine
  modified_base 2102: mod_base = OTHER; note = N1-methyl pseudouridine
  modified_base 2107: mod_base = OTHER; note = N1-methyl pseudouridine
  modified_base 2108: mod_base = OTHER; note = N1-methyl pseudouridine
  modified_base 2120: mod_base = OTHER; note = N1-methyl pseudouridine
  modified_base 2135: mod_base = OTHER; note = N1-methyl pseudouridine
  modified_base 2156: mod_base = OTHER; note = N1-methyl pseudouridine
  modified_base 2168: mod_base = OTHER; note = N1-methyl pseudouridine
  modified_base 2177: mod_base = OTHER; note = N1-methyl pseudouridine
  modified_base 2195: mod_base = OTHER; note = N1-methyl pseudouridine
  modified_base 2207: mod_base = OTHER; note = N1-methyl pseudouridine
  modified_base 2210: mod_base = OTHER; note = N1-methyl pseudouridine
  modified_base 2219: mod_base = OTHER; note = N1-methyl pseudouridine
  modified_base 2225: mod_base = OTHER; note = N1-methyl pseudouridine
  modified_base 2228: mod_base = OTHER; note = N1-methyl pseudouridine
  modified_base 2237: mod_base = OTHER; note = N1-methyl pseudouridine
  modified_base 2240: mod_base = OTHER; note = N1-methyl pseudouridine
  modified_base 2246: mod_base = OTHER; note = N1-methyl pseudouridine
  modified_base 2249: mod_base = OTHER; note = N1-methyl pseudouridine
  modified_base 2273: mod_base = OTHER; note = N1-methyl pseudouridine
  modified_base 2276: mod_base = OTHER; note = N1-methyl pseudouridine
  modified_base 2279: mod_base = OTHER; note = N1-methyl pseudouridine
  modified_base 2285: mod_base = OTHER; note = N1-methyl pseudouridine
  modified_base 2339: mod_base = OTHER; note = N1-methyl pseudouridine
  modified_base 2348: mod_base = OTHER; note = N1-methyl pseudouridine
  modified_base 2360: mod_base = OTHER; note = N1-methyl pseudouridine
  modified_base 2369: mod_base = OTHER; note = N1-methyl pseudouridine
  modified_base 2381: mod_base = OTHER; note = N1-methyl pseudouridine
  modified_base 2384: mod_base = OTHER; note = N1-methyl pseudouridine
  modified_base 2399: mod_base = OTHER; note = N1-methyl pseudouridine
  modified_base 2414: mod_base = OTHER; note = N1-methyl pseudouridine
  modified_base 2429: mod_base = OTHER; note = N1-methyl pseudouridine
  modified_base 2431: mod_base = OTHER; note = N1-methyl pseudouridine
  modified_base 2435: mod_base = OTHER; note = N1-methyl pseudouridine
  modified_base 2437: mod_base = OTHER; note = N1-methyl pseudouridine
  modified_base 2440: mod_base = OTHER; note = N1-methyl pseudouridine
  modified_base 2444: mod_base = OTHER; note = N1-methyl pseudouridine
  modified_base 2462: mod_base = OTHER; note = N1-methyl pseudouridine
  modified_base 2464: mod_base = OTHER; note = N1-methyl pseudouridine
  modified_base 2468: mod_base = OTHER; note = N1-methyl pseudouridine
  modified_base 2480: mod_base = OTHER; note = N1-methyl pseudouridine
  modified_base 2486: mod_base = OTHER; note = N1-methyl pseudouridine
  modified_base 2495: mod_base = OTHER; note = N1-methyl pseudouridine
  modified_base 2503: mod_base = OTHER; note = N1-methyl pseudouridine
  modified_base 2510: mod_base = OTHER; note = N1-methyl pseudouridine
  modified_base 2519: mod_base = OTHER; note = N1-methyl pseudouridine
  modified_base 2522: mod_base = OTHER; note = N1-methyl pseudouridine
  modified_base 2533: mod_base = OTHER; note = N1-methyl pseudouridine
  modified_base 2534: mod_base = OTHER; note = N1-methyl pseudouridine
  modified_base 2537: mod_base = OTHER; note = N1-methyl pseudouridine
  modified_base 2552: mod_base = OTHER; note = N1-methyl pseudouridine
  modified_base 2564: mod_base = OTHER; note = N1-methyl pseudouridine
  modified_base 2567: mod_base = OTHER; note = N1-methyl pseudouridine
  modified_base 2606: mod_base = OTHER; note = N1-methyl pseudouridine
  modified_base 2621: mod_base = OTHER; note = N1-methyl pseudouridine
  modified_base 2624: mod_base = OTHER; note = N1-methyl pseudouridine
  modified_base 2633: mod_base = OTHER; note = N1-methyl pseudouridine
  modified_base 2641: mod_base = OTHER; note = N1-methyl pseudouridine
  modified_base 2644: mod_base = OTHER; note = N1-methyl pseudouridine
  modified_base 2654: mod_base = OTHER; note = N1-methyl pseudouridine
  modified_base 2657: mod_base = OTHER; note = N1-methyl pseudouridine
  modified_base 2669: mod_base = OTHER; note = N1-methyl pseudouridine
  modified_base 2672: mod_base = OTHER; note = N1-methyl pseudouridine
  modified_base 2686: mod_base = OTHER; note = N1-methyl pseudouridine
  modified_base 2687: mod_base = OTHER; note = N1-methyl pseudouridine
  modified_base 2696: mod_base = OTHER; note = N1-methyl pseudouridine
  modified_base 2720: mod_base = OTHER; note = N1-methyl pseudouridine
  modified_base 2729: mod_base = OTHER; note = N1-methyl pseudouridine
  modified_base 2743: mod_base = OTHER; note = N1-methyl pseudouridine
  modified_base 2744: mod_base = OTHER; note = N1-methyl pseudouridine
  modified_base 2747: mod_base = OTHER; note = N1-methyl pseudouridine
  modified_base 2759: mod_base = OTHER; note = N1-methyl pseudouridine
  modified_base 2762: mod_base = OTHER; note = N1-methyl pseudouridine
  modified_base 2777: mod_base = OTHER; note = N1-methyl pseudouridine
  modified_base 2789: mod_base = OTHER; note = N1-methyl pseudouridine
  modified_base 2798: mod_base = OTHER; note = N1-methyl pseudouridine
  modified_base 2801: mod_base = OTHER; note = N1-methyl pseudouridine
  modified_base 2813: mod_base = OTHER; note = N1-methyl pseudouridine
  modified_base 2824: mod_base = OTHER; note = N1-methyl pseudouridine
  modified_base 2843: mod_base = OTHER; note = N1-methyl pseudouridine
  modified_base 2846: mod_base = OTHER; note = N1-methyl pseudouridine
  modified_base 2855: mod_base = OTHER; note = N1-methyl pseudouridine
  modified_base 2861: mod_base = OTHER; note = N1-methyl pseudouridine
  modified_base 2864: mod_base = OTHER; note = N1-methyl pseudouridine
  modified_base 2870: mod_base = OTHER; note = N1-methyl pseudouridine
  modified_base 2882: mod_base = OTHER; note = N1-methyl pseudouridine
  modified_base 2885: mod_base = OTHER; note = N1-methyl pseudouridine
  modified_base 2893: mod_base = OTHER; note = N1-methyl pseudouridine
  modified_base 2894: mod_base = OTHER; note = N1-methyl pseudouridine
  modified_base 2905: mod_base = OTHER; note = N1-methyl pseudouridine
  modified_base 2906: mod_base = OTHER; note = N1-methyl pseudouridine
  modified_base 2911: mod_base = OTHER; note = N1-methyl pseudouridine
  modified_base 2912: mod_base = OTHER; note = N1-methyl pseudouridine
  modified_base 2914: mod_base = OTHER; note = N1-methyl pseudouridine
  modified_base 2921: mod_base = OTHER; note = N1-methyl pseudouridine
  modified_base 2930: mod_base = OTHER; note = N1-methyl pseudouridine
  modified_base 2938: mod_base = OTHER; note = N1-methyl pseudouridine
  modified_base 2959: mod_base = OTHER; note = N1-methyl pseudouridine
  modified_base 2963: mod_base = OTHER; note = N1-methyl pseudouridine
  modified_base 2972: mod_base = OTHER; note = N1-methyl pseudouridine
  modified_base 2975: mod_base = OTHER; note = N1-methyl pseudouridine
  modified_base 2987: mod_base = OTHER; note = N1-methyl pseudouridine
  modified_base 2990: mod_base = OTHER; note = N1-methyl pseudouridine
  modified_base 2998: mod_base = OTHER; note = N1-methyl pseudouridine
  modified_base 3008: mod_base = OTHER; note = N1-methyl pseudouridine
  modified_base 3019: mod_base = OTHER; note = N1-methyl pseudouridine
  modified_base 3020: mod_base = OTHER; note = N1-methyl pseudouridine
  modified_base 3023: mod_base = OTHER; note = N1-methyl pseudouridine
  modified_base 3025: mod_base = OTHER; note = N1-methyl pseudouridine
  modified_base 3034: mod_base = OTHER; note = N1-methyl pseudouridine
  modified_base 3041: mod_base = OTHER; note = N1-methyl pseudouridine
  modified_base 3043: mod_base = OTHER; note = N1-methyl pseudouridine
  modified_base 3050: mod_base = OTHER; note = N1-methyl pseudouridine
  modified_base 3059: mod_base = OTHER; note = N1-methyl pseudouridine
  modified_base 3062: mod_base = OTHER; note = N1-methyl pseudouridine
  modified_base 3083: mod_base = OTHER; note = N1-methyl pseudouridine
  modified_base 3103: mod_base = OTHER; note = N1-methyl pseudouridine
  modified_base 3106: mod_base = OTHER; note = N1-methyl pseudouridine
  modified_base 3107: mod_base = OTHER; note = N1-methyl pseudouridine
  modified_base 3109: mod_base = OTHER; note = N1-methyl pseudouridine
  modified_base 3110: mod_base = OTHER; note = N1-methyl pseudouridine
  modified_base 3112: mod_base = OTHER; note = N1-methyl pseudouridine
  modified_base 3122: mod_base = OTHER; note = N1-methyl pseudouridine
  modified_base 3125: mod_base = OTHER; note = N1-methyl pseudouridine
  modified_base 3130: mod_base = OTHER; note = N1-methyl pseudouridine
  modified_base 3131: mod_base = OTHER; note = N1-methyl pseudouridine
  modified_base 3133: mod_base = OTHER; note = N1-methyl pseudouridine
  modified_base 3134: mod_base = OTHER; note = N1-methyl pseudouridine
  modified_base 3146: mod_base = OTHER; note = N1-methyl pseudouridine
  modified_base 3152: mod_base = OTHER; note = N1-methyl pseudouridine
  modified_base 3167: mod_base = OTHER; note = N1-methyl pseudouridine
  modified_base 3182: mod_base = OTHER; note = N1-methyl pseudouridine
  modified_base 3185: mod_base = OTHER; note = N1-methyl pseudouridine
  modified_base 3212: mod_base = OTHER; note = N1-methyl pseudouridine
  modified_base 3215: mod_base = OTHER; note = N1-methyl pseudouridine
  modified_base 3217: mod_base = OTHER; note = N1-methyl pseudouridine
  modified_base 3235: mod_base = OTHER; note = N1-methyl pseudouridine
  modified_base 3236: mod_base = OTHER; note = N1-methyl pseudouridine
  modified_base 3245: mod_base = OTHER; note = N1-methyl pseudouridine
  modified_base 3254: mod_base = OTHER; note = N1-methyl pseudouridine
  modified_base 3257: mod_base = OTHER; note = N1-methyl pseudouridine
  modified_base 3263: mod_base = OTHER; note = N1-methyl pseudouridine
  modified_base 3272: mod_base = OTHER; note = N1-methyl pseudouridine
  modified_base 3278: mod_base = OTHER; note = N1-methyl pseudouridine
  modified_base 3281: mod_base = OTHER; note = N1-methyl pseudouridine
  modified_base 3296: mod_base = OTHER; note = N1-methyl pseudouridine
  modified_base 3310: mod_base = OTHER; note = N1-methyl pseudouridine
  modified_base 3311: mod_base = OTHER; note = N1-methyl pseudouridine
  modified_base 3326: mod_base = OTHER; note = N1-methyl pseudouridine
  modified_base 3329: mod_base = OTHER; note = N1-methyl pseudouridine
  modified_base 3353: mod_base = OTHER; note = N1-methyl pseudouridine
  modified_base 3356: mod_base = OTHER; note = N1-methyl pseudouridine
  modified_base 3373: mod_base = OTHER; note = N1-methyl pseudouridine
  modified_base 3388: mod_base = OTHER; note = N1-methyl pseudouridine
  modified_base 3397: mod_base = OTHER; note = N1-methyl pseudouridine
  modified_base 3398: mod_base = OTHER; note = N1-methyl pseudouridine
  modified_base 3413: mod_base = OTHER; note = N1-methyl pseudouridine
  modified_base 3418: mod_base = OTHER; note = N1-methyl pseudouridine
  modified_base 3425: mod_base = OTHER; note = N1-methyl pseudouridine
  modified_base 3428: mod_base = OTHER; note = N1-methyl pseudouridine
  modified_base 3431: mod_base = OTHER; note = N1-methyl pseudouridine
  modified_base 3434: mod_base = OTHER; note = N1-methyl pseudouridine
  modified_base 3443: mod_base = OTHER; note = N1-methyl pseudouridine
  modified_base 3467: mod_base = OTHER; note = N1-methyl pseudouridine
  modified_base 3476: mod_base = OTHER; note = N1-methyl pseudouridine
  modified_base 3485: mod_base = OTHER; note = N1-methyl pseudouridine
  modified_base 3488: mod_base = OTHER; note = N1-methyl pseudouridine
  modified_base 3494: mod_base = OTHER; note = N1-methyl pseudouridine
  modified_base 3500: mod_base = OTHER; note = N1-methyl pseudouridine
  modified_base 3503: mod_base = OTHER; note = N1-methyl pseudouridine
  modified_base 3517: mod_base = OTHER; note = N1-methyl pseudouridine
  modified_base 3518: mod_base = OTHER; note = N1-methyl pseudouridine
  modified_base 3533: mod_base = OTHER; note = N1-methyl pseudouridine
  modified_base 3538: mod_base = OTHER; note = N1-methyl pseudouridine
  modified_base 3539: mod_base = OTHER; note = N1-methyl pseudouridine
  modified_base 3542: mod_base = OTHER; note = N1-methyl pseudouridine
  modified_base 3556: mod_base = OTHER; note = N1-methyl pseudouridine
  modified_base 3566: mod_base = OTHER; note = N1-methyl pseudouridine
  modified_base 3578: mod_base = OTHER; note = N1-methyl pseudouridine
  modified_base 3581: mod_base = OTHER; note = N1-methyl pseudouridine
  modified_base 3584: mod_base = OTHER; note = N1-methyl pseudouridine
  modified_base 3590: mod_base = OTHER; note = N1-methyl pseudouridine
  modified_base 3598: mod_base = OTHER; note = N1-methyl pseudouridine
  modified_base 3605: mod_base = OTHER; note = N1-methyl pseudouridine
  modified_base 3607: mod_base = OTHER; note = N1-methyl pseudouridine
  modified_base 3608: mod_base = OTHER; note = N1-methyl pseudouridine
  modified_base 3614: mod_base = OTHER; note = N1-methyl pseudouridine
  modified_base 3635: mod_base = OTHER; note = N1-methyl pseudouridine
  modified_base 3638: mod_base = OTHER; note = N1-methyl pseudouridine
  modified_base 3656: mod_base = OTHER; note = N1-methyl pseudouridine
  modified_base 3674: mod_base = OTHER; note = N1-methyl pseudouridine
  modified_base 3680: mod_base = OTHER; note = N1-methyl pseudouridine
  modified_base 3691: mod_base = OTHER; note = N1-methyl pseudouridine
  modified_base 3695: mod_base = OTHER; note = N1-methyl pseudouridine
  modified_base 3700: mod_base = OTHER; note = N1-methyl pseudouridine
  modified_base 3701: mod_base = OTHER; note = N1-methyl pseudouridine
  modified_base 3704: mod_base = OTHER; note = N1-methyl pseudouridine
  modified_base 3706: mod_base = OTHER; note = N1-methyl pseudouridine
  modified_base 3710: mod_base = OTHER; note = N1-methyl pseudouridine
  modified_base 3721: mod_base = OTHER; note = N1-methyl pseudouridine
  modified_base 3731: mod_base = OTHER; note = N1-methyl pseudouridine
  modified_base 3767: mod_base = OTHER; note = N1-methyl pseudouridine
  modified_base 3769: mod_base = OTHER; note = N1-methyl pseudouridine
  modified_base 3770: mod_base = OTHER; note = N1-methyl pseudouridine
  modified_base 3773: mod_base = OTHER; note = N1-methyl pseudouridine
  modified_base 3790: mod_base = OTHER; note = N1-methyl pseudouridine
  modified_base 3794: mod_base = OTHER; note = N1-methyl pseudouridine
  modified_base 3803: mod_base = OTHER; note = N1-methyl pseudouridine
  modified_base 3806: mod_base = OTHER; note = N1-methyl pseudouridine
  modified_base 3815: mod_base = OTHER; note = N1-methyl pseudouridine
  modified_base 3823: mod_base = OTHER; note = N1-methyl pseudouridine
  modified_base 3824: mod_base = OTHER; note = N1-methyl pseudouridine
  modified_base 3836: mod_base = OTHER; note = N1-methyl pseudouridine
  modified_base 3839: mod_base = OTHER; note = N1-methyl pseudouridine
  modified_base 3842: mod_base = OTHER; note = N1-methyl pseudouridine
  modified_base 3857: mod_base = OTHER; note = N1-methyl pseudouridine
  modified_base 3866: mod_base = OTHER; note = N1-methyl pseudouridine
  modified_base 3869: mod_base = OTHER; note = N1-methyl pseudouridine
  modified_base 3877: mod_base = OTHER; note = N1-methyl pseudouridine
  modified_base 3902: mod_base = OTHER; note = N1-methyl pseudouridine
  modified_base 3923: mod_base = OTHER; note = N1-methyl pseudouridine
  modified_base 3926: mod_base = OTHER; note = N1-methyl pseudouridine
  modified_base 3932: mod_base = OTHER; note = N1-methyl pseudouridine
  modified_base 3934: mod_base = OTHER; note = N1-methyl pseudouridine
  modified_base 3935: mod_base = OTHER; note = N1-methyl pseudouridine
  modified_base 3941: mod_base = OTHER; note = N1-methyl pseudouridine
  modified_base 3950: mod_base = OTHER; note = N1-methyl pseudouridine
  modified_base 3967: mod_base = OTHER; note = N1-methyl pseudouridine
  modified_base 3968: mod_base = OTHER; note = N1-methyl pseudouridine
  modified_base 3973: mod_base = OTHER; note = N1-methyl pseudouridine
  modified_base 3976: mod_base = OTHER; note = N1-methyl pseudouridine
  modified_base 3977: mod_base = OTHER; note = N1-methyl pseudouridine
  modified_base 3989: mod_base = OTHER; note = N1-methyl pseudouridine
  modified_base 4003: mod_base = OTHER; note = N1-methyl pseudouridine
  modified_base 4022: mod_base = OTHER; note = N1-methyl pseudouridine
  modified_base 4025: mod_base = OTHER; note = N1-methyl pseudouridine
  modified_base 4037: mod_base = OTHER; note = N1-methyl pseudouridine
  modified_base 4040: mod_base = OTHER; note = N1-methyl pseudouridine
  modified_base 4052: mod_base = OTHER; note = N1-methyl pseudouridine
  modified_base 4061: mod_base = OTHER; note = N1-methyl pseudouridine
  modified_base 4063: mod_base = OTHER; note = N1-methyl pseudouridine
  modified_base 4076: mod_base = OTHER; note = N1-methyl pseudouridine
  modified_base 4082: mod_base = OTHER; note = N1-methyl pseudouridine
  modified_base 4091: mod_base = OTHER; note = N1-methyl pseudouridine
gacaagaagtacagcatcggcctggccatcggcaccaacagcgtgggctgggccgtgatcaccgacgagtacaaggtgcccagcaagaagttcaaggtgctgggcaacaccgaccggcacagcatcaagaagaacctgatcggcgccctgctgttcgacagcggcgagacagccgaggccacccggctgaagcggaccgcccggcggcggtacacccggcggaagaaccggatctgctacctgcaggagatcttcagcaacgagatggccaaggtggacgacagcttcttccaccggctggaggagagcttcctggtggaggaggacaagaagcacgagcggcaccccatcttcggcaacatcgtggacgaggtggcctaccacgagaagtaccccaccatctaccacctgcggaagaagctggtggacagcaccgacaaggccgacctgcggctgatctacctggccctggcccacatgatcaagttccggggccacttcctgatcgagggcgacctgaaccccgacaacagcgacgtggacaagctgttcatccagctggtgcagacctacaaccagctgttcgaggagaaccccatcaacgccagcggcgtggacgccaaggccatcctgagcgcccggctgagcaagagccggcggctggagaacctgatcgcccagctgcccggcgagaagaagaacggcctgttcggcaacctgatcgccctgagcctgggcctgacccccaacttcaagagcaacttcgacctggccgaggacgccaagctgcagctgagcaaggacacctacgacgacgacctggacaacctgctggcccagatcggcgaccagtacgccgacctgttcctggccgccaagaacctgagcgacgccatcctgctgagcgacatcctgcgggtgaacaccgagatcaccaaggcccccctgagcgccagcatgatcaagcggtacgacgagcaccaccaggacctgaccctgctgaaggccctggtgcggcagcagctgcccgagaagtacaaggagatcttcttcgaccagagcaagaacggctacgccggctacatcgacggcggcgccagccaggaggagttctacaagttcatcaagcccatcctggagaagatggacggcaccgaggagctgctggtgaagctgaaccgggaggacctgctgcggaagcagcggaccttcgacaacggcagcatcccccaccagatccacctgggcgagctgcacgccatcctgcggcggcaggaggacttctaccccttcctgaaggacaaccgggagaagatcgagaagatcctgaccttccggatcccctactacgtgggccccctggcccggggcaacagccggttcgcctggatgacccgcaagagcgaggagacaatcaccccctggaacttcgaggaggtggtggacaagggcgccagcgcccagagcttcatcgagcggatgaccaacttcgacaagaacctgcccaacgagaaggtgctgcccaagcacagcctgctgtacgagtacttcaccgtgtacaacgagctgaccaaggtgaagtacgtgaccgagggcatgcggaagcccgccttcctgagcggcgagcagaagaaggccatcgtggacctgctgttcaagaccaaccggaaggtgaccgtgaagcagctgaaggaggactacttcaagaagatcgagtgcttcgacagcgtggagatcagcggcgtggaggaccggttcaacgccagcctgggcacctaccacgacctgctgaagatcatcaaggacaaggacttcctggacaacgaggagaacgaggacatcctggaggacatcgtgctgaccctgaccctgttcgaggaccgggagatgatcgaggagcggctgaagacctacgcccacctgttcgacgacaaggtgatgaagcagctgaagcggcggcggtacaccggctggggccggctgagccggaagctgatcaacggcatccgggacaagcagagcggcaagaccatcctggacttcctcaagagcgacggcttcgccaaccggaacttcatgcagctgatccacgacgacagcctgaccttcaaggaggacatccagaaggcccaggtgagcggccagggcgacagcctgcacgagcacatcgccaacctggccggcagccccgccatcaagaagggcatcctgcagaccgtgaaggtggtggacgagctggtgaaggtgatgggccggcacaagcccgagaacatcgtgatcgagatggcccgggagaaccagaccacccagaagggccagaagaacagccgggagcggatgaagcggatcgaggagggcatcaaggagctgggcagccagatcctgaaggagcaccccgtggagaacacccagctgcagaacgagaagctgtacctgtactacctgcagaacggccgggacatgtacgtggaccaggagctggacatcaaccggctgagcgactacgacgtggaccacatcgtgccccagagcttcctgaaggacgacagcatcgacaacaaggtgctgacccggagcgacaagaaccggggcaagagcgacaacgtgcccagcgaggaggtggtgaagaagatgaagaactactggcggcagctgctgaacgccaagctgatcacccagcggaagttcgacaacctgaccaaggccgagcggggcggcctgagcgagctggacaaggccggcttcatcaagcggcagctggtggagacacggcagatcaccaagcacgtggcccagatcctggacagccggatgaacaccaagtacgacgagaacgacaagctgatccgggaggtgaaggtgatcaccctcaagagcaagctggtgagcgacttccggaaggacttccagttctacaaggtgcgggagatcaacaactaccaccacgcccacgacgcctacctgaacgccgtggtgggcaccgccctgatcaagaagtaccccaagctggagagcgagttcgtgtacggcgactacaaggtgtacgacgtgcggaagatgatcgccaagagcgagcaggagatcggcaaggccaccgccaagtacttcttctacagcaacatcatgaacttcttcaagaccgagatcaccctggccaacggcgagatccggaagcggcccctgatcgagacaaacggcgagacaggcgagatcgtgtgggacaagggccgggacttcgccaccgtgcggaaggtgctgagcatgccccaggtgaacatcgtgaagaagaccgaggtgcagaccggcggcttcagcaaggagagcatcctgcccaagcggaacagcgacaagctgatcgcccggaagaaggactgggaccccaagaagtacggcggcttcgacagccccaccgtggcctacagcgtgctggtggtggccaaggtggagaagggcaagagcaagaagctcaagagcgtgaaggagctgctgggcatcaccatcatggagcggagcagcttcgagaagaaccccatcgacttcctggaggccaagggctacaaggaggtgaagaaggacctgatcatcaagctgcccaagtacagcctgttcgagctggagaacggccggaagcggatgctggccagcgccggcgagctgcagaagggcaacgagctggccctgcccagcaagtacgtgaacttcctgtacctggccagccactacgagaagctgaagggcagccccgaggacaacgagcagaagcagctgttcgtggagcagcacaagcactacctggacgagatcatcgagcagatcagcgagttcagcaagcgggtgatcctggccgacgccaacctggacaaggtgctgagcgcctacaacaagcaccgggacaagcccatccgggagcaggccgagaacatcatccacctgttcaccctgaccaacctgggcgcccccgccgccttcaagtacttcgacaccaccatcgaccggaagcggtacaccagcaccaaggaggtgctggacgccaccctgatccaccagagcatcaccggcctgtacgagacacggatcgacctgagccagctgggcggcgac

SEQ ID NO: 2143 - RNA, 12 nt, synthetic construct
  source 1..12: mol_type = other RNA
gagggcgccgac

SEQ ID NO: 2144 - protein, 4 aa, synthetic construct
EGAD

SEQ ID NO: 2145 - RNA, 57 nt, synthetic construct
  source 1..57: mol_type = other RNA
  modified_base 25: mod_base = OTHER; note = N1-methyl pseudouridine
  modified_base 26: mod_base = OTHER; note = N1-methyl pseudouridine
  modified_base 53: mod_base = OTHER; note = N1-methyl pseudouridine
  modified_base 55: mod_base = OTHER; note = N1-methyl pseudouridine
aagcggaccgccgacggcagcgagttcgagagccccaagaagaagcggaaggtgtga

SEQ ID NO: 2146 - protein, 18 aa, synthetic construct
KRTADGSEFESPKKKRKV

SEQ ID NO: 2147 - RNA, 115 nt, synthetic construct
  source 1..115: mol_type = other RNA
  modified_base 9: mod_base = OTHER; note = N1-methyl pseudouridine
  modified_base 10: mod_base = OTHER; note = N1-methyl pseudouridine
  modified_base 13: mod_base = OTHER; note = N1-methyl pseudouridine
  modified_base 14: mod_base = OTHER; note = N1-methyl pseudouridine
  modified_base 19: mod_base = OTHER; note = N1-methyl pseudouridine
  modified_base 23: mod_base = OTHER; note = N1-methyl pseudouridine
  modified_base 24: mod_base = OTHER; note = N1-methyl pseudouridine
  modified_base 26: mod_base = OTHER; note = N1-methyl pseudouridine
  modified_base 34: mod_base = OTHER; note = N1-methyl pseudouridine
  modified_base 35: mod_base = OTHER; note = N1-methyl pseudouridine
  modified_base 39: mod_base = OTHER; note = N1-methyl pseudouridine
  modified_base 40: mod_base = OTHER; note = N1-methyl pseudouridine
  modified_base 42: mod_base = OTHER; note = N1-methyl pseudouridine
  modified_base 48: mod_base = OTHER; note = N1-methyl pseudouridine
  modified_base 53: mod_base = OTHER; note = N1-methyl pseudouridine
  modified_base 54: mod_base = OTHER; note = N1-methyl pseudouridine
  modified_base 56: mod_base = OTHER; note = N1-methyl pseudouridine
  modified_base 57: mod_base = OTHER; note = N1-methyl pseudouridine
  modified_base 59: mod_base = OTHER; note = N1-methyl pseudouridine
  modified_base 61: mod_base = OTHER; note = N1-methyl pseudouridine
  modified_base 65: mod_base = OTHER; note = N1-methyl pseudouridine
  modified_base 66: mod_base = OTHER; note = N1-methyl pseudouridine
  modified_base 72: mod_base = OTHER; note = N1-methyl pseudouridine
  modified_base 74: mod_base = OTHER; note = N1-methyl pseudouridine
  modified_base 78: mod_base = OTHER; note = N1-methyl pseudouridine
  modified_base 80: mod_base = OTHER; note = N1-methyl pseudouridine
  modified_base 81: mod_base = OTHER; note = N1-methyl pseudouridine
  modified_base 84: mod_base = OTHER; note = N1-methyl pseudouridine
  modified_base 86: mod_base = OTHER; note = N1-methyl pseudouridine
  modified_base 87: mod_base = OTHER; note = N1-methyl pseudouridine
  modified_base 88: mod_base = OTHER; note = N1-methyl pseudouridine
  modified_base 92: mod_base = OTHER; note = N1-methyl pseudouridine
  modified_base 99: mod_base = OTHER; note = N1-methyl pseudouridine
  modified_base 103: mod_base = OTHER; note = N1-methyl pseudouridine
  modified_base 110: mod_base = OTHER; note = N1-methyl pseudouridine
  modified_base 112: mod_base = OTHER; note = N1-methyl pseudouridine
gcggccgcttaattaagctgccttctgcggggcttgccttctggccatgcccttcttctctcccttgcacctgtacctcttggtctttgaataaagcctgagtaggaagtctaga

SEQ ID NO: 2148 - RNA, 4929 nt, synthetic construct
  source 1..4929: mol_type = other RNA
  modified_base 7: mod_base = OTHER; note = N1-methyl pseudouridine
  modified_base 25: mod_base = OTHER; note = N1-methyl pseudouridine
  modified_base 35: mod_base = OTHER; note = N1-methyl pseudouridine
  modified_base 37: mod_base = OTHER; note = N1-methyl pseudouridine
  modified_base 49: mod_base = OTHER; note = N1-methyl pseudouridine
  modified_base 58: mod_base = OTHER; note = N1-methyl pseudouridine
  modified_base 63: mod_base = OTHER; note = N1-methyl pseudouridine
  modified_base 64: mod_base = OTHER; note = N1-methyl pseudouridine
  modified_base 75: mod_base = OTHER; note = N1-methyl pseudouridine
  modified_base 78: mod_base = OTHER; note = N1-methyl pseudouridine
  modified_base 82: mod_base = OTHER; note = N1-methyl pseudouridine
  modified_base 94: mod_base = OTHER; note = N1-methyl pseudouridine
  modified_base 100: mod_base = OTHER; note = N1-methyl pseudouridine
  modified_base 130: mod_base = OTHER; note = N1-methyl pseudouridine
  modified_base 136: mod_base = OTHER; note = N1-methyl pseudouridine
  modified_base 145: mod_base = OTHER; note = N1-methyl pseudouridine
  modified_base 148: mod_base = OTHER; note = N1-methyl pseudouridine
  modified_base 151: mod_base = OTHER; note = N1-methyl pseudouridine
  modified_base 154: mod_base = OTHER; note = N1-methyl pseudouridine
  modified_base 166: mod_base = OTHER; note = N1-methyl pseudouridine
  modified_base 169: mod_base = OTHER; note = N1-methyl pseudouridine
  modified_base 180: mod_base = OTHER; note = N1-methyl pseudouridine
  modified_base 193: mod_base = OTHER; note = N1-methyl pseudouridine
  modified_base 199: mod_base = OTHER; note = N1-methyl pseudouridine
  modified_base 226: mod_base = OTHER; note = N1-methyl pseudouridine
  modified_base 229: mod_base = OTHER; note = N1-methyl pseudouridine
  modified_base 235: mod_base = OTHER; note = N1-methyl pseudouridine
  modified_base 250: mod_base = OTHER; note = N1-methyl pseudouridine
  modified_base 253: mod_base = OTHER; note = N1-methyl pseudouridine
  modified_base 256: mod_base = OTHER; note = N1-methyl pseudouridine
  modified_base 264: mod_base = OTHER; note = N1-methyl pseudouridine
  modified_base 271: mod_base = OTHER; note = N1-methyl pseudouridine
  modified_base 274: mod_base = OTHER; note = N1-methyl pseudouridine
  modified_base 286: mod_base = OTHER; note = N1-methyl pseudouridine
  modified_base 288: mod_base = OTHER; note = N1-methyl pseudouridine
  modified_base 292: mod_base = OTHER; note = N1-methyl pseudouridine
  modified_base 297: mod_base = OTHER; note = N1-methyl pseudouridine
  modified_base 298: mod_base = OTHER; note = N1-methyl pseudouridine
  modified_base 306: mod_base = OTHER; note = N1-methyl pseudouridine
  modified_base 310: mod_base = OTHER; note = N1-methyl pseudouridine
  modified_base 313: mod_base = OTHER; note = N1-methyl pseudouridine
  modified_base 315: mod_base = OTHER; note = N1-methyl pseudouridine
  modified_base 328: mod_base = OTHER; note = N1-methyl pseudouridine
  modified_base 331: mod_base = OTHER; note = N1-methyl pseudouridine
  modified_base 343: mod_base = OTHER; note = N1-methyl pseudouridine
  modified_base 352: mod_base = OTHER; note = N1-methyl pseudouridine
  modified_base 355: mod_base = OTHER; note = N1-methyl pseudouridine
  modified_base 357: mod_base = OTHER; note = N1-methyl pseudouridine
  modified_base 358: mod_base = OTHER; note = N1-methyl pseudouridine
  modified_base 364: mod_base = OTHER; note = N1-methyl pseudouridine
  modified_base 397: mod_base = OTHER; note = N1-methyl pseudouridine
  modified_base 400: mod_base = OTHER; note = N1-methyl pseudouridine
  modified_base 406: mod_base = OTHER; note = N1-methyl pseudouridine
  modified_base 409: mod_base = OTHER; note = N1-methyl pseudouridine
  modified_base 424: mod_base = OTHER; note = N1-methyl pseudouridine
  modified_base 436: mod_base = OTHER; note = N1-methyl pseudouridine
  modified_base 442: mod_base = OTHER; note = N1-methyl pseudouridine
  modified_base 454: mod_base = OTHER; note = N1-methyl pseudouridine
  modified_base 457: mod_base = OTHER; note = N1-methyl pseudouridine
  modified_base 468: mod_base = OTHER; note = N1-methyl pseudouridine
  modified_base 478: mod_base = OTHER; note = N1-methyl pseudouridine
  modified_base 481: mod_base = OTHER; note = N1-methyl pseudouridine
  modified_base 483: mod_base = OTHER; note = N1-methyl pseudouridine
  modified_base 489: mod_base = OTHER; note = N1-methyl pseudouridine
  modified_base 490: mod_base = OTHER; note = N1-methyl pseudouridine
  modified_base 492: mod_base = OTHER; note = N1-methyl pseudouridine
  modified_base 493: mod_base = OTHER; note = N1-methyl pseudouridine
  modified_base 499: mod_base = OTHER; note = N1-methyl pseudouridine
  modified_base 511: mod_base = OTHER; note = N1-methyl pseudouridine
  modified_base 513: mod_base = OTHER; note = N1-methyl pseudouridine
  modified_base 514: mod_base = OTHER; note = N1-methyl pseudouridine
  modified_base 654: mod_base = OTHER; note = N1-methyl pseudouridine
  modified_base 661: mod_base = OTHER; note = N1-methyl pseudouridine
  modified_base 667: mod_base = OTHER; note = N1-methyl pseudouridine
  modified_base 673: mod_base = OTHER; note = N1-methyl pseudouridine
  modified_base 688: mod_base = OTHER; note = N1-methyl pseudouridine
  modified_base 693: mod_base = OTHER; note = N1-methyl pseudouridine
  modified_base 700: mod_base = OTHER; note = N1-methyl pseudouridine
  modified_base 703: mod_base = OTHER; note = N1-methyl pseudouridine
  modified_base 714: mod_base = OTHER; note = N1-methyl pseudouridine
  modified_base 721: mod_base = OTHER; note = N1-methyl pseudouridine
  modified_base 735: mod_base = OTHER; note = N1-methyl pseudouridine
  modified_base 736: mod_base = OTHER; note = N1-methyl pseudouridine
  modified_base 742: mod_base = OTHER; note = N1-methyl pseudouridine
  modified_base 745: mod_base = OTHER; note = N1-methyl pseudouridine
  modified_base 769: mod_base = OTHER; note = N1-methyl pseudouridine
  modified_base 781: mod_base = OTHER; note = N1-methyl pseudouridine
  modified_base 784: mod_base = OTHER; note = N1-methyl pseudouridine
  modified_base 793: mod_base = OTHER; note = N1-methyl pseudouridine
  modified_base 796: mod_base = OTHER; note = N1-methyl pseudouridine
  modified_base 798: mod_base = OTHER; note = N1-methyl pseudouridine
  modified_base 799: mod_base = OTHER; note = N1-methyl pseudouridine
  modified_base 832: mod_base = OTHER; note = N1-methyl pseudouridine
  modified_base 855: mod_base = OTHER; note = N1-methyl pseudouridine
  modified_base 877: mod_base = OTHER; note = N1-methyl pseudouridine
  modified_base 879: mod_base = OTHER; note = N1-methyl pseudouridine
  modified_base 882: mod_base = OTHER; note = N1-methyl pseudouridine
  modified_base 886: mod_base = OTHER; note = N1-methyl pseudouridine
  modified_base 895: mod_base = OTHER; note = N1-methyl pseudouridine
  modified_base 897: mod_base = OTHER; note = N1-methyl pseudouridine
  modified_base 898: mod_base = OTHER; note = N1-methyl pseudouridine
  modified_base 910: mod_base = OTHER; note = N1-methyl pseudouridine
  modified_base 919: mod_base = OTHER; note = N1-methyl pseudouridine
  modified_base 930: mod_base = OTHER; note = N1-methyl pseudouridine
  modified_base 931: mod_base = OTHER; note = N1-methyl pseudouridine
  modified_base 933: mod_base = OTHER; note = N1-methyl pseudouridine
  modified_base 934: mod_base = OTHER; note = N1-methyl pseudouridine
  modified_base 943: mod_base = OTHER; note = N1-methyl pseudouridine
  modified_base 954: mod_base = OTHER; note = N1-methyl pseudouridine
  modified_base 955: mod_base = OTHER; note = N1-methyl pseudouridine
  modified_base 958: mod_base = OTHER; note = N1-methyl pseudouridine
  modified_base 961: mod_base = OTHER; note = N1-methyl pseudouridine
  modified_base 994: mod_base = OTHER; note = N1-methyl pseudouridine
  modified_base 996: mod_base = OTHER; note = N1-methyl pseudouridine
  modified_base 997: mod_base = OTHER; note = N1-methyl pseudouridine
  modified_base 1006: mod_base = OTHER; note = N1-methyl pseudouridine
  modified_base 1009: mod_base = OTHER; note = N1-methyl pseudouridine
  modified_base 1018: mod_base = OTHER; note = N1-methyl pseudouridine
  modified_base 1023: mod_base = OTHER; note = N1-methyl pseudouridine
  modified_base 1035: mod_base = OTHER; note = N1-methyl pseudouridine
  modified_base 1045: mod_base = OTHER; note = N1-methyl pseudouridine
  modified_base 1047: mod_base = OTHER; note = N1-methyl pseudouridine
  modified_base 1054: mod_base = OTHER; note = N1-methyl pseudouridine
  modified_base 1066: mod_base = OTHER; note = N1-methyl pseudouridine
  modified_base 1069: mod_base = OTHER; note = N1-methyl pseudouridine
  modified_base 1093: mod_base = OTHER; note = N1-methyl pseudouridine
  modified_base 1099: mod_base = OTHER; note = N1-methyl pseudouridine
  modified_base 1102: mod_base = OTHER; note = N1-methyl pseudouridine
  modified_base 1104: mod_base = OTHER; note = N1-methyl pseudouridine
  modified_base 1108: mod_base = OTHER; note = N1-methyl pseudouridine
  modified_base 1114: mod_base = OTHER; note = N1-methyl pseudouridine
  modified_base 1123: mod_base = OTHER; note = N1-methyl pseudouridine
  modified_base 1126: mod_base = OTHER; note = N1-methyl pseudouridine
  modified_base 1131: mod_base = OTHER; note = N1-methyl pseudouridine
  modified_base 1132: mod_base = OTHER; note = N1-methyl pseudouridine
  modified_base 1143: mod_base = OTHER; note = N1-methyl pseudouridine
  modified_base 1144: mod_base = OTHER; note = N1-methyl pseudouridine
  modified_base 1147: mod_base = OTHER; note = N1-methyl pseudouridine
  modified_base 1150: mod_base = OTHER; note = N1-methyl pseudouridine
  modified_base 1162: mod_base = OTHER; note = N1-methyl pseudouridine
  modified_base 1183: mod_base = OTHER; note = N1-methyl pseudouridine
  modified_base 1192: mod_base = OTHER; note = N1-methyl pseudouridine
  modified_base 1194: mod_base = OTHER; note = N1-methyl pseudouridine
  modified_base 1195: mod_base = OTHER; note = N1-methyl pseudouridine
  modified_base 1198: mod_base = OTHER; note = N1-methyl pseudouridine
  modified_base 1204: mod_base = OTHER; note = N1-methyl pseudouridine
  modified_base 1207: mod_base = OTHER; note = N1-methyl pseudouridine
  modified_base 1215: mod_base = OTHER; note = N1-methyl pseudouridine
  modified_base 1225: mod_base = OTHER; note = N1-methyl pseudouridine
  modified_base 1227: mod_base = OTHER; note = N1-methyl pseudouridine
  modified_base 1228: mod_base = OTHER; note = N1-methyl pseudouridine
  modified_base 1243: mod_base = OTHER; note = N1-methyl pseudouridine
  modified_base 1258: mod_base = OTHER; note = N1-methyl pseudouridine
  modified_base 1273: mod_base = OTHER; note = N1-methyl pseudouridine
  modified_base 1276: mod_base = OTHER; note = N1-methyl pseudouridine
  modified_base 1288: mod_base = OTHER; note = N1-methyl pseudouridine
  modified_base 1306: mod_base = OTHER; note = N1-methyl pseudouridine
  modified_base 1315: mod_base = OTHER; note = N1-methyl pseudouridine
  modified_base 1318: mod_base = OTHER; note = N1-methyl pseudouridine
  modified_base 1327: mod_base = OTHER; note = N1-methyl pseudouridine
  modified_base 1351: mod_base = OTHER; note = N1-methyl pseudouridine
  modified_base 1353: mod_base = OTHER; note = N1-methyl pseudouridine
  modified_base 1354: mod_base = OTHER; note = N1-methyl pseudouridine
  modified_base 1363: mod_base = OTHER; note = N1-methyl pseudouridine
  modified_base 1366: mod_base = OTHER; note = N1-methyl pseudouridine
  modified_base 1372: mod_base = OTHER; note = N1-methyl pseudouridine
  modified_base 1378: mod_base = OTHER; note = N1-methyl pseudouridine
  modified_base 1384: mod_base = OTHER; note = N1-methyl pseudouridine
  modified_base 1395: mod_base = OTHER; note = N1-methyl pseudouridine
  modified_base 1396: mod_base = OTHER; note = N1-methyl pseudouridine
  modified_base 1407: mod_base = OTHER; note = N1-methyl pseudouridine
  modified_base 1408: mod_base = OTHER; note = N1-methyl pseudouridine
  modified_base 1414: mod_base = OTHER; note = N1-methyl pseudouridine
  modified_base 1432: mod_base = OTHER; note = N1-methyl pseudouridine
  modified_base 1438: mod_base = OTHER; note = N1-methyl pseudouridine
  modified_base 1452: mod_base = OTHER; note = N1-methyl pseudouridine
  modified_base 1465: mod_base = OTHER; note = N1-methyl pseudouridine
  modified_base 1474: mod_base = OTHER; note = N1-methyl pseudouridine
  modified_base 1477: mod_base = OTHER; note = N1-methyl pseudouridine
  modified_base 1486: mod_base = OTHER; note = N1-methyl pseudouridine
  modified_base 1497: mod_base = OTHER; note = N1-methyl pseudouridine
  modified_base 1507: mod_base = OTHER; note = N1-methyl pseudouridine
  modified_base 1509: mod_base = OTHER; note = N1-methyl pseudouridine
  modified_base 1510: mod_base = OTHER; note = N1-methyl pseudouridine
  modified_base 1513: mod_base = OTHER; note = N1-methyl pseudouridine
  modified_base 1528: mod_base = OTHER; note = N1-methyl pseudouridine
  modified_base 1540: mod_base = OTHER; note = N1-methyl pseudouridine
  modified_base 1543: mod_base = OTHER; note = N1-methyl pseudouridine
  modified_base 1546: mod_base = OTHER; note = N1-methyl pseudouridine
  modified_base 1555: mod_base = OTHER; note = N1-methyl pseudouridine
  modified_base 1558: mod_base = OTHER; note = N1-methyl pseudouridine
  modified_base 1564: mod_base = OTHER; note = N1-methyl pseudouridine
  modified_base 1576: mod_base = OTHER; note = N1-methyl pseudouridine
  modified_base 1591: mod_base = OTHER; note = N1-methyl pseudouridine
  modified_base 1603: mod_base = OTHER; note = N1-methyl pseudouridine
  modified_base 1606: mod_base = OTHER; note = N1-methyl pseudouridine
  modified_base 1614: mod_base = OTHER; note = N1-methyl pseudouridine
  modified_base 1636: mod_base = OTHER; note = N1-methyl pseudouridine
  modified_base 1642: mod_base = OTHER; note = N1-methyl pseudouridine
  modified_base 1645: mod_base = OTHER; note = N1-methyl pseudouridine
  modified_base 1654: mod_base = OTHER; note = N1-methyl pseudouridine
  modified_base 1657: mod_base = OTHER; note = N1-methyl pseudouridine
  modified_base 1669: mod_base = OTHER; note = N1-methyl pseudouridine
  modified_base 1680: mod_base = OTHER; note = N1-methyl pseudouridine
  modified_base 1690: mod_base = OTHER; note = N1-methyl pseudouridine
  modified_base 1692: mod_base = OTHER; note = N1-methyl pseudouridine
  modified_base 1693: mod_base = OTHER; note = N1-methyl pseudouridine
  modified_base 1695: mod_base = OTHER; note = N1-methyl pseudouridine
  modified_base 1696: mod_base = OTHER; note = N1-methyl pseudouridine
  modified_base 1716: mod_base = OTHER; note = N1-methyl pseudouridine
  modified_base 1725: mod_base = OTHER; note = N1-methyl pseudouridine
  modified_base 1729: mod_base = OTHER; note = N1-methyl pseudouridine
  modified_base 1755: mod_base = OTHER; note = N1-methyl pseudouridine
  modified_base 1756: mod_base = OTHER; note = N1-methyl pseudouridine
  modified_base 1758: mod_base = OTHER; note = N1-methyl pseudouridine
  modified_base 1764: mod_base = OTHER; note = N1-methyl pseudouridine
  modified_base 1765: mod_base = OTHER; note = N1-methyl pseudouridine
  modified_base 1768: mod_base = OTHER; note = N1-methyl pseudouridine
  modified_base 1777: mod_base = OTHER; note = N1-methyl pseudouridine
  modified_base 1780: mod_base = OTHER; note = N1-methyl pseudouridine
  modified_base 1789: mod_base = OTHER; note = N1-methyl pseudouridine
  modified_base 1807: mod_base = OTHER; note = N1-methyl pseudouridine
  modified_base 1810: mod_base = OTHER; note = N1-methyl pseudouridine
  modified_base 1813: mod_base = OTHER; note = N1-methyl pseudouridine
  modified_base 1819: mod_base = OTHER; note = N1-methyl pseudouridine
  modified_base 1834: mod_base = OTHER; note = N1-methyl pseudouridine
  modified_base 1837: mod_base = OTHER; note = N1-methyl pseudouridine
  modified_base 1854: mod_base = OTHER; note = N1-methyl pseudouridine
  modified_base 1855: mod_base = OTHER; note = N1-methyl pseudouridine
  modified_base 1870: mod_base = OTHER; note = N1-methyl pseudouridine
  modified_base 1882: mod_base = OTHER; note = N1-methyl pseudouridine
  modified_base 1888: mod_base = OTHER; note = N1-methyl pseudouridine
  modified_base 1897: mod_base = OTHER; note = N1-methyl pseudouridine
  modified_base 1906: mod_base = OTHER; note = N1-methyl pseudouridine
  modified_base 1909: mod_base = OTHER; note = N1-methyl pseudouridine
  modified_base 1926: mod_base = OTHER; note = N1-methyl pseudouridine
  modified_base 1927: mod_base = OTHER; note = N1-methyl pseudouridine
  modified_base 1929: mod_base = OTHER; note = N1-methyl pseudouridine
  modified_base 1935: mod_base = OTHER; note = N1-methyl pseudouridine
  modified_base 1936: mod_base = OTHER; note = N1-methyl pseudouridine
  modified_base 1939: mod_base = OTHER; note = N1-methyl pseudouridine
  modified_base 1960: mod_base = OTHER; note = N1-methyl pseudouridine
  modified_base 1969: mod_base = OTHER; note = N1-methyl pseudouridine
  modified_base 1972: mod_base = OTHER; note = N1-methyl pseudouridine
  modified_base 1977: mod_base = OTHER; note = N1-methyl pseudouridine
  modified_base 1978: mod_base = OTHER; note = N1-methyl pseudouridine
  modified_base 1984: mod_base = OTHER; note = N1-methyl pseudouridine
  modified_base 1989: mod_base = OTHER; note = N1-methyl pseudouridine
  modified_base 1992: mod_base = OTHER; note = N1-methyl pseudouridine
  modified_base 1996: mod_base = OTHER; note = N1-methyl pseudouridine
  modified_base 2005: mod_base = OTHER; note = N1-methyl pseudouridine
  modified_base 2025: mod_base = OTHER; note = N1-methyl pseudouridine
  modified_base 2026: mod_base = OTHER; note = N1-methyl pseudouridine
  modified_base 2031: mod_base = OTHER; note = N1-methyl pseudouridine
  modified_base 2035: mod_base = OTHER; note = N1-methyl pseudouridine
  modified_base 2059: mod_base = OTHER; note = N1-methyl pseudouridine
  modified_base 2067: mod_base = OTHER; note = N1-methyl pseudouridine
  modified_base 2073: mod_base = OTHER; note = N1-methyl pseudouridine
  modified_base 2074: mod_base = OTHER; note = N1-methyl pseudouridine
  modified_base 2083: mod_base = OTHER; note = N1-methyl pseudouridine
  modified_base 2086: mod_base = OTHER; note = N1-methyl pseudouridine
  modified_base 2112: mod_base = OTHER; note = N1-methyl pseudouridine
  modified_base 2113: mod_base = OTHER; note = N1-methyl pseudouridine
  modified_base 2116: mod_base = OTHER; note = N1-methyl pseudouridine
  modified_base 2125: mod_base = OTHER; note = N1-methyl pseudouridine
  modified_base 2133: mod_base = OTHER; note = N1-methyl pseudouridine
  modified_base 2134: mod_base = OTHER; note = N1-methyl pseudouridine
  modified_base 2146: mod_base = OTHER; note = N1-methyl pseudouridine
  modified_base 2161: mod_base = OTHER; note = N1-methyl pseudouridine
  modified_base 2164: mod_base = OTHER; note = N1-methyl pseudouridine
  modified_base 2179: mod_base = OTHER; note = N1-methyl pseudouridine
  modified_base 2182: mod_base = OTHER; note = N1-methyl pseudouridine
  modified_base 2184: mod_base = OTHER; note = N1-methyl pseudouridine
  modified_base 2190: mod_base = OTHER; note = N1-methyl pseudouridine
  modified_base 2193: mod_base = OTHER; note = N1-methyl pseudouridine
  modified_base 2194: mod_base = OTHER; note = N1-methyl pseudouridine
  modified_base 2200: mod_base = OTHER; note = N1-methyl pseudouridine
  modified_base 2202: mod_base = OTHER; note = N1-methyl pseudouridine
  modified_base 2212: mod_base = OTHER; note = N1-methyl pseudouridine
  modified_base 2221: mod_base = OTHER; note = N1-methyl pseudouridine
  modified_base 2226: mod_base = OTHER; note = N1-methyl pseudouridine
  modified_base 2230: mod_base = OTHER; note = N1-methyl pseudouridine
  modified_base 2242: mod_base = OTHER; note = N1-methyl pseudouridine
  modified_base 2256: mod_base = OTHER; note = N1-methyl pseudouridine
  modified_base 2257: mod_base = OTHER; note = N1-methyl pseudouridine
  modified_base 2260: mod_base = OTHER; note = N1-methyl pseudouridine
  modified_base 2284: mod_base = OTHER; note = N1-methyl pseudouridine
  modified_base 2287: mod_base = OTHER; note = N1-methyl pseudouridine
  modified_base 2293: mod_base = OTHER; note = N1-methyl pseudouridine
  modified_base 2296: mod_base = OTHER; note = N1-methyl pseudouridine
  modified_base 2298: mod_base = OTHER; note = N1-methyl pseudouridine
  modified_base 2299: mod_base = OTHER; note = N1-methyl pseudouridine
  modified_base 2317: mod_base = OTHER; note = N1-methyl pseudouridine
  modified_base 2323: mod_base = OTHER; note = N1-methyl pseudouridine
  modified_base 2332: mod_base = OTHER; note = N1-methyl pseudouridine
  modified_base 2343: mod_base = OTHER; note = N1-methyl pseudouridine
  modified_base 2346: mod_base = OTHER; note = N1-methyl pseudouridine
  modified_base 2347: mod_base = OTHER; note = N1-methyl pseudouridine
  modified_base 2356: mod_base = OTHER; note = N1-methyl pseudouridine
  modified_base 2361: mod_base = OTHER; note = N1-methyl pseudouridine
  modified_base 2364: mod_base = OTHER; note = N1-methyl pseudouridine
  modified_base 2365: mod_base = OTHER; note = N1-methyl pseudouridine
  modified_base 2374: mod_base = OTHER; note = N1-methyl pseudouridine
  modified_base 2380: mod_base = OTHER; note = N1-methyl pseudouridine
  modified_base 2389: mod_base = OTHER; note = N1-methyl pseudouridine
  modified_base 2400: mod_base = OTHER; note = N1-methyl pseudouridine
  modified_base 2401: mod_base = OTHER; note = N1-methyl pseudouridine
  modified_base 2413: mod_base = OTHER; note = N1-methyl pseudouridine
  modified_base 2421: mod_base = OTHER; note = N1-methyl pseudouridine
  modified_base 2431: mod_base = OTHER; note = N1-methyl pseudouridine
  modified_base 2434: mod_base = OTHER; note = N1-methyl pseudouridine
  modified_base 2440: mod_base = OTHER; note = N1-methyl pseudouridine
  modified_base 2443: mod_base = OTHER; note = N1-methyl pseudouridine
  modified_base 2457: mod_base = OTHER; note = N1-methyl pseudouridine
  modified_base 2458: mod_base = OTHER; note = N1-methyl pseudouridine
  modified_base 2461: mod_base = OTHER; note = N1-methyl pseudouridine
  modified_base 2485: mod_base = OTHER; note = N1-methyl pseudouridine
  modified_base 2488: mod_base = OTHER; note = N1-methyl pseudouridine
  modified_base 2497: mod_base = OTHER; note = N1-methyl pseudouridine
  modified_base 2500: mod_base = OTHER; note = N1-methyl pseudouridine
  modified_base 2503: mod_base = OTHER; note = N1-methyl pseudouridine
  modified_base 2509: mod_base = OTHER; note = N1-methyl pseudouridine
  modified_base 2515: mod_base = OTHER; note = N1-methyl pseudouridine
  modified_base 2517: mod_base = OTHER; note = N1-methyl pseudouridine
  modified_base 2518: mod_base = OTHER; note = N1-methyl pseudouridine
  modified_base 2533: mod_base = OTHER; note = N1-methyl pseudouridine
  modified_base 2536: mod_base = OTHER; note = N1-methyl pseudouridine
  modified_base 2548: mod_base = OTHER; note = N1-methyl pseudouridine
  modified_base 2556: mod_base = OTHER; note = N1-methyl pseudouridine
  modified_base 2566: mod_base = OTHER; note = N1-methyl pseudouridine
  modified_base 2568: mod_base = OTHER; note = N1-methyl pseudouridine
  modified_base 2569: mod_base = OTHER; note = N1-methyl pseudouridine
  modified_base 2581: mod_base = OTHER; note = N1-methyl pseudouridine
  modified_base 2584: mod_base = OTHER; note = N1-methyl pseudouridine
  modified_base 2593: mod_base = OTHER; note = N1-methyl pseudouridine
  modified_base 2607: mod_base = OTHER; note = N1-methyl pseudouridine
  modified_base 2616: mod_base = OTHER; note = N1-methyl pseudouridine
  modified_base 2626: mod_base = OTHER; note = N1-methyl pseudouridine
  modified_base 2638: mod_base = OTHER; note = N1-methyl pseudouridine
  modified_base 2641: mod_base = OTHER; note = N1-methyl pseudouridine
  modified_base 2650: mod_base = OTHER; note = N1-methyl pseudouridine
  modified_base 2677: mod_base = OTHER; note = N1-methyl pseudouridine
  modified_base 2680: mod_base = OTHER; note = N1-methyl pseudouridine
  modified_base 2685: mod_base = OTHER; note = N1-methyl pseudouridine
  modified_base 2686: mod_base = OTHER; note = N1-methyl pseudouridine
  modified_base 2689: mod_base = OTHER; note = N1-methyl pseudouridine
  modified_base 2703: mod_base = OTHER; note = N1-methyl pseudouridine
  modified_base 2704: mod_base = OTHER; note = N1-methyl pseudouridine
  modified_base 2718: mod_base = OTHER; note = N1-methyl pseudouridine
  modified_base 2719: mod_base = OTHER; note = N1-methyl pseudouridine
  modified_base 2722: mod_base = OTHER; note = N1-methyl pseudouridine
  modified_base 2728: mod_base = OTHER; note = N1-methyl pseudouridine
  modified_base 2731: mod_base = OTHER; note = N1-methyl pseudouridine
  modified_base 2746: mod_base = OTHER; note = N1-methyl pseudouridine
  modified_base 2751: mod_base = OTHER; note = N1-methyl pseudouridine
  modified_base 2752: mod_base = OTHER; note = N1-methyl pseudouridine
  modified_base 2764: mod_base = OTHER; note = N1-methyl pseudouridine
  modified_base 2779: mod_base = OTHER; note = N1-methyl pseudouridine
  modified_base 2800: mod_base = OTHER; note = N1-methyl pseudouridine
  modified_base 2812: mod_base = OTHER; note = N1-methyl pseudouridine
  modified_base 2821: mod_base = OTHER; note = N1-methyl pseudouridine
  modified_base 2839: mod_base = OTHER; note = N1-methyl pseudouridine
  modified_base 2851: mod_base = OTHER; note = N1-methyl pseudouridine
  modified_base 2854: mod_base = OTHER; note = N1-methyl pseudouridine
  modified_base 2863: mod_base = OTHER; note = N1-methyl pseudouridine
  modified_base 2869: mod_base = OTHER; note = N1-methyl pseudouridine
  modified_base 2872: mod_base = OTHER; note = N1-methyl pseudouridine
  modified_base 2881: mod_base = OTHER; note = N1-methyl pseudouridine
  modified_base 2884: mod_base = OTHER; note = N1-methyl pseudouridine
  modified_base 2890: mod_base = OTHER; note = N1-methyl pseudouridine
  modified_base 2893: mod_base = OTHER; note = N1-methyl pseudouridine
  modified_base 2917: mod_base = OTHER; note = N1-methyl pseudouridine
  modified_base 2920: mod_base = OTHER; note = N1-methyl pseudouridine
  modified_base 2923: mod_base = OTHER; note = N1-methyl pseudouridine
  modified_base 2929: mod_base = OTHER; note = N1-methyl pseudouridine
  modified_base 2983: mod_base = OTHER; note = N1-methyl pseudouridine
  modified_base 2992: mod_base = OTHER; note = N1-methyl pseudouridine
  modified_base 3004: mod_base = OTHER; note = N1-methyl pseudouridine
  modified_base 3013: mod_base = OTHER; note = N1-methyl pseudouridine
  modified_base 3025: mod_base = OTHER; note = N1-methyl pseudouridine
  modified_base 3028: mod_base = OTHER; note = N1-methyl pseudouridine
  modified_base 3043: mod_base = OTHER; note = N1-methyl pseudouridine
  modified_base 3058: mod_base = OTHER; note = N1-methyl pseudouridine
  modified_base 3073: mod_base = OTHER; note = N1-methyl pseudouridine
  modified_base 3075: mod_base = OTHER; note = N1-methyl pseudouridine
  modified_base 3079: mod_base = OTHER; note = N1-methyl pseudouridine
  modified_base 3081: mod_base = OTHER; note = N1-methyl pseudouridine
  modified_base 3084: mod_base = OTHER; note = N1-methyl pseudouridine
  modified_base 3088: mod_base = OTHER; note = N1-methyl pseudouridine
  modified_base 3106: mod_base = OTHER; note = N1-methyl pseudouridine
  modified_base 3108: mod_base = OTHER; note = N1-methyl pseudouridine
  modified_base 3112: mod_base = OTHER; note = N1-methyl pseudouridine
  modified_base 3124: mod_base = OTHER; note = N1-methyl pseudouridine
  modified_base 3130: mod_base = OTHER; note = N1-methyl pseudouridine
  modified_base 3139: mod_base = OTHER; note = N1-methyl pseudouridine
  modified_base 3147: mod_base = OTHER; note = N1-methyl pseudouridine
  modified_base 3154: mod_base = OTHER; note = N1-methyl pseudouridine
  modified_base 3163: mod_base = OTHER; note = N1-methyl pseudouridine
  modified_base 3166: mod_base = OTHER; note = N1-methyl pseudouridine
  modified_base 3177: mod_base = OTHER; note = N1-methyl pseudouridine
  modified_base 3178: mod_base = OTHER; note = N1-methyl pseudouridine
  modified_base 3181: mod_base = OTHER; note = N1-methyl pseudouridine
  modified_base 3196: mod_base = OTHER; note = N1-methyl pseudouridine
  modified_base 3208: mod_base = OTHER; note = N1-methyl pseudouridine
  modified_base 3211: mod_base = OTHER; note = N1-methyl pseudouridine
  modified_base 3250: mod_base = OTHER; note = N1-methyl pseudouridine
  modified_base 3265: mod_base = OTHER; note = N1-methyl pseudouridine
  modified_base 3268: mod_base = OTHER; note = N1-methyl pseudouridine
  modified_base 3277: mod_base = OTHER; note = N1-methyl pseudouridine
  modified_base 3285: mod_base = OTHER; note = N1-methyl pseudouridine
  modified_base 3288: mod_base = OTHER; note = N1-methyl pseudouridine
  modified_base 3298: mod_base = OTHER; note = N1-methyl pseudouridine
  modified_base 3301: mod_base = OTHER; note = N1-methyl pseudouridine
  modified_base 3313: mod_base = OTHER; note = N1-methyl pseudouridine
  modified_base 3316: mod_base = OTHER; note = N1-methyl pseudouridine
  modified_base 3330: mod_base = OTHER; note = N1-methyl pseudouridine
  modified_base 3331: mod_base = OTHER; note = N1-methyl pseudouridine
  modified_base 3340: mod_base = OTHER; note = N1-methyl pseudouridine
  modified_base 3364: mod_base = OTHER; note = N1-methyl pseudouridine
  modified_base 3373: mod_base = OTHER; note = N1-methyl pseudouridine
  modified_base 3387: mod_base = OTHER; note = N1-methyl pseudouridine
  modified_base 3388: mod_base = OTHER; note = N1-methyl pseudouridine
  modified_base 3391: mod_base = OTHER; note = N1-methyl pseudouridine
  modified_base 3403: mod_base = OTHER; note = N1-methyl pseudouridine
  modified_base 3406: mod_base = OTHER; note = N1-methyl pseudouridine
  modified_base 3421: mod_base = OTHER; note = N1-methyl pseudouridine
  modified_base 3433: mod_base = OTHER; note = N1-methyl pseudouridine
  modified_base 3442: mod_base = OTHER; note = N1-methyl pseudouridine
  modified_base 3445: mod_base = OTHER; note = N1-methyl pseudouridine
  modified_base 3457: mod_base = OTHER; note = N1-methyl pseudouridine
  modified_base 3468: mod_base = OTHER; note = N1-methyl pseudouridine
  modified_base 3487: mod_base = OTHER; note = N1-methyl pseudouridine
  modified_base 3490: mod_base = OTHER; note = N1-methyl pseudouridine
  modified_base 3499: mod_base = OTHER; note = N1-methyl pseudouridine
  modified_base 3505: mod_base = OTHER; note = N1-methyl pseudouridine
  modified_base 3508: mod_base = OTHER; note = N1-methyl pseudouridine
  modified_base 3514: mod_base = OTHER; note = N1-methyl pseudouridine
  modified_base 3526: mod_base = OTHER; note = N1-methyl pseudouridine
  modified_base 3529: mod_base = OTHER; note = N1-methyl pseudouridine
  modified_base 3537: mod_base = OTHER; note = N1-methyl pseudouridine
  modified_base 3538: mod_base = OTHER; note = N1-methyl pseudouridine
  modified_base 3549: mod_base = OTHER; note = N1-methyl pseudouridine
  modified_base 3550: mod_base = OTHER; note = N1-methyl pseudouridine
  modified_base 3555: mod_base = OTHER; note = N1-methyl pseudouridine
  modified_base 3556: mod_base = OTHER; note = N1-methyl pseudouridine
  modified_base 3558: mod_base = OTHER; note = N1-methyl pseudouridine
  modified_base 3565: mod_base = OTHER; note = N1-methyl pseudouridine
  modified_base 3574: mod_base = OTHER; note = N1-methyl pseudouridine
  modified_base 3582: mod_base = OTHER; note = N1-methyl pseudouridine
  modified_base 3603: mod_base = OTHER; note = N1-methyl pseudouridine
  modified_base 3607: mod_base = OTHER; note = N1-methyl pseudouridine
  modified_base 3616: mod_base = OTHER; note = N1-methyl pseudouridine
  modified_base 3619: mod_base = OTHER; note = N1-methyl pseudouridine
  modified_base 3631: mod_base = OTHER; note = N1-methyl pseudouridine
  modified_base 3634: mod_base = OTHER; note = N1-methyl pseudouridine
  modified_base 3642: mod_base = OTHER; note = N1-methyl pseudouridine
  modified_base 3652: mod_base = OTHER; note = N1-methyl pseudouridine
  modified_base 3663: mod_base = OTHER; note = N1-methyl pseudouridine
  modified_base 3664: mod_base = OTHER; note = N1-methyl pseudouridine
  modified_base 3667: mod_base = OTHER; note = N1-methyl pseudouridine
  modified_base 3669: mod_base = OTHER; note = N1-methyl pseudouridine
  modified_base 3678: mod_base = OTHER; note = N1-methyl pseudouridine
  modified_base 3685: mod_base = OTHER; note = N1-methyl pseudouridine
  modified_base 3687: mod_base = OTHER; note = N1-methyl pseudouridine
  modified_base 3694: mod_base = OTHER; note = N1-methyl pseudouridine
  modified_base 3703: mod_base = OTHER; note = N1-methyl pseudouridine
  modified_base 3706: mod_base = OTHER; note = N1-methyl pseudouridine
  modified_base 3727: mod_base = OTHER; note = N1-methyl pseudouridine
  modified_base 3747: mod_base = OTHER; note = N1-methyl pseudouridine
  modified_base 3750: mod_base = OTHER; note = N1-methyl pseudouridine
  modified_base 3751: mod_base = OTHER; note = N1-methyl pseudouridine
  modified_base 3753: mod_base = OTHER; note = N1-methyl pseudouridine
  modified_base 3754: mod_base = OTHER; note = N1-methyl pseudouridine
  modified_base 3756: mod_base = OTHER; note = N1-methyl pseudouridine
  modified_base 3766: mod_base = OTHER; note = N1-methyl pseudouridine
  modified_base 3769: mod_base = OTHER; note = N1-methyl pseudouridine
  modified_base 3774: mod_base = OTHER; note = N1-methyl pseudouridine
  modified_base 3775: mod_base = OTHER; note = N1-methyl pseudouridine
  modified_base 3777: mod_base = OTHER; note = N1-methyl pseudouridine
  modified_base 3778: mod_base = OTHER; note = N1-methyl pseudouridine
  modified_base 3790: mod_base = OTHER; note = N1-methyl pseudouridine
  modified_base 3796: mod_base = OTHER; note = N1-methyl pseudouridine
  modified_base 3811: mod_base = OTHER; note = N1-methyl pseudouridine
  modified_base 3826: mod_base = OTHER; note = N1-methyl pseudouridine
  modified_base 3829: mod_base = OTHER; note = N1-methyl pseudouridine
  modified_base 3856: mod_base = OTHER; note = N1-methyl pseudouridine
  modified_base 3859: mod_base = OTHER; note = N1-methyl pseudouridine
  modified_base 3861: mod_base = OTHER; note = N1-methyl pseudouridine
  modified_base 3879: mod_base = OTHER; note = N1-methyl pseudouridine
  modified_base 3880: mod_base = OTHER; note = N1-methyl pseudouridine
  modified_base 3889: mod_base = OTHER; note = N1-methyl pseudouridine
  modified_base 3898: mod_base = OTHER; note = N1-methyl pseudouridine
  modified_base 3901: mod_base = OTHER; note = N1-methyl pseudouridine
  modified_base 3907: mod_base = OTHER; note = N1-methyl pseudouridine
  modified_base 3916: mod_base = OTHER; note = N1-methyl pseudouridine
  modified_base 3922: mod_base = OTHER; note = N1-methyl pseudouridine
  modified_base 3925: mod_base = OTHER; note = N1-methyl pseudouridine
  modified_base 3940: mod_base = OTHER; note = N1-methyl pseudouridine
  modified_base 3954: mod_base = OTHER; note = N1-methyl pseudouridine
  modified_base 3955: mod_base = OTHER; note = N1-methyl pseudouridine
  modified_base 3970: mod_base = OTHER; note = N1-methyl pseudouridine
  modified_base 3973: mod_base = OTHER; note = N1-methyl pseudouridine
  modified_base 3997: mod_base = OTHER; note = N1-methyl pseudouridine
  modified_base 4000: mod_base = OTHER; note = N1-methyl pseudouridine
  modified_base 4017: mod_base = OTHER; note = N1-methyl pseudouridine
  modified_base 4032: mod_base = OTHER; note = N1-methyl pseudouridine
  modified_base 4041: mod_base = OTHER; note = N1-methyl pseudouridine
  modified_base 4042: mod_base = OTHER; note = N1-methyl pseudouridine
  modified_base 4057: mod_base = OTHER; note = N1-methyl pseudouridine
  modified_base 4062: mod_base = OTHER; note = N1-methyl pseudouridine
  modified_base 4069: mod_base = OTHER; note = N1-methyl pseudouridine
  modified_base 4072: mod_base = OTHER; note = N1-methyl pseudouridine
  modified_base 4075: mod_base = OTHER; note = N1-methyl pseudouridine
  modified_base 4078: mod_base = OTHER; note = N1-methyl pseudouridine
  modified_base 4087: mod_base = OTHER; note = N1-methyl pseudouridine
  modified_base 4111: mod_base = OTHER; note = N1-methyl pseudouridine
  modified_base 4120: mod_base = OTHER; note = N1-methyl pseudouridine
  modified_base 4129: mod_base = OTHER; note = N1-methyl pseudouridine
  modified_base 4132: mod_base = OTHER; note = N1-methyl pseudouridine
  modified_base 4138: mod_base = OTHER; note = N1-methyl pseudouridine
  modified_base 4144: mod_base = OTHER; note = N1-methyl pseudouridine
  modified_base 4147: mod_base = OTHER; note = N1-methyl pseudouridine
  modified_base 4161: mod_base = OTHER; note = N1-methyl pseudouridine
  modified_base 4162: mod_base = OTHER; note = N1-methyl pseudouridine
  modified_base 4177: mod_base = OTHER; note = N1-methyl pseudouridine
  modified_base 4182: mod_base = OTHER; note = N1-methyl pseudouridine
  modified_base 4183: mod_base = OTHER; note = N1-methyl pseudouridine
  modified_base 4186: mod_base = OTHER; note = N1-methyl pseudouridine
  modified_base 4200: mod_base = OTHER; note = N1-methyl pseudouridine
  modified_base 4210: mod_base = OTHER; note = N1-methyl pseudouridine
  modified_base 4222: mod_base = OTHER; note = N1-methyl pseudouridine
  modified_base 4225: mod_base = OTHER; note = N1-methyl pseudouridine
  modified_base 4228: mod_base = OTHER; note = N1-methyl pseudouridine
  modified_base 4234: mod_base = OTHER; note = N1-methyl pseudouridine
  modified_base 4242: mod_base = OTHER; note = N1-methyl pseudouridine
  modified_base 4249: mod_base = OTHER; note = N1-methyl pseudouridine
  modified_base 4251: mod_base = OTHER; note = N1-methyl pseudouridine
  modified_base 4252: mod_base = OTHER; note = N1-methyl pseudouridine
  modified_base 4258: mod_base = OTHER; note = N1-methyl pseudouridine
  modified_base 4279: mod_base = OTHER; note = N1-methyl pseudouridine
  modified_base 4282: mod_base = OTHER; note = N1-methyl pseudouridine
  modified_base 4300: mod_base = OTHER; note = N1-methyl pseudouridine
  modified_base 4318: mod_base = OTHER; note = N1-methyl pseudouridine
  modified_base 4324: mod_base = OTHER; note = N1-methyl pseudouridine
  modified_base 4335: mod_base = OTHER; note = N1-methyl pseudouridine
  modified_base 4339: mod_base = OTHER; note = N1-methyl pseudouridine
  modified_base 4344: mod_base = OTHER; note = N1-methyl pseudouridine
  modified_base 4345: mod_base = OTHER; note = N1-methyl pseudouridine
  modified_base 4348: mod_base = OTHER; note = N1-methyl pseudouridine
  modified_base 4350: mod_base = OTHER; note = N1-methyl pseudouridine
  modified_base 4354: mod_base = OTHER; note = N1-methyl pseudouridine
  modified_base 4365: mod_base = OTHER; note = N1-methyl pseudouridine
  modified_base 4375: mod_base = OTHER; note = N1-methyl pseudouridine
  modified_base 4411: mod_base = OTHER; note = N1-methyl pseudouridine
  modified_base 4413: mod_base = OTHER; note = N1-methyl pseudouridine
  modified_base 4414: mod_base = OTHER; note = N1-methyl pseudouridine
  modified_base 4417: mod_base = OTHER; note = N1-methyl pseudouridine
  modified_base 4434: mod_base = OTHER; note = N1-methyl pseudouridine
  modified_base 4438: mod_base = OTHER; note = N1-methyl pseudouridine
  modified_base 4447: mod_base = OTHER; note = N1-methyl pseudouridine
  modified_base 4450: mod_base = OTHER; note = N1-methyl pseudouridine
  modified_base 4459: mod_base = OTHER; note = N1-methyl pseudouridine
  modified_base 4467: mod_base = OTHER; note = N1-methyl pseudouridine
  modified_base 4468: mod_base = OTHER; note = N1-methyl pseudouridine
  modified_base 4480: mod_base = OTHER; note = N1-methyl pseudouridine
  modified_base 4483: mod_base = OTHER; note = N1-methyl pseudouridine
  modified_base 4486: mod_base = OTHER; note = N1-methyl pseudouridine
  modified_base 4501: mod_base = OTHER; note = N1-methyl pseudouridine
  modified_base 4510: mod_base = OTHER; note = N1-methyl pseudouridine
  modified_base 4513: mod_base = OTHER; note = N1-methyl pseudouridine
  modified_base 4521: mod_base = OTHER; note = N1-methyl pseudouridine
  modified_base 4546: mod_base = OTHER; note = N1-methyl pseudouridine
  modified_base 4567: mod_base = OTHER; note = N1-methyl pseudouridine
  modified_base 4570: mod_base = OTHER; note = N1-methyl pseudouridine
  modified_base 4576: mod_base = OTHER; note = N1-methyl pseudouridine
  modified_base 4578: mod_base = OTHER; note = N1-methyl pseudouridine
  modified_base 4579: mod_base = OTHER; note = N1-methyl pseudouridine
  modified_base 4585: mod_base = OTHER; note = N1-methyl pseudouridine
  modified_base 4594: mod_base = OTHER; note = N1-methyl pseudouridine
  modified_base 4611: mod_base = OTHER; note = N1-methyl pseudouridine
  modified_base 4612: mod_base = OTHER; note = N1-methyl pseudouridine
  modified_base 4617: mod_base = OTHER; note = N1-methyl pseudouridine
  modified_base 4620: mod_base = OTHER; note = N1-methyl pseudouridine
  modified_base 4621: mod_base = OTHER; note = N1-methyl pseudouridine
  modified_base 4633: mod_base = OTHER; note = N1-methyl pseudouridine
  modified_base 4647: mod_base = OTHER; note = N1-methyl pseudouridine
  modified_base 4666: mod_base = OTHER; note = N1-methyl pseudouridine
  modified_base 4669: mod_base = OTHER; note = N1-methyl pseudouridine
  modified_base 4681: mod_base = OTHER; note = N1-methyl pseudouridine
  modified_base 4684: mod_base = OTHER; note = N1-methyl pseudouridine
  modified_base 4696: mod_base = OTHER; note = N1-methyl pseudouridine
  modified_base 4705: mod_base = OTHER; note = N1-methyl pseudouridine
  modified_base 4707: mod_base = OTHER; note = N1-methyl pseudouridine
  modified_base 4720: mod_base = OTHER; note = N1-methyl pseudouridine
  modified_base 4726: mod_base = OTHER; note = N1-methyl pseudouridine
  modified_base 4735: mod_base = OTHER; note = N1-methyl pseudouridine
  modified_base 4782: mod_base = OTHER; note = N1-methyl pseudouridine
  modified_base 4783: mod_base = OTHER; note = N1-methyl pseudouridine
  modified_base 4810: mod_base = OTHER; note = N1-methyl pseudouridine
  modified_base 4812: mod_base = OTHER; note = N1-methyl pseudouridine
  modified_base 4823: mod_base = OTHER; note = N1-methyl pseudouridine
  modified_base 4824: mod_base = OTHER; note = N1-methyl pseudouridine
  modified_base 4827: mod_base = OTHER; note = N1-methyl pseudouridine
  modified_base 4828: mod_base = OTHER; note = N1-methyl pseudouridine
  modified_base 4833: mod_base = OTHER; note = N1-methyl pseudouridine
  modified_base 4837: mod_base = OTHER; note = N1-methyl pseudouridine
  modified_base 4838: mod_base = OTHER; note = N1-methyl pseudouridine
  modified_base 4840: mod_base = OTHER; note = N1-methyl pseudouridine
  modified_base 4848: mod_base = OTHER; note = N1-methyl pseudouridine
  modified_base 4849: mod_base = OTHER; note = N1-methyl pseudouridine
  modified_base 4853: mod_base = OTHER; note = N1-methyl pseudouridine
  modified_base 4854: mod_base = OTHER; note = N1-methyl pseudouridine
  modified_base 4856: mod_base = OTHER; note = N1-methyl pseudouridine
  modified_base 4862: mod_base = OTHER; note = N1-methyl pseudouridine
  modified_base 4867: mod_base = OTHER; note = N1-methyl pseudouridine
  modified_base 4868: mod_base = OTHER; note = N1-methyl pseudouridine
  modified_base 4870: mod_base = OTHER; note = N1-methyl pseudouridine
  modified_base 4871: mod_base = OTHER; note = N1-methyl pseudouridine
  modified_base 4873: mod_base = OTHER; note = N1-methyl pseudouridine
  modified_base 4875: mod_base = OTHER; note = N1-methyl pseudouridine
  modified_base 4879: mod_base = OTHER; note = N1-methyl pseudouridine
  modified_base 4880: mod_base = OTHER; note = N1-methyl pseudouridine
  modified_base 4886: mod_base = OTHER; note = N1-methyl pseudouridine
  modified_base 4888: mod_base = OTHER; note = N1-methyl pseudouridine
  modified_base 4892: mod_base = OTHER; note = N1-methyl pseudouridine
  modified_base 4894: mod_base = OTHER; note = N1-methyl pseudouridine
  modified_base 4895: mod_base = OTHER; note = N1-methyl pseudouridine
  modified_base 4898: mod_base = OTHER; note = N1-methyl pseudouridine
  modified_base 4900: mod_base = OTHER; note = N1-methyl pseudouridine
  modified_base 4901: mod_base = OTHER; note = N1-methyl pseudouridine
  modified_base 4902: mod_base = OTHER; note = N1-methyl pseudouridine
  modified_base 4906: mod_base = OTHER; note = N1-methyl pseudouridine
  modified_base 4913: mod_base = OTHER; note = N1-methyl pseudouridine
  modified_base 4917: mod_base = OTHER; note = N1-methyl pseudouridine
  modified_base 4924: mod_base = OTHER; note = N1-methyl pseudouridine
  modified_base 4926: mod_base = OTHER; note = N1-methyl pseudouridine
aggaaataagagagaaaagaagagtaagaagaaatataagagccaccatgagcgaggtggagttcagccacgagtactggatgcggcacgccctgaccctggccaagcgggcccgggacgagcgggaggtgcccgtgggcgccgtgctggtgctgaacaaccgggtgatcggcgagggctggaaccgggccatcggcctgcacgaccccaccgcccacgccgagatcatggccctgcggcagggcggcctggtgatgcagaactaccggctgatcgacgccaccctgtacgtgaccttcgagccctgcgtgatgtgcgccggcgccatgatccacagccggatcggccgggtggtgttcggcgtgcggaacgccaagaccggcgccgccggcagcctgatggacgtgctgcaccaccccggcatgaaccaccgggtggagatcaccgagggcatcctggccgacgagtgcgccgccctgctgtgccggttcttccggatgccccggcgggtgttcaacgcccagaagaaggcccagagcagcaccgacagcggcggcagcagcggcggcagcagcggcagcgagacacccggcaccagcgagagcgccacccccgagagcagcggcggcagcagcggcggcagcgacaagaagtacagcatcggcctggccatcggcaccaacagcgtgggctgggccgtgatcaccgacgagtacaaggtgcccagcaagaagttcaaggtgctgggcaacaccgaccggcacagcatcaagaagaacctgatcggcgccctgctgttcgacagcggcgagacagccgaggccacccggctgaagcggaccgcccggcggcggtacacccggcggaagaaccggatctgctacctgcaggagatcttcagcaacgagatggccaaggtggacgacagcttcttccaccggctggaggagagcttcctggtggaggaggacaagaagcacgagcggcaccccatcttcggcaacatcgtggacgaggtggcctaccacgagaagtaccccaccatctaccacctgcggaagaagctggtggacagcaccgacaaggccgacctgcggctgatctacctggccctggcccacatgatcaagttccggggccacttcctgatcgagggcgacctgaaccccgacaacagcgacgtggacaagctgttcatccagctggtgcagacctacaaccagctgttcgaggagaaccccatcaacgccagcggcgtggacgccaaggccatcctgagcgcccggctgagcaagagccggcggctggagaacctgatcgcccagctgcccggcgagaagaagaacggcctgttcggcaacctgatcgccctgagcctgggcctgacccccaacttcaagagcaacttcgacctggccgaggacgccaagctgcagctgagcaaggacacctacgacgacgacctggacaacctgctggcccagatcggcgaccagtacgccgacctgttcctggccgccaagaacctgagcgacgccatcctgctgagcgacatcctgcgggtgaacaccgagatcaccaaggcccccctgagcgccagcatgatcaagcggtacgacgagcaccaccaggacctgaccctgctgaaggccctggtgcggcagcagctgcccgagaagtacaaggagatcttcttcgaccagagcaagaacggctacgccggctacatcgacggcggcgccagccaggaggagttctacaagttcatcaagcccatcctggagaagatggacggcaccgaggagctgctggtgaagctgaaccgggaggacctgctgcggaagcagcggaccttcgacaacggcagcatcccccaccagatccacctgggcgagctgcacgccatcctgcggcggcaggaggacttctaccccttcctgaaggacaaccgggagaagatcgagaagatcctgaccttccggatcccctactacgtgggccccctggcccggggcaacagccggttcgcctggatgacccgcaagagcgaggagacaatcaccccctggaacttcgaggaggtggtggacaagggcgccagcgcccagagcttcatcgagcggatgaccaacttcgacaagaacctgcccaacgagaaggtgctgcccaagcacagcctgctgtacgagtacttcaccgtgtacaacgagctgaccaaggtgaagtacgtgaccgagggcatgcggaagcccgccttcctgagcggcgagcagaagaaggccatcgtggacctgctgttcaagaccaaccggaaggtgaccgtgaagcagctgaaggaggactacttcaagaagatcgagtgcttcgacagcgtggagatcagcggcgtggaggaccggttcaacgccagcctgggcacctaccacgacctgctgaagatcatcaaggacaaggacttcctggacaacgaggagaacgaggacatcctggaggacatcgtgctgaccctgaccctgttcgaggaccgggagatgatcgaggagcggctgaagacctacgcccacctgttcgacgacaaggtgatgaagcagctgaagcggcggcggtacaccggctggggccggctgagccggaagctgatcaacggcatccgggacaagcagagcggcaagaccatcctggacttcctcaagagcgacggcttcgccaaccggaacttcatgcagctgatccacgacgacagcctgaccttcaaggaggacatccagaaggcccaggtgagcggccagggcgacagcctgcacgagcacatcgccaacctggccggcagccccgccatcaagaagggcatcctgcagaccgtgaaggtggtggacgagctggtgaaggtgatgggccggcacaagcccgagaacatcgtgatcgagatggcccgggagaaccagaccacccagaagggccagaagaacagccgggagcggatgaagcggatcgaggagggcatcaaggagctgggcagccagatcctgaaggagcaccccgtggagaacacccagctgcagaacgagaagctgtacctgtactacctgcagaacggccgggacatgtacgtggaccaggagctggacatcaaccggctgagcgactacgacgtggaccacatcgtgccccagagcttcctgaaggacgacagcatcgacaacaaggtgctgacccggagcgacaagaaccggggcaagagcgacaacgtgcccagcgaggaggtggtgaagaagatgaagaactactggcggcagctgctgaacgccaagctgatcacccagcggaagttcgacaacctgaccaaggccgagcggggcggcctgagcgagctggacaaggccggcttcatcaagcggcagctggtggagacacggcagatcaccaagcacgtggcccagatcctggacagccggatgaacaccaagtacgacgagaacgacaagctgatccgggaggtgaaggtgatcaccctcaagagcaagctggtgagcgacttccggaaggacttccagttctacaaggtgcgggagatcaacaactaccaccacgcccacgacgcctacctgaacgccgtggtgggcaccgccctgatcaagaagtaccccaagctggagagcgagttcgtgtacggcgactacaaggtgtacgacgtgcggaagatgatcgccaagagcgagcaggagatcggcaaggccaccgccaagtacttcttctacagcaacatcatgaacttcttcaagaccgagatcaccctggccaacggcgagatccggaagcggcccctgatcgagacaaacggcgagacaggcgagatcgtgtgggacaagggccgggacttcgccaccgtgcggaaggtgctgagcatgccccaggtgaacatcgtgaagaagaccgaggtgcagaccggcggcttcagcaaggagagcatcctgcccaagcggaacagcgacaagctgatcgcccggaagaaggactgggaccccaagaagtacggcggcttcgagagccccaccgtggcctacagcgtgctggtggtggccaaggtggagaagggcaagagcaagaagctcaagagcgtgaaggagctgctgggcatcaccatcatggagcggagcagcttcgagaagaaccccatcgacttcctggaggccaagggctacaaggaggtgaagaaggacctgatcatcaagctgcccaagtacagcctgttcgagctggagaacggccggaagcggatgctggccagcgccggcgagctgcagaagggcaacgagctggccctgcccagcaagtacgtgaacttcctgtacctggccagccactacgagaagctgaagggcagccccgaggacaacgagcagaagcagctgttcgtggagcagcacaagcactacctggacgagatcatcgagcagatcagcgagttcagcaagcgggtgatcctggccgacgccaacctggacaaggtgctgagcgcctacaacaagcaccgggacaagcccatccgggagcaggccgagaacatcatccacctgttcaccctgaccaacctgggcgcccccgccgccttcaagtacttcgacaccaccatcgaccggaagcggtacaccagcaccaaggaggtgctggacgccaccctgatccaccagagcatcaccggcctgtacgagacacggatcgacctgagccagctgggcggcgacgagggcgccgacaagcggaccgccgacggcagcgagttcgagagccccaagaagaagcggaaggtgtgagcggccgcttaattaagctgccttctgcggggcttgccttctggccatgcccttcttctctcccttgcacctgtacctcttggtctttgaataaagcctgagtaggaagtctaga

SEQ ID NO: 2149 - protein, 1588 aa, synthetic construct
MSEVEFSHEYWMRHALTLAKRARDEREVPVGAVLVLNNRVIGEGWNRAIGLHDPTAHAEIMALRQGGLVMQNYRLIDATLYVTFEPCVMCAGAMIHSRIGRVVFGVRNAKTGAAGSLMDVLHHPGMNHRVEITEGILADECAALLCRFFRMPRRVFNAQKKAQSSTDSGGSSGGSSGSETPGTSESATPESSGGSSGGSDKKYSIGLAIGTNSVGWAVITDEYKVPSKKFKVLGNTDRHSIKKNLIGALLFDSGETAEATRLKRTARRRYTRRKNRICYLQEIFSNEMAKVDDSFFHRLEESFLVEEDKKHERHPIFGNIVDEVAYHEKYPTIYHLRKKLVDSTDKADLRLIYLALAHMIKFRGHFLIEGDLNPDNSDVDKLFIQLVQTYNQLFEENPINASGVDAKAILSARLSKSRRLENLIAQLPGEKKNGLFGNLIALSLGLTPNFKSNFDLAEDAKLQLSKDTYDDDLDNLLAQIGDQYADLFLAAKNLSDAILLSDILRVNTEITKAPLSASMIKRYDEHHQDLTLLKALVRQQLPEKYKEIFFDQSKNGYAGYIDGGASQEEFYKFIKPILEKMDGTEELLVKLNREDLLRKQRTFDNGSIPHQIHLGELHAILRRQEDFYPFLKDNREKIEKILTFRIPYYVGPLARGNSRFAWMTRKSEETITPWNFEEVVDKGASAQSFIERMTNFDKNLPNEKVLPKHSLLYEYFTVYNELTKVKYVTEGMRKPAFLSGEQKKAIVDLLFKTNRKVTVKQLKEDYFKKIECFDSVEISGVEDRFNASLGTYHDLLKIIKDKDFLDNEENEDILEDIVLTLTLFEDREMIEERLKTYAHLFDDKVMKQLKRRRYTGWGRLSRKLINGIRDKQSGKTILDFLKSDGFANRNFMQLIHDDSLTFKEDIQKAQVSGQGDSLHEHIANLAGSPAIKKGILQTVKVVDELVKVMGRHKPENIVIEMARENQTTQKGQKNSRERMKRIEEGIKELGSQILKEHPVENTQLQNEKLYLYYLQNGRDMYVDQELDINRLSDYDVDHIVPQSFLKDDSIDNKVLTRSDKNRGKSDNVPSEEVVKKMKNYWRQLLNAKLITQRKFDNLTKAERGGLSELDKAGFIKRQLVETRQITKHVAQILDSRMNTKYDENDKLIREVKVITLKSKLVSDFRKDFQFYKVREINNYHHAHDAYLNAVVGTALIKKYPKLESEFVYGDYKVYDVRKMIAKSEQEIGKATAKYFFYSNIMNFFKTEITLANGEIRKRPLIETNGETGEIVWDKGRDFATVRKVLSMPQVNIVKKTEVQTGGFSKESILPKRNSDKLIARKKDWDPKKYGGFESPTVAYSVLVVAKVEKGKSKKLKSVKELLGITIMERSSFEKNPIDFLEAKGYKEVKKDLIIKLPKYSLFELENGRKRMLASAGELQKGNELALPSKYVNFLYLASHYEKLKGSPEDNEQKQLFVEQHKHYLDEIIEQISEFSKRVILADANLDKVLSAYNKHRDKPIREQAENIIHLFTLTNLGAPAAFKYFDTTIDRKRYTSTKEVLDATLIHQSITGLYETRIDLSQLGGDEGADKRTADGSEFESPKKKRKV

SEQ ID NO: 2150 - protein, 32 aa, synthetic construct; identical to SEQ ID NO: 20

SEQ ID NO: 2151 - RNA, 4101 nt, synthetic construct
  source 1..4101: mol_type = other RNA
  modified_base 10: mod_base = OTHER; note = N1-methyl pseudouridine
  modified_base 17: mod_base = OTHER; note = N1-methyl pseudouridine
  modified_base 23: mod_base = OTHER; note = N1-methyl pseudouridine
  modified_base 29: mod_base = OTHER; note = N1-methyl pseudouridine
  modified_base 44: mod_base = OTHER; note = N1-methyl pseudouridine
  modified_base 49: mod_base = OTHER; note = N1-methyl pseudouridine
  modified_base 56: mod_base = OTHER; note = N1-methyl pseudouridine
  modified_base 59: mod_base = OTHER; note = N1-methyl pseudouridine
  modified_base 70: mod_base = OTHER; note = N1-methyl pseudouridine
  modified_base 77: mod_base = OTHER; note = N1-methyl pseudouridine
  modified_base 91: mod_base = OTHER; note = N1-methyl pseudouridine
  modified_base 92: mod_base = OTHER; note = N1-methyl pseudouridine
  modified_base 98: mod_base = OTHER; note = N1-methyl pseudouridine
  modified_base 101: mod_base = OTHER; note = N1-methyl pseudouridine
  modified_base 125: mod_base = OTHER; note = N1-methyl pseudouridine
  modified_base 137: mod_base = OTHER; note = N1-methyl pseudouridine
  modified_base 140: mod_base = OTHER; note = N1-methyl pseudouridine
  modified_base 149: mod_base = OTHER; note = N1-methyl pseudouridine
  modified_base 152: mod_base = OTHER; note = N1-methyl pseudouridine
  modified_base 154: mod_base = OTHER; note = N1-methyl pseudouridine
  modified_base 155: mod_base = OTHER; note = N1-methyl pseudouridine
  modified_base 188: mod_base = OTHER; note = N1-methyl pseudouridine
  modified_base 211: mod_base = OTHER; note = N1-methyl pseudouridine
  modified_base 233: mod_base = OTHER; note = N1-methyl pseudouridine
  modified_base 235: mod_base = OTHER; note = N1-methyl pseudouridine
  modified_base 238: mod_base = OTHER; note = N1-methyl pseudouridine
  modified_base 242: mod_base = OTHER; note = N1-methyl pseudouridine
  modified_base 251: mod_base = OTHER; note = N1-methyl pseudouridine
  modified_base 253: mod_base = OTHER; note = N1-methyl pseudouridine
  modified_base 254: mod_base = OTHER; note = N1-methyl pseudouridine
  modified_base 266: mod_base = OTHER; note = N1-methyl pseudouridine
  modified_base 275: mod_base = OTHER; note = N1-methyl pseudouridine
  modified_base 286: mod_base = OTHER; note = N1-methyl pseudouridine
  modified_base 287: mod_base = OTHER; note = N1-methyl pseudouridine
  modified_base 289: mod_base = OTHER; note = N1-methyl pseudouridine
  modified_base 290: mod_base = OTHER; note = N1-methyl pseudouridine
  modified_base 299: mod_base = OTHER; note = N1-methyl pseudouridine
  modified_base 310: mod_base = OTHER; note = N1-methyl pseudouridine
  modified_base 311: mod_base = OTHER; note = N1-methyl pseudouridine
  modified_base 314: mod_base = OTHER; note = N1-methyl pseudouridine
  modified_base 317: mod_base = OTHER; note = N1-methyl pseudouridine
  modified_base 350: mod_base = OTHER; note = N1-methyl pseudouridine
  modified_base 352: mod_base = OTHER; note = N1-methyl pseudouridine
  modified_base 353: mod_base = OTHER; note = N1-methyl pseudouridine
  modified_base 362: mod_base = OTHER; note = N1-methyl pseudouridine
  modified_base 365: mod_base = OTHER; note = N1-methyl pseudouridine
  modified_base 374: mod_base = OTHER; note = N1-methyl pseudouridine
  modified_base 379: mod_base = OTHER; note = N1-methyl pseudouridine
  modified_base 391: mod_base = OTHER; note = N1-methyl pseudouridine
  modified_base 401: mod_base = OTHER; note = N1-methyl pseudouridine
  modified_base 403: mod_base = OTHER; note = N1-methyl pseudouridine
  modified_base 410: mod_base = OTHER; note = N1-methyl pseudouridine
  modified_base 422: mod_base = OTHER; note = N1-methyl pseudouridine
  modified_base 425: mod_base = OTHER; note = N1-methyl pseudouridine
  modified_base 449: mod_base = OTHER; note = N1-methyl pseudouridine
  modified_base 455: mod_base = OTHER; note = N1-methyl pseudouridine
  modified_base 458: mod_base = OTHER; note = N1-methyl pseudouridine
  modified_base 460: mod_base = OTHER; note = N1-methyl pseudouridine
  modified_base 464: mod_base = OTHER; note = N1-methyl pseudouridine
  modified_base 470: mod_base = OTHER; note = N1-methyl pseudouridine
  modified_base 479: mod_base = OTHER; note = N1-methyl pseudouridine
  modified_base 482: mod_base = OTHER; note = N1-methyl pseudouridine
  modified_base 487: mod_base = OTHER; note = N1-methyl pseudouridine
  modified_base 488: mod_base = OTHER; note = N1-methyl pseudouridine
  modified_base 499: mod_base = OTHER; note = N1-methyl pseudouridine
  modified_base 500: mod_base = OTHER; note = N1-methyl pseudouridine
  modified_base 503: mod_base = OTHER; note = N1-methyl pseudouridine
  modified_base 506: mod_base = OTHER; note = N1-methyl pseudouridine
  modified_base 518: mod_base = OTHER; note = N1-methyl pseudouridine
  modified_base 539: mod_base = OTHER; note = N1-methyl pseudouridine
  modified_base 548: mod_base = OTHER; note = N1-methyl pseudouridine
  modified_base 550: mod_base = OTHER; note = N1-methyl pseudouridine
  modified_base 551: mod_base = OTHER; note = N1-methyl pseudouridine
  modified_base 554: mod_base = OTHER; note = N1-methyl pseudouridine
  modified_base 560: mod_base = OTHER; note = N1-methyl pseudouridine
  modified_base 563: mod_base = OTHER; note = N1-methyl pseudouridine
  modified_base 571: mod_base = OTHER; note = N1-methyl pseudouridine
  modified_base 581: mod_base = OTHER; note = N1-methyl pseudouridine
  modified_base 583: mod_base = OTHER; note = N1-methyl pseudouridine
  modified_base 584: mod_base = OTHER; note = N1-methyl pseudouridine
  modified_base 599: mod_base = OTHER; note = N1-methyl pseudouridine
  modified_base 614: mod_base = OTHER; note = N1-methyl pseudouridine
  modified_base 629: mod_base = OTHER; note = N1-methyl pseudouridine
  modified_base 632: mod_base = OTHER; note = N1-methyl pseudouridine
  modified_base 644: mod_base = OTHER; note = N1-methyl pseudouridine
  modified_base 662: mod_base = OTHER; note = N1-methyl pseudouridine
  modified_base 671: mod_base = OTHER; note = N1-methyl pseudouridine
  modified_base 674: mod_base = OTHER; note = N1-methyl pseudouridine
  modified_base 683: mod_base = OTHER; note = N1-methyl pseudouridine
  modified_base 707: mod_base = OTHER; note = N1-methyl pseudouridine
  modified_base 709: mod_base = OTHER; note = N1-methyl pseudouridine
  modified_base 710: mod_base = OTHER; note = N1-methyl pseudouridine
  modified_base 719: mod_base = OTHER; note = N1-methyl pseudouridine
  modified_base 722: mod_base = OTHER; note = N1-methyl pseudouridine
  modified_base 728: mod_base = OTHER; note = N1-methyl pseudouridine
  modified_base 734: mod_base = OTHER; note = N1-methyl pseudouridine
  modified_base 740: mod_base = OTHER; note = N1-methyl pseudouridine
  modified_base 751: mod_base = OTHER; note = N1-methyl pseudouridine
  modified_base 752: mod_base = OTHER; note = N1-methyl pseudouridine
  modified_base 763: mod_base = OTHER; note = N1-methyl pseudouridine
  modified_base 764: mod_base = OTHER; note = N1-methyl pseudouridine
  modified_base 770: mod_base = OTHER; note = N1-methyl pseudouridine
  modified_base 788: mod_base = OTHER; note = N1-methyl pseudouridine
  modified_base 794: mod_base = OTHER; note = N1-methyl pseudouridine
  modified_base 808: mod_base = OTHER; note = N1-methyl pseudouridine
  modified_base 821: mod_base = OTHER; note = N1-methyl pseudouridine
  modified_base 830: mod_base = OTHER; note = N1-methyl pseudouridine
  modified_base 833: mod_base = OTHER; note = N1-methyl pseudouridine
  modified_base 842: mod_base = OTHER; note = N1-methyl pseudouridine
  modified_base 853: mod_base = OTHER; note = N1-methyl pseudouridine
  modified_base 863: mod_base = OTHER; note = N1-methyl pseudouridine
  modified_base 865: mod_base = OTHER; note = N1-methyl pseudouridine
  modified_base 866: mod_base = OTHER; note = N1-methyl pseudouridine
  modified_base 869: mod_base = OTHER; note = N1-methyl pseudouridine
  modified_base 884: mod_base = OTHER; note = N1-methyl pseudouridine
  modified_base 896: mod_base = OTHER; note = N1-methyl pseudouridine
  modified_base 899: mod_base = OTHER; note = N1-methyl pseudouridine
  modified_base 902: mod_base = OTHER; note = N1-methyl pseudouridine
  modified_base 911: mod_base = OTHER; note = N1-methyl pseudouridine
  modified_base 914: mod_base = OTHER; note = N1-methyl pseudouridine
  modified_base 920: mod_base = OTHER; note = N1-methyl pseudouridine
  modified_base 932: mod_base = OTHER; note = N1-methyl pseudouridine
  modified_base 947: mod_base = OTHER; note = N1-methyl pseudouridine
  modified_base 959: mod_base = OTHER; note = N1-methyl pseudouridine
  modified_base 962: mod_base = OTHER; note = N1-methyl pseudouridine
  modified_base 970: mod_base = OTHER; note = N1-methyl pseudouridine
  modified_base 992: mod_base = OTHER; note = N1-methyl pseudouridine
  modified_base 998: mod_base = OTHER; note = N1-methyl pseudouridine
  modified_base 1001: mod_base = OTHER; note = N1-methyl pseudouridine
  modified_base 1010: mod_base = OTHER; note = N1-methyl pseudouridine
  modified_base 1013: mod_base = OTHER; note = N1-methyl pseudouridine
  modified_base 1025: mod_base = OTHER; note = N1-methyl pseudouridine
  modified_base 1036: mod_base = OTHER; note = N1-methyl pseudouridine
  modified_base 1046: mod_base = OTHER; note = N1-methyl pseudouridine
  modified_base 1048: mod_base = OTHER; note = N1-methyl pseudouridine
  modified_base 1049: mod_base = OTHER; note = N1-methyl pseudouridine
  modified_base 1051: mod_base = OTHER; note = N1-methyl pseudouridine
  modified_base 1052: mod_base = OTHER; note = N1-methyl pseudouridine
  modified_base 1072: mod_base = OTHER; note = N1-methyl pseudouridine
  modified_base 1081: mod_base = OTHER; note = N1-methyl pseudouridine
  modified_base 1085: mod_base = OTHER; note = N1-methyl pseudouridine
  modified_base 1111: mod_base = OTHER; note = N1-methyl pseudouridine
  modified_base 1112: mod_base = OTHER; note = N1-methyl pseudouridine
  modified_base 1114: mod_base = OTHER; note = N1-methyl pseudouridine
  modified_base 1120: mod_base = OTHER; note = N1-methyl pseudouridine
  modified_base 1121: mod_base = OTHER; note = N1-methyl pseudouridine
  modified_base 1124: mod_base = OTHER; note = N1-methyl pseudouridine
  modified_base 1133: mod_base = OTHER; note = N1-methyl pseudouridine
  modified_base 1136: mod_base = OTHER; note = N1-methyl pseudouridine
  modified_base 1145: mod_base = OTHER; note = N1-methyl pseudouridine
  modified_base 1163: mod_base = OTHER; note = N1-methyl pseudouridine
  modified_base 1166: mod_base = OTHER; note = N1-methyl pseudouridine
  modified_base 1169: mod_base = OTHER; note = N1-methyl pseudouridine
  modified_base 1175: mod_base = OTHER; note = N1-methyl pseudouridine
  modified_base 1190: mod_base = OTHER; note = N1-methyl pseudouridine
  modified_base 1193: mod_base = OTHER; note = N1-methyl pseudouridine
  modified_base 1210: mod_base = OTHER; note = N1-methyl pseudouridine
  modified_base 1211: mod_base = OTHER; note = N1-methyl pseudouridine
  modified_base 1226: mod_base = OTHER; note = N1-methyl pseudouridine
  modified_base 1238: mod_base = OTHER; note = N1-methyl pseudouridine
  modified_base 1244: mod_base = OTHER; note = N1-methyl pseudouridine
  modified_base 1253: mod_base = OTHER; note = N1-methyl pseudouridine
  modified_base 1262: mod_base = OTHER; note = N1-methyl pseudouridine
  modified_base 1265: mod_base = OTHER; note = N1-methyl pseudouridine
  modified_base 1282: mod_base = OTHER; note = N1-methyl pseudouridine
  modified_base 1283: mod_base = OTHER; note = N1-methyl pseudouridine
  modified_base 1285: mod_base = OTHER; note = N1-methyl pseudouridine
  modified_base 1291: mod_base = OTHER; note = N1-methyl pseudouridine
  modified_base 1292: mod_base = OTHER; note = N1-methyl pseudouridine
  modified_base 1295: mod_base = OTHER; note = N1-methyl pseudouridine
  modified_base 1316: mod_base = OTHER; note = N1-methyl pseudouridine
  modified_base 1325: mod_base = OTHER; note = N1-methyl pseudouridine
  modified_base 1328: mod_base = OTHER; note = N1-methyl pseudouridine
  modified_base 1333: mod_base = OTHER; note = N1-methyl pseudouridine
  modified_base 1334: mod_base = OTHER; note = N1-methyl pseudouridine
  modified_base 1340: mod_base = OTHER; note = N1-methyl pseudouridine
  modified_base 1345: mod_base = OTHER; note = N1-methyl pseudouridine
  modified_base 1348: mod_base = OTHER; note = N1-methyl pseudouridine
  modified_base 1352: mod_base = OTHER; note = N1-methyl pseudouridine
  modified_base 1361: mod_base = OTHER; note = N1-methyl pseudouridine
  modified_base 1381: mod_base = OTHER; note = N1-methyl pseudouridine
  modified_base 1382: mod_base = OTHER; note = N1-methyl pseudouridine
  modified_base 1387: mod_base = OTHER; note = N1-methyl pseudouridine
  modified_base 1391: mod_base = OTHER; note = N1-methyl pseudouridine
  modified_base 1415: mod_base = OTHER; note = N1-methyl pseudouridine
  modified_base 1423: mod_base = OTHER; note = N1-methyl pseudouridine
  modified_base 1429: mod_base = OTHER; note = N1-methyl pseudouridine
  modified_base 1430: mod_base = OTHER; note = N1-methyl pseudouridine
  modified_base 1439: mod_base = OTHER; note = N1-methyl pseudouridine
  modified_base 1442: mod_base = OTHER; note = N1-methyl pseudouridine
  modified_base 1468: mod_base = OTHER; note = N1-methyl pseudouridine
  modified_base 1469: mod_base = OTHER; note = N1-methyl pseudouridine
  modified_base 1472: mod_base = OTHER; note = N1-methyl pseudouridine
  modified_base 1481: mod_base = OTHER; note = N1-methyl pseudouridine
  modified_base 1489: mod_base = OTHER; note = N1-methyl pseudouridine
  modified_base 1490: mod_base = OTHER; note = N1-methyl pseudouridine
  modified_base 1502: mod_base = OTHER; note = N1-methyl pseudouridine
  modified_base 1517: mod_base = OTHER; note = N1-methyl pseudouridine
  modified_base 1520: mod_base = OTHER; note = N1-methyl pseudouridine
  modified_base 1535: mod_base = OTHER; note = N1-methyl pseudouridine
  modified_base 1538: mod_base = OTHER; note = N1-methyl pseudouridine
  modified_base 1540: mod_base = OTHER; note = N1-methyl pseudouridine
  modified_base 1546: mod_base = OTHER; note = N1-methyl pseudouridine
  modified_base 1549: mod_base = OTHER; note = N1-methyl pseudouridine
  modified_base 1550: mod_base = OTHER; note = N1-methyl pseudouridine
  modified_base 1556: mod_base = OTHER; note = N1-methyl pseudouridine
  modified_base 1558: mod_base = OTHER; note = N1-methyl pseudouridine
  modified_base 1568: mod_base = OTHER; note = N1-methyl pseudouridine
  modified_base 1577: mod_base = OTHER; note = N1-methyl pseudouridine
  modified_base 1582: mod_base = OTHER; note = N1-methyl pseudouridine
  modified_base 1586: mod_base = OTHER; note = N1-methyl pseudouridine
  modified_base 1598: mod_base = OTHER; note = N1-methyl pseudouridine
  modified_base 1612: mod_base = OTHER; note = N1-methyl pseudouridine
  modified_base 1613: mod_base = OTHER; note = N1-methyl pseudouridine
  modified_base 1616: mod_base = OTHER; note = N1-methyl pseudouridine
  modified_base 1640: mod_base = OTHER; note = N1-methyl pseudouridine
  modified_base 1643: mod_base = OTHER; note = N1-methyl pseudouridine
  modified_base 1649: mod_base = OTHER; note = N1-methyl pseudouridine
  modified_base 1652: mod_base = OTHER; note = N1-methyl pseudouridine
  modified_base 1654: mod_base = OTHER; note = N1-methyl pseudouridine
  modified_base 1655: mod_base = OTHER; note = N1-methyl pseudouridine
  modified_base 1673: mod_base = OTHER; note = N1-methyl pseudouridine
  modified_base 1679: mod_base = OTHER; note = N1-methyl pseudouridine
  modified_base 1688: mod_base = OTHER; note = N1-methyl pseudouridine
  modified_base 1699: mod_base = OTHER; note = N1-methyl pseudouridine
  modified_base 1702: mod_base = OTHER; note = N1-methyl pseudouridine
  modified_base 1703: mod_base = OTHER; note = N1-methyl pseudouridine
  modified_base 1712: mod_base = OTHER; note = N1-methyl pseudouridine
  modified_base 1717: mod_base = OTHER; note = N1-methyl pseudouridine
  modified_base 1720: mod_base = OTHER; note = N1-methyl pseudouridine
  modified_base 1721: mod_base = OTHER; note = N1-methyl pseudouridine
  modified_base 1730: mod_base = OTHER; note = N1-methyl pseudouridine
  modified_base 1736: mod_base = OTHER; note = N1-methyl pseudouridine
  modified_base 1745: mod_base = OTHER; note = N1-methyl pseudouridine
  modified_base 1756: mod_base = OTHER; note = N1-methyl pseudouridine
  modified_base 1757: mod_base = OTHER; note = N1-methyl pseudouridine
  modified_base 1769: mod_base = OTHER; note = N1-methyl pseudouridine
  modified_base 1777: mod_base = OTHER; note = N1-methyl pseudouridine
  modified_base 1787: mod_base = OTHER; note = N1-methyl pseudouridine
  modified_base 1790: mod_base = OTHER; note = N1-methyl pseudouridine
  modified_base 1796: mod_base = OTHER; note = N1-methyl pseudouridine
  modified_base 1799: mod_base = OTHER; note = N1-methyl pseudouridine
  modified_base 1813: mod_base = OTHER; note = N1-methyl pseudouridine
  modified_base 1814: mod_base = OTHER; note = N1-methyl pseudouridine
  modified_base 1817: mod_base = OTHER; note = N1-methyl pseudouridine
  modified_base 1841: mod_base = OTHER; note = N1-methyl pseudouridine
  modified_base 1844: mod_base = OTHER; note = N1-methyl pseudouridine
  modified_base 1853: mod_base = OTHER; note = N1-methyl pseudouridine
  modified_base 1856: mod_base = OTHER; note = N1-methyl pseudouridine
  modified_base 1859: mod_base = OTHER; note = N1-methyl pseudouridine
  modified_base 1865: mod_base = OTHER; note = N1-methyl pseudouridine
  modified_base 1871: mod_base = OTHER; note = N1-methyl pseudouridine
  modified_base 1873: mod_base = OTHER; note = N1-methyl pseudouridine
  modified_base 1874: mod_base = OTHER; note = N1-methyl pseudouridine
  modified_base 1889: mod_base = OTHER; note = N1-methyl pseudouridine
  modified_base 1892: mod_base = OTHER; note = N1-methyl pseudouridine
  modified_base 1904: mod_base = OTHER; note = N1-methyl pseudouridine
  modified_base 1912: mod_base = OTHER; note = N1-methyl pseudouridine
  modified_base 1922: mod_base = OTHER; note = N1-methyl pseudouridine
  modified_base 1924: mod_base = OTHER; note = N1-methyl pseudouridine
  modified_base 1925: mod_base = OTHER; note = N1-methyl pseudouridine
  modified_base 1937: mod_base = OTHER; note = N1-methyl pseudouridine
  modified_base 1940: mod_base = OTHER; note = N1-methyl pseudouridine
  modified_base 1949: mod_base = OTHER; note = N1-methyl pseudouridine
  modified_base 1963: mod_base = OTHER; note = N1-methyl pseudouridine
  modified_base 1972: mod_base = OTHER; note = N1-methyl pseudouridine
  modified_base 1982: mod_base = OTHER; note = N1-methyl pseudouridine
  modified_base 1994: mod_base = OTHER; note = N1-methyl pseudouridine
  modified_base 1997: mod_base = OTHER; note = N1-methyl pseudouridine
  modified_base 2006: mod_base = OTHER; note = N1-methyl pseudouridine
  modified_base 2033: mod_base = OTHER; note = N1-methyl pseudouridine
  modified_base 2036: mod_base = OTHER; note = N1-methyl pseudouridine
  modified_base 2041: mod_base = OTHER; note = N1-methyl pseudouridine
  modified_base 2042: mod_base = OTHER; note = N1-methyl pseudouridine
  modified_base 2045: mod_base = OTHER; note = N1-methyl pseudouridine
  modified_base 2059: mod_base = OTHER; note = N1-methyl pseudouridine
  modified_base 2060: mod_base = OTHER; note = N1-methyl pseudouridine
  modified_base 2074: mod_base = OTHER; note = N1-methyl pseudouridine
  modified_base 2075: mod_base = OTHER; note = N1-methyl pseudouridine
  modified_base 2078: mod_base = OTHER; note = N1-methyl pseudouridine
  modified_base 2084: mod_base = OTHER; note = N1-methyl pseudouridine
  modified_base 2087: mod_base = OTHER; note = N1-methyl pseudouridine
  modified_base 2102: mod_base = OTHER; note = N1-methyl pseudouridine
  modified_base 2107: mod_base = OTHER; note = N1-methyl pseudouridine
  modified_base 2108: mod_base = OTHER; note = N1-methyl pseudouridine
  modified_base 2120: mod_base = OTHER; note = N1-methyl pseudouridine
  modified_base 2135: mod_base = OTHER; note = N1-methyl pseudouridine
  modified_base 2156: mod_base = OTHER; note = N1-methyl pseudouridine
  modified_base 2168: mod_base = OTHER; note = N1-methyl pseudouridine
  modified_base 2177: mod_base = OTHER; note = N1-methyl pseudouridine
  modified_base 2195: mod_base = OTHER; note = N1-methyl pseudouridine
  modified_base 2207: mod_base = OTHER; note = N1-methyl pseudouridine
  modified_base 2210: mod_base = OTHER; note = N1-methyl pseudouridine
  modified_base 2219: mod_base = OTHER; note = N1-methyl pseudouridine
  modified_base 2225: mod_base = OTHER; note = N1-methyl pseudouridine
  modified_base 2228: mod_base = OTHER; note = N1-methyl pseudouridine
  modified_base 2237: mod_base = OTHER; note = N1-methyl pseudouridine
  modified_base 2240: mod_base = OTHER; note = N1-methyl pseudouridine
  modified_base 2246: mod_base = OTHER; note = N1-methyl pseudouridine
  modified_base 2249: mod_base = OTHER; note = N1-methyl pseudouridine
  modified_base 2273: mod_base = OTHER; note = N1-methyl pseudouridine
  modified_base 2276: mod_base = OTHER; note = N1-methyl pseudouridine
  modified_base 2279: mod_base = OTHER; note = N1-methyl pseudouridine
  modified_base 2285: mod_base = OTHER; note = N1-methyl pseudouridine
  modified_base 2339: mod_base = OTHER; note = N1-methyl pseudouridine
  modified_base 2348: mod_base = OTHER; note = N1-methyl pseudouridine
  modified_base 2360: mod_base = OTHER; note = N1-methyl pseudouridine
  modified_base 2369: mod_base = OTHER; note = N1-methyl pseudouridine
  modified_base 2381: mod_base = OTHER; note = N1-methyl pseudouridine
  modified_base 2384: mod_base = OTHER; note = N1-methyl pseudouridine
  modified_base 2399: mod_base = OTHER; note = N1-methyl pseudouridine
  modified_base 2414: mod_base = OTHER; note = N1-methyl pseudouridine
  modified_base 2429: mod_base = OTHER; note = N1-methyl pseudouridine
  modified_base 2431: mod_base = OTHER; note = N1-methyl pseudouridine
  modified_base 2435: mod_base = OTHER; note = N1-methyl pseudouridine
  modified_base 2437: mod_base = OTHER; note = N1-methyl pseudouridine
  modified_base 2440: mod_base = OTHER; note = N1-methyl pseudouridine
  modified_base 2444: mod_base = OTHER; note = N1-methyl pseudouridine
  modified_base 2462: mod_base = OTHER; note = N1-methyl pseudouridine
  modified_base 2464: mod_base = OTHER; note = N1-methyl pseudouridine
  modified_base 2468: mod_base = OTHER; note = N1-methyl pseudouridine
  modified_base 2480: mod_base = OTHER; note = N1-methyl pseudouridine
  modified_base 2486: mod_base = OTHER; note = N1-methyl pseudouridine
  modified_base 2495: mod_base = OTHER; note = N1-methyl pseudouridine
  modified_base 2503: mod_base = OTHER; note = N1-methyl pseudouridine
  modified_base 2510: mod_base = OTHER; note = N1-methyl pseudouridine
  modified_base 2519: mod_base = OTHER; note = N1-methyl pseudouridine
  modified_base 2522: mod_base = OTHER; note = N1-methyl pseudouridine
  modified_base 2533: mod_base = OTHER; note = N1-methyl pseudouridine
  modified_base 2534: mod_base = OTHER; note = N1-methyl pseudouridine
  modified_base 2537: mod_base = OTHER; note = N1-methyl pseudouridine
  modified_base 2552: mod_base = OTHER; note = N1-methyl pseudouridine
  modified_base 2564: mod_base = OTHER; note = N1-methyl pseudouridine
  modified_base 2567: mod_base = OTHER; note = N1-methyl pseudouridine
  modified_base 2606: mod_base = OTHER; note = N1-methyl pseudouridine
  modified_base 2621: mod_base = OTHER; note = N1-methyl pseudouridine
  modified_base 2624: mod_base = OTHER; note = N1-methyl pseudouridine
  modified_base 2633: mod_base = OTHER; note = N1-methyl pseudouridine
  modified_base 2641: mod_base = OTHER; note = N1-methyl pseudouridine
  modified_base 2644: mod_base = OTHER; note = N1-methyl pseudouridine
  modified_base 2654: mod_base = OTHER; note = N1-methyl pseudouridine
  modified_base 2657: mod_base = OTHER; note = N1-methyl pseudouridine
  modified_base 2669: mod_base = OTHER; note = N1-methyl pseudouridine
  modified_base 2672: mod_base = OTHER; note = N1-methyl pseudouridine
  modified_base 2686: mod_base = OTHER; note = N1-methyl pseudouridine
  modified_base 2687: mod_base = OTHER; note = N1-methyl pseudouridine
  modified_base 2696: mod_base = OTHER; note = N1-methyl pseudouridine
  modified_base 2720: mod_base = OTHER; note = N1-methyl pseudouridine
  modified_base 2729: mod_base = OTHER; note = N1-methyl pseudouridine
  modified_base 2743: mod_base = OTHER; note = N1-methyl pseudouridine
  modified_base 2744: mod_base = OTHER; note = N1-methyl pseudouridine
  modified_base 2747: mod_base = OTHER; note = N1-methyl pseudouridine
  modified_base 2759: mod_base = OTHER; note = N1-methyl pseudouridine
  modified_base 2762: mod_base = OTHER; note = N1-methyl pseudouridine
  modified_base 2777: mod_base = OTHER; note = N1-methyl pseudouridine
  modified_base 2789: mod_base = OTHER; note = N1-methyl pseudouridine
  modified_base 2798: mod_base = OTHER; note = N1-methyl pseudouridine
  modified_base 2801: mod_base = OTHER; note = N1-methyl pseudouridine
  modified_base 2813: mod_base = OTHER; note = N1-methyl pseudouridine
  modified_base 2824: mod_base = OTHER; note = N1-methyl pseudouridine
  modified_base 2843: mod_base = OTHER; note = N1-methyl pseudouridine
  modified_base 2846: mod_base = OTHER; note = N1-methyl pseudouridine
  modified_base 2855: mod_base = OTHER; note = N1-methyl pseudouridine
  modified_base 2861: mod_base = OTHER; note = N1-methyl pseudouridine
  modified_base 2864: mod_base = OTHER; note = N1-methyl pseudouridine
  modified_base 2870: mod_base = OTHER; note = N1-methyl pseudouridine
  modified_base 2882: mod_base = OTHER; note = N1-methyl pseudouridine
  modified_base 2885: mod_base = OTHER; note = N1-methyl pseudouridine
  modified_base 2893: mod_base = OTHER; note = N1-methyl pseudouridine
  modified_base 2894: mod_base = OTHER; note = N1-methyl pseudouridine
  modified_base 2905: mod_base = OTHER; note = N1-methyl pseudouridine
  modified_base 2906: mod_base = OTHER; note = N1-methyl pseudouridine
  modified_base 2911: mod_base = OTHER; note = N1-methyl pseudouridine
  modified_base 2912: mod_base = OTHER; note = N1-methyl pseudouridine
  modified_base 2914: mod_base = OTHER; note = N1-methyl pseudouridine
  modified_base 2921: mod_base = OTHER; note = N1-methyl pseudouridine
  modified_base 2930: mod_base = OTHER; note = N1-methyl pseudouridine
  modified_base 2938: mod_base = OTHER; note = N1-methyl pseudouridine
  modified_base 2959: mod_base = OTHER; note = N1-methyl pseudouridine
  modified_base 2963: mod_base = OTHER; note = N1-methyl pseudouridine
  modified_base 2972: mod_base = OTHER; note = N1-methyl pseudouridine
  modified_base 2975: mod_base = OTHER; note = N1-methyl pseudouridine
  modified_base 2987: mod_base = OTHER; note = N1-methyl pseudouridine
  modified_base 2990: mod_base = OTHER; note = N1-methyl pseudouridine
  modified_base 2998: mod_base = OTHER; note = N1-methyl pseudouridine
  modified_base 3008: mod_base = OTHER; note = N1-methyl pseudouridine
  modified_base 3019: mod_base = OTHER; note = N1-methyl pseudouridine
  modified_base 3020: mod_base = OTHER; note = N1-methyl pseudouridine
  modified_base 3023: mod_base = OTHER; note = N1-methyl pseudouridine
  modified_base 3025: mod_base = OTHER; note = N1-methyl pseudouridine
  modified_base 3034: mod_base = OTHER; note = N1-methyl pseudouridine
  modified_base 3041: mod_base = OTHER; note = N1-methyl pseudouridine
  modified_base 3043: mod_base = OTHER; note = N1-methyl pseudouridine
  modified_base 3050: mod_base = OTHER; note = N1-methyl pseudouridine
  modified_base 3059: mod_base = OTHER; note = N1-methyl pseudouridine
  modified_base 3062: mod_base = OTHER; note = N1-methyl pseudouridine
  modified_base 3083: mod_base = OTHER; note = N1-methyl pseudouridine
  modified_base 3103: mod_base = OTHER; note = N1-methyl pseudouridine
  modified_base 3106: mod_base = OTHER; note = N1-methyl pseudouridine
  modified_base 3107: mod_base = OTHER; note = N1-methyl pseudouridine
  modified_base 3109: mod_base = OTHER; note = N1-methyl pseudouridine
  modified_base 3110: mod_base = OTHER; note = N1-methyl pseudouridine
  modified_base 3112: mod_base = OTHER; note = N1-methyl pseudouridine
  modified_base 3122: mod_base = OTHER; note = N1-methyl pseudouridine
  modified_base 3125: mod_base = OTHER; note = N1-methyl pseudouridine
  modified_base 3130: mod_base = OTHER; note = N1-methyl pseudouridine
  modified_base 3131: mod_base = OTHER; note = N1-methyl pseudouridine
  modified_base 3133: mod_base = OTHER; note = N1-methyl pseudouridine
  modified_base 3134: mod_base = OTHER; note = N1-methyl pseudouridine
  modified_base 3146: mod_base = OTHER; note = N1-methyl pseudouridine
  modified_base 3152: mod_base = OTHER; note = N1-methyl pseudouridine
  modified_base 3167: mod_base = OTHER; note = N1-methyl pseudouridine
  modified_base 3182: mod_base = OTHER; note = N1-methyl pseudouridine
  modified_base 3185: mod_base = OTHER; note = N1-methyl pseudouridine
  modified_base 3212: mod_base = OTHER; note = N1-methyl pseudouridine
  modified_base 3215: mod_base = OTHER; note = N1-methyl pseudouridine
  modified_base 3217: mod_base = OTHER; note = N1-methyl pseudouridine
  modified_base 3235: mod_base = OTHER; note = N1-methyl pseudouridine
  modified_base 3236: mod_base = OTHER; note = N1-methyl pseudouridine
  modified_base 3245: mod_base = OTHER; note = N1-methyl pseudouridine
  modified_base 3254: mod_base = OTHER; note = N1-methyl pseudouridine
  modified_base 3257: mod_base = OTHER; note = N1-methyl pseudouridine
  modified_base 3263: mod_base = OTHER; note = N1-methyl pseudouridine
  modified_base 3272: mod_base = OTHER; note = N1-methyl pseudouridine
  modified_base 3278: mod_base = OTHER; note = N1-methyl pseudouridine
  modified_base 3281: mod_base = OTHER; note = N1-methyl pseudouridine
  modified_base 3296: mod_base = OTHER; note = N1-methyl pseudouridine
  modified_base 3310: mod_base = OTHER; note = N1-methyl pseudouridine
  modified_base 3311: mod_base = OTHER; note = N1-methyl pseudouridine
  modified_base 3326: mod_base = OTHER; note = N1-methyl pseudouridine
  modified_base 3329: mod_base = OTHER; note = N1-methyl pseudouridine
  modified_base 3353: mod_base = OTHER; note = N1-methyl pseudouridine
  modified_base 3356: mod_base = OTHER; note = N1-methyl pseudouridine
  modified_base 3373: mod_base = OTHER; note = N1-methyl pseudouridine
  modified_base 3388: mod_base = OTHER; note = N1-methyl pseudouridine
  modified_base 3397: mod_base = OTHER; note = N1-methyl pseudouridine
  modified_base 3398: mod_base = OTHER; note = N1-methyl pseudouridine
  modified_base 3413: mod_base = OTHER; note = N1-methyl pseudouridine
  modified_base 3418: mod_base = OTHER; note = N1-methyl pseudouridine
  modified_base 3425: mod_base = OTHER; note = N1-methyl pseudouridine
  modified_base 3428: mod_base = OTHER; note = N1-methyl pseudouridine
  modified_base 3431: mod_base = OTHER; note = N1-methyl pseudouridine
  modified_base 3434: mod_base = OTHER; note = N1-methyl pseudouridine
  modified_base 3443: mod_base = OTHER; note = N1-methyl pseudouridine
  modified_base 3467: mod_base = OTHER; note = N1-methyl pseudouridine
  modified_base 3476: mod_base = OTHER; note = N1-methyl pseudouridine
  modified_base 3485: mod_base = OTHER; note = N1-methyl pseudouridine
  modified_base 3488: mod_base = OTHER; note = N1-methyl pseudouridine
  modified_base 3494: mod_base = OTHER; note = N1-methyl pseudouridine
  modified_base 3500: mod_base = OTHER; note = N1-methyl pseudouridine
  modified_base 3503: mod_base = OTHER; note = N1-methyl pseudouridine
  modified_base 3517: mod_base = OTHER; note = N1-methyl pseudouridine
  modified_base 3518: mod_base = OTHER; note = N1-methyl pseudouridine
  modified_base 3533: mod_base = OTHER; note = N1-methyl pseudouridine
  modified_base 3538: mod_base = OTHER; note = N1-methyl pseudouridine
  modified_base 3539: mod_base = OTHER; note = N1-methyl pseudouridine
  modified_base 3542: mod_base = OTHER; note = N1-methyl pseudouridine
  modified_base 3556: mod_base = OTHER; note = N1-methyl pseudouridine
  modified_base 3566: mod_base = OTHER; note = N1-methyl pseudouridine
  modified_base 3578: mod_base = OTHER; note = N1-methyl pseudouridine
  modified_base 3581: mod_base = OTHER; note = N1-methyl pseudouridine
  modified_base 3584: mod_base = OTHER; note = N1-methyl pseudouridine
  modified_base 3590: mod_base = OTHER; note = N1-methyl pseudouridine
  modified_base 3598: mod_base = OTHER; note = N1-methyl pseudouridine
  modified_base 3605: mod_base = OTHER; note = N1-methyl pseudouridine
  modified_base 3607: mod_base = OTHER; note = N1-methyl pseudouridine
  modified_base 3608: mod_base = OTHER; note = N1-methyl pseudouridine
  modified_base 3614: mod_base = OTHER; note = N1-methyl pseudouridine
  modified_base 3635: mod_base = OTHER; note = N1-methyl pseudouridine
  modified_base 3638: mod_base = OTHER; note = N1-methyl pseudouridine
  modified_base 3656: mod_base = OTHER; note = N1-methyl pseudouridine
  modified_base 3674: mod_base = OTHER; note = N1-methyl pseudouridine
  modified_base 3680: mod_base = OTHER; note = N1-methyl pseudouridine
  modified_base 3691: mod_base = OTHER; note = N1-methyl pseudouridine
  modified_base 3695: mod_base = OTHER; note = N1-methyl pseudouridine
  modified_base 3700: mod_base = OTHER; note = N1-methyl pseudouridine
  modified_base 3701: mod_base = OTHER; note = N1-methyl pseudouridine
  modified_base 3704: mod_base = OTHER; note = N1-methyl pseudouridine
  modified_base 3706: mod_base = OTHER; note = N1-methyl pseudouridine
  modified_base 3710: mod_base = OTHER; note = N1-methyl pseudouridine
  modified_base 3721: mod_base = OTHER; note = N1-methyl pseudouridine
  modified_base 3731: mod_base = OTHER; note = N1-methyl pseudouridine
  modified_base 3767: mod_base = OTHER; note = N1-methyl pseudouridine
  modified_base 3769: mod_base = OTHER; note = N1-methyl pseudouridine
  modified_base 3770: mod_base = OTHER; note = N1-methyl pseudouridine
  modified_base 3773: mod_base = OTHER; note = N1-methyl pseudouridine
  modified_base 3790: mod_base = OTHER; note = N1-methyl pseudouridine
  modified_base 3794: mod_base = OTHER; note = N1-methyl pseudouridine
  modified_base 3803: mod_base = OTHER; note = N1-methyl pseudouridine
  modified_base 3806: mod_base = OTHER; note = N1-methyl pseudouridine
  modified_base 3815: mod_base = OTHER; note = N1-methyl pseudouridine
  modified_base 3823: mod_base = OTHER; note = N1-methyl pseudouridine
  modified_base 3824: mod_base = OTHER; note = N1-methyl pseudouridine
  modified_base 3836: mod_base = OTHER; note = N1-methyl pseudouridine
  modified_base 3839: mod_base = OTHER; note = N1-methyl pseudouridine
  modified_base 3842: mod_base = OTHER; note = N1-methyl pseudouridine
  modified_base 3857: mod_base = OTHER; note = N1-methyl pseudouridine
  modified_base 3866: mod_base = OTHER; note = N1-methyl pseudouridine
  modified_base 3869: mod_base = OTHER; note = N1-methyl pseudouridine
  modified_base 3877: mod_base = OTHER; note = N1-methyl pseudouridine
  modified_base 3902: mod_base = OTHER; note = N1-methyl pseudouridine
  modified_base 3923: mod_base = OTHER; note = N1-methyl pseudouridine
  modified_base 3926: mod_base = OTHER; note = N1-methyl pseudouridine
  modified_base 3932: mod_base = OTHER; note = N1-methyl pseudouridine
  modified_base 3934: mod_base = OTHER; note = N1-methyl pseudouridine
  modified_base 3935: mod_base = OTHER; note = N1-methyl pseudouridine
  modified_base 3941: mod_base = OTHER; note = N1-methyl pseudouridine
  modified_base 3950: mod_base = OTHER; note = N1-methyl pseudouridine
  modified_base 3967: mod_base = OTHER; note = N1-methyl pseudouridine
  modified_base 3968: mod_base = OTHER; note = N1-methyl pseudouridine
  modified_base 3973: mod_base = OTHER; note = N1-methyl pseudouridine
  modified_base 3976: mod_base = OTHER; note = N1-methyl pseudouridine
  modified_base 3977: mod_base = OTHER; note = N1-methyl pseudouridine
  modified_base 3989: mod_base = OTHER; note = N1-methyl pseudouridine
  modified_base 4003: mod_base = OTHER; note = N1-methyl pseudouridine
  modified_base 4022: mod_base = OTHER; note = N1-methyl pseudouridine
  modified_base 4025: mod_base = OTHER; note = N1-methyl pseudouridine
  modified_base 4037: mod_base = OTHER; note = N1-methyl pseudouridine
  modified_base 4040: mod_base = OTHER; note = N1-methyl pseudouridine
  modified_base 4052: mod_base = OTHER; note = N1-methyl pseudouridine
  modified_base 4061: mod_base = OTHER; note = N1-methyl pseudouridine
  modified_base 4063: mod_base = OTHER; note = N1-methyl pseudouridine
  modified_base 4076: mod_base = OTHER; note = N1-methyl pseudouridine
  modified_base 4082: mod_base = OTHER; note = N1-methyl pseudouridine
  modified_base 4091: mod_base = OTHER; note = N1-methyl pseudouridine
gacaagaagtacagcatcggcctggccatcggcaccaacagcgtgggctgggccgtgatcaccgacgagtacaaggtgcccagcaagaagttcaaggtgctgggcaacaccgaccggcacagcatcaagaagaacctgatcggcgccctgctgttcgacagcggcgagacagccgaggccacccggctgaagcggaccgcccggcggcggtacacccggcggaagaaccggatctgctacctgcaggagatcttcagcaacgagatggccaaggtggacgacagcttcttccaccggctggaggagagcttcctggtggaggaggacaagaagcacgagcggcaccccatcttcggcaacatcgtggacgaggtggcctaccacgagaagtaccccaccatctaccacctgcggaagaagctggtggacagcaccgacaaggccgacctgcggctgatctacctggccctggcccacatgatcaagttccggggccacttcctgatcgagggcgacctgaaccccgacaacagcgacgtggacaagctgttcatccagctggtgcagacctacaaccagctgttcgaggagaaccccatcaacgccagcggcgtggacgccaaggccatcctgagcgcccggctgagcaagagccggcggctggagaacctgatcgcccagctgcccggcgagaagaagaacggcctgttcggcaacctgatcgccctgagcctgggcctgacccccaacttcaagagcaacttcgacctggccgaggacgccaagctgcagctgagcaaggacacctacgacgacgacctggacaacctgctggcccagatcggcgaccagtacgccgacctgttcctggccgccaagaacctgagcgacgccatcctgctgagcgacatcctgcgggtgaacaccgagatcaccaaggcccccctgagcgccagcatgatcaagcggtacgacgagcaccaccaggacctgaccctgctgaaggccctggtgcggcagcagctgcccgagaagtacaaggagatcttcttcgaccagagcaagaacggctacgccggctacatcgacggcggcgccagccaggaggagttctacaagttcatcaagcccatcctggagaagatggacggcaccgaggagctgctggtgaagctgaaccgggaggacctgctgcggaagcagcggaccttcgacaacggcagcatcccccaccagatccacctgggcgagctgcacgccatcctgcggcggcaggaggacttctaccccttcctgaaggacaaccgggagaagatcgagaagatcctgaccttccggatcccctactacgtgggccccctggcccggggcaacagccggttcgcctggatgacccgcaagagcgaggagacaatcaccccctggaacttcgaggaggtggtggacaagggcgccagcgcccagagcttcatcgagcggatgaccaacttcgacaagaacctgcccaacgagaaggtgctgcccaagcacagcctgctgtacgagtacttcaccgtgtacaacgagctgaccaaggtgaagtacgtgaccgagggcatgcggaagcccgccttcctgagcggcgagcagaagaaggccatcgtggacctgctgttcaagaccaaccggaaggtgaccgtgaagcagctgaaggaggactacttcaagaagatcgagtgcttcgacagcgtggagatcagcggcgtggaggaccggttcaacgccagcctgggcacctaccacgacctgctgaagatcatcaaggacaaggacttcctggacaacgaggagaacgaggacatcctggaggacatcgtgctgaccctgaccctgttcgaggaccgggagatgatcgaggagcggctgaagacctacgcccacctgttcgacgacaaggtgatgaagcagctgaagcggcggcggtacaccggctggggccggctgagccggaagctgatcaacggcatccgggacaagcagagcggcaagaccatcctggacttcctcaagagcgacggcttcgccaaccggaacttcatgcagctgatccacgacgacagcctgaccttcaaggaggacatccagaaggcccaggtgagcggccagggcgacagcctgcacgagcacatcgccaacctggccggcagccccgccatcaagaagggcatcctgcagaccgtgaaggtggtggacgagctggtgaaggtgatgggccggcacaagcccgagaacatcgtgatcgagatggcccgggagaaccagaccacccagaagggccagaagaacagccgggagcggatgaagcggatcgaggagggcatcaaggagctgggcagccagatcctgaaggagcaccccgtggagaacacccagctgcagaacgagaagctgtacctgtactacctgcagaacggccgggacatgtacgtggaccaggagctggacatcaaccggctgagcgactacgacgtggaccacatcgtgccccagagcttcctgaaggacgacagcatcgacaacaaggtgctgacccggagcgacaagaaccggggcaagagcgacaacgtgcccagcgaggaggtggtgaagaagatgaagaactactggcggcagctgctgaacgccaagctgatcacccagcggaagttcgacaacctgaccaaggccgagcggggcggcctgagcgagctggacaaggccggcttcatcaagcggcagctggtggagacacggcagatcaccaagcacgtggcccagatcctggacagccggatgaacaccaagtacgacgagaacgacaagctgatccgggaggtgaaggtgatcaccctcaagagcaagctggtgagcgacttccggaaggacttccagttctacaaggtgcgggagatcaacaactaccaccacgcccacgacgcctacctgaacgccgtggtgggcaccgccctgatcaagaagtaccccaagctggagagcgagttcgtgtacggcgactacaaggtgtacgacgtgcggaagatgatcgccaagagcgagcaggagatcggcaaggccaccgccaagtacttcttctacagcaacatcatgaacttcttcaagaccgagatcaccctggccaacggcgagatccggaagcggcccctgatcgagacaaacggcgagacaggcgagatcgtgtgggacaagggccgggacttcgccaccgtgcggaaggtgctgagcatgccccaggtgaacatcgtgaagaagaccgaggtgcagaccggcggcttcagcaaggagagcatcctgcccaagcggaacagcgacaagctgatcgcccggaagaaggactgggaccccaagaagtacggcggcttcgagagccccaccgtggcctacagcgtgctggtggtggccaaggtggagaagggcaagagcaagaagctcaagagcgtgaaggagctgctgggcatcaccatcatggagcggagcagcttcgagaagaaccccatcgacttcctggaggccaagggctacaaggaggtgaagaaggacctgatcatcaagctgcccaagtacagcctgttcgagctggagaacggccggaagcggatgctggccagcgccggcgagctgcagaagggcaacgagctggccctgcccagcaagtacgtgaacttcctgtacctggccagccactacgagaagctgaagggcagccccgaggacaacgagcagaagcagctgttcgtggagcagcacaagcactacctggacgagatcatcgagcagatcagcgagttcagcaagcgggtgatcctggccgacgccaacctggacaaggtgctgagcgcctacaacaagcaccgggacaagcccatccgggagcaggccgagaacatcatccacctgttcaccctgaccaacctgggcgcccccgccgccttcaagtacttcgacaccaccatcgaccggaagcggtacaccagcaccaaggaggtgctggacgccaccctgatccaccagagcatcaccggcctgtacgagacacggatcgacctgagccagctgggcggcgac

SEQ ID NO: 2152 - protein, 1367 aa, synthetic construct
DKKYSIGLAIGTNSVGWAVITDEYKVPSKKFKVLGNTDRHSIKKNLIGALLFDSGETAEATRLKRTARRRYTRRKNRICYLQEIFSNEMAKVDDSFFHRLEESFLVEEDKKHERHPIFGNIVDEVAYHEKYPTIYHLRKKLVDSTDKADLRLIYLALAHMIKFRGHFLIEGDLNPDNSDVDKLFIQLVQTYNQLFEENPINASGVDAKAILSARLSKSRRLENLIAQLPGEKKNGLFGNLIALSLGLTPNFKSNFDLAEDAKLQLSKDTYDDDLDNLLAQIGDQYADLFLAAKNLSDAILLSDILRVNTEITKAPLSASMIKRYDEHHQDLTLLKALVRQQLPEKYKEIFFDQSKNGYAGYIDGGASQEEFYKFIKPILEKMDGTEELLVKLNREDLLRKQRTFDNGSIPHQIHLGELHAILRRQEDFYPFLKDNREKIEKILTFRIPYYVGPLARGNSRFAWMTRKSEETITPWNFEEVVDKGASAQSFIERMTNFDKNLPNEKVLPKHSLLYEYFTVYNELTKVKYVTEGMRKPAFLSGEQKKAIVDLLFKTNRKVTVKQLKEDYFKKIECFDSVEISGVEDRFNASLGTYHDLLKIIKDKDFLDNEENEDILEDIVLTLTLFEDREMIEERLKTYAHLFDDKVMKQLKRRRYTGWGRLSRKLINGIRDKQSGKTILDFLKSDGFANRNFMQLIHDDSLTFKEDIQKAQVSGQGDSLHEHIANLAGSPAIKKGILQTVKVVDELVKVMGRHKPENIVIEMARENQTTQKGQKNSRERMKRIEEGIKELGSQILKEHPVENTQLQNEKLYLYYLQNGRDMYVDQELDINRLSDYDVDHIVPQSFLKDDSIDNKVLTRSDKNRGKSDNVPSEEVVKKMKNYWRQLLNAKLITQRKFDNLTKAERGGLSELDKAGFIKRQLVETRQITKHVAQILDSRMNTKYDENDKLIREVKVITLKSKLVSDFRKDFQFYKVREINNYHHAHDAYLNAVVGTALIKKYPKLESEFVYGDYKVYDVRKMIAKSEQEIGKATAKYFFYSNIMNFFKTEITLANGEIRKRPLIETNGETGEIVWDKGRDFATVRKVLSMPQVNIVKKTEVQTGGFSKESILPKRNSDKLIARKKDWDPKKYGGFESPTVAYSVLVVAKVEKGKSKKLKSVKELLGITIMERSSFEKNPIDFLEAKGYKEVKKDLIIKLPKYSLFELENGRKRMLASAGELQKGNELALPSKYVNFLYLASHYEKLKGSPEDNEQKQLFVEQHKHYLDEIIEQISEFSKRVILADANLDKVLSAYNKHRDKPIREQAENIIHLFTLTNLGAPAAFKYFDTTIDRKRYTSTKEVLDATLIHQSITGLYETRIDLSQLGGD

SEQ ID NO: 2153 - RNA, 4929 nt, synthetic construct
  source 1..4929: mol_type = other RNA
  modified_base 7: mod_base = OTHER; note = N1-methyl pseudouridine
  modified_base 25: mod_base = OTHER; note = N1-methyl pseudouridine
  modified_base 35: mod_base = OTHER; note = N1-methyl pseudouridine
  modified_base 37: mod_base = OTHER; note = N1-methyl pseudouridine
  modified_base 49: mod_base = OTHER; note = N1-methyl pseudouridine
  modified_base 58: mod_base = OTHER; note = N1-methyl pseudouridine
  modified_base 63: mod_base = OTHER; note = N1-methyl pseudouridine
  modified_base 64: mod_base = OTHER; note = N1-methyl pseudouridine
  modified_base 75: mod_base = OTHER; note = N1-methyl pseudouridine
  modified_base 78: mod_base = OTHER; note = N1-methyl pseudouridine
  modified_base 82: mod_base = OTHER; note = N1-methyl pseudouridine
  modified_base 94: mod_base = OTHER; note = N1-methyl pseudouridine
  modified_base 100: mod_base = OTHER; note = N1-methyl pseudouridine
  modified_base 130: mod_base = OTHER; note = N1-methyl pseudouridine
  modified_base 136: mod_base = OTHER; note = N1-methyl pseudouridine
  modified_base 145: mod_base = OTHER; note = N1-methyl pseudouridine
  modified_base 148: mod_base = OTHER; note = N1-methyl pseudouridine
  modified_base 151: mod_base = OTHER; note = N1-methyl pseudouridine
  modified_base 154: mod_base = OTHER; note = N1-methyl pseudouridine
  modified_base 166: mod_base = OTHER; note = N1-methyl pseudouridine
  modified_base 169: mod_base = OTHER; note = N1-methyl pseudouridine
  modified_base 180: mod_base = OTHER; note = N1-methyl pseudouridine
  modified_base 193: mod_base = OTHER; note = N1-methyl pseudouridine
  modified_base 199: mod_base = OTHER; note = N1-methyl pseudouridine
  modified_base 226: mod_base = OTHER; note = N1-methyl pseudouridine
  modified_base 229: mod_base = OTHER; note = N1-methyl pseudouridine
  modified_base 235: mod_base = OTHER; note = N1-methyl pseudouridine
  modified_base 250: mod_base = OTHER; note = N1-methyl pseudouridine
  modified_base 253: mod_base = OTHER; note = N1-methyl pseudouridine
  modified_base 256: mod_base = OTHER; note = N1-methyl pseudouridine
  modified_base 264: mod_base = OTHER; note = N1-methyl pseudouridine
  modified_base 271: mod_base = OTHER; note = N1-methyl pseudouridine
  modified_base 274: mod_base = OTHER; note = N1-methyl pseudouridine
  modified_base 286: mod_base = OTHER; note = N1-methyl pseudouridine
  modified_base 288: mod_base = OTHER; note = N1-methyl pseudouridine
  modified_base 292: mod_base = OTHER; note = N1-methyl pseudouridine
  modified_base 297: mod_base = OTHER; note = N1-methyl pseudouridine
  modified_base 298: mod_base = OTHER; note = N1-methyl pseudouridine
  modified_base 306: mod_base = OTHER; note = N1-methyl pseudouridine
  modified_base 310: mod_base = OTHER; note = N1-methyl pseudouridine
  modified_base 313: mod_base = OTHER; note = N1-methyl pseudouridine
  modified_base 315: mod_base = OTHER; note = N1-methyl pseudouridine
  modified_base 328: mod_base = OTHER; note = N1-methyl pseudouridine
  modified_base 331: mod_base = OTHER; note = N1-methyl pseudouridine
  modified_base 343: mod_base = OTHER; note = N1-methyl pseudouridine
  modified_base 352: mod_base = OTHER; note = N1-methyl pseudouridine
  modified_base 355: mod_base = OTHER; note = N1-methyl pseudouridine
  modified_base 357: mod_base = OTHER; note = N1-methyl pseudouridine
  modified_base 358: mod_base = OTHER; note = N1-methyl pseudouridine
  modified_base 364: mod_base = OTHER; note = N1-methyl pseudouridine
  modified_base 397: mod_base = OTHER; note = N1-methyl pseudouridine
  modified_base 400: mod_base = OTHER; note = N1-methyl pseudouridine
  modified_base 406: mod_base = OTHER; note = N1-methyl pseudouridine
  modified_base 409: mod_base = OTHER; note = N1-methyl pseudouridine
  modified_base 424: mod_base = OTHER; note = N1-methyl pseudouridine
  modified_base 436: mod_base = OTHER; note = N1-methyl pseudouridine
  modified_base 442: mod_base = OTHER; note = N1-methyl pseudouridine
  modified_base 454: mod_base = OTHER; note = N1-methyl pseudouridine
  modified_base 457: mod_base = OTHER; note = N1-methyl pseudouridine
  modified_base 468: mod_base = OTHER; note = N1-methyl pseudouridine
  modified_base 478: mod_base = OTHER; note = N1-methyl pseudouridine
  modified_base 481: mod_base = OTHER; note = N1-methyl pseudouridine
  modified_base 483: mod_base = OTHER; note = N1-methyl pseudouridine
  modified_base 489: mod_base = OTHER; note = N1-methyl pseudouridine
  modified_base 490: mod_base = OTHER; note = N1-methyl pseudouridine
  modified_base 492: mod_base = OTHER; note = N1-methyl pseudouridine
  modified_base 493: mod_base = OTHER; note = N1-methyl pseudouridine
  modified_base 499: mod_base = OTHER; note = N1-methyl pseudouridine
  modified_base 511: mod_base = OTHER; note = N1-methyl pseudouridine
  modified_base 513: mod_base = OTHER; note = N1-methyl pseudouridine
  modified_base 514: mod_base = OTHER; note = N1-methyl pseudouridine
  modified_base 654: mod_base = OTHER; note = N1-methyl pseudouridine
  modified_base 661: mod_base = OTHER; note = N1-methyl pseudouridine
  modified_base 667: mod_base = OTHER; note = N1-methyl pseudouridine
  modified_base 673: mod_base = OTHER; note = N1-methyl pseudouridine
  modified_base 688: mod_base = OTHER; note = N1-methyl pseudouridine
  modified_base 693: mod_base = OTHER; note = N1-methyl pseudouridine
  modified_base 700: mod_base = OTHER; note = N1-methyl pseudouridine
  modified_base 703: mod_base = OTHER; note = N1-methyl pseudouridine
  modified_base 714: mod_base = OTHER; note = N1-methyl pseudouridine
  modified_base 721: mod_base = OTHER; note = N1-methyl pseudouridine
  modified_base 735: mod_base = OTHER; note = N1-methyl pseudouridine
  modified_base 736: mod_base = OTHER; note = N1-methyl pseudouridine
  modified_base 742: mod_base = OTHER; note = N1-methyl pseudouridine
  modified_base 745: mod_base = OTHER; note = N1-methyl pseudouridine
  modified_base 769: mod_base = OTHER; note = N1-methyl pseudouridine
  modified_base 781: mod_base = OTHER; note = N1-methyl pseudouridine
  modified_base 784: mod_base = OTHER; note = N1-methyl pseudouridine
  modified_base 793: mod_base = OTHER; note = N1-methyl pseudouridine
  modified_base 796: mod_base = OTHER; note = N1-methyl pseudouridine
  modified_base 798: mod_base = OTHER; note = N1-methyl pseudouridine
  modified_base 799: mod_base = OTHER; note = N1-methyl pseudouridine
  modified_base 832: mod_base = OTHER; note = N1-methyl pseudouridine
  modified_base 855: mod_base = OTHER; note = N1-methyl pseudouridine
  modified_base 877: mod_base = OTHER; note = N1-methyl pseudouridine
  modified_base 879: mod_base = OTHER; note = N1-methyl pseudouridine
  modified_base 882: mod_base = OTHER; note = N1-methyl pseudouridine
  modified_base 886: mod_base = OTHER; note = N1-methyl pseudouridine
  modified_base 895: mod_base = OTHER; note = N1-methyl pseudouridine
  modified_base 897: mod_base = OTHER; note = N1-methyl pseudouridine
  modified_base 898: mod_base = OTHER; note = N1-methyl pseudouridine
  modified_base 910: mod_base = OTHER; note = N1-methyl pseudouridine
  modified_base 919: mod_base = OTHER; note = N1-methyl pseudouridine
  modified_base 930: mod_base = OTHER; note = N1-methyl pseudouridine
  modified_base 931: mod_base = OTHER; note = N1-methyl pseudouridine
  modified_base 933: mod_base = OTHER; note = N1-methyl pseudouridine
  modified_base 934: mod_base = OTHER; note = N1-methyl pseudouridine
  modified_base 943: mod_base = OTHER; note = N1-methyl pseudouridine
  modified_base 954: mod_base = OTHER; note = N1-methyl pseudouridine
  modified_base 955: mod_base = OTHER; note = N1-methyl pseudouridine
  modified_base 958: mod_base = OTHER; note = N1-methyl pseudouridine
  modified_base 961: mod_base = OTHER; note = N1-methyl pseudouridine
  modified_base 994: mod_base = OTHER; note = N1-methyl pseudouridine
  modified_base 996: mod_base = OTHER; note = N1-methyl pseudouridine
  modified_base 997: mod_base = OTHER; note = N1-methyl pseudouridine
  modified_base 1006: mod_base = OTHER; note = N1-methyl pseudouridine
  modified_base 1009: mod_base = OTHER; note = N1-methyl pseudouridine
  modified_base 1018: mod_base = OTHER; note = N1-methyl pseudouridine
  modified_base 1023: mod_base = OTHER; note = N1-methyl pseudouridine
  modified_base 1035: mod_base = OTHER; note = N1-methyl pseudouridine
  modified_base 1045: mod_base = OTHER; note = N1-methyl pseudouridine
  modified_base 1047: mod_base = OTHER; note = N1-methyl pseudouridine
  modified_base 1054: mod_base = OTHER; note = N1-methyl pseudouridine
  modified_base 1066: mod_base = OTHER; note = N1-methyl pseudouridine
  modified_base 1069: mod_base = OTHER; note = N1-methyl pseudouridine
  modified_base 1093: mod_base = OTHER; note = N1-methyl pseudouridine
  modified_base 1099: mod_base = OTHER; note = N1-methyl pseudouridine
  modified_base 1102: mod_base = OTHER; note = N1-methyl pseudouridine
  modified_base 1104: mod_base = OTHER; note = N1-methyl pseudouridine
  modified_base 1108: mod_base = OTHER; note = N1-methyl pseudouridine
  modified_base 1114: mod_base = OTHER; note = N1-methyl pseudouridine
  modified_base 1123: mod_base = OTHER; note = N1-methyl pseudouridine
  modified_base 1126: mod_base = OTHER; note = N1-methyl pseudouridine
  modified_base 1131: mod_base = OTHER; note = N1-methyl pseudouridine
  modified_base 1132: mod_base = OTHER; note = N1-methyl pseudouridine
  modified_base 1143: mod_base = OTHER; note = N1-methyl pseudouridine
  modified_base 1144: mod_base = OTHER; note = N1-methyl pseudouridine
  modified_base 1147: mod_base = OTHER; note = N1-methyl pseudouridine
  modified_base 1150: mod_base = OTHER; note = N1-methyl pseudouridine
  modified_base 1162: mod_base = OTHER; note = N1-methyl pseudouridine
  modified_base 1183: mod_base = OTHER; note = N1-methyl pseudouridine
  modified_base 1192: mod_base = OTHER; note = N1-methyl pseudouridine
  modified_base 1194: mod_base = OTHER; note = N1-methyl pseudouridine
  modified_base 1195: mod_base = OTHER; note = N1-methyl pseudouridine
  modified_base 1198: mod_base = OTHER; note = N1-methyl pseudouridine
  modified_base 1204: mod_base = OTHER; note = N1-methyl pseudouridine
  modified_base 1207: mod_base = OTHER; note = N1-methyl pseudouridine
  modified_base 1215: mod_base = OTHER; note = N1-methyl pseudouridine
  modified_base 1225: mod_base = OTHER; note = N1-methyl pseudouridine
  modified_base 1227: mod_base = OTHER; note = N1-methyl pseudouridine
  modified_base 1228: mod_base = OTHER; note = N1-methyl pseudouridine
  modified_base 1243: mod_base = OTHER; note = N1-methyl pseudouridine
  modified_base 1258: mod_base = OTHER; note = N1-methyl pseudouridine
  modified_base 1273: mod_base = OTHER; note = N1-methyl pseudouridine
  modified_base 1276: mod_base = OTHER; note = N1-methyl pseudouridine
  modified_base 1288: mod_base = OTHER; note = N1-methyl pseudouridine
  modified_base 1306: mod_base = OTHER; note = N1-methyl pseudouridine
  modified_base 1315: mod_base = OTHER; note = N1-methyl pseudouridine
  modified_base 1318: mod_base = OTHER; note = N1-methyl pseudouridine
  modified_base 1327: mod_base = OTHER; note = N1-methyl pseudouridine
  modified_base 1351: mod_base = OTHER; note = N1-methyl pseudouridine
  modified_base 1353: mod_base = OTHER; note = N1-methyl pseudouridine
  modified_base 1354: mod_base = OTHER; note = N1-methyl pseudouridine
  modified_base 1363: mod_base = OTHER; note = N1-methyl pseudouridine
  modified_base 1366: mod_base = OTHER; note = N1-methyl pseudouridine
  modified_base 1372: mod_base = OTHER; note = N1-methyl pseudouridine
  modified_base 1378: mod_base = OTHER; note = N1-methyl pseudouridine
  modified_base 1384: mod_base = OTHER; note = N1-methyl pseudouridine
  modified_base 1395: mod_base = OTHER; note = N1-methyl pseudouridine
  modified_base 1396: mod_base = OTHER; note = N1-methyl pseudouridine
  modified_base 1407: mod_base = OTHER; note = N1-methyl pseudouridine
  modified_base 1408: mod_base = OTHER; note = N1-methyl pseudouridine
  modified_base 1414: mod_base = OTHER; note = N1-methyl pseudouridine
  modified_base 1432: mod_base = OTHER; note = N1-methyl pseudouridine
  modified_base 1438: mod_base = OTHER; note = N1-methyl pseudouridine
  modified_base 1452: mod_base = OTHER; note = N1-methyl pseudouridine
  modified_base 1465: mod_base = OTHER; note = N1-methyl pseudouridine
  modified_base 1474: mod_base = OTHER; note = N1-methyl pseudouridine
  modified_base 1477: mod_base = OTHER; note = N1-methyl pseudouridine
  modified_base 1486: mod_base = OTHER; note = N1-methyl pseudouridine
  modified_base 1497: mod_base = OTHER; note = N1-methyl pseudouridine
  modified_base 1507: mod_base = OTHER; note = N1-methyl pseudouridine
  modified_base 1509: mod_base = OTHER; note = N1-methyl pseudouridine
  modified_base 1510: mod_base = OTHER; note = N1-methyl pseudouridine
  modified_base 1513: mod_base = OTHER; note = N1-methyl pseudouridine
  modified_base 1528: mod_base = OTHER; note = N1-methyl pseudouridine
  modified_base 1540: mod_base = OTHER; note = N1-methyl pseudouridine
  modified_base 1543: mod_base = OTHER; note = N1-methyl pseudouridine
  modified_base 1546: mod_base = OTHER; note = N1-methyl pseudouridine
  modified_base 1555: mod_base = OTHER; note = N1-methyl pseudouridine
  modified_base 1558: mod_base = OTHER; note = N1-methyl pseudouridine
  modified_base 1564: mod_base = OTHER; note = N1-methyl pseudouridine
  modified_base 1576: mod_base = OTHER; note = N1-methyl pseudouridine
  modified_base 1591: mod_base = OTHER; note = N1-methyl pseudouridine
  modified_base 1603: mod_base = OTHER; note = N1-methyl pseudouridine
  modified_base 1606: mod_base = OTHER; note = N1-methyl pseudouridine
  modified_base 1614: mod_base = OTHER; note = N1-methyl pseudouridine
  modified_base 1636: mod_base = OTHER; note = N1-methyl pseudouridine
  modified_base 1642: mod_base = OTHER; note = N1-methyl pseudouridine
  modified_base 1645: mod_base = OTHER; note = N1-methyl pseudouridine
  modified_base 1654: mod_base = OTHER; note = N1-methyl pseudouridine
  modified_base 1657: mod_base = OTHER; note = N1-methyl pseudouridine
  modified_base 1669: mod_base = OTHER; note = N1-methyl pseudouridine
  modified_base 1680: mod_base = OTHER; note = N1-methyl pseudouridine
  modified_base 1690: mod_base = OTHER; note = N1-methyl pseudouridine
  modified_base 1692: mod_base = OTHER; note = N1-methyl pseudouridine
  modified_base 1693: mod_base = OTHER; note = N1-methyl pseudouridine
  modified_base 1695: mod_base = OTHER; note = N1-methyl pseudouridine
  modified_base 1696: mod_base = OTHER; note = N1-methyl pseudouridine
  modified_base 1716: mod_base = OTHER; note = N1-methyl pseudouridine
  modified_base 1725: mod_base = OTHER; note = N1-methyl pseudouridine
  modified_base 1729: mod_base = OTHER; note = N1-methyl pseudouridine
  modified_base 1755: mod_base = OTHER; note = N1-methyl pseudouridine
  modified_base 1756: mod_base = OTHER; note = N1-methyl pseudouridine
  modified_base 1758: mod_base = OTHER; note = N1-methyl pseudouridine
  modified_base 1764: mod_base = OTHER; note = N1-methyl pseudouridine
  modified_base 1765: mod_base = OTHER; note = N1-methyl pseudouridine
  modified_base 1768: mod_base = OTHER; note = N1-methyl pseudouridine
  modified_base 1777: mod_base = OTHER; note = N1-methyl pseudouridine
  modified_base 1780: mod_base = OTHER; note = N1-methyl pseudouridine
  modified_base 1789: mod_base = OTHER; note = N1-methyl pseudouridine
  modified_base 1807: mod_base = OTHER; note = N1-methyl pseudouridine
  modified_base 1810: mod_base = OTHER; note = N1-methyl pseudouridine
  modified_base 1813: mod_base = OTHER; note = N1-methyl pseudouridine
  modified_base 1819: mod_base = OTHER; note = N1-methyl pseudouridine
  modified_base 1834: mod_base = OTHER; note = N1-methyl pseudouridine
  modified_base 1837: mod_base = OTHER; note = N1-methyl pseudouridine
  modified_base 1854: mod_base = OTHER; note = N1-methyl pseudouridine
  modified_base 1855: mod_base = OTHER; note = N1-methyl pseudouridine
  modified_base 1870: mod_base = OTHER; note = N1-methyl pseudouridine
  modified_base 1882: mod_base = OTHER; note = N1-methyl pseudouridine
  modified_base 1888: mod_base = OTHER; note = N1-methyl pseudouridine
  modified_base 1897: mod_base = OTHER; note = N1-methyl pseudouridine
  modified_base 1906: mod_base = OTHER; note = N1-methyl pseudouridine
  modified_base 1909: mod_base = OTHER; note = N1-methyl pseudouridine
  modified_base 1926: mod_base = OTHER; note = N1-methyl pseudouridine
  modified_base 1927: mod_base = OTHER; note = N1-methyl pseudouridine
  modified_base 1929: mod_base = OTHER; note = N1-methyl pseudouridine
  modified_base 1935: mod_base = OTHER; note = N1-methyl pseudouridine
  modified_base 1936: mod_base = OTHER; note = N1-methyl pseudouridine
  modified_base 1939: mod_base = OTHER; note = N1-methyl pseudouridine
  modified_base 1960: mod_base = OTHER; note = N1-methyl pseudouridine
  modified_base 1969: mod_base = OTHER; note = N1-methyl pseudouridine
  modified_base 1972: mod_base = OTHER; note = N1-methyl pseudouridine
  modified_base 1977: mod_base = OTHER; note = N1-methyl pseudouridine
  modified_base 1978: mod_base = OTHER; note = N1-methyl pseudouridine
  modified_base 1984: mod_base = OTHER; note = N1-methyl pseudouridine
  modified_base 1989: mod_base = OTHER; note = N1-methyl pseudouridine
  modified_base 1992: mod_base = OTHER; note = N1-methyl pseudouridine
  modified_base 1996: mod_base = OTHER; note = N1-methyl pseudouridine
  modified_base 2005: mod_base = OTHER; note = N1-methyl pseudouridine
  modified_base 2025: mod_base = OTHER; note = N1-methyl pseudouridine
  modified_base 2026: mod_base = OTHER; note = N1-methyl pseudouridine
  modified_base 2031: mod_base = OTHER; note = N1-methyl pseudouridine
  modified_base 2035: mod_base = OTHER; note = N1-methyl pseudouridine
  modified_base 2059: mod_base = OTHER; note = N1-methyl pseudouridine
  modified_base 2067: mod_base = OTHER; note = N1-methyl pseudouridine
  modified_base 2073: mod_base = OTHER; note = N1-methyl pseudouridine
  modified_base 2074: mod_base = OTHER; note = N1-methyl pseudouridine
  modified_base 2083: mod_base = OTHER; note = N1-methyl pseudouridine
  modified_base 2086: mod_base = OTHER; note = N1-methyl pseudouridine
  modified_base 2112: mod_base = OTHER; note = N1-methyl pseudouridine
  modified_base 2113: mod_base = OTHER; note = N1-methyl pseudouridine
  modified_base 2116: mod_base = OTHER; note = N1-methyl pseudouridine
  modified_base 2125: mod_base = OTHER; note = N1-methyl pseudouridine
  modified_base 2133: mod_base = OTHER; note = N1-methyl pseudouridine
  modified_base 2134: mod_base = OTHER; note = N1-methyl pseudouridine
  modified_base 2146: mod_base = OTHER; note = N1-methyl pseudouridine
  modified_base 2161: mod_base = OTHER; note = N1-methyl pseudouridine
  modified_base 2164: mod_base = OTHER; note = N1-methyl pseudouridine
  modified_base 2179: mod_base = OTHER; note = N1-methyl pseudouridine
  modified_base 2182: mod_base = OTHER; note = N1-methyl pseudouridine
  modified_base 2184: mod_base = OTHER; note = N1-methyl pseudouridine
  modified_base 2190: mod_base = OTHER; note = N1-methyl pseudouridine
  modified_base 2193: mod_base = OTHER; note = N1-methyl pseudouridine
  modified_base 2194: mod_base = OTHER; note = N1-methyl pseudouridine
  modified_base 2200: mod_base = OTHER; note = N1-methyl pseudouridine
  modified_base 2202: mod_base = OTHER; note = N1-methyl pseudouridine
  modified_base 2212: mod_base = OTHER; note = N1-methyl pseudouridine
  modified_base 2221: mod_base = OTHER; note = N1-methyl pseudouridine
  modified_base 2226: mod_base = OTHER; note = N1-methyl pseudouridine
  modified_base 2230: mod_base = OTHER; note = N1-methyl pseudouridine
  modified_base 2242: mod_base = OTHER; note = N1-methyl pseudouridine
  modified_base 2256: mod_base = OTHER; note = N1-methyl pseudouridine
  modified_base 2257: mod_base = OTHER; note = N1-methyl pseudouridine
  modified_base 2260: mod_base = OTHER; note = N1-methyl pseudouridine
  modified_base 2284: mod_base = OTHER; note = N1-methyl pseudouridine
  modified_base 2287: mod_base = OTHER; note = N1-methyl pseudouridine
  modified_base 2293: mod_base = OTHER; note = N1-methyl pseudouridine
  modified_base 2296: mod_base = OTHER; note = N1-methyl pseudouridine
  modified_base 2298: mod_base = OTHER; note = N1-methyl pseudouridine
  modified_base 2299: mod_base = OTHER; note = N1-methyl pseudouridine
  modified_base 2317: mod_base = OTHER; note = N1-methyl pseudouridine
  modified_base 2323: mod_base = OTHER; note = N1-methyl pseudouridine
  modified_base 2332: mod_base = OTHER; note = N1-methyl pseudouridine
  modified_base 2343: mod_base = OTHER; note = N1-methyl pseudouridine
  modified_base 2346: mod_base = OTHER; note = N1-methyl pseudouridine
  modified_base 2347: mod_base = OTHER; note = N1-methyl pseudouridine
  modified_base 2356: mod_base = OTHER; note = N1-methyl pseudouridine
  modified_base 2361: mod_base = OTHER; note = N1-methyl pseudouridine
  modified_base 2364: mod_base = OTHER; note = N1-methyl pseudouridine
  modified_base 2365: mod_base = OTHER; note = N1-methyl pseudouridine
  modified_base 2374: mod_base = OTHER; note = N1-methyl pseudouridine
  modified_base 2380: mod_base = OTHER; note = N1-methyl pseudouridine
  modified_base 2389: mod_base = OTHER; note = N1-methyl pseudouridine
  modified_base 2400: mod_base = OTHER; note = N1-methyl pseudouridine
  modified_base 2401: mod_base = OTHER; note = N1-methyl pseudouridine
  modified_base 2413: mod_base = OTHER; note = N1-methyl pseudouridine
  modified_base 2421: mod_base = OTHER; note = N1-methyl pseudouridine
  modified_base 2431: mod_base = OTHER; note = N1-methyl pseudouridine
  modified_base 2434: mod_base = OTHER; note = N1-methyl pseudouridine
  modified_base 2440: mod_base = OTHER; note = N1-methyl pseudouridine
  modified_base 2443: mod_base = OTHER; note = N1-methyl pseudouridine
  modified_base 2457: mod_base = OTHER; note = N1-methyl pseudouridine
  modified_base 2458: mod_base = OTHER; note = N1-methyl pseudouridine
  modified_base 2461: mod_base = OTHER; note = N1-methyl pseudouridine
  modified_base 2485: mod_base = OTHER; note = N1-methyl pseudouridine
  modified_base 2488: mod_base = OTHER; note = N1-methyl pseudouridine
  modified_base 2497: mod_base = OTHER; note = N1-methyl pseudouridine
  modified_base 2500: mod_base = OTHER; note = N1-methyl pseudouridine
  modified_base 2503: mod_base = OTHER; note = N1-methyl pseudouridine
  modified_base 2509: mod_base = OTHER; note = N1-methyl pseudouridine
  modified_base 2515: mod_base = OTHER; note = N1-methyl pseudouridine
  modified_base 2517: mod_base = OTHER; note = N1-methyl pseudouridine
  modified_base 2518: mod_base = OTHER; note = N1-methyl pseudouridine
  modified_base 2533: mod_base = OTHER; note = N1-methyl pseudouridine
  modified_base 2536: mod_base = OTHER; note = N1-methyl pseudouridine
  modified_base 2548: mod_base = OTHER; note = N1-methyl pseudouridine
  modified_base 2556: mod_base = OTHER; note = N1-methyl pseudouridine
  modified_base 2566: mod_base = OTHER; note = N1-methyl pseudouridine
  modified_base 2568: mod_base = OTHER; note = N1-methyl pseudouridine
  modified_base 2569: mod_base = OTHER; note = N1-methyl pseudouridine
  modified_base 2581: mod_base = OTHER; note = N1-methyl pseudouridine
  modified_base 2584: mod_base = OTHER; note = N1-methyl pseudouridine
  modified_base 2593: mod_base = OTHER; note = N1-methyl pseudouridine
  modified_base 2607: mod_base = OTHER; note = N1-methyl pseudouridine
  modified_base 2616: mod_base = OTHER; note = N1-methyl pseudouridine
  modified_base 2626: mod_base = OTHER; note = N1-methyl pseudouridine
  modified_base 2638: mod_base = OTHER; note = N1-methyl pseudouridine
  modified_base 2641: mod_base = OTHER; note = N1-methyl pseudouridine
  modified_base 2650: mod_base = OTHER; note = N1-methyl pseudouridine
  modified_base 2677: mod_base = OTHER; note = N1-methyl pseudouridine
  modified_base 2680: mod_base = OTHER; note = N1-methyl pseudouridine
  modified_base 2685: mod_base = OTHER; note = N1-methyl pseudouridine
  modified_base 2686: mod_base = OTHER; note = N1-methyl pseudouridine
  modified_base 2689: mod_base = OTHER; note = N1-methyl pseudouridine
  modified_base 2703: mod_base = OTHER; note = N1-methyl pseudouridine
  modified_base 2704: mod_base = OTHER; note = N1-methyl pseudouridine
  modified_base 2718: mod_base = OTHER; note = N1-methyl pseudouridine
  modified_base 2719: mod_base = OTHER; note = N1-methyl pseudouridine
  modified_base 2722: mod_base = OTHER; note = N1-methyl pseudouridine
  modified_base 2728: mod_base = OTHER; note = N1-methyl pseudouridine
  modified_base 2731: mod_base = OTHER; note = N1-methyl pseudouridine
  modified_base 2746: mod_base = OTHER; note = N1-methyl pseudouridine
  modified_base 2751: mod_base = OTHER; note = N1-methyl pseudouridine
  modified_base 2752: mod_base = OTHER; note = N1-methyl pseudouridine
  modified_base 2764: mod_base = OTHER; note = N1-methyl pseudouridine
  modified_base 2779: mod_base = OTHER; note = N1-methyl pseudouridine
  modified_base 2800: mod_base = OTHER; note = N1-methyl pseudouridine
  modified_base 2812: mod_base = OTHER; note = N1-methyl pseudouridine
  modified_base 2821: mod_base = OTHER; note = N1-methyl pseudouridine
  modified_base 2839: mod_base = OTHER; note = N1-methyl pseudouridine
  modified_base 2851: mod_base = OTHER; note = N1-methyl pseudouridine
  modified_base 2854: mod_base = OTHER; note = N1-methyl pseudouridine
  modified_base 2863: mod_base = OTHER; note = N1-methyl pseudouridine
  modified_base 2869: mod_base = OTHER; note = N1-methyl pseudouridine
  modified_base 2872: mod_base = OTHER; note = N1-methyl pseudouridine
  modified_base 2881: mod_base = OTHER; note = N1-methyl pseudouridine
  modified_base 2884: mod_base = OTHER; note = N1-methyl pseudouridine
  modified_base 2890: mod_base = OTHER; note = N1-methyl pseudouridine
  modified_base 2893: mod_base = OTHER; note = N1-methyl pseudouridine
  modified_base 2917: mod_base = OTHER; note = N1-methyl pseudouridine
  modified_base 2920: mod_base = OTHER; note = N1-methyl pseudouridine
  modified_base 2923: mod_base = OTHER; note = N1-methyl pseudouridine
  modified_base 2929: mod_base = OTHER; note = N1-methyl pseudouridine
  modified_base 2983: mod_base = OTHER; note = N1-methyl pseudouridine
  modified_base 2992: mod_base = OTHER; note = N1-methyl pseudouridine
  modified_base 3004: mod_base = OTHER; note = N1-methyl pseudouridine
  modified_base 3013: mod_base = OTHER; note = N1-methyl pseudouridine
  modified_base 3025: mod_base = OTHER; note = N1-methyl pseudouridine
  modified_base 3028: mod_base = OTHER; note = N1-methyl pseudouridine
  modified_base 3043: mod_base = OTHER; note = N1-methyl pseudouridine
  modified_base 3058: mod_base = OTHER; note = N1-methyl pseudouridine
  modified_base 3073: mod_base = OTHER; note = N1-methyl pseudouridine
  modified_base 3075: mod_base = OTHER; note = N1-methyl pseudouridine
  modified_base 3079: mod_base = OTHER; note = N1-methyl pseudouridine
  modified_base 3081: mod_base = OTHER; note = N1-methyl pseudouridine
  modified_base 3084: mod_base = OTHER; note = N1-methyl pseudouridine
  modified_base 3088: mod_base = OTHER; note = N1-methyl pseudouridine
  modified_base 3106: mod_base = OTHER; note = N1-methyl pseudouridine
  modified_base 3108: mod_base = OTHER; note = N1-methyl pseudouridine
  modified_base 3112: mod_base = OTHER; note = N1-methyl pseudouridine
  modified_base 3124: mod_base = OTHER; note = N1-methyl pseudouridine
  modified_base 3130: mod_base = OTHER; note = N1-methyl pseudouridine
  modified_base 3139: mod_base = OTHER; note = N1-methyl pseudouridine
  modified_base 3147: mod_base = OTHER; note = N1-methyl pseudouridine
  modified_base 3154: mod_base = OTHER; note = N1-methyl pseudouridine
  modified_base 3163: mod_base = OTHER; note = N1-methyl pseudouridine
  modified_base 3166: mod_base = OTHER; note = N1-methyl pseudouridine
  modified_base 3177: mod_base = OTHER; note = N1-methyl pseudouridine
  modified_base 3178: mod_base = OTHER; note = N1-methyl pseudouridine
  modified_base 3181: mod_base = OTHER; note = N1-methyl pseudouridine
  modified_base 3196: mod_base = OTHER; note = N1-methyl pseudouridine
  modified_base 3208: mod_base = OTHER; note = N1-methyl pseudouridine
  modified_base 3211: mod_base = OTHER; note = N1-methyl pseudouridine
  modified_base 3250: mod_base = OTHER; note = N1-methyl pseudouridine
  modified_base 3265: mod_base = OTHER; note = N1-methyl pseudouridine
  modified_base 3268: mod_base = OTHER; note = N1-methyl pseudouridine
  modified_base 3277: mod_base = OTHER; note = N1-methyl pseudouridine
  modified_base 3285: mod_base = OTHER; note = N1-methyl pseudouridine
  modified_base 3288: mod_base = OTHER; note = N1-methyl pseudouridine
  modified_base 3298: mod_base = OTHER; note = N1-methyl pseudouridine
  modified_base 3301: mod_base = OTHER; note = N1-methyl pseudouridine
  modified_base 3313: mod_base = OTHER; note = N1-methyl pseudouridine
  modified_base 3316: mod_base = OTHER; note = N1-methyl pseudouridine
  modified_base 3330: mod_base = OTHER; note = N1-methyl pseudouridine
  modified_base 3331: mod_base = OTHER; note = N1-methyl pseudouridine
  modified_base 3340: mod_base = OTHER; note = N1-methyl pseudouridine
  modified_base 3364: mod_base = OTHER; note = N1-methyl pseudouridine
  modified_base 3373: mod_base = OTHER; note = N1-methyl pseudouridine
  modified_base 3387: mod_base = OTHER; note = N1-methyl pseudouridine
  modified_base 3388: mod_base = OTHER; note = N1-methyl pseudouridine
  modified_base 3391: mod_base = OTHER; note = N1-methyl pseudouridine
  modified_base 3403: mod_base = OTHER; note = N1-methyl pseudouridine
  modified_base 3406: mod_base = OTHER; note = N1-methyl pseudouridine
  modified_base 3421: mod_base = OTHER; note = N1-methyl pseudouridine
  modified_base 3433: mod_base = OTHER; note = N1-methyl pseudouridine
  modified_base 3442: mod_base = OTHER; note = N1-methyl pseudouridine
  modified_base 3445: mod_base = OTHER; note = N1-methyl pseudouridine
  modified_base 3457: mod_base = OTHER; note = N1-methyl pseudouridine
  modified_base 3468: mod_base = OTHER; note = N1-methyl pseudouridine
  modified_base 3487: mod_base = OTHER; note = N1-methyl pseudouridine
  modified_base 3490: mod_base = OTHER; note = N1-methyl pseudouridine
  modified_base 3499: mod_base = OTHER; note = N1-methyl pseudouridine
  modified_base 3505: mod_base = OTHER; note = N1-methyl pseudouridine
  modified_base 3508: mod_base = OTHER; note = N1-methyl pseudouridine
  modified_base 3514: mod_base = OTHER; note = N1-methyl pseudouridine
  modified_base 3526: mod_base = OTHER; note = N1-methyl pseudouridine
  modified_base 3529: mod_base = OTHER; note = N1-methyl pseudouridine
  modified_base 3537: mod_base = OTHER; note = N1-methyl pseudouridine
  modified_base 3538: mod_base = OTHER; note = N1-methyl pseudouridine
  modified_base 3549: mod_base = OTHER; note = N1-methyl pseudouridine
  modified_base 3550: mod_base = OTHER; note = N1-methyl pseudouridine
  modified_base 3555: mod_base = OTHER; note = N1-methyl pseudouridine
  modified_base 3556: mod_base = OTHER; note = N1-methyl pseudouridine
  modified_base 3558: mod_base = OTHER; note = N1-methyl pseudouridine
  modified_base 3565: mod_base = OTHER; note = N1-methyl pseudouridine
  modified_base 3574: mod_base = OTHER; note = N1-methyl pseudouridine
  modified_base 3582: mod_base = OTHER; note = N1-methyl pseudouridine
  modified_base 3603: mod_base = OTHER; note = N1-methyl pseudouridine
  modified_base 3607: mod_base = OTHER; note = N1-methyl pseudouridine
  modified_base 3616: mod_base = OTHER; note = N1-methyl pseudouridine
  modified_base 3619: mod_base = OTHER; note = N1-methyl pseudouridine
  modified_base 3631: mod_base = OTHER; note = N1-methyl pseudouridine
  modified_base 3634: mod_base = OTHER; note = N1-methyl pseudouridine
  modified_base 3642: mod_base = OTHER; note = N1-methyl pseudouridine
  modified_base 3652: mod_base = OTHER; note = N1-methyl pseudouridine
  modified_base 3663: mod_base = OTHER; note = N1-methyl pseudouridine
  modified_base 3664: mod_base = OTHER; note = N1-methyl pseudouridine
  modified_base 3667: mod_base = OTHER; note = N1-methyl pseudouridine
  modified_base 3669: mod_base = OTHER; note = N1-methyl pseudouridine
  modified_base 3678: mod_base = OTHER; note = N1-methyl pseudouridine
  modified_base 3685: mod_base = OTHER; note = N1-methyl pseudouridine
  modified_base 3687: mod_base = OTHER; note = N1-methyl pseudouridine
  modified_base 3694: mod_base = OTHER; note = N1-methyl pseudouridine
  modified_base 3703: mod_base = OTHER; note = N1-methyl pseudouridine
  modified_base 3706: mod_base = OTHER; note = N1-methyl pseudouridine
  modified_base 3727: mod_base = OTHER; note = N1-methyl pseudouridine
  modified_base 3747: mod_base = OTHER; note = N1-methyl pseudouridine
  modified_base 3750: mod_base = OTHER; note = N1-methyl pseudouridine
  modified_base 3751: mod_base = OTHER; note = N1-methyl pseudouridine
  modified_base 3753: mod_base = OTHER; note = N1-methyl pseudouridine
  modified_base 3754: mod_base = OTHER; note = N1-methyl pseudouridine
  modified_base 3756: mod_base = OTHER; note = N1-methyl pseudouridine
  modified_base 3766: mod_base = OTHER; note = N1-methyl pseudouridine
  modified_base 3769: mod_base = OTHER; note = N1-methyl pseudouridine
  modified_base 3774: mod_base = OTHER; note = N1-methyl pseudouridine
  modified_base 3775: mod_base = OTHER; note = N1-methyl pseudouridine
  modified_base 3777: mod_base = OTHER; note = N1-methyl pseudouridine
  modified_base 3778: mod_base = OTHER; note = N1-methyl pseudouridine
  modified_base 3790: mod_base = OTHER; note = N1-methyl pseudouridine
  modified_base 3796: mod_base = OTHER; note = N1-methyl pseudouridine
  modified_base 3811: mod_base = OTHER; note = N1-methyl pseudouridine
  modified_base 3826: mod_base = OTHER; note = N1-methyl pseudouridine
  modified_base 3829: mod_base = OTHER; note = N1-methyl pseudouridine
  modified_base 3856: mod_base = OTHER; note = N1-methyl pseudouridine
  modified_base 3859: mod_base = OTHER; note = N1-methyl pseudouridine
  modified_base 3861: mod_base = OTHER; note = N1-methyl pseudouridine
  modified_base 3879: mod_base = OTHER; note = N1-methyl pseudouridine
  modified_base 3880: mod_base = OTHER; note = N1-methyl pseudouridine
  modified_base 3889: mod_base = OTHER; note = N1-methyl pseudouridine
  modified_base 3898: mod_base = OTHER; note = N1-methyl pseudouridine
  modified_base 3901: mod_base = OTHER; note = N1-methyl pseudouridine
  modified_base 3907: mod_base = OTHER; note = N1-methyl pseudouridine
  modified_base 3916: mod_base = OTHER; note = N1-methyl pseudouridine
  modified_base 3922: mod_base = OTHER; note = N1-methyl pseudouridine
  modified_base 3925: mod_base = OTHER; note = N1-methyl pseudouridine
  modified_base 3940: mod_base = OTHER; note = N1-methyl pseudouridine
  modified_base 3954: mod_base = OTHER; note = N1-methyl pseudouridine
  modified_base 3955: mod_base = OTHER; note = N1-methyl pseudouridine
  modified_base 3970: mod_base = OTHER; note = N1-methyl pseudouridine
  modified_base 3973: mod_base = OTHER; note = N1-methyl pseudouridine
  modified_base 3997: mod_base = OTHER; note = N1-methyl pseudouridine
  modified_base 4000: mod_base = OTHER; note = N1-methyl pseudouridine
  modified_base 4017: mod_base = OTHER; note = N1-methyl pseudouridine
  modified_base 4032: mod_base = OTHER; note = N1-methyl pseudouridine
  modified_base 4041: mod_base = OTHER; note = N1-methyl pseudouridine
  modified_base 4042: mod_base = OTHER; note = N1-methyl pseudouridine
  modified_base 4057: mod_base = OTHER; note = N1-methyl pseudouridine
  modified_base 4062: mod_base = OTHER; note = N1-methyl pseudouridine
  modified_base 4069: mod_base = OTHER; note = N1-methyl pseudouridine
  modified_base 4072: mod_base = OTHER; note = N1-methyl pseudouridine
  modified_base 4075: mod_base = OTHER; note = N1-methyl pseudouridine
  modified_base 4078: mod_base = OTHER; note = N1-methyl pseudouridine
  modified_base 4087: mod_base = OTHER; note = N1-methyl pseudouridine
  modified_base 4111: mod_base = OTHER; note = N1-methyl pseudouridine
  modified_base 4120: mod_base = OTHER; note = N1-methyl pseudouridine
  modified_base 4129: mod_base = OTHER; note = N1-methyl pseudouridine
  modified_base 4132: mod_base = OTHER; note = N1-methyl pseudouridine
  modified_base 4138: mod_base = OTHER; note = N1-methyl pseudouridine
  modified_base 4144: mod_base = OTHER; note = N1-methyl pseudouridine
  modified_base 4147: mod_base = OTHER; note = N1-methyl pseudouridine
  modified_base 4161: mod_base = OTHER; note = N1-methyl pseudouridine
  modified_base 4162: mod_base = OTHER; note = N1-methyl pseudouridine
  modified_base 4177: mod_base = OTHER; note = N1-methyl pseudouridine
  modified_base 4182: mod_base = OTHER; note = N1-methyl pseudouridine
  modified_base 4183: mod_base = OTHER; note = N1-methyl pseudouridine
  modified_base 4186: mod_base = OTHER; note = N1-methyl pseudouridine
  modified_base 4200: mod_base = OTHER; note = N1-methyl pseudouridine
  modified_base 4210: mod_base = OTHER; note = N1-methyl pseudouridine
  modified_base 4222: mod_base = OTHER; note = N1-methyl pseudouridine
  modified_base 4225: mod_base = OTHER; note = N1-methyl pseudouridine
  modified_base 4228: mod_base = OTHER; note = N1-methyl pseudouridine
  modified_base 4234: mod_base = OTHER; note = N1-methyl pseudouridine
  modified_base 4242: mod_base = OTHER; note = N1-methyl pseudouridine
  modified_base 4249: mod_base = OTHER; note = N1-methyl pseudouridine
  modified_base 4251: mod_base = OTHER; note = N1-methyl pseudouridine
  modified_base 4252: mod_base = OTHER; note = N1-methyl pseudouridine
  modified_base 4258: mod_base = OTHER; note = N1-methyl pseudouridine
  modified_base 4279: mod_base = OTHER; note = N1-methyl pseudouridine
  modified_base 4282: mod_base = OTHER; note = N1-methyl pseudouridine
  modified_base 4300: mod_base = OTHER; note = N1-methyl pseudouridine
  modified_base 4318: mod_base = OTHER; note = N1-methyl pseudouridine
  modified_base 4324: mod_base = OTHER; note = N1-methyl pseudouridine
  modified_base 4335: mod_base = OTHER; note = N1-methyl pseudouridine
  modified_base 4339: mod_base = OTHER; note = N1-methyl pseudouridine
  modified_base 4344: mod_base = OTHER; note = N1-methyl pseudouridine
  modified_base 4345: mod_base = OTHER; note = N1-methyl pseudouridine
  modified_base 4348: mod_base = OTHER; note = N1-methyl pseudouridine
  modified_base 4350: mod_base = OTHER; note = N1-methyl pseudouridine
  modified_base 4354: mod_base = OTHER; note = N1-methyl pseudouridine
  modified_base 4365: mod_base = OTHER; note = N1-methyl pseudouridine
  modified_base 4375: mod_base = OTHER; note = N1-methyl pseudouridine
  modified_base 4411: mod_base = OTHER; note = N1-methyl pseudouridine
  modified_base 4413: mod_base = OTHER; note = N1-methyl pseudouridine
  modified_base 4414: mod_base = OTHER; note = N1-methyl pseudouridine
  modified_base 4417: mod_base = OTHER; note = N1-methyl pseudouridine
  modified_base 4434: mod_base = OTHER; note = N1-methyl pseudouridine
  modified_base 4438: mod_base = OTHER; note = N1-methyl pseudouridine
  modified_base 4447: mod_base = OTHER; note = N1-methyl pseudouridine
  modified_base 4450: mod_base = OTHER; note = N1-methyl pseudouridine
  modified_base 4459: mod_base = OTHER; note = N1-methyl pseudouridine
  modified_base 4467: mod_base = OTHER; note = N1-methyl pseudouridine
  modified_base 4468: mod_base = OTHER; note = N1-methyl pseudouridine
  modified_base 4480: mod_base = OTHER; note = N1-methyl pseudouridine
  modified_base 4483: mod_base = OTHER; note = N1-methyl pseudouridine
  modified_base 4486: mod_base = OTHER; note = N1-methyl pseudouridine
  modified_base 4501: mod_base = OTHER; note = N1-methyl pseudouridine
  modified_base 4510: mod_base = OTHER; note = N1-methyl pseudouridine
  modified_base 4513: mod_base = OTHER; note = N1-methyl pseudouridine
  modified_base 4521: mod_base = OTHER; note = N1-methyl pseudouridine
  modified_base 4546: mod_base = OTHER; note = N1-methyl pseudouridine
  modified_base 4567: mod_base = OTHER; note = N1-methyl pseudouridine
  modified_base 4570: mod_base = OTHER; note = N1-methyl pseudouridine
  modified_base 4576: mod_base = OTHER; note = N1-methyl pseudouridine
  modified_base 4578: mod_base = OTHER; note = N1-methyl pseudouridine
  modified_base 4579: mod_base = OTHER; note = N1-methyl pseudouridine
  modified_base 4585: mod_base = OTHER; note = N1-methyl pseudouridine
  modified_base 4594: mod_base = OTHER; note = N1-methyl pseudouridine
  modified_base 4611: mod_base = OTHER; note = N1-methyl pseudouridine
  modified_base 4612: mod_base = OTHER; note = N1-methyl pseudouridine
  modified_base 4617: mod_base = OTHER; note = N1-methyl pseudouridine
  modified_base 4620: mod_base = OTHER; note = N1-methyl pseudouridine
  modified_base 4621: mod_base = OTHER; note = N1-methyl pseudouridine
  modified_base 4633: mod_base = OTHER; note = N1-methyl pseudouridine
  modified_base 4647: mod_base = OTHER; note = N1-methyl pseudouridine
  modified_base 4666: mod_base = OTHER; note = N1-methyl pseudouridine
  modified_base 4669: mod_base = OTHER; note = N1-methyl pseudouridine
  modified_base 4681: mod_base = OTHER; note = N1-methyl pseudouridine
  modified_base 4684: mod_base = OTHER; note = N1-methyl pseudouridine
  modified_base 4696: mod_base = OTHER; note = N1-methyl pseudouridine
  modified_base 4705: mod_base = OTHER; note = N1-methyl pseudouridine
  modified_base 4707: mod_base = OTHER; note = N1-methyl pseudouridine
  modified_base 4720: mod_base = OTHER; note = N1-methyl pseudouridine
  modified_base 4726: mod_base = OTHER; note = N1-methyl pseudouridine
  modified_base 4735: mod_base = OTHER; note = N1-methyl pseudouridine
  modified_base 4782: mod_base = OTHER; note = N1-methyl pseudouridine
  modified_base 4783: mod_base = OTHER; note = N1-methyl pseudouridine
  modified_base 4810: mod_base = OTHER; note = N1-methyl pseudouridine
  modified_base 4812: mod_base = OTHER; note = N1-methyl pseudouridine
  modified_base 4823: mod_base = OTHER; note = N1-methyl pseudouridine
  modified_base 4824: mod_base = OTHER; note = N1-methyl pseudouridine
  modified_base 4827: mod_base = OTHER; note = N1-methyl pseudouridine
  modified_base 4828: mod_base = OTHER; note = N1-methyl pseudouridine
  modified_base 4833: mod_base = OTHER; note = N1-methyl pseudouridine
  modified_base 4837: mod_base = OTHER; note = N1-methyl pseudouridine
  modified_base 4838: mod_base = OTHER; note = N1-methyl pseudouridine
  modified_base 4840: mod_base = OTHER; note = N1-methyl pseudouridine
  modified_base 4848: mod_base = OTHER; note = N1-methyl pseudouridine
  modified_base 4849: mod_base = OTHER; note = N1-methyl pseudouridine
  modified_base 4853: mod_base = OTHER; note = N1-methyl pseudouridine
  modified_base 4854: mod_base = OTHER; note = N1-methyl pseudouridine
  modified_base 4856: mod_base = OTHER; note = N1-methyl pseudouridine
  modified_base 4862: mod_base = OTHER; note = N1-methyl pseudouridine
  modified_base 4867: mod_base = OTHER; note = N1-methyl pseudouridine
  modified_base 4868: mod_base = OTHER; note = N1-methyl pseudouridine
  modified_base 4870: mod_base = OTHER; note = N1-methyl pseudouridine
  modified_base 4871: mod_base = OTHER; note = N1-methyl pseudouridine
  modified_base 4873: mod_base = OTHER; note = N1-methyl pseudouridine
  modified_base 4875: mod_base = OTHER; note = N1-methyl pseudouridine
  modified_base 4879: mod_base = OTHER; note = N1-methyl pseudouridine
  modified_base 4880: mod_base = OTHER; note = N1-methyl pseudouridine
  modified_base 4886: mod_base = OTHER; note = N1-methyl pseudouridine
  modified_base 4888: mod_base = OTHER; note = N1-methyl pseudouridine
  modified_base 4892: mod_base = OTHER; note = N1-methyl pseudouridine
  modified_base 4894: mod_base = OTHER; note = N1-methyl pseudouridine
  modified_base 4895: mod_base = OTHER; note = N1-methyl pseudouridine
  modified_base 4898: mod_base = OTHER; note = N1-methyl pseudouridine
  modified_base 4900: mod_base = OTHER; note = N1-methyl pseudouridine
  modified_base 4901: mod_base = OTHER; note = N1-methyl pseudouridine
  modified_base 4902: mod_base = OTHER; note = N1-methyl pseudouridine
  modified_base 4906: mod_base = OTHER; note = N1-methyl pseudouridine
  modified_base 4913: mod_base = OTHER; note = N1-methyl pseudouridine
  modified_base 4917: mod_base = OTHER; note = N1-methyl pseudouridine
  modified_base 4924: mod_base = OTHER; note = N1-methyl pseudouridine
  modified_base 4926: mod_base = OTHER; note = N1-methyl pseudouridine
aggaaataagagagaaaagaagagtaagaagaaatataagagccaccatgagcgaggtggagttcagccacgagtactggatgcggcacgccctgaccctggccaagcgggcccgggacgagcgggaggtgcccgtgggcgccgtgctggtgctgaacaaccgggtgatcggcgagggctggaaccgggccatcggcctgcacgaccccaccgcccacgccgagatcatggccctgcggcagggcggcctggtgatgcagaactaccggctgatcgacgccaccctgtacgtgaccttcgagccctgcgtgatgtgcgccggcgccatgatccacagccggatcggccgggtggtgttcggcgtgcggaacgccaagaccggcgccgccggcagcctgatggacgtgctgcaccaccccggcatgaaccaccgggtggagatcaccgagggcatcctggccgacgagtgcgccgccctgctgtgccggttcttccggatgccccggcgggtgttcaacgcccagaagaaggcccagagcagcaccgacagcggcggcagcagcggcggcagcagcggcagcgagacacccggcaccagcgagagcgccacccccgagagcagcggcggcagcagcggcggcagcgacaagaagtacagcatcggcctggccatcggcaccaacagcgtgggctgggccgtgatcaccgacgagtacaaggtgcccagcaagaagttcaaggtgctgggcaacaccgaccggcacagcatcaagaagaacctgatcggcgccctgctgttcgacagcggcgagacagccgaggccacccggctgaagcggaccgcccggcggcggtacacccggcggaagaaccggatctgctacctgcaggagatcttcagcaacgagatggccaaggtggacgacagcttcttccaccggctggaggagagcttcctggtggaggaggacaagaagcacgagcggcaccccatcttcggcaacatcgtggacgaggtggcctaccacgagaagtaccccaccatctaccacctgcggaagaagctggtggacagcaccgacaaggccgacctgcggctgatctacctggccctggcccacatgatcaagttccggggccacttcctgatcgagggcgacctgaaccccgacaacagcgacgtggacaagctgttcatccagctggtgcagacctacaaccagctgttcgaggagaaccccatcaacgccagcggcgtggacgccaaggccatcctgagcgcccggctgagcaagagccggcggctggagaacctgatcgcccagctgcccggcgagaagaagaacggcctgttcggcaacctgatcgccctgagcctgggcctgacccccaacttcaagagcaacttcgacctggccgaggacgccaagctgcagctgagcaaggacacctacgacgacgacctggacaacctgctggcccagatcggcgaccagtacgccgacctgttcctggccgccaagaacctgagcgacgccatcctgctgagcgacatcctgcgggtgaacaccgagatcaccaaggcccccctgagcgccagcatgatcaagcggtacgacgagcaccaccaggacctgaccctgctgaaggccctggtgcggcagcagctgcccgagaagtacaaggagatcttcttcgaccagagcaagaacggctacgccggctacatcgacggcggcgccagccaggaggagttctacaagttcatcaagcccatcctggagaagatggacggcaccgaggagctgctggtgaagctgaaccgggaggacctgctgcggaagcagcggaccttcgacaacggcagcatcccccaccagatccacctgggcgagctgcacgccatcctgcggcggcaggaggacttctaccccttcctgaaggacaaccgggagaagatcgagaagatcctgaccttccggatcccctactacgtgggccccctggcccggggcaacagccggttcgcctggatgacccgcaagagcgaggagacaatcaccccctggaacttcgaggaggtggtggacaagggcgccagcgcccagagcttcatcgagcggatgaccaacttcgacaagaacctgcccaacgagaaggtgctgcccaagcacagcctgctgtacgagtacttcaccgtgtacaacgagctgaccaaggtgaagtacgtgaccgagggcatgcggaagcccgccttcctgagcggcgagcagaagaaggccatcgtggacctgctgttcaagaccaaccggaaggtgaccgtgaagcagctgaaggaggactacttcaagaagatcgagtgcttcgacagcgtggagatcagcggcgtggaggaccggttcaacgccagcctgggcacctaccacgacctgctgaagatcatcaaggacaaggacttcctggacaacgaggagaacgaggacatcctggaggacatcgtgctgaccctgaccctgttcgaggaccgggagatgatcgaggagcggctgaagacctacgcccacctgttcgacgacaaggtgatgaagcagctgaagcggcggcggtacaccggctggggccggctgagccggaagctgatcaacggcatccgggacaagcagagcggcaagaccatcctggacttcctcaagagcgacggcttcgccaacgccaacttcatgcagctgatccacgacgacagcctgaccttcaaggaggacatccagaaggcccaggtgagcggccagggcgacagcctgcacgagcacatcgccaacctggccggcagccccgccatcaagaagggcatcctgcagaccgtgaaggtggtggacgagctggtgaaggtgatgggccggcacaagcccgagaacatcgtgatcgagatggcccgggagaaccagaccacccagaagggccagaagaacagccgggagcggatgaagcggatcgaggagggcatcaaggagctgggcagccagatcctgaaggagcaccccgtggagaacacccagctgcagaacgagaagctgtacctgtactacctgcagaacggccgggacatgtacgtggaccaggagctggacatcaaccggctgagcgactacgacgtggaccacatcgtgccccagagcttcctgaaggacgacagcatcgacaacaaggtgctgacccggagcgacaagaaccggggcaagagcgacaacgtgcccagcgaggaggtggtgaagaagatgaagaactactggcggcagctgctgaacgccaagctgatcacccagcggaagttcgacaacctgaccaaggccgagcggggcggcctgagcgagctggacaaggccggcttcatcaagcggcagctggtggagacacggcagatcaccaagcacgtggcccagatcctggacagccggatgaacaccaagtacgacgagaacgacaagctgatccgggaggtgaaggtgatcaccctcaagagcaagctggtgagcgacttccggaaggacttccagttctacaaggtgcgggagatcaacaactaccaccacgcccacgacgcctacctgaacgccgtggtgggcaccgccctgatcaagaagtaccccaagctggagagcgagttcgtgtacggcgactacaaggtgtacgacgtgcggaagatgatcgccaagagcgagcaggagatcggcaaggccaccgccaagtacttcttctacagcaacatcatgaacttcttcaagaccgagatcaccctggccaacggcgagatccggaagcggcccctgatcgagacaaacggcgagacaggcgagatcgtgtgggacaagggccgggacttcgccaccgtgcggaaggtgctgagcatgccccaggtgaacatcgtgaagaagaccgaggtgcagaccggcggcttcagcaaggagagcatcctgcccaagcggaacagcgacaagctgatcgcccggaagaaggactgggaccccaagaagtacggcggcttcgagagccccaccgtggcctacagcgtgctggtggtggccaaggtggagaagggcaagagcaagaagctcaagagcgtgaaggagctgctgggcatcaccatcatggagcggagcagcttcgagaagaaccccatcgacttcctggaggccaagggctacaaggaggtgaagaaggacctgatcatcaagctgcccaagtacagcctgttcgagctggagaacggccggaagcggatgctggccagcgccggcgagctgcagaagggcaacgagctggccctgcccagcaagtacgtgaacttcctgtacctggccagccactacgagaagctgaagggcagccccgaggacaacgagcagaagcagctgttcgtggagcagcacaagcactacctggacgagatcatcgagcagatcagcgagttcagcaagcgggtgatcctggccgacgccaacctggacaaggtgctgagcgcctacaacaagcaccgggacaagcccatccgggagcaggccgagaacatcatccacctgttcaccctgaccaacctgggcgcccccgccgccttcaagtacttcgacaccaccatcgaccggaagcggtacaccagcaccaaggaggtgctggacgccaccctgatccaccagagcatcaccggcctgtacgagacacggatcgacctgagccagctgggcggcgacgagggcgccgacaagcggaccgccgacggcagcgagttcgagagccccaagaagaagcggaaggtgtgagcggccgcttaattaagctgccttctgcggggcttgccttctggccatgcccttcttctctcccttgcacctgtacctcttggtctttgaataaagcctgagtaggaagtctaga

SEQ ID NO: 2154 - protein, 1588 aa, synthetic construct
MSEVEFSHEYWMRHALTLAKRARDEREVPVGAVLVLNNRVIGEGWNRAIGLHDPTAHAEIMALRQGGLVMQNYRLIDATLYVTFEPCVMCAGAMIHSRIGRVVFGVRNAKTGAAGSLMDVLHHPGMNHRVEITEGILADECAALLCRFFRMPRRVFNAQKKAQSSTDSGGSSGGSSGSETPGTSESATPESSGGSSGGSDKKYSIGLAIGTNSVGWAVITDEYKVPSKKFKVLGNTDRHSIKKNLIGALLFDSGETAEATRLKRTARRRYTRRKNRICYLQEIFSNEMAKVDDSFFHRLEESFLVEEDKKHERHPIFGNIVDEVAYHEKYPTIYHLRKKLVDSTDKADLRLIYLALAHMIKFRGHFLIEGDLNPDNSDVDKLFIQLVQTYNQLFEENPINASGVDAKAILSARLSKSRRLENLIAQLPGEKKNGLFGNLIALSLGLTPNFKSNFDLAEDAKLQLSKDTYDDDLDNLLAQIGDQYADLFLAAKNLSDAILLSDILRVNTEITKAPLSASMIKRYDEHHQDLTLLKALVRQQLPEKYKEIFFDQSKNGYAGYIDGGASQEEFYKFIKPILEKMDGTEELLVKLNREDLLRKQRTFDNGSIPHQIHLGELHAILRRQEDFYPFLKDNREKIEKILTFRIPYYVGPLARGNSRFAWMTRKSEETITPWNFEEVVDKGASAQSFIERMTNFDKNLPNEKVLPKHSLLYEYFTVYNELTKVKYVTEGMRKPAFLSGEQKKAIVDLLFKTNRKVTVKQLKEDYFKKIECFDSVEISGVEDRFNASLGTYHDLLKIIKDKDFLDNEENEDILEDIVLTLTLFEDREMIEERLKTYAHLFDDKVMKQLKRRRYTGWGRLSRKLINGIRDKQSGKTILDFLKSDGFANANFMQLIHDDSLTFKEDIQKAQVSGQGDSLHEHIANLAGSPAIKKGILQTVKVVDELVKVMGRHKPENIVIEMARENQTTQKGQKNSRERMKRIEEGIKELGSQILKEHPVENTQLQNEKLYLYYLQNGRDMYVDQELDINRLSDYDVDHIVPQSFLKDDSIDNKVLTRSDKNRGKSDNVPSEEVVKKMKNYWRQLLNAKLITQRKFDNLTKAERGGLSELDKAGFIKRQLVETRQITKHVAQILDSRMNTKYDENDKLIREVKVITLKSKLVSDFRKDFQFYKVREINNYHHAHDAYLNAVVGTALIKKYPKLESEFVYGDYKVYDVRKMIAKSEQEIGKATAKYFFYSNIMNFFKTEITLANGEIRKRPLIETNGETGEIVWDKGRDFATVRKVLSMPQVNIVKKTEVQTGGFSKESILPKRNSDKLIARKKDWDPKKYGGFESPTVAYSVLVVAKVEKGKSKKLKSVKELLGITIMERSSFEKNPIDFLEAKGYKEVKKDLIIKLPKYSLFELENGRKRMLASAGELQKGNELALPSKYVNFLYLASHYEKLKGSPEDNEQKQLFVEQHKHYLDEIIEQISEFSKRVILADANLDKVLSAYNKHRDKPIREQAENIIHLFTLTNLGAPAAFKYFDTTIDRKRYTSTKEVLDATLIHQSITGLYETRIDLSQLGGDEGADKRTADGSEFESPKKKRKV

SEQ ID NO: 2155 - RNA, 4101 nt, synthetic construct
  source 1..4101: mol_type = other RNA
  modified_base 10: mod_base = OTHER; note = N1-methyl pseudouridine
  modified_base 17: mod_base = OTHER; note = N1-methyl pseudouridine
  modified_base 23: mod_base = OTHER; note = N1-methyl pseudouridine
  modified_base 29: mod_base = OTHER; note = N1-methyl pseudouridine
  modified_base 44: mod_base = OTHER; note = N1-methyl pseudouridine
  modified_base 49: mod_base = OTHER; note = N1-methyl pseudouridine
  modified_base 56: mod_base = OTHER; note = N1-methyl pseudouridine
  modified_base 59: mod_base = OTHER; note = N1-methyl pseudouridine
  modified_base 70: mod_base = OTHER; note = N1-methyl pseudouridine
  modified_base 77: mod_base = OTHER; note = N1-methyl pseudouridine
  modified_base 91: mod_base = OTHER; note = N1-methyl pseudouridine
  modified_base 92: mod_base = OTHER; note = N1-methyl pseudouridine
  modified_base 98: mod_base = OTHER; note = N1-methyl pseudouridine
  modified_base 101: mod_base = OTHER; note = N1-methyl pseudouridine
  modified_base 125: mod_base = OTHER; note = N1-methyl pseudouridine
  modified_base 137: mod_base = OTHER; note = N1-methyl pseudouridine
  modified_base 140: mod_base = OTHER; note = N1-methyl pseudouridine
  modified_base 149: mod_base = OTHER; note = N1-methyl pseudouridine
  modified_base 152: mod_base = OTHER; note = N1-methyl pseudouridine
  modified_base 154: mod_base = OTHER; note = N1-methyl pseudouridine
  modified_base 155: mod_base = OTHER; note = N1-methyl pseudouridine
  modified_base 188: mod_base = OTHER; note = N1-methyl pseudouridine
  modified_base 211: mod_base = OTHER; note = N1-methyl pseudouridine
  modified_base 233: mod_base = OTHER; note = N1-methyl pseudouridine
  modified_base 235: mod_base = OTHER; note = N1-methyl pseudouridine
  modified_base 238: mod_base = OTHER; note = N1-methyl pseudouridine
  modified_base 242: mod_base = OTHER; note = N1-methyl pseudouridine
  modified_base 251: mod_base = OTHER; note = N1-methyl pseudouridine
  modified_base 253: mod_base = OTHER; note = N1-methyl pseudouridine
  modified_base 254: mod_base = OTHER; note = N1-methyl pseudouridine
  modified_base 266: mod_base = OTHER; note = N1-methyl pseudouridine
  modified_base 275: mod_base = OTHER; note = N1-methyl pseudouridine
  modified_base 286: mod_base = OTHER; note = N1-methyl pseudouridine
  modified_base 287: mod_base = OTHER; note = N1-methyl pseudouridine
  modified_base 289: mod_base = OTHER; note = N1-methyl pseudouridine
  modified_base 290: mod_base = OTHER; note = N1-methyl pseudouridine
  modified_base 299: mod_base = OTHER; note = N1-methyl pseudouridine
  modified_base 310: mod_base = OTHER; note = N1-methyl pseudouridine
  modified_base 311: mod_base = OTHER; note = N1-methyl pseudouridine
  modified_base 314: mod_base = OTHER; note = N1-methyl pseudouridine
  modified_base 317: mod_base = OTHER; note = N1-methyl pseudouridine
  modified_base 350: mod_base = OTHER; note = N1-methyl pseudouridine
  modified_base 352: mod_base = OTHER; note = N1-methyl pseudouridine
  modified_base 353: mod_base = OTHER; note = N1-methyl pseudouridine
  modified_base 362: mod_base = OTHER; note = N1-methyl pseudouridine
  modified_base 365: mod_base = OTHER; note = N1-methyl pseudouridine
  modified_base 374: mod_base = OTHER; note = N1-methyl pseudouridine
  modified_base 379: mod_base = OTHER; note = N1-methyl pseudouridine
  modified_base 391: mod_base = OTHER; note = N1-methyl pseudouridine
  modified_base 401: mod_base = OTHER; note = N1-methyl pseudouridine
  modified_base 403: mod_base = OTHER; note = N1-methyl pseudouridine
  modified_base 410: mod_base = OTHER; note = N1-methyl pseudouridine
  modified_base 422: mod_base = OTHER; note = N1-methyl pseudouridine
  modified_base 425: mod_base = OTHER; note = N1-methyl pseudouridine
  modified_base 449: mod_base = OTHER; note = N1-methyl pseudouridine
  modified_base 455: mod_base = OTHER; note = N1-methyl pseudouridine
  modified_base 458: mod_base = OTHER; note = N1-methyl pseudouridine
  modified_base 460: mod_base = OTHER; note = N1-methyl pseudouridine
  modified_base 464: mod_base = OTHER; note = N1-methyl pseudouridine
  modified_base 470: mod_base = OTHER; note = N1-methyl pseudouridine
  modified_base 479: mod_base = OTHER; note = N1-methyl pseudouridine
  modified_base 482: mod_base = OTHER; note = N1-methyl pseudouridine
  modified_base 487: mod_base = OTHER; note = N1-methyl pseudouridine
  modified_base 488: mod_base = OTHER; note = N1-methyl pseudouridine
  modified_base 499: mod_base = OTHER; note = N1-methyl pseudouridine
  modified_base 500: mod_base = OTHER; note = N1-methyl pseudouridine
  modified_base 503: mod_base = OTHER; note = N1-methyl pseudouridine
  modified_base 506: mod_base = OTHER; note = N1-methyl pseudouridine
  modified_base 518: mod_base = OTHER; note = N1-methyl pseudouridine
  modified_base 539: mod_base = OTHER; note = N1-methyl pseudouridine
  modified_base 548: mod_base = OTHER; note = N1-methyl pseudouridine
  modified_base 550: mod_base = OTHER; note = N1-methyl pseudouridine
  modified_base 551: mod_base = OTHER; note = N1-methyl pseudouridine
  modified_base 554: mod_base = OTHER; note = N1-methyl pseudouridine
  modified_base 560: mod_base = OTHER; note = N1-methyl pseudouridine
  modified_base 563: mod_base = OTHER; note = N1-methyl pseudouridine
  modified_base 571: mod_base = OTHER; note = N1-methyl pseudouridine
  modified_base 581: mod_base = OTHER; note = N1-methyl pseudouridine
  modified_base 583: mod_base = OTHER; note = N1-methyl pseudouridine
  modified_base 584: mod_base = OTHER; note = N1-methyl pseudouridine
  modified_base 599: mod_base = OTHER; note = N1-methyl pseudouridine
  modified_base 614: mod_base = OTHER; note = N1-methyl pseudouridine
  modified_base 629: mod_base = OTHER; note = N1-methyl pseudouridine
  modified_base 632: mod_base = OTHER; note = N1-methyl pseudouridine
  modified_base 644: mod_base = OTHER; note = N1-methyl pseudouridine
  modified_base 662: mod_base = OTHER; note = N1-methyl pseudouridine
  modified_base 671: mod_base = OTHER; note = N1-methyl pseudouridine
  modified_base 674: mod_base = OTHER; note = N1-methyl pseudouridine
  modified_base 683: mod_base = OTHER; note = N1-methyl pseudouridine
  modified_base 707: mod_base = OTHER; note = N1-methyl pseudouridine
  modified_base 709: mod_base = OTHER; note = N1-methyl pseudouridine
  modified_base 710: mod_base = OTHER; note = N1-methyl pseudouridine
  modified_base 719: mod_base = OTHER; note = N1-methyl pseudouridine
  modified_base 722: mod_base = OTHER; note = N1-methyl pseudouridine
  modified_base 728: mod_base = OTHER; note = N1-methyl pseudouridine
  modified_base 734: mod_base = OTHER; note = N1-methyl pseudouridine
  modified_base 740: mod_base = OTHER; note = N1-methyl pseudouridine
  modified_base 751: mod_base = OTHER; note = N1-methyl pseudouridine
  modified_base 752: mod_base = OTHER; note = N1-methyl pseudouridine
  modified_base 763: mod_base = OTHER; note = N1-methyl pseudouridine
  modified_base 764: mod_base = OTHER; note = N1-methyl pseudouridine
  modified_base 770: mod_base = OTHER; note = N1-methyl pseudouridine
  modified_base 788: mod_base = OTHER; note = N1-methyl pseudouridine
  modified_base 794: mod_base = OTHER; note = N1-methyl pseudouridine
  modified_base 808: mod_base = OTHER; note = N1-methyl pseudouridine
  modified_base 821: mod_base = OTHER; note = N1-methyl pseudouridine
  modified_base 830: mod_base = OTHER; note = N1-methyl pseudouridine
  modified_base 833: mod_base = OTHER; note = N1-methyl pseudouridine
  modified_base 842: mod_base = OTHER; note = N1-methyl pseudouridine
  modified_base 853: mod_base = OTHER; note = N1-methyl pseudouridine
  modified_base 863: mod_base = OTHER; note = N1-methyl pseudouridine
  modified_base 865: mod_base = OTHER; note = N1-methyl pseudouridine
  modified_base 866: mod_base = OTHER; note = N1-methyl pseudouridine
  modified_base 869: mod_base = OTHER; note = N1-methyl pseudouridine
  modified_base 884: mod_base = OTHER; note = N1-methyl pseudouridine
  modified_base 896: mod_base = OTHER; note = N1-methyl pseudouridine
  modified_base 899: mod_base = OTHER; note = N1-methyl pseudouridine
  modified_base 902: mod_base = OTHER; note = N1-methyl pseudouridine
  modified_base 911: mod_base = OTHER; note = N1-methyl pseudouridine
  modified_base 914: mod_base = OTHER; note = N1-methyl pseudouridine
  modified_base 920: mod_base = OTHER; note = N1-methyl pseudouridine
  modified_base 932: mod_base = OTHER; note = N1-methyl pseudouridine
  modified_base 947: mod_base = OTHER; note = N1-methyl pseudouridine
  modified_base 959: mod_base = OTHER; note = N1-methyl pseudouridine
  modified_base 962: mod_base = OTHER; note = N1-methyl pseudouridine
  modified_base 970: mod_base = OTHER; note = N1-methyl pseudouridine
  modified_base 992: mod_base = OTHER; note = N1-methyl pseudouridine
  modified_base 998: mod_base = OTHER; note = N1-methyl pseudouridine
  modified_base 1001: mod_base = OTHER; note = N1-methyl pseudouridine
  modified_base 1010: mod_base = OTHER; note = N1-methyl pseudouridine
  modified_base 1013: mod_base = OTHER; note = N1-methyl pseudouridine
  modified_base 1025: mod_base = OTHER; note = N1-methyl pseudouridine
  modified_base 1036: mod_base = OTHER; note = N1-methyl pseudouridine
  modified_base 1046: mod_base = OTHER; note = N1-methyl pseudouridine
  modified_base 1048: mod_base = OTHER; note = N1-methyl pseudouridine
  modified_base 1049: mod_base = OTHER; note = N1-methyl pseudouridine
  modified_base 1051: mod_base = OTHER; note = N1-methyl pseudouridine
  modified_base 1052: mod_base = OTHER; note = N1-methyl pseudouridine
  modified_base 1072: mod_base = OTHER; note = N1-methyl pseudouridine
  modified_base 1081: mod_base = OTHER; note = N1-methyl pseudouridine
  modified_base 1085: mod_base = OTHER; note = N1-methyl pseudouridine
  modified_base 1111: mod_base = OTHER; note = N1-methyl pseudouridine
  modified_base 1112: mod_base = OTHER; note = N1-methyl pseudouridine
  modified_base 1114: mod_base = OTHER; note = N1-methyl pseudouridine
  modified_base 1120: mod_base = OTHER; note = N1-methyl pseudouridine
  modified_base 1121: mod_base = OTHER; note = N1-methyl pseudouridine
  modified_base 1124: mod_base = OTHER; note = N1-methyl pseudouridine
  modified_base 1133: mod_base = OTHER; note = N1-methyl pseudouridine
  modified_base 1136: mod_base = OTHER; note = N1-methyl pseudouridine
  modified_base 1145: mod_base = OTHER; note = N1-methyl pseudouridine
  modified_base 1163: mod_base = OTHER; note = N1-methyl pseudouridine
  modified_base 1166: mod_base = OTHER; note = N1-methyl pseudouridine
  modified_base 1169: mod_base = OTHER; note = N1-methyl pseudouridine
  modified_base 1175: mod_base = OTHER; note = N1-methyl pseudouridine
  modified_base 1190: mod_base = OTHER; note = N1-methyl pseudouridine
  modified_base 1193: mod_base = OTHER; note = N1-methyl pseudouridine
  modified_base 1210: mod_base = OTHER; note = N1-methyl pseudouridine
  modified_base 1211: mod_base = OTHER; note = N1-methyl pseudouridine
  modified_base 1226: mod_base = OTHER; note = N1-methyl pseudouridine
  modified_base 1238: mod_base = OTHER; note = N1-methyl pseudouridine
  modified_base 1244: mod_base = OTHER; note = N1-methyl pseudouridine
  modified_base 1253: mod_base = OTHER; note = N1-methyl pseudouridine
  modified_base 1262: mod_base = OTHER; note = N1-methyl pseudouridine
  modified_base 1265: mod_base = OTHER; note = N1-methyl pseudouridine
  modified_base 1282: mod_base = OTHER; note = N1-methyl pseudouridine
  modified_base 1283: mod_base = OTHER; note = N1-methyl pseudouridine
  modified_base 1285: mod_base = OTHER; note = N1-methyl pseudouridine
  modified_base 1291: mod_base = OTHER; note = N1-methyl pseudouridine
  modified_base 1292: mod_base = OTHER; note = N1-methyl pseudouridine
  modified_base 1295: mod_base = OTHER; note = N1-methyl pseudouridine
  modified_base 1316: mod_base = OTHER; note = N1-methyl pseudouridine
  modified_base 1325: mod_base = OTHER; note = N1-methyl pseudouridine
  modified_base 1328: mod_base = OTHER; note = N1-methyl pseudouridine
  modified_base 1333: mod_base = OTHER; note = N1-methyl pseudouridine
  modified_base 1334: mod_base = OTHER; note = N1-methyl pseudouridine
  modified_base 1340: mod_base = OTHER; note = N1-methyl pseudouridine
  modified_base 1345: mod_base = OTHER; note = N1-methyl pseudouridine
  modified_base 1348: mod_base = OTHER; note = N1-methyl pseudouridine
  modified_base 1352: mod_base = OTHER; note = N1-methyl pseudouridine
  modified_base 1361: mod_base = OTHER; note = N1-methyl pseudouridine
  modified_base 1381: mod_base = OTHER; note = N1-methyl pseudouridine
  modified_base 1382: mod_base = OTHER; note = N1-methyl pseudouridine
  modified_base 1387: mod_base = OTHER; note = N1-methyl pseudouridine
  modified_base 1391: mod_base = OTHER; note = N1-methyl pseudouridine
  modified_base 1415: mod_base = OTHER; note = N1-methyl pseudouridine
  modified_base 1423: mod_base = OTHER; note = N1-methyl pseudouridine
  modified_base 1429: mod_base = OTHER; note = N1-methyl pseudouridine
  modified_base 1430: mod_base = OTHER; note = N1-methyl pseudouridine
  modified_base 1439: mod_base = OTHER; note = N1-methyl pseudouridine
  modified_base 1442: mod_base = OTHER; note = N1-methyl pseudouridine
  modified_base 1468: mod_base = OTHER; note = N1-methyl pseudouridine
  modified_base 1469: mod_base = OTHER; note = N1-methyl pseudouridine
  modified_base 1472: mod_base = OTHER; note = N1-methyl pseudouridine
  modified_base 1481: mod_base = OTHER; note = N1-methyl pseudouridine
  modified_base 1489: mod_base = OTHER; note = N1-methyl pseudouridine
  modified_base 1490: mod_base = OTHER; note = N1-methyl pseudouridine
  modified_base 1502: mod_base = OTHER; note = N1-methyl pseudouridine
  modified_base 1517: mod_base = OTHER; note = N1-methyl pseudouridine
  modified_base 1520: mod_base = OTHER; note = N1-methyl pseudouridine
  modified_base 1535: mod_base = OTHER; note = N1-methyl pseudouridine
  modified_base 1538: mod_base = OTHER; note = N1-methyl pseudouridine
  modified_base 1540: mod_base = OTHER; note = N1-methyl pseudouridine
  modified_base 1546: mod_base = OTHER; note = N1-methyl pseudouridine
  modified_base 1549: mod_base = OTHER; note = N1-methyl pseudouridine
  modified_base 1550: mod_base = OTHER; note = N1-methyl pseudouridine
  modified_base 1556: mod_base = OTHER; note = N1-methyl pseudouridine
  modified_base 1558: mod_base = OTHER; note = N1-methyl pseudouridine
  modified_base 1568: mod_base = OTHER; note = N1-methyl pseudouridine
  modified_base 1577: mod_base = OTHER; note = N1-methyl pseudouridine
  modified_base 1582: mod_base = OTHER; note = N1-methyl pseudouridine
  modified_base 1586: mod_base = OTHER; note = N1-methyl pseudouridine
  modified_base 1598: mod_base = OTHER; note = N1-methyl pseudouridine
  modified_base 1612: mod_base = OTHER; note = N1-methyl pseudouridine
  modified_base 1613: mod_base = OTHER; note = N1-methyl pseudouridine
  modified_base 1616: mod_base = OTHER; note = N1-methyl pseudouridine
  modified_base 1640: mod_base = OTHER; note = N1-methyl pseudouridine
  modified_base 1643: mod_base = OTHER; note = N1-methyl pseudouridine
  modified_base 1649: mod_base = OTHER; note = N1-methyl pseudouridine
  modified_base 1652: mod_base = OTHER; note = N1-methyl pseudouridine
  modified_base 1654: mod_base = OTHER; note = N1-methyl pseudouridine
  modified_base 1655: mod_base = OTHER; note = N1-methyl pseudouridine
  modified_base 1673: mod_base = OTHER; note = N1-methyl pseudouridine
  modified_base 1679: mod_base = OTHER; note = N1-methyl pseudouridine
  modified_base 1688: mod_base = OTHER; note = N1-methyl pseudouridine
  modified_base 1699: mod_base = OTHER; note = N1-methyl pseudouridine
  modified_base 1702: mod_base = OTHER; note = N1-methyl pseudouridine
  modified_base 1703: mod_base = OTHER; note = N1-methyl pseudouridine
  modified_base 1712: mod_base = OTHER; note = N1-methyl pseudouridine
  modified_base 1717: mod_base = OTHER; note = N1-methyl pseudouridine
  modified_base 1720: mod_base = OTHER; note = N1-methyl pseudouridine
  modified_base 1721: mod_base = OTHER; note = N1-methyl pseudouridine
  modified_base 1730: mod_base = OTHER; note = N1-methyl pseudouridine
  modified_base 1736: mod_base = OTHER; note = N1-methyl pseudouridine
  modified_base 1745: mod_base = OTHER; note = N1-methyl pseudouridine
  modified_base 1756: mod_base = OTHER; note = N1-methyl pseudouridine
  modified_base 1757: mod_base = OTHER; note = N1-methyl pseudouridine
  modified_base 1769: mod_base = OTHER; note = N1-methyl pseudouridine
  modified_base 1777: mod_base = OTHER; note = N1-methyl pseudouridine
  modified_base 1787: mod_base = OTHER; note = N1-methyl pseudouridine
  modified_base 1790: mod_base = OTHER; note = N1-methyl pseudouridine
  modified_base 1796: mod_base = OTHER; note = N1-methyl pseudouridine
  modified_base 1799: mod_base = OTHER; note = N1-methyl pseudouridine
  modified_base 1813: mod_base = OTHER; note = N1-methyl pseudouridine
  modified_base 1814: mod_base = OTHER; note = N1-methyl pseudouridine
  modified_base 1817: mod_base = OTHER; note = N1-methyl pseudouridine
  modified_base 1841: mod_base = OTHER; note = N1-methyl pseudouridine
  modified_base 1844: mod_base = OTHER; note = N1-methyl pseudouridine
  modified_base 1853: mod_base = OTHER; note = N1-methyl pseudouridine
  modified_base 1856: mod_base = OTHER; note = N1-methyl pseudouridine
  modified_base 1859: mod_base = OTHER; note = N1-methyl pseudouridine
  modified_base 1865: mod_base = OTHER; note = N1-methyl pseudouridine
  modified_base 1871: mod_base = OTHER; note = N1-methyl pseudouridine
  modified_base 1873: mod_base = OTHER; note = N1-methyl pseudouridine
  modified_base 1874: mod_base = OTHER; note = N1-methyl pseudouridine
  modified_base 1889: mod_base = OTHER; note = N1-methyl pseudouridine
  modified_base 1892: mod_base = OTHER; note = N1-methyl pseudouridine
  modified_base 1904: mod_base = OTHER; note = N1-methyl pseudouridine
  modified_base 1912: mod_base = OTHER; note = N1-methyl pseudouridine
  modified_base 1922: mod_base = OTHER; note = N1-methyl pseudouridine
  modified_base 1924: mod_base = OTHER; note = N1-methyl pseudouridine
  modified_base 1925: mod_base = OTHER; note = N1-methyl pseudouridine
  modified_base 1937: mod_base = OTHER; note = N1-methyl pseudouridine
  modified_base 1940: mod_base = OTHER; note = N1-methyl pseudouridine
  modified_base 1949: mod_base = OTHER; note = N1-methyl pseudouridine
  modified_base 1963: mod_base = OTHER; note = N1-methyl pseudouridine
  modified_base 1972: mod_base = OTHER; note = N1-methyl pseudouridine
  modified_base 1982: mod_base = OTHER; note = N1-methyl pseudouridine
  modified_base 1994: mod_base = OTHER; note = N1-methyl pseudouridine
  modified_base 1997: mod_base = OTHER; note = N1-methyl pseudouridine
  modified_base 2006: mod_base = OTHER; note = N1-methyl pseudouridine
  modified_base 2033: mod_base = OTHER; note = N1-methyl pseudouridine
  modified_base 2036: mod_base = OTHER; note = N1-methyl pseudouridine
  modified_base 2041: mod_base = OTHER; note = N1-methyl pseudouridine
  modified_base 2042: mod_base = OTHER; note = N1-methyl pseudouridine
  modified_base 2045: mod_base = OTHER; note = N1-methyl pseudouridine
  modified_base 2059: mod_base = OTHER; note = N1-methyl pseudouridine
  modified_base 2060: mod_base = OTHER; note = N1-methyl pseudouridine
  modified_base 2074: mod_base = OTHER; note = N1-methyl pseudouridine
  modified_base 2075: mod_base = OTHER; note = N1-methyl pseudouridine
  modified_base 2078: mod_base = OTHER; note = N1-methyl pseudouridine
  modified_base 2084: mod_base = OTHER; note = N1-methyl pseudouridine
  modified_base 2087: mod_base = OTHER; note = N1-methyl pseudouridine
  modified_base 2102: mod_base = OTHER; note = N1-methyl pseudouridine
  modified_base 2107: mod_base = OTHER; note = N1-methyl pseudouridine
  modified_base 2108: mod_base = OTHER; note = N1-methyl pseudouridine
  modified_base 2120: mod_base = OTHER; note = N1-methyl pseudouridine
  modified_base 2135: mod_base = OTHER; note = N1-methyl pseudouridine
  modified_base 2156: mod_base = OTHER; note = N1-methyl pseudouridine
  modified_base 2168: mod_base = OTHER; note = N1-methyl pseudouridine
  modified_base 2177: mod_base = OTHER; note = N1-methyl pseudouridine
  modified_base 2195: mod_base = OTHER; note = N1-methyl pseudouridine
  modified_base 2207: mod_base = OTHER; note = N1-methyl pseudouridine
  modified_base 2210: mod_base = OTHER; note = N1-methyl pseudouridine
  modified_base 2219: mod_base = OTHER; note = N1-methyl pseudouridine
  modified_base 2225: mod_base = OTHER; note = N1-methyl pseudouridine
  modified_base 2228: mod_base = OTHER; note = N1-methyl pseudouridine
  modified_base 2237: mod_base = OTHER; note = N1-methyl pseudouridine
  modified_base 2240: mod_base = OTHER; note = N1-methyl pseudouridine
  modified_base 2246: mod_base = OTHER; note = N1-methyl pseudouridine
  modified_base 2249: mod_base = OTHER; note = N1-methyl pseudouridine
  modified_base 2273: mod_base = OTHER; note = N1-methyl pseudouridine
  modified_base 2276: mod_base = OTHER; note = N1-methyl pseudouridine
  modified_base 2279: mod_base = OTHER; note = N1-methyl pseudouridine
  modified_base 2285: mod_base = OTHER; note = N1-methyl pseudouridine
  modified_base 2339: mod_base = OTHER; note = N1-methyl pseudouridine
  modified_base 2348: mod_base = OTHER; note = N1-methyl pseudouridine
  modified_base 2360: mod_base = OTHER; note = N1-methyl pseudouridine
  modified_base 2369: mod_base = OTHER; note = N1-methyl pseudouridine
  modified_base 2381: mod_base = OTHER; note = N1-methyl pseudouridine
  modified_base 2384: mod_base = OTHER; note = N1-methyl pseudouridine
  modified_base 2399: mod_base = OTHER; note = N1-methyl pseudouridine
  modified_base 2414: mod_base = OTHER; note = N1-methyl pseudouridine
  modified_base 2429: mod_base = OTHER; note = N1-methyl pseudouridine
  modified_base 2431: mod_base = OTHER; note = N1-methyl pseudouridine
  modified_base 2435: mod_base = OTHER; note = N1-methyl pseudouridine
  modified_base 2437: mod_base = OTHER; note = N1-methyl pseudouridine
  modified_base 2440: mod_base = OTHER; note = N1-methyl pseudouridine
  modified_base 2444: mod_base = OTHER; note = N1-methyl pseudouridine
  modified_base 2462: mod_base = OTHER; note = N1-methyl pseudouridine
  modified_base 2464: mod_base = OTHER; note = N1-methyl pseudouridine
  modified_base 2468: mod_base = OTHER; note = N1-methyl pseudouridine
  modified_base 2480: mod_base = OTHER; note = N1-methyl pseudouridine
  modified_base 2486: mod_base = OTHER; note = N1-methyl pseudouridine
  modified_base 2495: mod_base = OTHER; note = N1-methyl pseudouridine
  modified_base 2503: mod_base = OTHER; note = N1-methyl pseudouridine
  modified_base 2510: mod_base = OTHER; note = N1-methyl pseudouridine
  modified_base 2519: mod_base = OTHER; note = N1-methyl pseudouridine
  modified_base 2522: mod_base = OTHER; note = N1-methyl pseudouridine
  modified_base 2533: mod_base = OTHER; note = N1-methyl pseudouridine
  modified_base 2534: mod_base = OTHER; note = N1-methyl pseudouridine
  modified_base 2537: mod_base = OTHER; note = N1-methyl pseudouridine
  modified_base 2552: mod_base = OTHER; note = N1-methyl pseudouridine
  modified_base 2564: mod_base = OTHER; note = N1-methyl pseudouridine
  modified_base 2567: mod_base = OTHER; note = N1-methyl pseudouridine
  modified_base 2606: mod_base = OTHER; note = N1-methyl pseudouridine
  modified_base 2621: mod_base = OTHER; note = N1-methyl pseudouridine
  modified_base 2624: mod_base = OTHER; note = N1-methyl pseudouridine
  modified_base 2633: mod_base = OTHER; note = N1-methyl pseudouridine
  modified_base 2641: mod_base = OTHER; note = N1-methyl pseudouridine
  modified_base 2644: mod_base = OTHER; note = N1-methyl pseudouridine
  modified_base 2654: mod_base = OTHER; note = N1-methyl pseudouridine
  modified_base 2657: mod_base = OTHER; note = N1-methyl pseudouridine
  modified_base 2669: mod_base = OTHER; note = N1-methyl pseudouridine
  modified_base 2672: mod_base = OTHER; note = N1-methyl pseudouridine
  modified_base 2686: mod_base = OTHER; note = N1-methyl pseudouridine
  modified_base 2687: mod_base = OTHER; note = N1-methyl pseudouridine
  modified_base 2696: mod_base = OTHER; note = N1-methyl pseudouridine
  modified_base 2720: mod_base = OTHER; note = N1-methyl pseudouridine
  modified_base 2729: mod_base = OTHER; note = N1-methyl pseudouridine
  modified_base 2743: mod_base = OTHER; note = N1-methyl pseudouridine
  modified_base 2744: mod_base = OTHER; note = N1-methyl pseudouridine
  modified_base 2747: mod_base = OTHER; note = N1-methyl pseudouridine
  modified_base 2759: mod_base = OTHER; note = N1-methyl pseudouridine
  modified_base 2762: mod_base = OTHER; note = N1-methyl pseudouridine
  modified_base 2777: mod_base = OTHER; note = N1-methyl pseudouridine
  modified_base 2789: mod_base = OTHER; note = N1-methyl pseudouridine
  modified_base 2798: mod_base = OTHER; note = N1-methyl pseudouridine
  modified_base 2801: mod_base = OTHER; note = N1-methyl pseudouridine
  modified_base 2813: mod_base = OTHER; note = N1-methyl pseudouridine
  modified_base 2824: mod_base = OTHER; note = N1-methyl pseudouridine
  modified_base 2843: mod_base = OTHER; note = N1-methyl pseudouridine
  modified_base 2846: mod_base = OTHER; note = N1-methyl pseudouridine
  modified_base 2855: mod_base = OTHER; note = N1-methyl pseudouridine
  modified_base 2861: mod_base = OTHER; note = N1-methyl pseudouridine
  modified_base 2864: mod_base = OTHER; note = N1-methyl pseudouridine
  modified_base 2870: mod_base = OTHER; note = N1-methyl pseudouridine
  modified_base 2882: mod_base = OTHER; note = N1-methyl pseudouridine
  modified_base 2885: mod_base = OTHER; note = N1-methyl pseudouridine
  modified_base 2893: mod_base = OTHER; note = N1-methyl pseudouridine
  modified_base 2894: mod_base = OTHER; note = N1-methyl pseudouridine
  modified_base 2905: mod_base = OTHER; note = N1-methyl pseudouridine
  modified_base 2906: mod_base = OTHER; note = N1-methyl pseudouridine
  modified_base 2911: mod_base = OTHER; note = N1-methyl pseudouridine
  modified_base 2912: mod_base = OTHER; note = N1-methyl pseudouridine
  modified_base 2914: mod_base = OTHER; note = N1-methyl pseudouridine
  modified_base 2921: mod_base = OTHER; note = N1-methyl pseudouridine
  modified_base 2930: mod_base = OTHER; note = N1-methyl pseudouridine
  modified_base 2938: mod_base = OTHER; note = N1-methyl pseudouridine
  modified_base 2959: mod_base = OTHER; note = N1-methyl pseudouridine
  modified_base 2963: mod_base = OTHER; note = N1-methyl pseudouridine
  modified_base 2972: mod_base = OTHER; note = N1-methyl pseudouridine
  modified_base 2975: mod_base = OTHER; note = N1-methyl pseudouridine
  modified_base 2987: mod_base = OTHER; note = N1-methyl pseudouridine
  modified_base 2990: mod_base = OTHER; note = N1-methyl pseudouridine
  modified_base 2998: mod_base = OTHER; note = N1-methyl pseudouridine
  modified_base 3008: mod_base = OTHER; note = N1-methyl pseudouridine
  modified_base 3019: mod_base = OTHER; note = N1-methyl pseudouridine
  modified_base 3020: mod_base = OTHER; note = N1-methyl pseudouridine
  modified_base 3023: mod_base = OTHER; note = N1-methyl pseudouridine
  modified_base 3025: mod_base = OTHER; note = N1-methyl pseudouridine
  modified_base 3034: mod_base = OTHER; note = N1-methyl pseudouridine
  modified_base 3041: mod_base = OTHER; note = N1-methyl pseudouridine
  modified_base 3043: mod_base = OTHER; note = N1-methyl pseudouridine
  modified_base 3050: mod_base = OTHER; note = N1-methyl pseudouridine
  modified_base 3059: mod_base = OTHER; note = N1-methyl pseudouridine
  modified_base 3062: mod_base = OTHER; note = N1-methyl pseudouridine
  modified_base 3083: mod_base = OTHER; note = N1-methyl pseudouridine
  modified_base 3103: mod_base = OTHER; note = N1-methyl pseudouridine
  modified_base 3106: mod_base = OTHER; note = N1-methyl pseudouridine
  modified_base 3107: mod_base = OTHER; note = N1-methyl pseudouridine
  modified_base 3109: mod_base = OTHER; note = N1-methyl pseudouridine
  modified_base 3110: mod_base = OTHER; note = N1-methyl pseudouridine
  modified_base 3112: mod_base = OTHER; note = N1-methyl pseudouridine
  modified_base 3122: mod_base = OTHER; note = N1-methyl pseudouridine
  modified_base 3125: mod_base = OTHER; note = N1-methyl pseudouridine
  modified_base 3130: mod_base = OTHER; note = N1-methyl pseudouridine
  modified_base 3131: mod_base = OTHER; note = N1-methyl pseudouridine
  modified_base 3133: mod_base = OTHER; note = N1-methyl pseudouridine
  modified_base 3134: mod_base = OTHER; note = N1-methyl pseudouridine
  modified_base 3146: mod_base = OTHER; note = N1-methyl pseudouridine
  modified_base 3152: mod_base = OTHER; note = N1-methyl pseudouridine
  modified_base 3167: mod_base = OTHER; note = N1-methyl pseudouridine
  modified_base 3182: mod_base = OTHER; note = N1-methyl pseudouridine
  modified_base 3185: mod_base = OTHER; note = N1-methyl pseudouridine
  modified_base 3212: mod_base = OTHER; note = N1-methyl pseudouridine
  modified_base 3215: mod_base = OTHER; note = N1-methyl pseudouridine
  modified_base 3217: mod_base = OTHER; note = N1-methyl pseudouridine
  modified_base 3235: mod_base = OTHER; note = N1-methyl pseudouridine
  modified_base 3236: mod_base = OTHER; note = N1-methyl pseudouridine
  modified_base 3245: mod_base = OTHER; note = N1-methyl pseudouridine
  modified_base 3254: mod_base = OTHER; note = N1-methyl pseudouridine
  modified_base 3257: mod_base = OTHER; note = N1-methyl pseudouridine
  modified_base 3263: mod_base = OTHER; note = N1-methyl pseudouridine
  modified_base 3272: mod_base = OTHER; note = N1-methyl pseudouridine
  modified_base 3278: mod_base = OTHER; note = N1-methyl pseudouridine
  modified_base 3281: mod_base = OTHER; note = N1-methyl pseudouridine
  modified_base 3296: mod_base = OTHER; note = N1-methyl pseudouridine
  modified_base 3310: mod_base = OTHER; note = N1-methyl pseudouridine
  modified_base 3311: mod_base = OTHER; note = N1-methyl pseudouridine
  modified_base 3326: mod_base = OTHER; note = N1-methyl pseudouridine
  modified_base 3329: mod_base = OTHER; note = N1-methyl pseudouridine
  modified_base 3353: mod_base = OTHER; note = N1-methyl pseudouridine
  modified_base 3356: mod_base = OTHER; note = N1-methyl pseudouridine
  modified_base 3373: mod_base = OTHER; note = N1-methyl pseudouridine
  modified_base 3388: mod_base = OTHER; note = N1-methyl pseudouridine
  modified_base 3397: mod_base = OTHER; note = N1-methyl pseudouridine
  modified_base 3398: mod_base = OTHER; note = N1-methyl pseudouridine
  modified_base 3413: mod_base = OTHER; note = N1-methyl pseudouridine
  modified_base 3418: mod_base = OTHER; note = N1-methyl pseudouridine
  modified_base 3425: mod_base = OTHER; note = N1-methyl pseudouridine
  modified_base 3428: mod_base = OTHER; note = N1-methyl pseudouridine
  modified_base 3431: mod_base = OTHER; note = N1-methyl pseudouridine
  modified_base 3434: mod_base = OTHER; note = N1-methyl pseudouridine
  modified_base 3443: mod_base = OTHER; note = N1-methyl pseudouridine
  modified_base 3467: mod_base = OTHER; note = N1-methyl pseudouridine
  modified_base 3476: mod_base = OTHER; note = N1-methyl pseudouridine
  modified_base 3485: mod_base = OTHER; note = N1-methyl pseudouridine
  modified_base 3488: mod_base = OTHER; note = N1-methyl pseudouridine
  modified_base 3494: mod_base = OTHER; note = N1-methyl pseudouridine
  modified_base 3500: mod_base = OTHER; note = N1-methyl pseudouridine
  modified_base 3503: mod_base = OTHER; note = N1-methyl pseudouridine
  modified_base 3517: mod_base = OTHER; note = N1-methyl pseudouridine
  modified_base 3518: mod_base = OTHER; note = N1-methyl pseudouridine
  modified_base 3533: mod_base = OTHER; note = N1-methyl pseudouridine
  modified_base 3538: mod_base = OTHER; note = N1-methyl pseudouridine
  modified_base 3539: mod_base = OTHER; note = N1-methyl pseudouridine
  modified_base 3542: mod_base = OTHER; note = N1-methyl pseudouridine
  modified_base 3556: mod_base = OTHER; note = N1-methyl pseudouridine
  modified_base 3566: mod_base = OTHER; note = N1-methyl pseudouridine
  modified_base 3578: mod_base = OTHER; note = N1-methyl pseudouridine
  modified_base 3581: mod_base = OTHER; note = N1-methyl pseudouridine
  modified_base 3584: mod_base = OTHER; note = N1-methyl pseudouridine
  modified_base 3590: mod_base = OTHER; note = N1-methyl pseudouridine
  modified_base 3598: mod_base = OTHER; note = N1-methyl pseudouridine
  modified_base 3605: mod_base = OTHER; note = N1-methyl pseudouridine
  modified_base 3607: mod_base = OTHER; note = N1-methyl pseudouridine
  modified_base 3608: mod_base = OTHER; note = N1-methyl pseudouridine
  modified_base 3614: mod_base = OTHER; note = N1-methyl pseudouridine
  modified_base 3635: mod_base = OTHER; note = N1-methyl pseudouridine
  modified_base 3638: mod_base = OTHER; note = N1-methyl pseudouridine
  modified_base 3656: mod_base = OTHER; note = N1-methyl pseudouridine
  modified_base 3674: mod_base = OTHER; note = N1-methyl pseudouridine
  modified_base 3680: mod_base = OTHER; note = N1-methyl pseudouridine
  modified_base 3691: mod_base = OTHER; note = N1-methyl pseudouridine
  modified_base 3695: mod_base = OTHER; note = N1-methyl pseudouridine
  modified_base 3700: mod_base = OTHER; note = N1-methyl pseudouridine
  modified_base 3701: mod_base = OTHER; note = N1-methyl pseudouridine
  modified_base 3704: mod_base = OTHER; note = N1-methyl pseudouridine
  modified_base 3706: mod_base = OTHER; note = N1-methyl pseudouridine
  modified_base 3710: mod_base = OTHER; note = N1-methyl pseudouridine
  modified_base 3721: mod_base = OTHER; note = N1-methyl pseudouridine
  modified_base 3731: mod_base = OTHER; note = N1-methyl pseudouridine
  modified_base 3767: mod_base = OTHER; note = N1-methyl pseudouridine
  modified_base 3769: mod_base = OTHER; note = N1-methyl pseudouridine
  modified_base 3770: mod_base = OTHER; note = N1-methyl pseudouridine
  modified_base 3773: mod_base = OTHER; note = N1-methyl pseudouridine
  modified_base 3790: mod_base = OTHER; note = N1-methyl pseudouridine
  modified_base 3794: mod_base = OTHER; note = N1-methyl pseudouridine
  modified_base 3803: mod_base = OTHER; note = N1-methyl pseudouridine
  modified_base 3806: mod_base = OTHER; note = N1-methyl pseudouridine
  modified_base 3815: mod_base = OTHER; note = N1-methyl pseudouridine
  modified_base 3823: mod_base = OTHER; note = N1-methyl pseudouridine
  modified_base 3824: mod_base = OTHER; note = N1-methyl pseudouridine
  modified_base 3836: mod_base = OTHER; note = N1-methyl pseudouridine
  modified_base 3839: mod_base = OTHER; note = N1-methyl pseudouridine
  modified_base 3842: mod_base = OTHER; note = N1-methyl pseudouridine
  modified_base 3857: mod_base = OTHER; note = N1-methyl pseudouridine
  modified_base 3866: mod_base = OTHER; note = N1-methyl pseudouridine
  modified_base 3869: mod_base = OTHER; note = N1-methyl pseudouridine
  modified_base 3877: mod_base = OTHER; note = N1-methyl pseudouridine
  modified_base 3902: mod_base = OTHER; note = N1-methyl pseudouridine
  modified_base 3923: mod_base = OTHER; note = N1-methyl pseudouridine
  modified_base 3926: mod_base = OTHER; note = N1-methyl pseudouridine
  modified_base 3932: mod_base = OTHER; note = N1-methyl pseudouridine
  modified_base 3934: mod_base = OTHER; note = N1-methyl pseudouridine
  modified_base 3935: mod_base = OTHER; note = N1-methyl pseudouridine
  modified_base 3941: mod_base = OTHER; note = N1-methyl pseudouridine
  modified_base 3950: mod_base = OTHER; note = N1-methyl pseudouridine
  modified_base 3967: mod_base = OTHER; note = N1-methyl pseudouridine
  modified_base 3968: mod_base = OTHER; note = N1-methyl pseudouridine
  modified_base 3973: mod_base = OTHER; note = N1-methyl pseudouridine
  modified_base 3976: mod_base = OTHER; note = N1-methyl pseudouridine
  modified_base 3977: mod_base = OTHER; note = N1-methyl pseudouridine
  modified_base 3989: mod_base = OTHER; note = N1-methyl pseudouridine
  modified_base 4003: mod_base = OTHER; note = N1-methyl pseudouridine
  modified_base 4022: mod_base = OTHER; note = N1-methyl pseudouridine
  modified_base 4025: mod_base = OTHER; note = N1-methyl pseudouridine
  modified_base 4037: mod_base = OTHER; note = N1-methyl pseudouridine
  modified_base 4040: mod_base = OTHER; note = N1-methyl pseudouridine
  modified_base 4052: mod_base = OTHER; note = N1-methyl pseudouridine
  modified_base 4061: mod_base = OTHER; note = N1-methyl pseudouridine
  modified_base 4063: mod_base = OTHER; note = N1-methyl pseudouridine
  modified_base 4076: mod_base = OTHER; note = N1-methyl pseudouridine
  modified_base 4082: mod_base = OTHER; note = N1-methyl pseudouridine
  modified_base 4091: mod_base = OTHER; note = N1-methyl pseudouridine
gacaagaagtacagcatcggcctggccatcggcaccaacagcgtgggctgggccgtgatcaccgacgagtacaaggtgcccagcaagaagttcaaggtgctgggcaacaccgaccggcacagcatcaagaagaacctgatcggcgccctgctgttcgacagcggcgagacagccgaggccacccggctgaagcggaccgcccggcggcggtacacccggcggaagaaccggatctgctacctgcaggagatcttcagcaacgagatggccaaggtggacgacagcttcttccaccggctggaggagagcttcctggtggaggaggacaagaagcacgagcggcaccccatcttcggcaacatcgtggacgaggtggcctaccacgagaagtaccccaccatctaccacctgcggaagaagctggtggacagcaccgacaaggccgacctgcggctgatctacctggccctggcccacatgatcaagttccggggccacttcctgatcgagggcgacctgaaccccgacaacagcgacgtggacaagctgttcatccagctggtgcagacctacaaccagctgttcgaggagaaccccatcaacgccagcggcgtggacgccaaggccatcctgagcgcccggctgagcaagagccggcggctggagaacctgatcgcccagctgcccggcgagaagaagaacggcctgttcggcaacctgatcgccctgagcctgggcctgacccccaacttcaagagcaacttcgacctggccgaggacgccaagctgcagctgagcaaggacacctacgacgacgacctggacaacctgctggcccagatcggcgaccagtacgccgacctgttcctggccgccaagaacctgagcgacgccatcctgctgagcgacatcctgcgggtgaacaccgagatcaccaaggcccccctgagcgccagcatgatcaagcggtacgacgagcaccaccaggacctgaccctgctgaaggccctggtgcggcagcagctgcccgagaagtacaaggagatcttcttcgaccagagcaagaacggctacgccggctacatcgacggcggcgccagccaggaggagttctacaagttcatcaagcccatcctggagaagatggacggcaccgaggagctgctggtgaagctgaaccgggaggacctgctgcggaagcagcggaccttcgacaacggcagcatcccccaccagatccacctgggcgagctgcacgccatcctgcggcggcaggaggacttctaccccttcctgaaggacaaccgggagaagatcgagaagatcctgaccttccggatcccctactacgtgggccccctggcccggggcaacagccggttcgcctggatgacccgcaagagcgaggagacaatcaccccctggaacttcgaggaggtggtggacaagggcgccagcgcccagagcttcatcgagcggatgaccaacttcgacaagaacctgcccaacgagaaggtgctgcccaagcacagcctgctgtacgagtacttcaccgtgtacaacgagctgaccaaggtgaagtacgtgaccgagggcatgcggaagcccgccttcctgagcggcgagcagaagaaggccatcgtggacctgctgttcaagaccaaccggaaggtgaccgtgaagcagctgaaggaggactacttcaagaagatcgagtgcttcgacagcgtggagatcagcggcgtggaggaccggttcaacgccagcctgggcacctaccacgacctgctgaagatcatcaaggacaaggacttcctggacaacgaggagaacgaggacatcctggaggacatcgtgctgaccctgaccctgttcgaggaccgggagatgatcgaggagcggctgaagacctacgcccacctgttcgacgacaaggtgatgaagcagctgaagcggcggcggtacaccggctggggccggctgagccggaagctgatcaacggcatccgggacaagcagagcggcaagaccatcctggacttcctcaagagcgacggcttcgccaacgccaacttcatgcagctgatccacgacgacagcctgaccttcaaggaggacatccagaaggcccaggtgagcggccagggcgacagcctgcacgagcacatcgccaacctggccggcagccccgccatcaagaagggcatcctgcagaccgtgaaggtggtggacgagctggtgaaggtgatgggccggcacaagcccgagaacatcgtgatcgagatggcccgggagaaccagaccacccagaagggccagaagaacagccgggagcggatgaagcggatcgaggagggcatcaaggagctgggcagccagatcctgaaggagcaccccgtggagaacacccagctgcagaacgagaagctgtacctgtactacctgcagaacggccgggacatgtacgtggaccaggagctggacatcaaccggctgagcgactacgacgtggaccacatcgtgccccagagcttcctgaaggacgacagcatcgacaacaaggtgctgacccggagcgacaagaaccggggcaagagcgacaacgtgcccagcgaggaggtggtgaagaagatgaagaactactggcggcagctgctgaacgccaagctgatcacccagcggaagttcgacaacctgaccaaggccgagcggggcggcctgagcgagctggacaaggccggcttcatcaagcggcagctggtggagacacggcagatcaccaagcacgtggcccagatcctggacagccggatgaacaccaagtacgacgagaacgacaagctgatccgggaggtgaaggtgatcaccctcaagagcaagctggtgagcgacttccggaaggacttccagttctacaaggtgcgggagatcaacaactaccaccacgcccacgacgcctacctgaacgccgtggtgggcaccgccctgatcaagaagtaccccaagctggagagcgagttcgtgtacggcgactacaaggtgtacgacgtgcggaagatgatcgccaagagcgagcaggagatcggcaaggccaccgccaagtacttcttctacagcaacatcatgaacttcttcaagaccgagatcaccctggccaacggcgagatccggaagcggcccctgatcgagacaaacggcgagacaggcgagatcgtgtgggacaagggccgggacttcgccaccgtgcggaaggtgctgagcatgccccaggtgaacatcgtgaagaagaccgaggtgcagaccggcggcttcagcaaggagagcatcctgcccaagcggaacagcgacaagctgatcgcccggaagaaggactgggaccccaagaagtacggcggcttcgagagccccaccgtggcctacagcgtgctggtggtggccaaggtggagaagggcaagagcaagaagctcaagagcgtgaaggagctgctgggcatcaccatcatggagcggagcagcttcgagaagaaccccatcgacttcctggaggccaagggctacaaggaggtgaagaaggacctgatcatcaagctgcccaagtacagcctgttcgagctggagaacggccggaagcggatgctggccagcgccggcgagctgcagaagggcaacgagctggccctgcccagcaagtacgtgaacttcctgtacctggccagccactacgagaagctgaagggcagccccgaggacaacgagcagaagcagctgttcgtggagcagcacaagcactacctggacgagatcatcgagcagatcagcgagttcagcaagcgggtgatcctggccgacgccaacctggacaaggtgctgagcgcctacaacaagcaccgggacaagcccatccgggagcaggccgagaacatcatccacctgttcaccctgaccaacctgggcgcccccgccgccttcaagtacttcgacaccaccatcgaccggaagcggtacaccagcaccaaggaggtgctggacgccaccctgatccaccagagcatcaccggcctgtacgagacacggatcgacctgagccagctgggcggcgac

SEQ ID NO: 2156 - protein, 1367 aa, synthetic construct
DKKYSIGLAIGTNSVGWAVITDEYKVPSKKFKVLGNTDRHSIKKNLIGALLFDSGETAEATRLKRTARRRYTRRKNRICYLQEIFSNEMAKVDDSFFHRLEESFLVEEDKKHERHPIFGNIVDEVAYHEKYPTIYHLRKKLVDSTDKADLRLIYLALAHMIKFRGHFLIEGDLNPDNSDVDKLFIQLVQTYNQLFEENPINASGVDAKAILSARLSKSRRLENLIAQLPGEKKNGLFGNLIALSLGLTPNFKSNFDLAEDAKLQLSKDTYDDDLDNLLAQIGDQYADLFLAAKNLSDAILLSDILRVNTEITKAPLSASMIKRYDEHHQDLTLLKALVRQQLPEKYKEIFFDQSKNGYAGYIDGGASQEEFYKFIKPILEKMDGTEELLVKLNREDLLRKQRTFDNGSIPHQIHLGELHAILRRQEDFYPFLKDNREKIEKILTFRIPYYVGPLARGNSRFAWMTRKSEETITPWNFEEVVDKGASAQSFIERMTNFDKNLPNEKVLPKHSLLYEYFTVYNELTKVKYVTEGMRKPAFLSGEQKKAIVDLLFKTNRKVTVKQLKEDYFKKIECFDSVEISGVEDRFNASLGTYHDLLKIIKDKDFLDNEENEDILEDIVLTLTLFEDREMIEERLKTYAHLFDDKVMKQLKRRRYTGWGRLSRKLINGIRDKQSGKTILDFLKSDGFANANFMQLIHDDSLTFKEDIQKAQVSGQGDSLHEHIANLAGSPAIKKGILQTVKVVDELVKVMGRHKPENIVIEMARENQTTQKGQKNSRERMKRIEEGIKELGSQILKEHPVENTQLQNEKLYLYYLQNGRDMYVDQELDINRLSDYDVDHIVPQSFLKDDSIDNKVLTRSDKNRGKSDNVPSEEVVKKMKNYWRQLLNAKLITQRKFDNLTKAERGGLSELDKAGFIKRQLVETRQITKHVAQILDSRMNTKYDENDKLIREVKVITLKSKLVSDFRKDFQFYKVREINNYHHAHDAYLNAVVGTALIKKYPKLESEFVYGDYKVYDVRKMIAKSEQEIGKATAKYFFYSNIMNFFKTEITLANGEIRKRPLIETNGETGEIVWDKGRDFATVRKVLSMPQVNIVKKTEVQTGGFSKESILPKRNSDKLIARKKDWDPKKYGGFESPTVAYSVLVVAKVEKGKSKKLKSVKELLGITIMERSSFEKNPIDFLEAKGYKEVKKDLIIKLPKYSLFELENGRKRMLASAGELQKGNELALPSKYVNFLYLASHYEKLKGSPEDNEQKQLFVEQHKHYLDEIIEQISEFSKRVILADANLDKVLSAYNKHRDKPIREQAENIIHLFTLTNLGAPAAFKYFDTTIDRKRYTSTKEVLDATLIHQSITGLYETRIDLSQLGGD

SEQ ID NO: 2157 - RNA, 4929 nt, synthetic construct
  source 1..4929: mol_type = other RNA
  modified_base 7: mod_base = OTHER; note = N1-methyl pseudouridine
  modified_base 25: mod_base = OTHER; note = N1-methyl pseudouridine
  modified_base 35: mod_base = OTHER; note = N1-methyl pseudouridine
  modified_base 37: mod_base = OTHER; note = N1-methyl pseudouridine
  modified_base 49: mod_base = OTHER; note = N1-methyl pseudouridine
  modified_base 58: mod_base = OTHER; note = N1-methyl pseudouridine
  modified_base 63: mod_base = OTHER; note = N1-methyl pseudouridine
  modified_base 64: mod_base = OTHER; note = N1-methyl pseudouridine
  modified_base 75: mod_base = OTHER; note = N1-methyl pseudouridine
  modified_base 78: mod_base = OTHER; note = N1-methyl pseudouridine
  modified_base 82: mod_base = OTHER; note = N1-methyl pseudouridine
  modified_base 94: mod_base = OTHER; note = N1-methyl pseudouridine
  modified_base 100: mod_base = OTHER; note = N1-methyl pseudouridine
  modified_base 130: mod_base = OTHER; note = N1-methyl pseudouridine
  modified_base 136: mod_base = OTHER; note = N1-methyl pseudouridine
  modified_base 145: mod_base = OTHER; note = N1-methyl pseudouridine
  modified_base 148: mod_base = OTHER; note = N1-methyl pseudouridine
  modified_base 151: mod_base = OTHER; note = N1-methyl pseudouridine
  modified_base 154: mod_base = OTHER; note = N1-methyl pseudouridine
  modified_base 166: mod_base = OTHER; note = N1-methyl pseudouridine
  modified_base 169: mod_base = OTHER; note = N1-methyl pseudouridine
  modified_base 180: mod_base = OTHER; note = N1-methyl pseudouridine
  modified_base 193: mod_base = OTHER; note = N1-methyl pseudouridine
  modified_base 199: mod_base = OTHER; note = N1-methyl pseudouridine
  modified_base 226: mod_base = OTHER; note = N1-methyl pseudouridine
  modified_base 229: mod_base = OTHER; note = N1-methyl pseudouridine
  modified_base 235: mod_base = OTHER; note = N1-methyl pseudouridine
  modified_base 250: mod_base = OTHER; note = N1-methyl pseudouridine
  modified_base 253: mod_base = OTHER; note = N1-methyl pseudouridine
  modified_base 256: mod_base = OTHER; note = N1-methyl pseudouridine
  modified_base 264: mod_base = OTHER; note = N1-methyl pseudouridine
  modified_base 271: mod_base = OTHER; note = N1-methyl pseudouridine
  modified_base 274: mod_base = OTHER; note = N1-methyl pseudouridine
  modified_base 286: mod_base = OTHER; note = N1-methyl pseudouridine
  modified_base 288: mod_base = OTHER; note = N1-methyl pseudouridine
  modified_base 292: mod_base = OTHER; note = N1-methyl pseudouridine
  modified_base 297: mod_base = OTHER; note = N1-methyl pseudouridine
  modified_base 298: mod_base = OTHER; note = N1-methyl pseudouridine
  modified_base 306: mod_base = OTHER; note = N1-methyl pseudouridine
  modified_base 310: mod_base = OTHER; note = N1-methyl pseudouridine
  modified_base 313: mod_base = OTHER; note = N1-methyl pseudouridine
  modified_base 315: mod_base = OTHER; note = N1-methyl pseudouridine
  modified_base 328: mod_base = OTHER; note = N1-methyl pseudouridine
  modified_base 331: mod_base = OTHER; note = N1-methyl pseudouridine
  modified_base 343: mod_base = OTHER; note = N1-methyl pseudouridine
  modified_base 352: mod_base = OTHER; note = N1-methyl pseudouridine
  modified_base 355: mod_base = OTHER; note = N1-methyl pseudouridine
  modified_base 357: mod_base = OTHER; note = N1-methyl pseudouridine
  modified_base 358: mod_base = OTHER; note = N1-methyl pseudouridine
  modified_base 364: mod_base = OTHER; note = N1-methyl pseudouridine
  modified_base 397: mod_base = OTHER; note = N1-methyl pseudouridine
  modified_base 400: mod_base = OTHER; note = N1-methyl pseudouridine
  modified_base 406: mod_base = OTHER; note = N1-methyl pseudouridine
  modified_base 409: mod_base = OTHER; note = N1-methyl pseudouridine
  modified_base 424: mod_base = OTHER; note = N1-methyl pseudouridine
  modified_base 436: mod_base = OTHER; note = N1-methyl pseudouridine
  modified_base 442: mod_base = OTHER; note = N1-methyl pseudouridine
  modified_base 454: mod_base = OTHER; note = N1-methyl pseudouridine
  modified_base 457: mod_base = OTHER; note = N1-methyl pseudouridine
  modified_base 468: mod_base = OTHER; note = N1-methyl pseudouridine
  modified_base 478: mod_base = OTHER; note = N1-methyl pseudouridine
  modified_base 481: mod_base = OTHER; note = N1-methyl pseudouridine
  modified_base 483: mod_base = OTHER; note = N1-methyl pseudouridine
  modified_base 489: mod_base = OTHER; note = N1-methyl pseudouridine
  modified_base 490: mod_base = OTHER; note = N1-methyl pseudouridine
  modified_base 492: mod_base = OTHER; note = N1-methyl pseudouridine
  modified_base 493: mod_base = OTHER; note = N1-methyl pseudouridine
  modified_base 499: mod_base = OTHER; note = N1-methyl pseudouridine
  modified_base 511: mod_base = OTHER; note = N1-methyl pseudouridine
  modified_base 513: mod_base = OTHER; note = N1-methyl pseudouridine
  modified_base 514: mod_base = OTHER; note = N1-methyl pseudouridine
  modified_base 654: mod_base = OTHER; note = N1-methyl pseudouridine
  modified_base 661: mod_base = OTHER; note = N1-methyl pseudouridine
  modified_base 667: mod_base = OTHER; note = N1-methyl pseudouridine
  modified_base 673: mod_base = OTHER; note = N1-methyl pseudouridine
  modified_base 688: mod_base = OTHER; note = N1-methyl pseudouridine
  modified_base 693: mod_base = OTHER; note = N1-methyl pseudouridine
  modified_base 700: mod_base = OTHER; note = N1-methyl pseudouridine
  modified_base 703: mod_base = OTHER; note = N1-methyl pseudouridine
  modified_base 714: mod_base = OTHER; note = N1-methyl pseudouridine
  modified_base 721: mod_base = OTHER; note = N1-methyl pseudouridine
  modified_base 735: mod_base = OTHER; note = N1-methyl pseudouridine
  modified_base 736: mod_base = OTHER; note = N1-methyl pseudouridine
  modified_base 742: mod_base = OTHER; note = N1-methyl pseudouridine
  modified_base 745: mod_base = OTHER; note = N1-methyl pseudouridine
  modified_base 769: mod_base = OTHER; note = N1-methyl pseudouridine
  modified_base 781: mod_base = OTHER; note = N1-methyl pseudouridine
  modified_base 784: mod_base = OTHER; note = N1-methyl pseudouridine
  modified_base 793: mod_base = OTHER; note = N1-methyl pseudouridine
  modified_base 796: mod_base = OTHER; note = N1-methyl pseudouridine
  modified_base 798: mod_base = OTHER; note = N1-methyl pseudouridine
  modified_base 799: mod_base = OTHER; note = N1-methyl pseudouridine
  modified_base 832: mod_base = OTHER; note = N1-methyl pseudouridine
  modified_base 855: mod_base = OTHER; note = N1-methyl pseudouridine
  modified_base 877: mod_base = OTHER; note = N1-methyl pseudouridine
  modified_base 879: mod_base = OTHER; note = N1-methyl pseudouridine
  modified_base 882: mod_base = OTHER; note = N1-methyl pseudouridine
  modified_base 886: mod_base = OTHER; note = N1-methyl pseudouridine
  modified_base 895: mod_base = OTHER; note = N1-methyl pseudouridine
  modified_base 897: mod_base = OTHER; note = N1-methyl pseudouridine
  modified_base 898: mod_base = OTHER; note = N1-methyl pseudouridine
  modified_base 910: mod_base = OTHER; note = N1-methyl pseudouridine
  modified_base 919: mod_base = OTHER; note = N1-methyl pseudouridine
  modified_base 930: mod_base = OTHER; note = N1-methyl pseudouridine
  modified_base 931: mod_base = OTHER; note = N1-methyl pseudouridine
  modified_base 933: mod_base = OTHER; note = N1-methyl pseudouridine
  modified_base 934: mod_base = OTHER; note = N1-methyl pseudouridine
  modified_base 943: mod_base = OTHER; note = N1-methyl pseudouridine
  modified_base 954: mod_base = OTHER; note = N1-methyl pseudouridine
  modified_base 955: mod_base = OTHER; note = N1-methyl pseudouridine
  modified_base 958: mod_base = OTHER; note = N1-methyl pseudouridine
  modified_base 961: mod_base = OTHER; note = N1-methyl pseudouridine
  modified_base 994: mod_base = OTHER; note = N1-methyl pseudouridine
  modified_base 996: mod_base = OTHER; note = N1-methyl pseudouridine
  modified_base 997: mod_base = OTHER; note = N1-methyl pseudouridine
  modified_base 1006: mod_base = OTHER; note = N1-methyl pseudouridine
  modified_base 1009: mod_base = OTHER; note = N1-methyl pseudouridine
  modified_base 1018: mod_base = OTHER; note = N1-methyl pseudouridine
  modified_base 1023: mod_base = OTHER; note = N1-methyl pseudouridine
  modified_base 1035: mod_base = OTHER; note = N1-methyl pseudouridine
  modified_base 1045: mod_base = OTHER; note = N1-methyl pseudouridine
  modified_base 1047: mod_base = OTHER; note = N1-methyl pseudouridine
  modified_base 1054: mod_base = OTHER; note = N1-methyl pseudouridine
  modified_base 1066: mod_base = OTHER; note = N1-methyl pseudouridine
  modified_base 1069: mod_base = OTHER; note = N1-methyl pseudouridine
  modified_base 1093: mod_base = OTHER; note = N1-methyl pseudouridine
  modified_base 1099: mod_base = OTHER; note = N1-methyl pseudouridine
  modified_base 1102: mod_base = OTHER; note = N1-methyl pseudouridine
  modified_base 1104: mod_base = OTHER; note = N1-methyl pseudouridine
  modified_base 1108: mod_base = OTHER; note = N1-methyl pseudouridine
  modified_base 1114: mod_base = OTHER; note = N1-methyl pseudouridine
  modified_base 1123: mod_base = OTHER; note = N1-methyl pseudouridine
  modified_base 1126: mod_base = OTHER; note = N1-methyl pseudouridine
  modified_base 1131: mod_base = OTHER; note = N1-methyl pseudouridine
  modified_base 1132: mod_base = OTHER; note = N1-methyl pseudouridine
  modified_base 1143: mod_base = OTHER; note = N1-methyl pseudouridine
  modified_base 1144: mod_base = OTHER; note = N1-methyl pseudouridine
  modified_base 1147: mod_base = OTHER; note = N1-methyl pseudouridine
  modified_base 1150: mod_base = OTHER; note = N1-methyl pseudouridine
  modified_base 1162: mod_base = OTHER; note = N1-methyl pseudouridine
  modified_base 1183: mod_base = OTHER; note = N1-methyl pseudouridine
  modified_base 1192: mod_base = OTHER; note = N1-methyl pseudouridine
  modified_base 1194: mod_base = OTHER; note = N1-methyl pseudouridine
  modified_base 1195: mod_base = OTHER; note = N1-methyl pseudouridine
  modified_base 1198: mod_base = OTHER; note = N1-methyl pseudouridine
  modified_base 1204: mod_base = OTHER; note = N1-methyl pseudouridine
  modified_base 1207: mod_base = OTHER; note = N1-methyl pseudouridine
  modified_base 1215: mod_base = OTHER; note = N1-methyl pseudouridine
  modified_base 1225: mod_base = OTHER; note = N1-methyl pseudouridine
  modified_base 1227: mod_base = OTHER; note = N1-methyl pseudouridine
  modified_base 1228: mod_base = OTHER; note = N1-methyl pseudouridine
  modified_base 1243: mod_base = OTHER; note = N1-methyl pseudouridine
  modified_base 1258: mod_base = OTHER; note = N1-methyl pseudouridine
  modified_base 1273: mod_base = OTHER; note = N1-methyl pseudouridine
  modified_base 1276: mod_base = OTHER; note = N1-methyl pseudouridine
  modified_base 1288: mod_base = OTHER; note = N1-methyl pseudouridine
  modified_base 1306: mod_base = OTHER; note = N1-methyl pseudouridine
  modified_base 1315: mod_base = OTHER; note = N1-methyl pseudouridine
  modified_base 1318: mod_base = OTHER; note = N1-methyl pseudouridine
  modified_base 1327: mod_base = OTHER; note = N1-methyl pseudouridine
  modified_base 1351: mod_base = OTHER; note = N1-methyl pseudouridine
  modified_base 1353: mod_base = OTHER; note = N1-methyl pseudouridine
  modified_base 1354: mod_base = OTHER; note = N1-methyl pseudouridine
  modified_base 1363: mod_base = OTHER; note = N1-methyl pseudouridine
  modified_base 1366: mod_base = OTHER; note = N1-methyl pseudouridine
  modified_base 1372: mod_base = OTHER; note = N1-methyl pseudouridine
  modified_base 1378: mod_base = OTHER; note = N1-methyl pseudouridine
  modified_base 1384: mod_base = OTHER; note = N1-methyl pseudouridine
  modified_base 1395: mod_base = OTHER; note = N1-methyl pseudouridine
  modified_base 1396: mod_base = OTHER; note = N1-methyl pseudouridine
  modified_base 1407: mod_base = OTHER; note = N1-methyl pseudouridine
  modified_base 1408: mod_base = OTHER; note = N1-methyl pseudouridine
  modified_base 1414: mod_base = OTHER; note = N1-methyl pseudouridine
  modified_base 1432: mod_base = OTHER; note = N1-methyl pseudouridine
  modified_base 1438: mod_base = OTHER; note = N1-methyl pseudouridine
  modified_base 1452: mod_base = OTHER; note = N1-methyl pseudouridine
  modified_base 1465: mod_base = OTHER; note = N1-methyl pseudouridine
  modified_base 1474: mod_base = OTHER; note = N1-methyl pseudouridine
  modified_base 1477: mod_base = OTHER; note = N1-methyl pseudouridine
  modified_base 1486: mod_base = OTHER; note = N1-methyl pseudouridine
  modified_base 1497: mod_base = OTHER; note = N1-methyl pseudouridine
  modified_base 1507: mod_base = OTHER; note = N1-methyl pseudouridine
  modified_base 1509: mod_base = OTHER; note = N1-methyl pseudouridine
  modified_base 1510: mod_base = OTHER; note = N1-methyl pseudouridine
  modified_base 1513: mod_base = OTHER; note = N1-methyl pseudouridine
  modified_base 1528: mod_base = OTHER; note = N1-methyl pseudouridine
  modified_base 1540: mod_base = OTHER; note = N1-methyl pseudouridine
  modified_base 1543: mod_base = OTHER; note = N1-methyl pseudouridine
  modified_base 1546: mod_base = OTHER; note = N1-methyl pseudouridine
  modified_base 1555: mod_base = OTHER; note = N1-methyl pseudouridine
  modified_base 1558: mod_base = OTHER; note = N1-methyl pseudouridine
  modified_base 1564: mod_base = OTHER; note = N1-methyl pseudouridine
  modified_base 1576: mod_base = OTHER; note = N1-methyl pseudouridine
  modified_base 1591: mod_base = OTHER; note = N1-methyl pseudouridine
  modified_base 1603: mod_base = OTHER; note = N1-methyl pseudouridine
  modified_base 1606: mod_base = OTHER; note = N1-methyl pseudouridine
  modified_base 1614: mod_base = OTHER; note = N1-methyl pseudouridine
  modified_base 1636: mod_base = OTHER; note = N1-methyl pseudouridine
  modified_base 1642: mod_base = OTHER; note = N1-methyl pseudouridine
  modified_base 1645: mod_base = OTHER; note = N1-methyl pseudouridine
  modified_base 1654: mod_base = OTHER; note = N1-methyl pseudouridine
  modified_base 1657: mod_base = OTHER; note = N1-methyl pseudouridine
  modified_base 1669: mod_base = OTHER; note = N1-methyl pseudouridine
  modified_base 1680: mod_base = OTHER; note = N1-methyl pseudouridine
  modified_base 1690: mod_base = OTHER; note = N1-methyl pseudouridine
  modified_base 1692: mod_base = OTHER; note = N1-methyl pseudouridine
  modified_base 1693: mod_base = OTHER; note = N1-methyl pseudouridine
  modified_base 1695: mod_base = OTHER; note = N1-methyl pseudouridine
  modified_base 1696: mod_base = OTHER; note = N1-methyl pseudouridine
  modified_base 1716: mod_base = OTHER; note = N1-methyl pseudouridine
  modified_base 1725: mod_base = OTHER; note = N1-methyl pseudouridine
  modified_base 1729: mod_base = OTHER; note = N1-methyl pseudouridine
  modified_base 1755: mod_base = OTHER; note = N1-methyl pseudouridine
  modified_base 1756: mod_base = OTHER; note = N1-methyl pseudouridine
  modified_base 1758: mod_base = OTHER; note = N1-methyl pseudouridine
  modified_base 1764: mod_base = OTHER; note = N1-methyl pseudouridine
  modified_base 1765: mod_base = OTHER; note = N1-methyl pseudouridine
  modified_base 1768: mod_base = OTHER; note = N1-methyl pseudouridine
  modified_base 1777: mod_base = OTHER; note = N1-methyl pseudouridine
  modified_base 1780: mod_base = OTHER; note = N1-methyl pseudouridine
  modified_base 1789: mod_base = OTHER; note = N1-methyl pseudouridine
  modified_base 1807: mod_base = OTHER; note = N1-methyl pseudouridine
  modified_base 1810: mod_base = OTHER; note = N1-methyl pseudouridine
  modified_base 1813: mod_base = OTHER; note = N1-methyl pseudouridine
  modified_base 1819: mod_base = OTHER; note = N1-methyl pseudouridine
  modified_base 1834: mod_base = OTHER; note = N1-methyl pseudouridine
  modified_base 1837: mod_base = OTHER; note = N1-methyl pseudouridine
  modified_base 1854: mod_base = OTHER; note = N1-methyl pseudouridine
  modified_base 1855: mod_base = OTHER; note = N1-methyl pseudouridine
  modified_base 1870: mod_base = OTHER; note = N1-methyl pseudouridine
  modified_base 1882: mod_base = OTHER; note = N1-methyl pseudouridine
  modified_base 1888: mod_base = OTHER; note = N1-methyl pseudouridine
  modified_base 1897: mod_base = OTHER; note = N1-methyl pseudouridine
  modified_base 1906: mod_base = OTHER; note = N1-methyl pseudouridine
  modified_base 1909: mod_base = OTHER; note = N1-methyl pseudouridine
  modified_base 1926: mod_base = OTHER; note = N1-methyl pseudouridine
  modified_base 1927: mod_base = OTHER; note = N1-methyl pseudouridine
  modified_base 1929: mod_base = OTHER; note = N1-methyl pseudouridine
  modified_base 1935: mod_base = OTHER; note = N1-methyl pseudouridine
  modified_base 1936: mod_base = OTHER; note = N1-methyl pseudouridine
  modified_base 1939: mod_base = OTHER; note = N1-methyl pseudouridine
  modified_base 1960: mod_base = OTHER; note = N1-methyl pseudouridine
  modified_base 1969: mod_base = OTHER; note = N1-methyl pseudouridine
  modified_base 1972: mod_base = OTHER; note = N1-methyl pseudouridine
  modified_base 1977: mod_base = OTHER; note = N1-methyl pseudouridine
  modified_base 1978: mod_base = OTHER; note = N1-methyl pseudouridine
  modified_base 1984: mod_base = OTHER; note = N1-methyl pseudouridine
  modified_base 1989: mod_base = OTHER; note = N1-methyl pseudouridine
  modified_base 1992: mod_base = OTHER; note = N1-methyl pseudouridine
  modified_base 1996: mod_base = OTHER; note = N1-methyl pseudouridine
  modified_base 2005: mod_base = OTHER; note = N1-methyl pseudouridine
  modified_base 2025: mod_base = OTHER; note = N1-methyl pseudouridine
  modified_base 2026: mod_base = OTHER; note = N1-methyl pseudouridine
  modified_base 2031: mod_base = OTHER; note = N1-methyl pseudouridine
  modified_base 2035: mod_base = OTHER; note = N1-methyl pseudouridine
  modified_base 2059: mod_base = OTHER; note = N1-methyl pseudouridine
  modified_base 2067: mod_base = OTHER; note = N1-methyl pseudouridine
  modified_base 2073: mod_base = OTHER; note = N1-methyl pseudouridine
  modified_base 2074: mod_base = OTHER; note = N1-methyl pseudouridine
  modified_base 2083: mod_base = OTHER; note = N1-methyl pseudouridine
  modified_base 2086: mod_base = OTHER; note = N1-methyl pseudouridine
  modified_base 2112: mod_base = OTHER; note = N1-methyl pseudouridine
  modified_base 2113: mod_base = OTHER; note = N1-methyl pseudouridine
  modified_base 2116: mod_base = OTHER; note = N1-methyl pseudouridine
  modified_base 2125: mod_base = OTHER; note = N1-methyl pseudouridine
  modified_base 2133: mod_base = OTHER; note = N1-methyl pseudouridine
  modified_base 2134: mod_base = OTHER; note = N1-methyl pseudouridine
  modified_base 2146: mod_base = OTHER; note = N1-methyl pseudouridine
  modified_base 2161: mod_base = OTHER; note = N1-methyl pseudouridine
  modified_base 2164: mod_base = OTHER; note = N1-methyl pseudouridine
  modified_base 2179: mod_base = OTHER; note = N1-methyl pseudouridine
  modified_base 2182: mod_base = OTHER; note = N1-methyl pseudouridine
  modified_base 2184: mod_base = OTHER; note = N1-methyl pseudouridine
  modified_base 2190: mod_base = OTHER; note = N1-methyl pseudouridine
  modified_base 2193: mod_base = OTHER; note = N1-methyl pseudouridine
  modified_base 2194: mod_base = OTHER; note = N1-methyl pseudouridine
  modified_base 2200: mod_base = OTHER; note = N1-methyl pseudouridine
  modified_base 2202: mod_base = OTHER; note = N1-methyl pseudouridine
  modified_base 2212: mod_base = OTHER; note = N1-methyl pseudouridine
  modified_base 2221: mod_base = OTHER; note = N1-methyl pseudouridine
  modified_base 2226: mod_base = OTHER; note = N1-methyl pseudouridine
  modified_base 2230: mod_base = OTHER; note = N1-methyl pseudouridine
  modified_base 2242: mod_base = OTHER; note = N1-methyl pseudouridine
  modified_base 2256: mod_base = OTHER; note = N1-methyl pseudouridine
  modified_base 2257: mod_base = OTHER; note = N1-methyl pseudouridine
  modified_base 2260: mod_base = OTHER; note = N1-methyl pseudouridine
  modified_base 2284: mod_base = OTHER; note = N1-methyl pseudouridine
  modified_base 2287: mod_base = OTHER; note = N1-methyl pseudouridine
  modified_base 2293: mod_base = OTHER; note = N1-methyl pseudouridine
  modified_base 2296: mod_base = OTHER; note = N1-methyl pseudouridine
  modified_base 2298: mod_base = OTHER; note = N1-methyl pseudouridine
  modified_base 2299: mod_base = OTHER; note = N1-methyl pseudouridine
  modified_base 2317: mod_base = OTHER; note = N1-methyl pseudouridine
  modified_base 2323: mod_base = OTHER; note = N1-methyl pseudouridine
  modified_base 2332: mod_base = OTHER; note = N1-methyl pseudouridine
  modified_base 2343: mod_base = OTHER; note = N1-methyl pseudouridine
  modified_base 2346: mod_base = OTHER; note = N1-methyl pseudouridine
  modified_base 2347: mod_base = OTHER; note = N1-methyl pseudouridine
  modified_base 2356: mod_base = OTHER; note = N1-methyl pseudouridine
  modified_base 2361: mod_base = OTHER; note = N1-methyl pseudouridine
  modified_base 2364: mod_base = OTHER; note = N1-methyl pseudouridine
  modified_base 2365: mod_base = OTHER; note = N1-methyl pseudouridine
  modified_base 2374: mod_base = OTHER; note = N1-methyl pseudouridine
  modified_base 2380: mod_base = OTHER; note = N1-methyl pseudouridine
  modified_base 2389: mod_base = OTHER; note = N1-methyl pseudouridine
  modified_base 2400: mod_base = OTHER; note = N1-methyl pseudouridine
  modified_base 2401: mod_base = OTHER; note = N1-methyl pseudouridine
  modified_base 2413: mod_base = OTHER; note = N1-methyl pseudouridine
  modified_base 2421: mod_base = OTHER; note = N1-methyl pseudouridine
  modified_base 2431: mod_base = OTHER; note = N1-methyl pseudouridine
  modified_base 2434: mod_base = OTHER; note = N1-methyl pseudouridine
  modified_base 2440: mod_base = OTHER; note = N1-methyl pseudouridine
  modified_base 2443: mod_base = OTHER; note = N1-methyl pseudouridine
  modified_base 2457: mod_base = OTHER; note = N1-methyl pseudouridine
  modified_base 2458: mod_base = OTHER; note = N1-methyl pseudouridine
  modified_base 2461: mod_base = OTHER; note = N1-methyl pseudouridine
  modified_base 2485: mod_base = OTHER; note = N1-methyl pseudouridine
  modified_base 2488: mod_base = OTHER; note = N1-methyl pseudouridine
  modified_base 2497: mod_base = OTHER; note = N1-methyl pseudouridine
  modified_base 2500: mod_base = OTHER; note = N1-methyl pseudouridine
  modified_base 2503: mod_base = OTHER; note = N1-methyl pseudouridine
  modified_base 2509: mod_base = OTHER; note = N1-methyl pseudouridine
  modified_base 2515: mod_base = OTHER; note = N1-methyl pseudouridine
  modified_base 2517: mod_base = OTHER; note = N1-methyl pseudouridine
  modified_base 2518: mod_base = OTHER; note = N1-methyl pseudouridine
  modified_base 2533: mod_base = OTHER; note = N1-methyl pseudouridine
  modified_base 2536: mod_base = OTHER; note = N1-methyl pseudouridine
  modified_base 2548: mod_base = OTHER; note = N1-methyl pseudouridine
  modified_base 2556: mod_base = OTHER; note = N1-methyl pseudouridine
  modified_base 2566: mod_base = OTHER; note = N1-methyl pseudouridine
  modified_base 2568: mod_base = OTHER; note = N1-methyl pseudouridine
  modified_base 2569: mod_base = OTHER; note = N1-methyl pseudouridine
  modified_base 2581: mod_base = OTHER; note = N1-methyl pseudouridine
  modified_base 2584: mod_base = OTHER; note = N1-methyl pseudouridine
  modified_base 2593: mod_base = OTHER; note = N1-methyl pseudouridine
  modified_base 2607: mod_base = OTHER; note = N1-methyl pseudouridine
  modified_base 2616: mod_base = OTHER; note = N1-methyl pseudouridine
  modified_base 2626: mod_base = OTHER; note = N1-methyl pseudouridine
  modified_base 2638: mod_base = OTHER; note = N1-methyl pseudouridine
  modified_base 2641: mod_base = OTHER; note = N1-methyl pseudouridine
  modified_base 2650: mod_base = OTHER; note = N1-methyl pseudouridine
  modified_base 2677: mod_base = OTHER; note = N1-methyl pseudouridine
  modified_base 2680: mod_base = OTHER; note = N1-methyl pseudouridine
  modified_base 2685: mod_base = OTHER; note = N1-methyl pseudouridine
  modified_base 2686: mod_base = OTHER; note = N1-methyl pseudouridine
  modified_base 2689: mod_base = OTHER; note = N1-methyl pseudouridine
  modified_base 2703: mod_base = OTHER; note = N1-methyl pseudouridine
  modified_base 2704: mod_base = OTHER; note = N1-methyl pseudouridine
  modified_base 2718: mod_base = OTHER; note = N1-methyl pseudouridine
  modified_base 2719: mod_base = OTHER; note = N1-methyl pseudouridine
  modified_base 2722: mod_base = OTHER; note = N1-methyl pseudouridine
  modified_base 2728: mod_base = OTHER; note = N1-methyl pseudouridine
  modified_base 2731: mod_base = OTHER; note = N1-methyl pseudouridine
  modified_base 2746: mod_base = OTHER; note = N1-methyl pseudouridine
  modified_base 2751: mod_base = OTHER; note = N1-methyl pseudouridine
  modified_base 2752: mod_base = OTHER; note = N1-methyl pseudouridine
  modified_base 2764: mod_base = OTHER; note = N1-methyl pseudouridine
  modified_base 2779: mod_base = OTHER; note = N1-methyl pseudouridine
  modified_base 2800: mod_base = OTHER; note = N1-methyl pseudouridine
  modified_base 2812: mod_base = OTHER; note = N1-methyl pseudouridine
  modified_base 2821: mod_base = OTHER; note = N1-methyl pseudouridine
  modified_base 2839: mod_base = OTHER; note = N1-methyl pseudouridine
  modified_base 2851: mod_base = OTHER; note = N1-methyl pseudouridine
  modified_base 2854: mod_base = OTHER; note = N1-methyl pseudouridine
  modified_base 2863: mod_base = OTHER; note = N1-methyl pseudouridine
  modified_base 2869: mod_base = OTHER; note = N1-methyl pseudouridine
  modified_base 2872: mod_base = OTHER; note = N1-methyl pseudouridine
  modified_base 2881: mod_base = OTHER; note = N1-methyl pseudouridine
  modified_base 2884: mod_base = OTHER; note = N1-methyl pseudouridine
  modified_base 2890: mod_base = OTHER; note = N1-methyl pseudouridine
  modified_base 2893: mod_base = OTHER; note = N1-methyl pseudouridine
  modified_base 2917: mod_base = OTHER; note = N1-methyl pseudouridine
  modified_base 2920: mod_base = OTHER; note = N1-methyl pseudouridine
  modified_base 2923: mod_base = OTHER; note = N1-methyl pseudouridine
  modified_base 2929: mod_base = OTHER; note = N1-methyl pseudouridine
  modified_base 2983: mod_base = OTHER; note = N1-methyl pseudouridine
  modified_base 2992: mod_base = OTHER; note = N1-methyl pseudouridine
  modified_base 3004: mod_base = OTHER; note = N1-methyl pseudouridine
  modified_base 3013: mod_base = OTHER; note = N1-methyl pseudouridine
  modified_base 3025: mod_base = OTHER; note = N1-methyl pseudouridine
  modified_base 3028: mod_base = OTHER; note = N1-methyl pseudouridine
  modified_base 3043: mod_base = OTHER; note = N1-methyl pseudouridine
  modified_base 3058: mod_base = OTHER; note = N1-methyl pseudouridine
  modified_base 3073: mod_base = OTHER; note = N1-methyl pseudouridine
  modified_base 3075: mod_base = OTHER; note = N1-methyl pseudouridine
  modified_base 3079: mod_base = OTHER; note = N1-methyl pseudouridine
  modified_base 3081: mod_base = OTHER; note = N1-methyl pseudouridine
  modified_base 3084: mod_base = OTHER; note = N1-methyl pseudouridine
  modified_base 3088: mod_base = OTHER; note = N1-methyl pseudouridine
  modified_base 3106: mod_base = OTHER; note = N1-methyl pseudouridine
  modified_base 3108: mod_base = OTHER; note = N1-methyl pseudouridine
  modified_base 3112: mod_base = OTHER; note = N1-methyl pseudouridine
  modified_base 3124: mod_base = OTHER; note = N1-methyl pseudouridine
  modified_base 3130: mod_base = OTHER; note = N1-methyl pseudouridine
  modified_base 3139: mod_base = OTHER; note = N1-methyl pseudouridine
  modified_base 3147: mod_base = OTHER; note = N1-methyl pseudouridine
  modified_base 3154: mod_base = OTHER; note = N1-methyl pseudouridine
  modified_base 3163: mod_base = OTHER; note = N1-methyl pseudouridine
  modified_base 3166: mod_base = OTHER; note = N1-methyl pseudouridine
  modified_base 3177: mod_base = OTHER; note = N1-methyl pseudouridine
  modified_base 3178: mod_base = OTHER; note = N1-methyl pseudouridine
  modified_base 3181: mod_base = OTHER; note = N1-methyl pseudouridine
  modified_base 3196: mod_base = OTHER; note = N1-methyl pseudouridine
  modified_base 3208: mod_base = OTHER; note = N1-methyl pseudouridine
  modified_base 3211: mod_base = OTHER; note = N1-methyl pseudouridine
  modified_base 3250: mod_base = OTHER; note = N1-methyl pseudouridine
  modified_base 3265: mod_base = OTHER; note = N1-methyl pseudouridine
  modified_base 3268: mod_base = OTHER; note = N1-methyl pseudouridine
  modified_base 3277: mod_base = OTHER; note = N1-methyl pseudouridine
  modified_base 3285: mod_base = OTHER; note = N1-methyl pseudouridine
  modified_base 3288: mod_base = OTHER; note = N1-methyl pseudouridine
  modified_base 3298: mod_base = OTHER; note = N1-methyl pseudouridine
  modified_base 3301: mod_base = OTHER; note = N1-methyl pseudouridine
  modified_base 3313: mod_base = OTHER; note = N1-methyl pseudouridine
  modified_base 3316: mod_base = OTHER; note = N1-methyl pseudouridine
  modified_base 3330: mod_base = OTHER; note = N1-methyl pseudouridine
  modified_base 3331: mod_base = OTHER; note = N1-methyl pseudouridine
  modified_base 3340: mod_base = OTHER; note = N1-methyl pseudouridine
  modified_base 3364: mod_base = OTHER; note = N1-methyl pseudouridine
  modified_base 3373: mod_base = OTHER; note = N1-methyl pseudouridine
  modified_base 3387: mod_base = OTHER; note = N1-methyl pseudouridine
  modified_base 3388: mod_base = OTHER; note = N1-methyl pseudouridine
  modified_base 3391: mod_base = OTHER; note = N1-methyl pseudouridine
  modified_base 3403: mod_base = OTHER; note = N1-methyl pseudouridine
  modified_base 3406: mod_base = OTHER; note = N1-methyl pseudouridine
  modified_base 3421: mod_base = OTHER; note = N1-methyl pseudouridine
  modified_base 3433: mod_base = OTHER; note = N1-methyl pseudouridine
  modified_base 3442: mod_base = OTHER; note = N1-methyl pseudouridine
  modified_base 3445: mod_base = OTHER; note = N1-methyl pseudouridine
  modified_base 3457: mod_base = OTHER; note = N1-methyl pseudouridine
  modified_base 3468: mod_base = OTHER; note = N1-methyl pseudouridine
  modified_base 3487: mod_base = OTHER; note = N1-methyl pseudouridine
  modified_base 3490: mod_base = OTHER; note = N1-methyl pseudouridine
  modified_base 3499: mod_base = OTHER; note = N1-methyl pseudouridine
  modified_base 3505: mod_base = OTHER; note = N1-methyl pseudouridine
  modified_base 3508: mod_base = OTHER; note = N1-methyl pseudouridine
  modified_base 3514: mod_base = OTHER; note = N1-methyl pseudouridine
  modified_base 3526: mod_base = OTHER; note = N1-methyl pseudouridine
  modified_base 3529: mod_base = OTHER; note = N1-methyl pseudouridine
  modified_base 3537: mod_base = OTHER; note = N1-methyl pseudouridine
  modified_base 3538: mod_base = OTHER; note = N1-methyl pseudouridine
  modified_base 3549: mod_base = OTHER; note = N1-methyl pseudouridine
  modified_base 3550: mod_base = OTHER; note = N1-methyl pseudouridine
  modified_base 3555: mod_base = OTHER; note = N1-methyl pseudouridine
  modified_base 3556: mod_base = OTHER; note = N1-methyl pseudouridine
  modified_base 3558: mod_base = OTHER; note = N1-methyl pseudouridine
  modified_base 3565: mod_base = OTHER; note = N1-methyl pseudouridine
  modified_base 3574: mod_base = OTHER; note = N1-methyl pseudouridine
  modified_base 3582: mod_base = OTHER; note = N1-methyl pseudouridine
  modified_base 3603: mod_base = OTHER; note = N1-methyl pseudouridine
  modified_base 3607: mod_base = OTHER; note = N1-methyl pseudouridine
  modified_base 3616: mod_base = OTHER; note = N1-methyl pseudouridine
  modified_base 3619: mod_base = OTHER; note = N1-methyl pseudouridine
  modified_base 3631: mod_base = OTHER; note = N1-methyl pseudouridine
  modified_base 3634: mod_base = OTHER; note = N1-methyl pseudouridine
  modified_base 3642: mod_base = OTHER; note = N1-methyl pseudouridine
  modified_base 3652: mod_base = OTHER; note = N1-methyl pseudouridine
  modified_base 3663: mod_base = OTHER; note = N1-methyl pseudouridine
  modified_base 3664: mod_base = OTHER; note = N1-methyl pseudouridine
  modified_base 3667: mod_base = OTHER; note = N1-methyl pseudouridine
  modified_base 3669: mod_base = OTHER; note = N1-methyl pseudouridine
  modified_base 3678: mod_base = OTHER; note = N1-methyl pseudouridine
  modified_base 3685: mod_base = OTHER; note = N1-methyl pseudouridine
  modified_base 3687: mod_base = OTHER; note = N1-methyl pseudouridine
  modified_base 3694: mod_base = OTHER; note = N1-methyl pseudouridine
  modified_base 3703: mod_base = OTHER; note = N1-methyl pseudouridine
  modified_base 3706: mod_base = OTHER; note = N1-methyl pseudouridine
  modified_base 3727: mod_base = OTHER; note = N1-methyl pseudouridine
  modified_base 3747: mod_base = OTHER; note = N1-methyl pseudouridine
  modified_base 3750: mod_base = OTHER; note = N1-methyl pseudouridine
  modified_base 3751: mod_base = OTHER; note = N1-methyl pseudouridine
  modified_base 3753: mod_base = OTHER; note = N1-methyl pseudouridine
  modified_base 3754: mod_base = OTHER; note = N1-methyl pseudouridine
  modified_base 3756: mod_base = OTHER; note = N1-methyl pseudouridine
  modified_base 3766: mod_base = OTHER; note = N1-methyl pseudouridine
  modified_base 3769: mod_base = OTHER; note = N1-methyl pseudouridine
  modified_base 3774: mod_base = OTHER; note = N1-methyl pseudouridine
  modified_base 3775: mod_base = OTHER; note = N1-methyl pseudouridine
  modified_base 3777: mod_base = OTHER; note = N1-methyl pseudouridine
  modified_base 3778: mod_base = OTHER; note = N1-methyl pseudouridine
  modified_base 3790: mod_base = OTHER; note = N1-methyl pseudouridine
  modified_base 3796: mod_base = OTHER; note = N1-methyl pseudouridine
  modified_base 3811: mod_base = OTHER; note = N1-methyl pseudouridine
  modified_base 3826: mod_base = OTHER; note = N1-methyl pseudouridine
  modified_base 3829: mod_base = OTHER; note = N1-methyl pseudouridine
  modified_base 3856: mod_base = OTHER; note = N1-methyl pseudouridine
  modified_base 3859: mod_base = OTHER; note = N1-methyl pseudouridine
  modified_base 3861: mod_base = OTHER; note = N1-methyl pseudouridine
  modified_base 3879: mod_base = OTHER; note = N1-methyl pseudouridine
  modified_base 3880: mod_base = OTHER; note = N1-methyl pseudouridine
  modified_base 3889: mod_base = OTHER; note = N1-methyl pseudouridine
  modified_base 3898: mod_base = OTHER; note = N1-methyl pseudouridine
  modified_base 3901: mod_base = OTHER; note = N1-methyl pseudouridine
  modified_base 3907: mod_base = OTHER; note = N1-methyl pseudouridine
  modified_base 3916: mod_base = OTHER; note = N1-methyl pseudouridine
  modified_base 3922: mod_base = OTHER; note = N1-methyl pseudouridine
  modified_base 3925: mod_base = OTHER; note = N1-methyl pseudouridine
  modified_base 3940: mod_base = OTHER; note = N1-methyl pseudouridine
  modified_base 3954: mod_base = OTHER; note = N1-methyl pseudouridine
  modified_base 3955: mod_base = OTHER; note = N1-methyl pseudouridine
  modified_base 3970: mod_base = OTHER; note = N1-methyl pseudouridine
  modified_base 3973: mod_base = OTHER; note = N1-methyl pseudouridine
  modified_base 3997: mod_base = OTHER; note = N1-methyl pseudouridine
  modified_base 4000: mod_base = OTHER; note = N1-methyl pseudouridine
  modified_base 4017: mod_base = OTHER; note = N1-methyl pseudouridine
  modified_base 4032: mod_base = OTHER; note = N1-methyl pseudouridine
  modified_base 4041: mod_base = OTHER; note = N1-methyl pseudouridine
  modified_base 4042: mod_base = OTHER; note = N1-methyl pseudouridine
  modified_base 4057: mod_base = OTHER; note = N1-methyl pseudouridine
  modified_base 4062: mod_base = OTHER; note = N1-methyl pseudouridine
  modified_base 4069: mod_base = OTHER; note = N1-methyl pseudouridine
  modified_base 4072: mod_base = OTHER; note = N1-methyl pseudouridine
  modified_base 4075: mod_base = OTHER; note = N1-methyl pseudouridine
  modified_base 4078: mod_base = OTHER; note = N1-methyl pseudouridine
  modified_base 4087: mod_base = OTHER; note = N1-methyl pseudouridine
  modified_base 4111: mod_base = OTHER; note = N1-methyl pseudouridine
  modified_base 4120: mod_base = OTHER; note = N1-methyl pseudouridine
  modified_base 4129: mod_base = OTHER; note = N1-methyl pseudouridine
  modified_base 4132: mod_base = OTHER; note = N1-methyl pseudouridine
  modified_base 4138: mod_base = OTHER; note = N1-methyl pseudouridine
  modified_base 4144: mod_base = OTHER; note = N1-methyl pseudouridine
  modified_base 4147: mod_base = OTHER; note = N1-methyl pseudouridine
  modified_base 4161: mod_base = OTHER; note = N1-methyl pseudouridine
  modified_base 4162: mod_base = OTHER; note = N1-methyl pseudouridine
  modified_base 4177: mod_base = OTHER; note = N1-methyl pseudouridine
  modified_base 4182: mod_base = OTHER; note = N1-methyl pseudouridine
  modified_base 4183: mod_base = OTHER; note = N1-methyl pseudouridine
  modified_base 4186: mod_base = OTHER; note = N1-methyl pseudouridine
  modified_base 4200: mod_base = OTHER; note = N1-methyl pseudouridine
  modified_base 4210: mod_base = OTHER; note = N1-methyl pseudouridine
  modified_base 4222: mod_base = OTHER; note = N1-methyl pseudouridine
  modified_base 4225: mod_base = OTHER; note = N1-methyl pseudouridine
  modified_base 4228: mod_base = OTHER; note = N1-methyl pseudouridine
  modified_base 4234: mod_base = OTHER; note = N1-methyl pseudouridine
  modified_base 4242: mod_base = OTHER; note = N1-methyl pseudouridine
  modified_base 4249: mod_base = OTHER; note = N1-methyl pseudouridine
  modified_base 4251: mod_base = OTHER; note = N1-methyl pseudouridine
  modified_base 4252: mod_base = OTHER; note = N1-methyl pseudouridine
  modified_base 4258: mod_base = OTHER; note = N1-methyl pseudouridine
  modified_base 4279: mod_base = OTHER; note = N1-methyl pseudouridine
  modified_base 4282: mod_base = OTHER; note = N1-methyl pseudouridine
  modified_base 4300: mod_base = OTHER; note = N1-methyl pseudouridine
  modified_base 4318: mod_base = OTHER; note = N1-methyl pseudouridine
  modified_base 4324: mod_base = OTHER; note = N1-methyl pseudouridine
  modified_base 4335: mod_base = OTHER; note = N1-methyl pseudouridine
  modified_base 4339: mod_base = OTHER; note = N1-methyl pseudouridine
  modified_base 4344: mod_base = OTHER; note = N1-methyl pseudouridine
  modified_base 4345: mod_base = OTHER; note = N1-methyl pseudouridine
  modified_base 4348: mod_base = OTHER; note = N1-methyl pseudouridine
  modified_base 4350: mod_base = OTHER; note = N1-methyl pseudouridine
  modified_base 4354: mod_base = OTHER; note = N1-methyl pseudouridine
  modified_base 4365: mod_base = OTHER; note = N1-methyl pseudouridine
  modified_base 4375: mod_base = OTHER; note = N1-methyl pseudouridine
  modified_base 4411: mod_base = OTHER; note = N1-methyl pseudouridine
  modified_base 4413: mod_base = OTHER; note = N1-methyl pseudouridine
  modified_base 4414: mod_base = OTHER; note = N1-methyl pseudouridine
  modified_base 4417: mod_base = OTHER; note = N1-methyl pseudouridine
  modified_base 4434: mod_base = OTHER; note = N1-methyl pseudouridine
  modified_base 4438: mod_base = OTHER; note = N1-methyl pseudouridine
  modified_base 4447: mod_base = OTHER; note = N1-methyl pseudouridine
  modified_base 4450: mod_base = OTHER; note = N1-methyl pseudouridine
  modified_base 4459: mod_base = OTHER; note = N1-methyl pseudouridine
  modified_base 4467: mod_base = OTHER; note = N1-methyl pseudouridine
  modified_base 4468: mod_base = OTHER; note = N1-methyl pseudouridine
  modified_base 4480: mod_base = OTHER; note = N1-methyl pseudouridine
  modified_base 4483: mod_base = OTHER; note = N1-methyl pseudouridine
  modified_base 4486: mod_base = OTHER; note = N1-methyl pseudouridine
  modified_base 4501: mod_base = OTHER; note = N1-methyl pseudouridine
  modified_base 4510: mod_base = OTHER; note = N1-methyl pseudouridine
  modified_base 4513: mod_base = OTHER; note = N1-methyl pseudouridine
  modified_base 4521: mod_base = OTHER; note = N1-methyl pseudouridine
  modified_base 4546: mod_base = OTHER; note = N1-methyl pseudouridine
  modified_base 4567: mod_base = OTHER; note = N1-methyl pseudouridine
  modified_base 4570: mod_base = OTHER; note = N1-methyl pseudouridine
  modified_base 4576: mod_base = OTHER; note = N1-methyl pseudouridine
  modified_base 4578: mod_base = OTHER; note = N1-methyl pseudouridine
  modified_base 4579: mod_base = OTHER; note = N1-methyl pseudouridine
  modified_base 4585: mod_base = OTHER; note = N1-methyl pseudouridine
  modified_base 4594: mod_base = OTHER; note = N1-methyl pseudouridine
  modified_base 4611: mod_base = OTHER; note = N1-methyl pseudouridine
  modified_base 4612: mod_base = OTHER; note = N1-methyl pseudouridine
  modified_base 4617: mod_base = OTHER; note = N1-methyl pseudouridine
  modified_base 4620: mod_base = OTHER; note = N1-methyl pseudouridine
  modified_base 4621: mod_base = OTHER; note = N1-methyl pseudouridine
  modified_base 4633: mod_base = OTHER; note = N1-methyl pseudouridine
  modified_base 4647: mod_base = OTHER; note = N1-methyl pseudouridine
  modified_base 4666: mod_base = OTHER; note = N1-methyl pseudouridine
  modified_base 4669: mod_base = OTHER; note = N1-methyl pseudouridine
  modified_base 4681: mod_base = OTHER; note = N1-methyl pseudouridine
  modified_base 4684: mod_base = OTHER; note = N1-methyl pseudouridine
  modified_base 4696: mod_base = OTHER; note = N1-methyl pseudouridine
  modified_base 4705: mod_base = OTHER; note = N1-methyl pseudouridine
  modified_base 4707: mod_base = OTHER; note = N1-methyl pseudouridine
  modified_base 4720: mod_base = OTHER; note = N1-methyl pseudouridine
  modified_base 4726: mod_base = OTHER; note = N1-methyl pseudouridine
  modified_base 4735: mod_base = OTHER; note = N1-methyl pseudouridine
  modified_base 4782: mod_base = OTHER; note = N1-methyl pseudouridine
  modified_base 4783: mod_base = OTHER; note = N1-methyl pseudouridine
  modified_base 4810: mod_base = OTHER; note = N1-methyl pseudouridine
  modified_base 4812: mod_base = OTHER; note = N1-methyl pseudouridine
  modified_base 4823: mod_base = OTHER; note = N1-methyl pseudouridine
  modified_base 4824: mod_base = OTHER; note = N1-methyl pseudouridine
  modified_base 4827: mod_base = OTHER; note = N1-methyl pseudouridine
  modified_base 4828: mod_base = OTHER; note = N1-methyl pseudouridine
  modified_base 4833: mod_base = OTHER; note = N1-methyl pseudouridine
  modified_base 4837: mod_base = OTHER; note = N1-methyl pseudouridine
  modified_base 4838: mod_base = OTHER; note = N1-methyl pseudouridine
  modified_base 4840: mod_base = OTHER; note = N1-methyl pseudouridine
  modified_base 4848: mod_base = OTHER; note = N1-methyl pseudouridine
  modified_base 4849: mod_base = OTHER; note = N1-methyl pseudouridine
  modified_base 4853: mod_base = OTHER; note = N1-methyl pseudouridine
  modified_base 4854: mod_base = OTHER; note = N1-methyl pseudouridine
  modified_base 4856: mod_base = OTHER; note = N1-methyl pseudouridine
  modified_base 4862: mod_base = OTHER; note = N1-methyl pseudouridine
  modified_base 4867: mod_base = OTHER; note = N1-methyl pseudouridine
  modified_base 4868: mod_base = OTHER; note = N1-methyl pseudouridine
  modified_base 4870: mod_base = OTHER; note = N1-methyl pseudouridine
  modified_base 4871: mod_base = OTHER; note = N1-methyl pseudouridine
  modified_base 4873: mod_base = OTHER; note = N1-methyl pseudouridine
  modified_base 4875: mod_base = OTHER; note = N1-methyl pseudouridine
  modified_base 4879: mod_base = OTHER; note = N1-methyl pseudouridine
  modified_base 4880: mod_base = OTHER; note = N1-methyl pseudouridine
  modified_base 4886: mod_base = OTHER; note = N1-methyl pseudouridine
  modified_base 4888: mod_base = OTHER; note = N1-methyl pseudouridine
  modified_base 4892: mod_base = OTHER; note = N1-methyl pseudouridine
  modified_base 4894: mod_base = OTHER; note = N1-methyl pseudouridine
  modified_base 4895: mod_base = OTHER; note = N1-methyl pseudouridine
  modified_base 4898: mod_base = OTHER; note = N1-methyl pseudouridine
  modified_base 4900: mod_base = OTHER; note = N1-methyl pseudouridine
  modified_base 4901: mod_base = OTHER; note = N1-methyl pseudouridine
  modified_base 4902: mod_base = OTHER; note = N1-methyl pseudouridine
  modified_base 4906: mod_base = OTHER; note = N1-methyl pseudouridine
  modified_base 4913: mod_base = OTHER; note = N1-methyl pseudouridine
  modified_base 4917: mod_base = OTHER; note = N1-methyl pseudouridine
  modified_base 4924: mod_base = OTHER; note = N1-methyl pseudouridine
  modified_base 4926: mod_base = OTHER; note = N1-methyl pseudouridine
aggaaataagagagaaaagaagagtaagaagaaatataagagccaccatgagcgaggtggagttcagccacgagtactggatgcggcacgccctgaccctggccaagcgggcccgggacgagcgggaggtgcccgtgggcgccgtgctggtgctgaacaaccgggtgatcggcgagggctggaaccgggccatcggcctgcacgaccccaccgcccacgccgagatcatggccctgcggcagggcggcctggtgatgcagaactaccggctgatcgacgccaccctgtacgtgaccttcgagccctgcgtgatgtgcgccggcgccatgatccacagccggatcggccgggtggtgttcggcgtgcggaacgccaagaccggcgccgccggcagcctgatggacgtgctgcaccaccccggcatgaaccaccgggtggagatcaccgagggcatcctggccgacgagtgcgccgccctgctgtgccggttcttccggatgccccggcgggtgttcaacgcccagaagaaggcccagagcagcaccgacagcggcggcagcagcggcggcagcagcggcagcgagacacccggcaccagcgagagcgccacccccgagagcagcggcggcagcagcggcggcagcgacaagaagtacagcatcggcctggccatcggcaccaacagcgtgggctgggccgtgatcaccgacgagtacaaggtgcccagcaagaagttcaaggtgctgggcaacaccgaccggcacagcatcaagaagaacctgatcggcgccctgctgttcgacagcggcgagacagccgaggccacccggctgaagcggaccgcccggcggcggtacacccggcggaagaaccggatctgctacctgcaggagatcttcagcaacgagatggccaaggtggacgacagcttcttccaccggctggaggagagcttcctggtggaggaggacaagaagcacgagcggcaccccatcttcggcaacatcgtggacgaggtggcctaccacgagaagtaccccaccatctaccacctgcggaagaagctggtggacagcaccgacaaggccgacctgcggctgatctacctggccctggcccacatgatcaagttccggggccacttcctgatcgagggcgacctgaaccccgacaacagcgacgtggacaagctgttcatccagctggtgcagacctacaaccagctgttcgaggagaaccccatcaacgccagcggcgtggacgccaaggccatcctgagcgcccggctgagcaagagccggcggctggagaacctgatcgcccagctgcccggcgagaagaagaacggcctgttcggcaacctgatcgccctgagcctgggcctgacccccaacttcaagagcaacttcgacctggccgaggacgccaagctgcagctgagcaaggacacctacgacgacgacctggacaacctgctggcccagatcggcgaccagtacgccgacctgttcctggccgccaagaacctgagcgacgccatcctgctgagcgacatcctgcgggtgaacaccgagatcaccaaggcccccctgagcgccagcatgatcaagcggtacgacgagcaccaccaggacctgaccctgctgaaggccctggtgcggcagcagctgcccgagaagtacaaggagatcttcttcgaccagagcaagaacggctacgccggctacatcgacggcggcgccagccaggaggagttctacaagttcatcaagcccatcctggagaagatggacggcaccgaggagctgctggtgaagctgaaccgggaggacctgctgcggaagcagcggaccttcgacaacggcagcatcccccaccagatccacctgggcgagctgcacgccatcctgcggcggcaggaggacttctaccccttcctgaaggacaaccgggagaagatcgagaagatcctgaccttccggatcccctactacgtgggccccctggcccggggcaacagccggttcgcctggatgacccgcaagagcgaggagacaatcaccccctggaacttcgaggaggtggtggacaagggcgccagcgcccagagcttcatcgagcggatgaccaacttcgacaagaacctgcccaacgagaaggtgctgcccaagcacagcctgctgtacgagtacttcaccgtgtacaacgagctgaccaaggtgaagtacgtgaccgagggcatgcggaagcccgccttcctgagcggcgagcagaagaaggccatcgtggacctgctgttcaagaccaaccggaaggtgaccgtgaagcagctgaaggaggactacttcaagaagatcgagtgcttcgacagcgtggagatcagcggcgtggaggaccggttcaacgccagcctgggcacctaccacgacctgctgaagatcatcaaggacaaggacttcctggacaacgaggagaacgaggacatcctggaggacatcgtgctgaccctgaccctgttcgaggaccgggagatgatcgaggagcggctgaagacctacgcccacctgttcgacgacaaggtgatgaagcagctgaagcggcggcggtacaccggctggggccggctgagccggaagctgatcaacggcatccgggacaagcagagcggcaagaccatcctggacttcctcaagagcgacggcttcgccaacgccaacttcatgcagctgatccacgacgacagcctgaccttcaaggaggacatccagaaggcccaggtgagcggccagggcgacagcctgcacgagcacatcgccaacctggccggcagccccgccatcaagaagggcatcctgcagaccgtgaaggtggtggacgagctggtgaaggtgatgggccggcacaagcccgagaacatcgtgatcgagatggcccgggagaaccagaccacccagaagggccagaagaacagccgggagcggatgaagcggatcgaggagggcatcaaggagctgggcagccagatcctgaaggagcaccccgtggagaacacccagctgcagaacgagaagctgtacctgtactacctgcagaacggccgggacatgtacgtggaccaggagctggacatcaaccggctgagcgactacgacgtggaccacatcgtgccccagagcttcctgaaggacgacagcatcgacaacaaggtgctgacccggagcgacaagaaccggggcaagagcgacaacgtgcccagcgaggaggtggtgaagaagatgaagaactactggcggcagctgctgaacgccaagctgatcacccagcggaagttcgacaacctgaccaaggccgagcggggcggcctgagcgagctggacaaggccggcttcatcaagcggcagctggtggagacacggcagatcaccaagcacgtggcccagatcctggacagccggatgaacaccaagtacgacgagaacgacaagctgatccgggaggtgaaggtgatcaccctcaagagcaagctggtgagcgacttccggaaggacttccagttctacaaggtgcgggagatcaacaactaccaccacgcccacgacgcctacctgaacgccgtggtgggcaccgccctgatcaagaagtaccccaagctggagagcgagttcgtgtacggcgactacaaggtgtacgacgtgcggaagatgatcgccaagagcgagcaggagatcggcaaggccaccgccaagtacttcttctacagcaacatcatgaacttcttcaagaccgagatcaccctggccaacggcgagatccggaagcggcccctgatcgagacaaacggcgagacaggcgagatcgtgtgggacaagggccgggacttcgccaccgtgcggaaggtgctgagcatgccccaggtgaacatcgtgaagaagaccgaggtgcagaccggcggcttcagcaaggagagcatcctgcccaagcggaacagcgacaagctgatcgcccggaagaaggactgggaccccaagaagtacggcggcttcgacagccccaccgtggcctacagcgtgctggtggtggccaaggtggagaagggcaagagcaagaagctcaagagcgtgaaggagctgctgggcatcaccatcatggagcggagcagcttcgagaagaaccccatcgacttcctggaggccaagggctacaaggaggtgaagaaggacctgatcatcaagctgcccaagtacagcctgttcgagctggagaacggccggaagcggatgctggccagcgccggcgagctgcagaagggcaacgagctggccctgcccagcaagtacgtgaacttcctgtacctggccagccactacgagaagctgaagggcagccccgaggacaacgagcagaagcagctgttcgtggagcagcacaagcactacctggacgagatcatcgagcagatcagcgagttcagcaagcgggtgatcctggccgacgccaacctggacaaggtgctgagcgcctacaacaagcaccgggacaagcccatccgggagcaggccgagaacatcatccacctgttcaccctgaccaacctgggcgcccccgccgccttcaagtacttcgacaccaccatcgaccggaagcggtacaccagcaccaaggaggtgctggacgccaccctgatccaccagagcatcaccggcctgtacgagacacggatcgacctgagccagctgggcggcgacgagggcgccgacaagcggaccgccgacggcagcgagttcgagagccccaagaagaagcggaaggtgtgagcggccgcttaattaagctgccttctgcggggcttgccttctggccatgcccttcttctctcccttgcacctgtacctcttggtctttgaataaagcctgagtaggaagtctaga

SEQ ID NO: 2158 - protein, 1588 aa, synthetic construct
MSEVEFSHEYWMRHALTLAKRARDEREVPVGAVLVLNNRVIGEGWNRAIGLHDPTAHAEIMALRQGGLVMQNYRLIDATLYVTFEPCVMCAGAMIHSRIGRVVFGVRNAKTGAAGSLMDVLHHPGMNHRVEITEGILADECAALLCRFFRMPRRVFNAQKKAQSSTDSGGSSGGSSGSETPGTSESATPESSGGSSGGSDKKYSIGLAIGTNSVGWAVITDEYKVPSKKFKVLGNTDRHSIKKNLIGALLFDSGETAEATRLKRTARRRYTRRKNRICYLQEIFSNEMAKVDDSFFHRLEESFLVEEDKKHERHPIFGNIVDEVAYHEKYPTIYHLRKKLVDSTDKADLRLIYLALAHMIKFRGHFLIEGDLNPDNSDVDKLFIQLVQTYNQLFEENPINASGVDAKAILSARLSKSRRLENLIAQLPGEKKNGLFGNLIALSLGLTPNFKSNFDLAEDAKLQLSKDTYDDDLDNLLAQIGDQYADLFLAAKNLSDAILLSDILRVNTEITKAPLSASMIKRYDEHHQDLTLLKALVRQQLPEKYKEIFFDQSKNGYAGYIDGGASQEEFYKFIKPILEKMDGTEELLVKLNREDLLRKQRTFDNGSIPHQIHLGELHAILRRQEDFYPFLKDNREKIEKILTFRIPYYVGPLARGNSRFAWMTRKSEETITPWNFEEVVDKGASAQSFIERMTNFDKNLPNEKVLPKHSLLYEYFTVYNELTKVKYVTEGMRKPAFLSGEQKKAIVDLLFKTNRKVTVKQLKEDYFKKIECFDSVEISGVEDRFNASLGTYHDLLKIIKDKDFLDNEENEDILEDIVLTLTLFEDREMIEERLKTYAHLFDDKVMKQLKRRRYTGWGRLSRKLINGIRDKQSGKTILDFLKSDGFANANFMQLIHDDSLTFKEDIQKAQVSGQGDSLHEHIANLAGSPAIKKGILQTVKVVDELVKVMGRHKPENIVIEMARENQTTQKGQKNSRERMKRIEEGIKELGSQILKEHPVENTQLQNEKLYLYYLQNGRDMYVDQELDINRLSDYDVDHIVPQSFLKDDSIDNKVLTRSDKNRGKSDNVPSEEVVKKMKNYWRQLLNAKLITQRKFDNLTKAERGGLSELDKAGFIKRQLVETRQITKHVAQILDSRMNTKYDENDKLIREVKVITLKSKLVSDFRKDFQFYKVREINNYHHAHDAYLNAVVGTALIKKYPKLESEFVYGDYKVYDVRKMIAKSEQEIGKATAKYFFYSNIMNFFKTEITLANGEIRKRPLIETNGETGEIVWDKGRDFATVRKVLSMPQVNIVKKTEVQTGGFSKESILPKRNSDKLIARKKDWDPKKYGGFDSPTVAYSVLVVAKVEKGKSKKLKSVKELLGITIMERSSFEKNPIDFLEAKGYKEVKKDLIIKLPKYSLFELENGRKRMLASAGELQKGNELALPSKYVNFLYLASHYEKLKGSPEDNEQKQLFVEQHKHYLDEIIEQISEFSKRVILADANLDKVLSAYNKHRDKPIREQAENIIHLFTLTNLGAPAAFKYFDTTIDRKRYTSTKEVLDATLIHQSITGLYETRIDLSQLGGDEGADKRTADGSEFESPKKKRKV

SEQ ID NO: 2159 - RNA, 4101 nt, synthetic construct
  source 1..4101: mol_type = other RNA
  modified_base 10: mod_base = OTHER; note = N1-methyl pseudouridine
  modified_base 17: mod_base = OTHER; note = N1-methyl pseudouridine
  modified_base 23: mod_base = OTHER; note = N1-methyl pseudouridine
  modified_base 29: mod_base = OTHER; note = N1-methyl pseudouridine
  modified_base 44: mod_base = OTHER; note = N1-methyl pseudouridine
  modified_base 49: mod_base = OTHER; note = N1-methyl pseudouridine
  modified_base 56: mod_base = OTHER; note = N1-methyl pseudouridine
  modified_base 59: mod_base = OTHER; note = N1-methyl pseudouridine
  modified_base 70: mod_base = OTHER; note = N1-methyl pseudouridine
  modified_base 77: mod_base = OTHER; note = N1-methyl pseudouridine
  modified_base 91: mod_base = OTHER; note = N1-methyl pseudouridine
  modified_base 92: mod_base = OTHER; note = N1-methyl pseudouridine
  modified_base 98: mod_base = OTHER; note = N1-methyl pseudouridine
  modified_base 101: mod_base = OTHER; note = N1-methyl pseudouridine
  modified_base 125: mod_base = OTHER; note = N1-methyl pseudouridine
  modified_base 137: mod_base = OTHER; note = N1-methyl pseudouridine
  modified_base 140: mod_base = OTHER; note = N1-methyl pseudouridine
  modified_base 149: mod_base = OTHER; note = N1-methyl pseudouridine
  modified_base 152: mod_base = OTHER; note = N1-methyl pseudouridine
  modified_base 154: mod_base = OTHER; note = N1-methyl pseudouridine
  modified_base 155: mod_base = OTHER; note = N1-methyl pseudouridine
  modified_base 188: mod_base = OTHER; note = N1-methyl pseudouridine
  modified_base 211: mod_base = OTHER; note = N1-methyl pseudouridine
  modified_base 233: mod_base = OTHER; note = N1-methyl pseudouridine
  modified_base 235: mod_base = OTHER; note = N1-methyl pseudouridine
  modified_base 238: mod_base = OTHER; note = N1-methyl pseudouridine
  modified_base 242: mod_base = OTHER; note = N1-methyl pseudouridine
  modified_base 251: mod_base = OTHER; note = N1-methyl pseudouridine
  modified_base 253: mod_base = OTHER; note = N1-methyl pseudouridine
  modified_base 254: mod_base = OTHER; note = N1-methyl pseudouridine
  modified_base 266: mod_base = OTHER; note = N1-methyl pseudouridine
  modified_base 275: mod_base = OTHER; note = N1-methyl pseudouridine
  modified_base 286: mod_base = OTHER; note = N1-methyl pseudouridine
  modified_base 287: mod_base = OTHER; note = N1-methyl pseudouridine
  modified_base 289: mod_base = OTHER; note = N1-methyl pseudouridine
  modified_base 290: mod_base = OTHER; note = N1-methyl pseudouridine
  modified_base 299: mod_base = OTHER; note = N1-methyl pseudouridine
  modified_base 310: mod_base = OTHER; note = N1-methyl pseudouridine
  modified_base 311: mod_base = OTHER; note = N1-methyl pseudouridine
  modified_base 314: mod_base = OTHER; note = N1-methyl pseudouridine
  modified_base 317: mod_base = OTHER; note = N1-methyl pseudouridine
  modified_base 350: mod_base = OTHER; note = N1-methyl pseudouridine
  modified_base 352: mod_base = OTHER; note = N1-methyl pseudouridine
  modified_base 353: mod_base = OTHER; note = N1-methyl pseudouridine
  modified_base 362: mod_base = OTHER; note = N1-methyl pseudouridine
  modified_base 365: mod_base = OTHER; note = N1-methyl pseudouridine
  modified_base 374: mod_base = OTHER; note = N1-methyl pseudouridine
  modified_base 379: mod_base = OTHER; note = N1-methyl pseudouridine
  modified_base 391: mod_base = OTHER; note = N1-methyl pseudouridine
  modified_base 401: mod_base = OTHER; note = N1-methyl pseudouridine
  modified_base 403: mod_base = OTHER; note = N1-methyl pseudouridine
  modified_base 410: mod_base = OTHER; note = N1-methyl pseudouridine
  modified_base 422: mod_base = OTHER; note = N1-methyl pseudouridine
  modified_base 425: mod_base = OTHER; note = N1-methyl pseudouridine
  modified_base 449: mod_base = OTHER; note = N1-methyl pseudouridine
  modified_base 455: mod_base = OTHER; note = N1-methyl pseudouridine
  modified_base 458: mod_base = OTHER; note = N1-methyl pseudouridine
  modified_base 460: mod_base = OTHER; note = N1-methyl pseudouridine
  modified_base 464: mod_base = OTHER; note = N1-methyl pseudouridine
  modified_base 470: mod_base = OTHER; note = N1-methyl pseudouridine
  modified_base 479: mod_base = OTHER; note = N1-methyl pseudouridine
  modified_base 482: mod_base = OTHER; note = N1-methyl pseudouridine
  modified_base 487: mod_base = OTHER; note = N1-methyl pseudouridine
  modified_base 488: mod_base = OTHER; note = N1-methyl pseudouridine
  modified_base 499: mod_base = OTHER; note = N1-methyl pseudouridine
  modified_base 500: mod_base = OTHER; note = N1-methyl pseudouridine
  modified_base 503: mod_base = OTHER; note = N1-methyl pseudouridine
  modified_base 506: mod_base = OTHER; note = N1-methyl pseudouridine
  modified_base 518: mod_base = OTHER; note = N1-methyl pseudouridine
  modified_base 539: mod_base = OTHER; note = N1-methyl pseudouridine
  modified_base 548: mod_base = OTHER; note = N1-methyl pseudouridine
  modified_base 550: mod_base = OTHER; note = N1-methyl pseudouridine
  modified_base 551: mod_base = OTHER; note = N1-methyl pseudouridine
  modified_base 554: mod_base = OTHER; note = N1-methyl pseudouridine
  modified_base 560: mod_base = OTHER; note = N1-methyl pseudouridine
  modified_base 563: mod_base = OTHER; note = N1-methyl pseudouridine
  modified_base 571: mod_base = OTHER; note = N1-methyl pseudouridine
  modified_base 581: mod_base = OTHER; note = N1-methyl pseudouridine
  modified_base 583: mod_base = OTHER; note = N1-methyl pseudouridine
  modified_base 584: mod_base = OTHER; note = N1-methyl pseudouridine
  modified_base 599: mod_base = OTHER; note = N1-methyl pseudouridine
  modified_base 614: mod_base = OTHER; note = N1-methyl pseudouridine
  modified_base 629: mod_base = OTHER; note = N1-methyl pseudouridine
  modified_base 632: mod_base = OTHER; note = N1-methyl pseudouridine
  modified_base 644: mod_base = OTHER; note = N1-methyl pseudouridine
  modified_base 662: mod_base = OTHER; note = N1-methyl pseudouridine
  modified_base 671: mod_base = OTHER; note = N1-methyl pseudouridine
  modified_base 674: mod_base = OTHER; note = N1-methyl pseudouridine
  modified_base 683: mod_base = OTHER; note = N1-methyl pseudouridine
  modified_base 707: mod_base = OTHER; note = N1-methyl pseudouridine
  modified_base 709: mod_base = OTHER; note = N1-methyl pseudouridine
  modified_base 710: mod_base = OTHER; note = N1-methyl pseudouridine
  modified_base 719: mod_base = OTHER; note = N1-methyl pseudouridine
  modified_base 722: mod_base = OTHER; note = N1-methyl pseudouridine
  modified_base 728: mod_base = OTHER; note = N1-methyl pseudouridine
  modified_base 734: mod_base = OTHER; note = N1-methyl pseudouridine
  modified_base 740: mod_base = OTHER; note = N1-methyl pseudouridine
  modified_base 751: mod_base = OTHER; note = N1-methyl pseudouridine
  modified_base 752: mod_base = OTHER; note = N1-methyl pseudouridine
  modified_base 763: mod_base = OTHER; note = N1-methyl pseudouridine
  modified_base 764: mod_base = OTHER; note = N1-methyl pseudouridine
  modified_base 770: mod_base = OTHER; note = N1-methyl pseudouridine
  modified_base 788: mod_base = OTHER; note = N1-methyl pseudouridine
  modified_base 794: mod_base = OTHER; note = N1-methyl pseudouridine
  modified_base 808: mod_base = OTHER; note = N1-methyl pseudouridine
  modified_base 821: mod_base = OTHER; note = N1-methyl pseudouridine
  modified_base 830: mod_base = OTHER; note = N1-methyl pseudouridine
  modified_base 833: mod_base = OTHER; note = N1-methyl pseudouridine
  modified_base 842: mod_base = OTHER; note = N1-methyl pseudouridine
  modified_base 853: mod_base = OTHER; note = N1-methyl pseudouridine
  modified_base 863: mod_base = OTHER; note = N1-methyl pseudouridine
  modified_base 865: mod_base = OTHER; note = N1-methyl pseudouridine
  modified_base 866: mod_base = OTHER; note = N1-methyl pseudouridine
  modified_base 869: mod_base = OTHER; note = N1-methyl pseudouridine
  modified_base 884: mod_base = OTHER; note = N1-methyl pseudouridine
  modified_base 896: mod_base = OTHER; note = N1-methyl pseudouridine
  modified_base 899: mod_base = OTHER; note = N1-methyl pseudouridine
  modified_base 902: mod_base = OTHER; note = N1-methyl pseudouridine
  modified_base 911: mod_base = OTHER; note = N1-methyl pseudouridine
  modified_base 914: mod_base = OTHER; note = N1-methyl pseudouridine
  modified_base 920: mod_base = OTHER; note = N1-methyl pseudouridine
  modified_base 932: mod_base = OTHER; note = N1-methyl pseudouridine
  modified_base 947: mod_base = OTHER; note = N1-methyl pseudouridine
  modified_base 959: mod_base = OTHER; note = N1-methyl pseudouridine
  modified_base 962: mod_base = OTHER; note = N1-methyl pseudouridine
  modified_base 970: mod_base = OTHER; note = N1-methyl pseudouridine
  modified_base 992: mod_base = OTHER; note = N1-methyl pseudouridine
  modified_base 998: mod_base = OTHER; note = N1-methyl pseudouridine
  modified_base 1001: mod_base = OTHER; note = N1-methyl pseudouridine
  modified_base 1010: mod_base = OTHER; note = N1-methyl pseudouridine
  modified_base 1013: mod_base = OTHER; note = N1-methyl pseudouridine
  modified_base 1025: mod_base = OTHER; note = N1-methyl pseudouridine
  modified_base 1036: mod_base = OTHER; note = N1-methyl pseudouridine
  modified_base 1046: mod_base = OTHER; note = N1-methyl pseudouridine
  modified_base 1048: mod_base = OTHER; note = N1-methyl pseudouridine
  modified_base 1049: mod_base = OTHER; note = N1-methyl pseudouridine
  modified_base 1051: mod_base = OTHER; note = N1-methyl pseudouridine
  modified_base 1052: mod_base = OTHER; note = N1-methyl pseudouridine
  modified_base 1072: mod_base = OTHER; note = N1-methyl pseudouridine
  modified_base 1081: mod_base = OTHER; note = N1-methyl pseudouridine
  modified_base 1085: mod_base = OTHER; note = N1-methyl pseudouridine
  modified_base 1111: mod_base = OTHER; note = N1-methyl pseudouridine
  modified_base 1112: mod_base = OTHER; note = N1-methyl pseudouridine
  modified_base 1114: mod_base = OTHER; note = N1-methyl pseudouridine
  modified_base 1120: mod_base = OTHER; note = N1-methyl pseudouridine
  modified_base 1121: mod_base = OTHER; note = N1-methyl pseudouridine
  modified_base 1124: mod_base = OTHER; note = N1-methyl pseudouridine
  modified_base 1133: mod_base = OTHER; note = N1-methyl pseudouridine
  modified_base 1136: mod_base = OTHER; note = N1-methyl pseudouridine
  modified_base 1145: mod_base = OTHER; note = N1-methyl pseudouridine
  modified_base 1163: mod_base = OTHER; note = N1-methyl pseudouridine
  modified_base 1166: mod_base = OTHER; note = N1-methyl pseudouridine
  modified_base 1169: mod_base = OTHER; note = N1-methyl pseudouridine
  modified_base 1175: mod_base = OTHER; note = N1-methyl pseudouridine
  modified_base 1190: mod_base = OTHER; note = N1-methyl pseudouridine
  modified_base 1193: mod_base = OTHER; note = N1-methyl pseudouridine
  modified_base 1210: mod_base = OTHER; note = N1-methyl pseudouridine
  modified_base 1211: mod_base = OTHER; note = N1-methyl pseudouridine
  modified_base 1226: mod_base = OTHER; note = N1-methyl pseudouridine
  modified_base 1238: mod_base = OTHER; note = N1-methyl pseudouridine
  modified_base 1244: mod_base = OTHER; note = N1-methyl pseudouridine
  modified_base 1253: mod_base = OTHER; note = N1-methyl pseudouridine
  modified_base 1262: mod_base = OTHER; note = N1-methyl pseudouridine
  modified_base 1265: mod_base = OTHER; note = N1-methyl pseudouridine
  modified_base 1282: mod_base = OTHER; note = N1-methyl pseudouridine
  modified_base 1283: mod_base = OTHER; note = N1-methyl pseudouridine
  modified_base 1285: mod_base = OTHER; note = N1-methyl pseudouridine
  modified_base 1291: mod_base = OTHER; note = N1-methyl pseudouridine
  modified_base 1292: mod_base = OTHER; note = N1-methyl pseudouridine
  modified_base 1295: mod_base = OTHER; note = N1-methyl pseudouridine
  modified_base 1316: mod_base = OTHER; note = N1-methyl pseudouridine
  modified_base 1325: mod_base = OTHER; note = N1-methyl pseudouridine
  modified_base 1328: mod_base = OTHER; note = N1-methyl pseudouridine
  modified_base 1333: mod_base = OTHER; note = N1-methyl pseudouridine
  modified_base 1334: mod_base = OTHER; note = N1-methyl pseudouridine
  modified_base 1340: mod_base = OTHER; note = N1-methyl pseudouridine
  modified_base 1345: mod_base = OTHER; note = N1-methyl pseudouridine
  modified_base 1348: mod_base = OTHER; note = N1-methyl pseudouridine
  modified_base 1352: mod_base = OTHER; note = N1-methyl pseudouridine
  modified_base 1361: mod_base = OTHER; note = N1-methyl pseudouridine
  modified_base 1381: mod_base = OTHER; note = N1-methyl pseudouridine
  modified_base 1382: mod_base = OTHER; note = N1-methyl pseudouridine
  modified_base 1387: mod_base = OTHER; note = N1-methyl pseudouridine
  modified_base 1391: mod_base = OTHER; note = N1-methyl pseudouridine
  modified_base 1415: mod_base = OTHER; note = N1-methyl pseudouridine
  modified_base 1423: mod_base = OTHER; note = N1-methyl pseudouridine
  modified_base 1429: mod_base = OTHER; note = N1-methyl pseudouridine
  modified_base 1430: mod_base = OTHER; note = N1-methyl pseudouridine
  modified_base 1439: mod_base = OTHER; note = N1-methyl pseudouridine
  modified_base 1442: mod_base = OTHER; note = N1-methyl pseudouridine
  modified_base 1468: mod_base = OTHER; note = N1-methyl pseudouridine
  modified_base 1469: mod_base = OTHER; note = N1-methyl pseudouridine
  modified_base 1472: mod_base = OTHER; note = N1-methyl pseudouridine
  modified_base 1481: mod_base = OTHER; note = N1-methyl pseudouridine
  modified_base 1489: mod_base = OTHER; note = N1-methyl pseudouridine
  modified_base 1490: mod_base = OTHER; note = N1-methyl pseudouridine
  modified_base 1502: mod_base = OTHER; note = N1-methyl pseudouridine
  modified_base 1517: mod_base = OTHER; note = N1-methyl pseudouridine
  modified_base 1520: mod_base = OTHER; note = N1-methyl pseudouridine
  modified_base 1535: mod_base = OTHER; note = N1-methyl pseudouridine
  modified_base 1538: mod_base = OTHER; note = N1-methyl pseudouridine
  modified_base 1540: mod_base = OTHER; note = N1-methyl pseudouridine
  modified_base 1546: mod_base = OTHER; note = N1-methyl pseudouridine
  modified_base 1549: mod_base = OTHER; note = N1-methyl pseudouridine
  modified_base 1550: mod_base = OTHER; note = N1-methyl pseudouridine
  modified_base 1556: mod_base = OTHER; note = N1-methyl pseudouridine
  modified_base 1558: mod_base = OTHER; note = N1-methyl pseudouridine
  modified_base 1568: mod_base = OTHER; note = N1-methyl pseudouridine
  modified_base 1577: mod_base = OTHER; note = N1-methyl pseudouridine
  modified_base 1582: mod_base = OTHER; note = N1-methyl pseudouridine
  modified_base 1586: mod_base = OTHER; note = N1-methyl pseudouridine
  modified_base 1598: mod_base = OTHER; note = N1-methyl pseudouridine
  modified_base 1612: mod_base = OTHER; note = N1-methyl pseudouridine
  modified_base 1613: mod_base = OTHER; note = N1-methyl pseudouridine
  modified_base 1616: mod_base = OTHER; note = N1-methyl pseudouridine
  modified_base 1640: mod_base = OTHER; note = N1-methyl pseudouridine
  modified_base 1643: mod_base = OTHER; note = N1-methyl pseudouridine
  modified_base 1649: mod_base = OTHER; note = N1-methyl pseudouridine
  modified_base 1652: mod_base = OTHER; note = N1-methyl pseudouridine
  modified_base 1654: mod_base = OTHER; note = N1-methyl pseudouridine
  modified_base 1655: mod_base = OTHER; note = N1-methyl pseudouridine
  modified_base 1673: mod_base = OTHER; note = N1-methyl pseudouridine
  modified_base 1679: mod_base = OTHER; note = N1-methyl pseudouridine
  modified_base 1688: mod_base = OTHER; note = N1-methyl pseudouridine
  modified_base 1699: mod_base = OTHER; note = N1-methyl pseudouridine
  modified_base 1702: mod_base = OTHER; note = N1-methyl pseudouridine
  modified_base 1703: mod_base = OTHER; note = N1-methyl pseudouridine
  modified_base 1712: mod_base = OTHER; note = N1-methyl pseudouridine
  modified_base 1717: mod_base = OTHER; note = N1-methyl pseudouridine
  modified_base 1720: mod_base = OTHER; note = N1-methyl pseudouridine
  modified_base 1721: mod_base = OTHER; note = N1-methyl pseudouridine
  modified_base 1730: mod_base = OTHER; note = N1-methyl pseudouridine
  modified_base 1736: mod_base = OTHER; note = N1-methyl pseudouridine
  modified_base 1745: mod_base = OTHER; note = N1-methyl pseudouridine
  modified_base 1756: mod_base = OTHER; note = N1-methyl pseudouridine
  modified_base 1757: mod_base = OTHER; note = N1-methyl pseudouridine
  modified_base 1769: mod_base = OTHER; note = N1-methyl pseudouridine
  modified_base 1777: mod_base = OTHER; note = N1-methyl pseudouridine
  modified_base 1787: mod_base = OTHER; note = N1-methyl pseudouridine
  modified_base 1790: mod_base = OTHER; note = N1-methyl pseudouridine
  modified_base 1796: mod_base = OTHER; note = N1-methyl pseudouridine
  modified_base 1799: mod_base = OTHER; note = N1-methyl pseudouridine
  modified_base 1813: mod_base = OTHER; note = N1-methyl pseudouridine
  modified_base 1814: mod_base = OTHER; note = N1-methyl pseudouridine
  modified_base 1817: mod_base = OTHER; note = N1-methyl pseudouridine
  modified_base 1841: mod_base = OTHER; note = N1-methyl pseudouridine
  modified_base 1844: mod_base = OTHER; note = N1-methyl pseudouridine
  modified_base 1853: mod_base = OTHER; note = N1-methyl pseudouridine
  modified_base 1856: mod_base = OTHER; note = N1-methyl pseudouridine
  modified_base 1859: mod_base = OTHER; note = N1-methyl pseudouridine
  modified_base 1865: mod_base = OTHER; note = N1-methyl pseudouridine
  modified_base 1871: mod_base = OTHER; note = N1-methyl pseudouridine
  modified_base 1873: mod_base = OTHER; note = N1-methyl pseudouridine
  modified_base 1874: mod_base = OTHER; note = N1-methyl pseudouridine
  modified_base 1889: mod_base = OTHER; note = N1-methyl pseudouridine
  modified_base 1892: mod_base = OTHER; note = N1-methyl pseudouridine
  modified_base 1904: mod_base = OTHER; note = N1-methyl pseudouridine
  modified_base 1912: mod_base = OTHER; note = N1-methyl pseudouridine
  modified_base 1922: mod_base = OTHER; note = N1-methyl pseudouridine
  modified_base 1924: mod_base = OTHER; note = N1-methyl pseudouridine
  modified_base 1925: mod_base = OTHER; note = N1-methyl pseudouridine
  modified_base 1937: mod_base = OTHER; note = N1-methyl pseudouridine
  modified_base 1940: mod_base = OTHER; note = N1-methyl pseudouridine
  modified_base 1949: mod_base = OTHER; note = N1-methyl pseudouridine
  modified_base 1963: mod_base = OTHER; note = N1-methyl pseudouridine
  modified_base 1972: mod_base = OTHER; note = N1-methyl pseudouridine
  modified_base 1982: mod_base = OTHER; note = N1-methyl pseudouridine
  modified_base 1994: mod_base = OTHER; note = N1-methyl pseudouridine
  modified_base 1997: mod_base = OTHER; note = N1-methyl pseudouridine
  modified_base 2006: mod_base = OTHER; note = N1-methyl pseudouridine
  modified_base 2033: mod_base = OTHER; note = N1-methyl pseudouridine
  modified_base 2036: mod_base = OTHER; note = N1-methyl pseudouridine
  modified_base 2041: mod_base = OTHER; note = N1-methyl pseudouridine
  modified_base 2042: mod_base = OTHER; note = N1-methyl pseudouridine
  modified_base 2045: mod_base = OTHER; note = N1-methyl pseudouridine
  modified_base 2059: mod_base = OTHER; note = N1-methyl pseudouridine
  modified_base 2060: mod_base = OTHER; note = N1-methyl pseudouridine
  modified_base 2074: mod_base = OTHER; note = N1-methyl pseudouridine
  modified_base 2075: mod_base = OTHER; note = N1-methyl pseudouridine
  modified_base 2078: mod_base = OTHER; note = N1-methyl pseudouridine
  modified_base 2084: mod_base = OTHER; note = N1-methyl pseudouridine
  modified_base 2087: mod_base = OTHER; note = N1-methyl pseudouridine
  modified_base 2102: mod_base = OTHER; note = N1-methyl pseudouridine
  modified_base 2107: mod_base = OTHER; note = N1-methyl pseudouridine
  modified_base 2108: mod_base = OTHER; note = N1-methyl pseudouridine
  modified_base 2120: mod_base = OTHER; note = N1-methyl pseudouridine
  modified_base 2135: mod_base = OTHER; note = N1-methyl pseudouridine
  modified_base 2156: mod_base = OTHER; note = N1-methyl pseudouridine
  modified_base 2168: mod_base = OTHER; note = N1-methyl pseudouridine
  modified_base 2177: mod_base = OTHER; note = N1-methyl pseudouridine
  modified_base 2195: mod_base = OTHER; note = N1-methyl pseudouridine
  modified_base 2207: mod_base = OTHER; note = N1-methyl pseudouridine
  modified_base 2210: mod_base = OTHER; note = N1-methyl pseudouridine
  modified_base 2219: mod_base = OTHER; note = N1-methyl pseudouridine
  modified_base 2225: mod_base = OTHER; note = N1-methyl pseudouridine
  modified_base 2228: mod_base = OTHER; note = N1-methyl pseudouridine
  modified_base 2237: mod_base = OTHER; note = N1-methyl pseudouridine
  modified_base 2240: mod_base = OTHER; note = N1-methyl pseudouridine
  modified_base 2246: mod_base = OTHER; note = N1-methyl pseudouridine
  modified_base 2249: mod_base = OTHER; note = N1-methyl pseudouridine
  modified_base 2273: mod_base = OTHER; note = N1-methyl pseudouridine
  modified_base 2276: mod_base = OTHER; note = N1-methyl pseudouridine
  modified_base 2279: mod_base = OTHER; note = N1-methyl pseudouridine
  modified_base 2285: mod_base = OTHER; note = N1-methyl pseudouridine
  modified_base 2339: mod_base = OTHER; note = N1-methyl pseudouridine
  modified_base 2348: mod_base = OTHER; note = N1-methyl pseudouridine
  modified_base 2360: mod_base = OTHER; note = N1-methyl pseudouridine
  modified_base 2369: mod_base = OTHER; note = N1-methyl pseudouridine
  modified_base 2381: mod_base = OTHER; note = N1-methyl pseudouridine
  modified_base 2384: mod_base = OTHER; note = N1-methyl pseudouridine
  modified_base 2399: mod_base = OTHER; note = N1-methyl pseudouridine
  modified_base 2414: mod_base = OTHER; note = N1-methyl pseudouridine
  modified_base 2429: mod_base = OTHER; note = N1-methyl pseudouridine
  modified_base 2431: mod_base = OTHER; note = N1-methyl pseudouridine
  modified_base 2435: mod_base = OTHER; note = N1-methyl pseudouridine
  modified_base 2437: mod_base = OTHER; note = N1-methyl pseudouridine
  modified_base 2440: mod_base = OTHER; note = N1-methyl pseudouridine
  modified_base 2444: mod_base = OTHER; note = N1-methyl pseudouridine
  modified_base 2462: mod_base = OTHER; note = N1-methyl pseudouridine
  modified_base 2464: mod_base = OTHER; note = N1-methyl pseudouridine
  modified_base 2468: mod_base = OTHER; note = N1-methyl pseudouridine
  modified_base 2480: mod_base = OTHER; note = N1-methyl pseudouridine
  modified_base 2486: mod_base = OTHER; note = N1-methyl pseudouridine
  modified_base 2495: mod_base = OTHER; note = N1-methyl pseudouridine
  modified_base 2503: mod_base = OTHER; note = N1-methyl pseudouridine
  modified_base 2510: mod_base = OTHER; note = N1-methyl pseudouridine
  modified_base 2519: mod_base = OTHER; note = N1-methyl pseudouridine
  modified_base 2522: mod_base = OTHER; note = N1-methyl pseudouridine
  modified_base 2533: mod_base = OTHER; note = N1-methyl pseudouridine
  modified_base 2534: mod_base = OTHER; note = N1-methyl pseudouridine
  modified_base 2537: mod_base = OTHER; note = N1-methyl pseudouridine
  modified_base 2552: mod_base = OTHER; note = N1-methyl pseudouridine
  modified_base 2564: mod_base = OTHER; note = N1-methyl pseudouridine
  modified_base 2567: mod_base = OTHER; note = N1-methyl pseudouridine
  modified_base 2606: mod_base = OTHER; note = N1-methyl pseudouridine
  modified_base 2621: mod_base = OTHER; note = N1-methyl pseudouridine
  modified_base 2624: mod_base = OTHER; note = N1-methyl pseudouridine
  modified_base 2633: mod_base = OTHER; note = N1-methyl pseudouridine
  modified_base 2641: mod_base = OTHER; note = N1-methyl pseudouridine
  modified_base 2644: mod_base = OTHER; note = N1-methyl pseudouridine
  modified_base 2654: mod_base = OTHER; note = N1-methyl pseudouridine
  modified_base 2657: mod_base = OTHER; note = N1-methyl pseudouridine
  modified_base 2669: mod_base = OTHER; note = N1-methyl pseudouridine
  modified_base 2672: mod_base = OTHER; note = N1-methyl pseudouridine
  modified_base 2686: mod_base = OTHER; note = N1-methyl pseudouridine
  modified_base 2687: mod_base = OTHER; note = N1-methyl pseudouridine
  modified_base 2696: mod_base = OTHER; note = N1-methyl pseudouridine
  modified_base 2720: mod_base = OTHER; note = N1-methyl pseudouridine
  modified_base 2729: mod_base = OTHER; note = N1-methyl pseudouridine
  modified_base 2743: mod_base = OTHER; note = N1-methyl pseudouridine
  modified_base 2744: mod_base = OTHER; note = N1-methyl pseudouridine
  modified_base 2747: mod_base = OTHER; note = N1-methyl pseudouridine
  modified_base 2759: mod_base = OTHER; note = N1-methyl pseudouridine
  modified_base 2762: mod_base = OTHER; note = N1-methyl pseudouridine
  modified_base 2777: mod_base = OTHER; note = N1-methyl pseudouridine
  modified_base 2789: mod_base = OTHER; note = N1-methyl pseudouridine
  modified_base 2798: mod_base = OTHER; note = N1-methyl pseudouridine
  modified_base 2801: mod_base = OTHER; note = N1-methyl pseudouridine
  modified_base 2813: mod_base = OTHER; note = N1-methyl pseudouridine
  modified_base 2824: mod_base = OTHER; note = N1-methyl pseudouridine
  modified_base 2843: mod_base = OTHER; note = N1-methyl pseudouridine
  modified_base 2846: mod_base = OTHER; note = N1-methyl pseudouridine
  modified_base 2855: mod_base = OTHER; note = N1-methyl pseudouridine
  modified_base 2861: mod_base = OTHER; note = N1-methyl pseudouridine
  modified_base 2864: mod_base = OTHER; note = N1-methyl pseudouridine
  modified_base 2870: mod_base = OTHER; note = N1-methyl pseudouridine
  modified_base 2882: mod_base = OTHER; note = N1-methyl pseudouridine
  modified_base 2885: mod_base = OTHER; note = N1-methyl pseudouridine
  modified_base 2893: mod_base = OTHER; note = N1-methyl pseudouridine
  modified_base 2894: mod_base = OTHER; note = N1-methyl pseudouridine
  modified_base 2905: mod_base = OTHER; note = N1-methyl pseudouridine
  modified_base 2906: mod_base = OTHER; note = N1-methyl pseudouridine
  modified_base 2911: mod_base = OTHER; note = N1-methyl pseudouridine
  modified_base 2912: mod_base = OTHER; note = N1-methyl pseudouridine
  modified_base 2914: mod_base = OTHER; note = N1-methyl pseudouridine
  modified_base 2921: mod_base = OTHER; note = N1-methyl pseudouridine
  modified_base 2930: mod_base = OTHER; note = N1-methyl pseudouridine
  modified_base 2938: mod_base = OTHER; note = N1-methyl pseudouridine
  modified_base 2959: mod_base = OTHER; note = N1-methyl pseudouridine
  modified_base 2963: mod_base = OTHER; note = N1-methyl pseudouridine
  modified_base 2972: mod_base = OTHER; note = N1-methyl pseudouridine
  modified_base 2975: mod_base = OTHER; note = N1-methyl pseudouridine
  modified_base 2987: mod_base = OTHER; note = N1-methyl pseudouridine
  modified_base 2990: mod_base = OTHER; note = N1-methyl pseudouridine
  modified_base 2998: mod_base = OTHER; note = N1-methyl pseudouridine
  modified_base 3008: mod_base = OTHER; note = N1-methyl pseudouridine
  modified_base 3019: mod_base = OTHER; note = N1-methyl pseudouridine
  modified_base 3020: mod_base = OTHER; note = N1-methyl pseudouridine
  modified_base 3023: mod_base = OTHER; note = N1-methyl pseudouridine
  modified_base 3025: mod_base = OTHER; note = N1-methyl pseudouridine
  modified_base 3034: mod_base = OTHER; note = N1-methyl pseudouridine
  modified_base 3041: mod_base = OTHER; note = N1-methyl pseudouridine
  modified_base 3043: mod_base = OTHER; note = N1-methyl pseudouridine
  modified_base 3050: mod_base = OTHER; note = N1-methyl pseudouridine
  modified_base 3059: mod_base = OTHER; note = N1-methyl pseudouridine
  modified_base 3062: mod_base = OTHER; note = N1-methyl pseudouridine
  modified_base 3083: mod_base = OTHER; note = N1-methyl pseudouridine
  modified_base 3103: mod_base = OTHER; note = N1-methyl pseudouridine
  modified_base 3106: mod_base = OTHER; note = N1-methyl pseudouridine
  modified_base 3107: mod_base = OTHER; note = N1-methyl pseudouridine
  modified_base 3109: mod_base = OTHER; note = N1-methyl pseudouridine
  modified_base 3110: mod_base = OTHER; note = N1-methyl pseudouridine
  modified_base 3112: mod_base = OTHER; note = N1-methyl pseudouridine
  modified_base 3122: mod_base = OTHER; note = N1-methyl pseudouridine
  modified_base 3125: mod_base = OTHER; note = N1-methyl pseudouridine
  modified_base 3130: mod_base = OTHER; note = N1-methyl pseudouridine
  modified_base 3131: mod_base = OTHER; note = N1-methyl pseudouridine
  modified_base 3133: mod_base = OTHER; note = N1-methyl pseudouridine
  modified_base 3134: mod_base = OTHER; note = N1-methyl pseudouridine
  modified_base 3146: mod_base = OTHER; note = N1-methyl pseudouridine
  modified_base 3152: mod_base = OTHER; note = N1-methyl pseudouridine
  modified_base 3167: mod_base = OTHER; note = N1-methyl pseudouridine
  modified_base 3182: mod_base = OTHER; note = N1-methyl pseudouridine
  modified_base 3185: mod_base = OTHER; note = N1-methyl pseudouridine
  modified_base 3212: mod_base = OTHER; note = N1-methyl pseudouridine
  modified_base 3215: mod_base = OTHER; note = N1-methyl pseudouridine
  modified_base 3217: mod_base = OTHER; note = N1-methyl pseudouridine
  modified_base 3235: mod_base = OTHER; note = N1-methyl pseudouridine
  modified_base 3236: mod_base = OTHER; note = N1-methyl pseudouridine
  modified_base 3245: mod_base = OTHER; note = N1-methyl pseudouridine
  modified_base 3254: mod_base = OTHER; note = N1-methyl pseudouridine
  modified_base 3257: mod_base = OTHER; note = N1-methyl pseudouridine
  modified_base 3263: mod_base = OTHER; note = N1-methyl pseudouridine
  modified_base 3272: mod_base = OTHER; note = N1-methyl pseudouridine
  modified_base 3278: mod_base = OTHER; note = N1-methyl pseudouridine
  modified_base 3281: mod_base = OTHER; note = N1-methyl pseudouridine
  modified_base 3296: mod_base = OTHER; note = N1-methyl pseudouridine
  modified_base 3310: mod_base = OTHER; note = N1-methyl pseudouridine
  modified_base 3311: mod_base = OTHER; note = N1-methyl pseudouridine
  modified_base 3326: mod_base = OTHER; note = N1-methyl pseudouridine
  modified_base 3329: mod_base = OTHER; note = N1-methyl pseudouridine
  modified_base 3353: mod_base = OTHER; note = N1-methyl pseudouridine
  modified_base 3356: mod_base = OTHER; note = N1-methyl pseudouridine
  modified_base 3373: mod_base = OTHER; note = N1-methyl pseudouridine
  modified_base 3388: mod_base = OTHER; note = N1-methyl pseudouridine
  modified_base 3397: mod_base = OTHER; note = N1-methyl pseudouridine
  modified_base 3398: mod_base = OTHER; note = N1-methyl pseudouridine
  modified_base 3413: mod_base = OTHER; note = N1-methyl pseudouridine
  modified_base 3418: mod_base = OTHER; note = N1-methyl pseudouridine
  modified_base 3425: mod_base = OTHER; note = N1-methyl pseudouridine
  modified_base 3428: mod_base = OTHER; note = N1-methyl pseudouridine
  modified_base 3431: mod_base = OTHER; note = N1-methyl pseudouridine
  modified_base 3434: mod_base = OTHER; note = N1-methyl pseudouridine
  modified_base 3443: mod_base = OTHER; note = N1-methyl pseudouridine
  modified_base 3467: mod_base = OTHER; note = N1-methyl pseudouridine
  modified_base 3476: mod_base = OTHER; note = N1-methyl pseudouridine
  modified_base 3485: mod_base = OTHER; note = N1-methyl pseudouridine
  modified_base 3488: mod_base = OTHER; note = N1-methyl pseudouridine
  modified_base 3494: mod_base = OTHER; note = N1-methyl pseudouridine
  modified_base 3500: mod_base = OTHER; note = N1-methyl pseudouridine
  modified_base 3503: mod_base = OTHER; note = N1-methyl pseudouridine
  modified_base 3517: mod_base = OTHER; note = N1-methyl pseudouridine
  modified_base 3518: mod_base = OTHER; note = N1-methyl pseudouridine
  modified_base 3533: mod_base = OTHER; note = N1-methyl pseudouridine
  modified_base 3538: mod_base = OTHER; note = N1-methyl pseudouridine
  modified_base 3539: mod_base = OTHER; note = N1-methyl pseudouridine
  modified_base 3542: mod_base = OTHER; note = N1-methyl pseudouridine
  modified_base 3556: mod_base = OTHER; note = N1-methyl pseudouridine
  modified_base 3566: mod_base = OTHER; note = N1-methyl pseudouridine
  modified_base 3578: mod_base = OTHER; note = N1-methyl pseudouridine
  modified_base 3581: mod_base = OTHER; note = N1-methyl pseudouridine
  modified_base 3584: mod_base = OTHER; note = N1-methyl pseudouridine
  modified_base 3590: mod_base = OTHER; note = N1-methyl pseudouridine
  modified_base 3598: mod_base = OTHER; note = N1-methyl pseudouridine
  modified_base 3605: mod_base = OTHER; note = N1-methyl pseudouridine
  modified_base 3607: mod_base = OTHER; note = N1-methyl pseudouridine
  modified_base 3608: mod_base = OTHER; note = N1-methyl pseudouridine
  modified_base 3614: mod_base = OTHER; note = N1-methyl pseudouridine
  modified_base 3635: mod_base = OTHER; note = N1-methyl pseudouridine
  modified_base 3638: mod_base = OTHER; note = N1-methyl pseudouridine
  modified_base 3656: mod_base = OTHER; note = N1-methyl pseudouridine
  modified_base 3674: mod_base = OTHER; note = N1-methyl pseudouridine
  modified_base 3680: mod_base = OTHER; note = N1-methyl pseudouridine
  modified_base 3691: mod_base = OTHER; note = N1-methyl pseudouridine
  modified_base 3695: mod_base = OTHER; note = N1-methyl pseudouridine
  modified_base 3700: mod_base = OTHER; note = N1-methyl pseudouridine
  modified_base 3701: mod_base = OTHER; note = N1-methyl pseudouridine
  modified_base 3704: mod_base = OTHER; note = N1-methyl pseudouridine
  modified_base 3706: mod_base = OTHER; note = N1-methyl pseudouridine
  modified_base 3710: mod_base = OTHER; note = N1-methyl pseudouridine
  modified_base 3721: mod_base = OTHER; note = N1-methyl pseudouridine
  modified_base 3731: mod_base = OTHER; note = N1-methyl pseudouridine
  modified_base 3767: mod_base = OTHER; note = N1-methyl pseudouridine
  modified_base 3769: mod_base = OTHER; note = N1-methyl pseudouridine
  modified_base 3770: mod_base = OTHER; note = N1-methyl pseudouridine
  modified_base 3773: mod_base = OTHER; note = N1-methyl pseudouridine
  modified_base 3790: mod_base = OTHER; note = N1-methyl pseudouridine
  modified_base 3794: mod_base = OTHER; note = N1-methyl pseudouridine
  modified_base 3803: mod_base = OTHER; note = N1-methyl pseudouridine
  modified_base 3806: mod_base = OTHER; note = N1-methyl pseudouridine
  modified_base 3815: mod_base = OTHER; note = N1-methyl pseudouridine
  modified_base 3823: mod_base = OTHER; note = N1-methyl pseudouridine
  modified_base 3824: mod_base = OTHER; note = N1-methyl pseudouridine
  modified_base 3836: mod_base = OTHER; note = N1-methyl pseudouridine
  modified_base 3839: mod_base = OTHER; note = N1-methyl pseudouridine
  modified_base 3842: mod_base = OTHER; note = N1-methyl pseudouridine
  modified_base 3857: mod_base = OTHER; note = N1-methyl pseudouridine
  modified_base 3866: mod_base = OTHER; note = N1-methyl pseudouridine
  modified_base 3869: mod_base = OTHER; note = N1-methyl pseudouridine
  modified_base 3877: mod_base = OTHER; note = N1-methyl pseudouridine
  modified_base 3902: mod_base = OTHER; note = N1-methyl pseudouridine
  modified_base 3923: mod_base = OTHER; note = N1-methyl pseudouridine
  modified_base 3926: mod_base = OTHER; note = N1-methyl pseudouridine
  modified_base 3932: mod_base = OTHER; note = N1-methyl pseudouridine
  modified_base 3934: mod_base = OTHER; note = N1-methyl pseudouridine
  modified_base 3935: mod_base = OTHER; note = N1-methyl pseudouridine
  modified_base 3941: mod_base = OTHER; note = N1-methyl pseudouridine
  modified_base 3950: mod_base = OTHER; note = N1-methyl pseudouridine
  modified_base 3967: mod_base = OTHER; note = N1-methyl pseudouridine
  modified_base 3968: mod_base = OTHER; note = N1-methyl pseudouridine
  modified_base 3973: mod_base = OTHER; note = N1-methyl pseudouridine
  modified_base 3976: mod_base = OTHER; note = N1-methyl pseudouridine
  modified_base 3977: mod_base = OTHER; note = N1-methyl pseudouridine
  modified_base 3989: mod_base = OTHER; note = N1-methyl pseudouridine
  modified_base 4003: mod_base = OTHER; note = N1-methyl pseudouridine
  modified_base 4022: mod_base = OTHER; note = N1-methyl pseudouridine
  modified_base 4025: mod_base = OTHER; note = N1-methyl pseudouridine
  modified_base 4037: mod_base = OTHER; note = N1-methyl pseudouridine
  modified_base 4040: mod_base = OTHER; note = N1-methyl pseudouridine
  modified_base 4052: mod_base = OTHER; note = N1-methyl pseudouridine
  modified_base 4061: mod_base = OTHER; note = N1-methyl pseudouridine
  modified_base 4063: mod_base = OTHER; note = N1-methyl pseudouridine
  modified_base 4076: mod_base = OTHER; note = N1-methyl pseudouridine
  modified_base 4082: mod_base = OTHER; note = N1-methyl pseudouridine
  modified_base 4091: mod_base = OTHER; note = N1-methyl pseudouridine
gacaagaagtacagcatcggcctggccatcggcaccaacagcgtgggctgggccgtgatcaccgacgagtacaaggtgcccagcaagaagttcaaggtgctgggcaacaccgaccggcacagcatcaagaagaacctgatcggcgccctgctgttcgacagcggcgagacagccgaggccacccggctgaagcggaccgcccggcggcggtacacccggcggaagaaccggatctgctacctgcaggagatcttcagcaacgagatggccaaggtggacgacagcttcttccaccggctggaggagagcttcctggtggaggaggacaagaagcacgagcggcaccccatcttcggcaacatcgtggacgaggtggcctaccacgagaagtaccccaccatctaccacctgcggaagaagctggtggacagcaccgacaaggccgacctgcggctgatctacctggccctggcccacatgatcaagttccggggccacttcctgatcgagggcgacctgaaccccgacaacagcgacgtggacaagctgttcatccagctggtgcagacctacaaccagctgttcgaggagaaccccatcaacgccagcggcgtggacgccaaggccatcctgagcgcccggctgagcaagagccggcggctggagaacctgatcgcccagctgcccggcgagaagaagaacggcctgttcggcaacctgatcgccctgagcctgggcctgacccccaacttcaagagcaacttcgacctggccgaggacgccaagctgcagctgagcaaggacacctacgacgacgacctggacaacctgctggcccagatcggcgaccagtacgccgacctgttcctggccgccaagaacctgagcgacgccatcctgctgagcgacatcctgcgggtgaacaccgagatcaccaaggcccccctgagcgccagcatgatcaagcggtacgacgagcaccaccaggacctgaccctgctgaaggccctggtgcggcagcagctgcccgagaagtacaaggagatcttcttcgaccagagcaagaacggctacgccggctacatcgacggcggcgccagccaggaggagttctacaagttcatcaagcccatcctggagaagatggacggcaccgaggagctgctggtgaagctgaaccgggaggacctgctgcggaagcagcggaccttcgacaacggcagcatcccccaccagatccacctgggcgagctgcacgccatcctgcggcggcaggaggacttctaccccttcctgaaggacaaccgggagaagatcgagaagatcctgaccttccggatcccctactacgtgggccccctggcccggggcaacagccggttcgcctggatgacccgcaagagcgaggagacaatcaccccctggaacttcgaggaggtggtggacaagggcgccagcgcccagagcttcatcgagcggatgaccaacttcgacaagaacctgcccaacgagaaggtgctgcccaagcacagcctgctgtacgagtacttcaccgtgtacaacgagctgaccaaggtgaagtacgtgaccgagggcatgcggaagcccgccttcctgagcggcgagcagaagaaggccatcgtggacctgctgttcaagaccaaccggaaggtgaccgtgaagcagctgaaggaggactacttcaagaagatcgagtgcttcgacagcgtggagatcagcggcgtggaggaccggttcaacgccagcctgggcacctaccacgacctgctgaagatcatcaaggacaaggacttcctggacaacgaggagaacgaggacatcctggaggacatcgtgctgaccctgaccctgttcgaggaccgggagatgatcgaggagcggctgaagacctacgcccacctgttcgacgacaaggtgatgaagcagctgaagcggcggcggtacaccggctggggccggctgagccggaagctgatcaacggcatccgggacaagcagagcggcaagaccatcctggacttcctcaagagcgacggcttcgccaacgccaacttcatgcagctgatccacgacgacagcctgaccttcaaggaggacatccagaaggcccaggtgagcggccagggcgacagcctgcacgagcacatcgccaacctggccggcagccccgccatcaagaagggcatcctgcagaccgtgaaggtggtggacgagctggtgaaggtgatgggccggcacaagcccgagaacatcgtgatcgagatggcccgggagaaccagaccacccagaagggccagaagaacagccgggagcggatgaagcggatcgaggagggcatcaaggagctgggcagccagatcctgaaggagcaccccgtggagaacacccagctgcagaacgagaagctgtacctgtactacctgcagaacggccgggacatgtacgtggaccaggagctggacatcaaccggctgagcgactacgacgtggaccacatcgtgccccagagcttcctgaaggacgacagcatcgacaacaaggtgctgacccggagcgacaagaaccggggcaagagcgacaacgtgcccagcgaggaggtggtgaagaagatgaagaactactggcggcagctgctgaacgccaagctgatcacccagcggaagttcgacaacctgaccaaggccgagcggggcggcctgagcgagctggacaaggccggcttcatcaagcggcagctggtggagacacggcagatcaccaagcacgtggcccagatcctggacagccggatgaacaccaagtacgacgagaacgacaagctgatccgggaggtgaaggtgatcaccctcaagagcaagctggtgagcgacttccggaaggacttccagttctacaaggtgcgggagatcaacaactaccaccacgcccacgacgcctacctgaacgccgtggtgggcaccgccctgatcaagaagtaccccaagctggagagcgagttcgtgtacggcgactacaaggtgtacgacgtgcggaagatgatcgccaagagcgagcaggagatcggcaaggccaccgccaagtacttcttctacagcaacatcatgaacttcttcaagaccgagatcaccctggccaacggcgagatccggaagcggcccctgatcgagacaaacggcgagacaggcgagatcgtgtgggacaagggccgggacttcgccaccgtgcggaaggtgctgagcatgccccaggtgaacatcgtgaagaagaccgaggtgcagaccggcggcttcagcaaggagagcatcctgcccaagcggaacagcgacaagctgatcgcccggaagaaggactgggaccccaagaagtacggcggcttcgacagccccaccgtggcctacagcgtgctggtggtggccaaggtggagaagggcaagagcaagaagctcaagagcgtgaaggagctgctgggcatcaccatcatggagcggagcagcttcgagaagaaccccatcgacttcctggaggccaagggctacaaggaggtgaagaaggacctgatcatcaagctgcccaagtacagcctgttcgagctggagaacggccggaagcggatgctggccagcgccggcgagctgcagaagggcaacgagctggccctgcccagcaagtacgtgaacttcctgtacctggccagccactacgagaagctgaagggcagccccgaggacaacgagcagaagcagctgttcgtggagcagcacaagcactacctggacgagatcatcgagcagatcagcgagttcagcaagcgggtgatcctggccgacgccaacctggacaaggtgctgagcgcctacaacaagcaccgggacaagcccatccgggagcaggccgagaacatcatccacctgttcaccctgaccaacctgggcgcccccgccgccttcaagtacttcgacaccaccatcgaccggaagcggtacaccagcaccaaggaggtgctggacgccaccctgatccaccagagcatcaccggcctgtacgagacacggatcgacctgagccagctgggcggcgac

SEQ ID NO: 2160 - protein, 1367 aa, synthetic construct
DKKYSIGLAIGTNSVGWAVITDEYKVPSKKFKVLGNTDRHSIKKNLIGALLFDSGETAEATRLKRTARRRYTRRKNRICYLQEIFSNEMAKVDDSFFHRLEESFLVEEDKKHERHPIFGNIVDEVAYHEKYPTIYHLRKKLVDSTDKADLRLIYLALAHMIKFRGHFLIEGDLNPDNSDVDKLFIQLVQTYNQLFEENPINASGVDAKAILSARLSKSRRLENLIAQLPGEKKNGLFGNLIALSLGLTPNFKSNFDLAEDAKLQLSKDTYDDDLDNLLAQIGDQYADLFLAAKNLSDAILLSDILRVNTEITKAPLSASMIKRYDEHHQDLTLLKALVRQQLPEKYKEIFFDQSKNGYAGYIDGGASQEEFYKFIKPILEKMDGTEELLVKLNREDLLRKQRTFDNGSIPHQIHLGELHAILRRQEDFYPFLKDNREKIEKILTFRIPYYVGPLARGNSRFAWMTRKSEETITPWNFEEVVDKGASAQSFIERMTNFDKNLPNEKVLPKHSLLYEYFTVYNELTKVKYVTEGMRKPAFLSGEQKKAIVDLLFKTNRKVTVKQLKEDYFKKIECFDSVEISGVEDRFNASLGTYHDLLKIIKDKDFLDNEENEDILEDIVLTLTLFEDREMIEERLKTYAHLFDDKVMKQLKRRRYTGWGRLSRKLINGIRDKQSGKTILDFLKSDGFANANFMQLIHDDSLTFKEDIQKAQVSGQGDSLHEHIANLAGSPAIKKGILQTVKVVDELVKVMGRHKPENIVIEMARENQTTQKGQKNSRERMKRIEEGIKELGSQILKEHPVENTQLQNEKLYLYYLQNGRDMYVDQELDINRLSDYDVDHIVPQSFLKDDSIDNKVLTRSDKNRGKSDNVPSEEVVKKMKNYWRQLLNAKLITQRKFDNLTKAERGGLSELDKAGFIKRQLVETRQITKHVAQILDSRMNTKYDENDKLIREVKVITLKSKLVSDFRKDFQFYKVREINNYHHAHDAYLNAVVGTALIKKYPKLESEFVYGDYKVYDVRKMIAKSEQEIGKATAKYFFYSNIMNFFKTEITLANGEIRKRPLIETNGETGEIVWDKGRDFATVRKVLSMPQVNIVKKTEVQTGGFSKESILPKRNSDKLIARKKDWDPKKYGGFDSPTVAYSVLVVAKVEKGKSKKLKSVKELLGITIMERSSFEKNPIDFLEAKGYKEVKKDLIIKLPKYSLFELENGRKRMLASAGELQKGNELALPSKYVNFLYLASHYEKLKGSPEDNEQKQLFVEQHKHYLDEIIEQISEFSKRVILADANLDKVLSAYNKHRDKPIREQAENIIHLFTLTNLGAPAAFKYFDTTIDRKRYTSTKEVLDATLIHQSITGLYETRIDLSQLGGD

SEQ ID NO: 2161 - RNA, 4929 nt, synthetic construct
  source 1..4929: mol_type = other RNA
  modified_base 7: mod_base = OTHER; note = N1-methyl pseudouridine
  modified_base 25: mod_base = OTHER; note = N1-methyl pseudouridine
  modified_base 35: mod_base = OTHER; note = N1-methyl pseudouridine
  modified_base 37: mod_base = OTHER; note = N1-methyl pseudouridine
  modified_base 49: mod_base = OTHER; note = N1-methyl pseudouridine
  modified_base 51: mod_base = OTHER; note = N1-methyl pseudouridine
  modified_base 58: mod_base = OTHER; note = N1-methyl pseudouridine
  modified_base 63: mod_base = OTHER; note = N1-methyl pseudouridine
  modified_base 64: mod_base = OTHER; note = N1-methyl pseudouridine
  modified_base 75: mod_base = OTHER; note = N1-methyl pseudouridine
  modified_base 78: mod_base = OTHER; note = N1-methyl pseudouridine
  modified_base 82: mod_base = OTHER; note = N1-methyl pseudouridine
  modified_base 89: mod_base = OTHER; note = N1-methyl pseudouridine
  modified_base 94: mod_base = OTHER; note = N1-methyl pseudouridine
  modified_base 100: mod_base = OTHER; note = N1-methyl pseudouridine
  modified_base 113: mod_base = OTHER; note = N1-methyl pseudouridine
  modified_base 119: mod_base = OTHER; note = N1-methyl pseudouridine
  modified_base 130: mod_base = OTHER; note = N1-methyl pseudouridine
  modified_base 136: mod_base = OTHER; note = N1-methyl pseudouridine
  modified_base 143: mod_base = OTHER; note = N1-methyl pseudouridine
  modified_base 145: mod_base = OTHER; note = N1-methyl pseudouridine
  modified_base 148: mod_base = OTHER; note = N1-methyl pseudouridine
  modified_base 151: mod_base = OTHER; note = N1-methyl pseudouridine
  modified_base 154: mod_base = OTHER; note = N1-methyl pseudouridine
  modified_base 166: mod_base = OTHER; note = N1-methyl pseudouridine
  modified_base 169: mod_base = OTHER; note = N1-methyl pseudouridine
  modified_base 170: mod_base = OTHER; note = N1-methyl pseudouridine
  modified_base 180: mod_base = OTHER; note = N1-methyl pseudouridine
  modified_base 193: mod_base = OTHER; note = N1-methyl pseudouridine
  modified_base 194: mod_base = OTHER; note = N1-methyl pseudouridine
  modified_base 199: mod_base = OTHER; note = N1-methyl pseudouridine
  modified_base 200: mod_base = OTHER; note = N1-methyl pseudouridine
  modified_base 206: mod_base = OTHER; note = N1-methyl pseudouridine
  modified_base 215: mod_base = OTHER; note = N1-methyl pseudouridine
  modified_base 218: mod_base = OTHER; note = N1-methyl pseudouridine
  modified_base 226: mod_base = OTHER; note = N1-methyl pseudouridine
  modified_base 229: mod_base = OTHER; note = N1-methyl pseudouridine
  modified_base 235: mod_base = OTHER; note = N1-methyl pseudouridine
  modified_base 248: mod_base = OTHER; note = N1-methyl pseudouridine
  modified_base 250: mod_base = OTHER; note = N1-methyl pseudouridine
  modified_base 251: mod_base = OTHER; note = N1-methyl pseudouridine
  modified_base 253: mod_base = OTHER; note = N1-methyl pseudouridine
  modified_base 256: mod_base = OTHER; note = N1-methyl pseudouridine
  modified_base 264: mod_base = OTHER; note = N1-methyl pseudouridine
  modified_base 266: mod_base = OTHER; note = N1-methyl pseudouridine
  modified_base 271: mod_base = OTHER; note = N1-methyl pseudouridine
  modified_base 274: mod_base = OTHER; note = N1-methyl pseudouridine
  modified_base 275: mod_base = OTHER; note = N1-methyl pseudouridine
  modified_base 278: mod_base = OTHER; note = N1-methyl pseudouridine
  modified_base 284: mod_base = OTHER; note = N1-methyl pseudouridine
  modified_base 286: mod_base = OTHER; note = N1-methyl pseudouridine
  modified_base 288: mod_base = OTHER; note = N1-methyl pseudouridine
  modified_base 292: mod_base = OTHER; note = N1-methyl pseudouridine
  modified_base 297: mod_base = OTHER; note = N1-methyl pseudouridine
  modified_base 298: mod_base = OTHER; note = N1-methyl pseudouridine
  modified_base 305: mod_base = OTHER; note = N1-methyl pseudouridine
  modified_base 306: mod_base = OTHER; note = N1-methyl pseudouridine
  modified_base 310: mod_base = OTHER; note = N1-methyl pseudouridine
  modified_base 313: mod_base = OTHER; note = N1-methyl pseudouridine
  modified_base 315: mod_base = OTHER; note = N1-methyl pseudouridine
  modified_base 323: mod_base = OTHER; note = N1-methyl pseudouridine
  modified_base 328: mod_base = OTHER; note = N1-methyl pseudouridine
  modified_base 331: mod_base = OTHER; note = N1-methyl pseudouridine
  modified_base 336: mod_base = OTHER; note = N1-methyl pseudouridine
  modified_base 343: mod_base = OTHER; note = N1-methyl pseudouridine
  modified_base 347: mod_base = OTHER; note = N1-methyl pseudouridine
  modified_base 352: mod_base = OTHER; note = N1-methyl pseudouridine
  modified_base 355: mod_base = OTHER; note = N1-methyl pseudouridine
  modified_base 357: mod_base = OTHER; note = N1-methyl pseudouridine
  modified_base 358: mod_base = OTHER; note = N1-methyl pseudouridine
  modified_base 364: mod_base = OTHER; note = N1-methyl pseudouridine
  modified_base 374: mod_base = OTHER; note = N1-methyl pseudouridine
  modified_base 380: mod_base = OTHER; note = N1-methyl pseudouridine
  modified_base 393: mod_base = OTHER; note = N1-methyl pseudouridine
  modified_base 397: mod_base = OTHER; note = N1-methyl pseudouridine
  modified_base 400: mod_base = OTHER; note = N1-methyl pseudouridine
  modified_base 404: mod_base = OTHER; note = N1-methyl pseudouridine
  modified_base 406: mod_base = OTHER; note = N1-methyl pseudouridine
  modified_base 409: mod_base = OTHER; note = N1-methyl pseudouridine
  modified_base 413: mod_base = OTHER; note = N1-methyl pseudouridine
  modified_base 424: mod_base = OTHER; note = N1-methyl pseudouridine
  modified_base 436: mod_base = OTHER; note = N1-methyl pseudouridine
  modified_base 442: mod_base = OTHER; note = N1-methyl pseudouridine
  modified_base 454: mod_base = OTHER; note = N1-methyl pseudouridine
  modified_base 455: mod_base = OTHER; note = N1-methyl pseudouridine
  modified_base 457: mod_base = OTHER; note = N1-methyl pseudouridine
  modified_base 468: mod_base = OTHER; note = N1-methyl pseudouridine
  modified_base 478: mod_base = OTHER; note = N1-methyl pseudouridine
  modified_base 480: mod_base = OTHER; note = N1-methyl pseudouridine
  modified_base 481: mod_base = OTHER; note = N1-methyl pseudouridine
  modified_base 483: mod_base = OTHER; note = N1-methyl pseudouridine
  modified_base 485: mod_base = OTHER; note = N1-methyl pseudouridine
  modified_base 489: mod_base = OTHER; note = N1-methyl pseudouridine
  modified_base 490: mod_base = OTHER; note = N1-methyl pseudouridine
  modified_base 492: mod_base = OTHER; note = N1-methyl pseudouridine
  modified_base 493: mod_base = OTHER; note = N1-methyl pseudouridine
  modified_base 499: mod_base = OTHER; note = N1-methyl pseudouridine
  modified_base 503: mod_base = OTHER; note = N1-methyl pseudouridine
  modified_base 511: mod_base = OTHER; note = N1-methyl pseudouridine
  modified_base 513: mod_base = OTHER; note = N1-methyl pseudouridine
  modified_base 514: mod_base = OTHER; note = N1-methyl pseudouridine
  modified_base 540: mod_base = OTHER; note = N1-methyl pseudouridine
  modified_base 545: mod_base = OTHER; note = N1-methyl pseudouridine
  modified_base 549: mod_base = OTHER; note = N1-methyl pseudouridine
  modified_base 551: mod_base = OTHER; note = N1-methyl pseudouridine
  modified_base 557: mod_base = OTHER; note = N1-methyl pseudouridine
  modified_base 558: mod_base = OTHER; note = N1-methyl pseudouridine
  modified_base 561: mod_base = OTHER; note = N1-methyl pseudouridine
  modified_base 570: mod_base = OTHER; note = N1-methyl pseudouridine
  modified_base 573: mod_base = OTHER; note = N1-methyl pseudouridine
  modified_base 579: mod_base = OTHER; note = N1-methyl pseudouridine
  modified_base 587: mod_base = OTHER; note = N1-methyl pseudouridine
  modified_base 590: mod_base = OTHER; note = N1-methyl pseudouridine
  modified_base 597: mod_base = OTHER; note = N1-methyl pseudouridine
  modified_base 603: mod_base = OTHER; note = N1-methyl pseudouridine
  modified_base 611: mod_base = OTHER; note = N1-methyl pseudouridine
  modified_base 618: mod_base = OTHER; note = N1-methyl pseudouridine
  modified_base 621: mod_base = OTHER; note = N1-methyl pseudouridine
  modified_base 630: mod_base = OTHER; note = N1-methyl pseudouridine
  modified_base 642: mod_base = OTHER; note = N1-methyl pseudouridine
  modified_base 647: mod_base = OTHER; note = N1-methyl pseudouridine
  modified_base 654: mod_base = OTHER; note = N1-methyl pseudouridine
  modified_base 661: mod_base = OTHER; note = N1-methyl pseudouridine
  modified_base 667: mod_base = OTHER; note = N1-methyl pseudouridine
  modified_base 668: mod_base = OTHER; note = N1-methyl pseudouridine
  modified_base 673: mod_base = OTHER; note = N1-methyl pseudouridine
  modified_base 684: mod_base = OTHER; note = N1-methyl pseudouridine
  modified_base 688: mod_base = OTHER; note = N1-methyl pseudouridine
  modified_base 693: mod_base = OTHER; note = N1-methyl pseudouridine
  modified_base 698: mod_base = OTHER; note = N1-methyl pseudouridine
  modified_base 700: mod_base = OTHER; note = N1-methyl pseudouridine
  modified_base 703: mod_base = OTHER; note = N1-methyl pseudouridine
  modified_base 707: mod_base = OTHER; note = N1-methyl pseudouridine
  modified_base 714: mod_base = OTHER; note = N1-methyl pseudouridine
  modified_base 721: mod_base = OTHER; note = N1-methyl pseudouridine
  modified_base 725: mod_base = OTHER; note = N1-methyl pseudouridine
  modified_base 726: mod_base = OTHER; note = N1-methyl pseudouridine
  modified_base 735: mod_base = OTHER; note = N1-methyl pseudouridine
  modified_base 736: mod_base = OTHER; note = N1-methyl pseudouridine
  modified_base 742: mod_base = OTHER; note = N1-methyl pseudouridine
  modified_base 745: mod_base = OTHER; note = N1-methyl pseudouridine
  modified_base 755: mod_base = OTHER; note = N1-methyl pseudouridine
  modified_base 758: mod_base = OTHER; note = N1-methyl pseudouridine
  modified_base 765: mod_base = OTHER; note = N1-methyl pseudouridine
  modified_base 769: mod_base = OTHER; note = N1-methyl pseudouridine
  modified_base 770: mod_base = OTHER; note = N1-methyl pseudouridine
  modified_base 781: mod_base = OTHER; note = N1-methyl pseudouridine
  modified_base 784: mod_base = OTHER; note = N1-methyl pseudouridine
  modified_base 788: mod_base = OTHER; note = N1-methyl pseudouridine
  modified_base 793: mod_base = OTHER; note = N1-methyl pseudouridine
  modified_base 796: mod_base = OTHER; note = N1-methyl pseudouridine
  modified_base 798: mod_base = OTHER; note = N1-methyl pseudouridine
  modified_base 799: mod_base = OTHER; note = N1-methyl pseudouridine
  modified_base 804: mod_base = OTHER; note = N1-methyl pseudouridine
  modified_base 806: mod_base = OTHER; note = N1-methyl pseudouridine
  modified_base 815: mod_base = OTHER; note = N1-methyl pseudouridine
  modified_base 827: mod_base = OTHER; note = N1-methyl pseudouridine
  modified_base 832: mod_base = OTHER; note = N1-methyl pseudouridine
  modified_base 842: mod_base = OTHER; note = N1-methyl pseudouridine
  modified_base 855: mod_base = OTHER; note = N1-methyl pseudouridine
  modified_base 877: mod_base = OTHER; note = N1-methyl pseudouridine
  modified_base 879: mod_base = OTHER; note = N1-methyl pseudouridine
  modified_base 882: mod_base = OTHER; note = N1-methyl pseudouridine
  modified_base 885: mod_base = OTHER; note = N1-methyl pseudouridine
  modified_base 886: mod_base = OTHER; note = N1-methyl pseudouridine
  modified_base 895: mod_base = OTHER; note = N1-methyl pseudouridine
  modified_base 896: mod_base = OTHER; note = N1-methyl pseudouridine
  modified_base 897: mod_base = OTHER; note = N1-methyl pseudouridine
  modified_base 898: mod_base = OTHER; note = N1-methyl pseudouridine
  modified_base 910: mod_base = OTHER; note = N1-methyl pseudouridine
  modified_base 919: mod_base = OTHER; note = N1-methyl pseudouridine
  modified_base 927: mod_base = OTHER; note = N1-methyl pseudouridine
  modified_base 930: mod_base = OTHER; note = N1-methyl pseudouridine
  modified_base 931: mod_base = OTHER; note = N1-methyl pseudouridine
  modified_base 932: mod_base = OTHER; note = N1-methyl pseudouridine
  modified_base 933: mod_base = OTHER; note = N1-methyl pseudouridine
  modified_base 934: mod_base = OTHER; note = N1-methyl pseudouridine
  modified_base 943: mod_base = OTHER; note = N1-methyl pseudouridine
  modified_base 954: mod_base = OTHER; note = N1-methyl pseudouridine
  modified_base 955: mod_base = OTHER; note = N1-methyl pseudouridine
  modified_base 958: mod_base = OTHER; note = N1-methyl pseudouridine
  modified_base 961: mod_base = OTHER; note = N1-methyl pseudouridine
  modified_base 971: mod_base = OTHER; note = N1-methyl pseudouridine
  modified_base 980: mod_base = OTHER; note = N1-methyl pseudouridine
  modified_base 989: mod_base = OTHER; note = N1-methyl pseudouridine
  modified_base 994: mod_base = OTHER; note = N1-methyl pseudouridine
  modified_base 996: mod_base = OTHER; note = N1-methyl pseudouridine
  modified_base 997: mod_base = OTHER; note = N1-methyl pseudouridine
  modified_base 1006: mod_base = OTHER; note = N1-methyl pseudouridine
  modified_base 1009: mod_base = OTHER; note = N1-methyl pseudouridine
  modified_base 1018: mod_base = OTHER; note = N1-methyl pseudouridine
  modified_base 1023: mod_base = OTHER; note = N1-methyl pseudouridine
  modified_base 1028: mod_base = OTHER; note = N1-methyl pseudouridine
  modified_base 1035: mod_base = OTHER; note = N1-methyl pseudouridine
  modified_base 1045: mod_base = OTHER; note = N1-methyl pseudouridine
  modified_base 1047: mod_base = OTHER; note = N1-methyl pseudouridine
  modified_base 1052: mod_base = OTHER; note = N1-methyl pseudouridine
  modified_base 1054: mod_base = OTHER; note = N1-methyl pseudouridine
  modified_base 1066: mod_base = OTHER; note = N1-methyl pseudouridine
  modified_base 1069: mod_base = OTHER; note = N1-methyl pseudouridine
  modified_base 1079: mod_base = OTHER; note = N1-methyl pseudouridine
  modified_base 1092: mod_base = OTHER; note = N1-methyl pseudouridine
  modified_base 1093: mod_base = OTHER; note = N1-methyl pseudouridine
  modified_base 1099: mod_base = OTHER; note = N1-methyl pseudouridine
  modified_base 1102: mod_base = OTHER; note = N1-methyl pseudouridine
  modified_base 1104: mod_base = OTHER; note = N1-methyl pseudouridine
  modified_base 1108: mod_base = OTHER; note = N1-methyl pseudouridine
  modified_base 1109: mod_base = OTHER; note = N1-methyl pseudouridine
  modified_base 1114: mod_base = OTHER; note = N1-methyl pseudouridine
  modified_base 1123: mod_base = OTHER; note = N1-methyl pseudouridine
  modified_base 1126: mod_base = OTHER; note = N1-methyl pseudouridine
  modified_base 1131: mod_base = OTHER; note = N1-methyl pseudouridine
  modified_base 1132: mod_base = OTHER; note = N1-methyl pseudouridine
  modified_base 1143: mod_base = OTHER; note = N1-methyl pseudouridine
  modified_base 1144: mod_base = OTHER; note = N1-methyl pseudouridine
  modified_base 1147: mod_base = OTHER; note = N1-methyl pseudouridine
  modified_base 1150: mod_base = OTHER; note = N1-methyl pseudouridine
  modified_base 1162: mod_base = OTHER; note = N1-methyl pseudouridine
  modified_base 1175: mod_base = OTHER; note = N1-methyl pseudouridine
  modified_base 1176: mod_base = OTHER; note = N1-methyl pseudouridine
  modified_base 1183: mod_base = OTHER; note = N1-methyl pseudouridine
  modified_base 1187: mod_base = OTHER; note = N1-methyl pseudouridine
  modified_base 1192: mod_base = OTHER; note = N1-methyl pseudouridine
  modified_base 1194: mod_base = OTHER; note = N1-methyl pseudouridine
  modified_base 1195: mod_base = OTHER; note = N1-methyl pseudouridine
  modified_base 1198: mod_base = OTHER; note = N1-methyl pseudouridine
  modified_base 1204: mod_base = OTHER; note = N1-methyl pseudouridine
  modified_base 1207: mod_base = OTHER; note = N1-methyl pseudouridine
  modified_base 1214: mod_base = OTHER; note = N1-methyl pseudouridine
  modified_base 1215: mod_base = OTHER; note = N1-methyl pseudouridine
  modified_base 1225: mod_base = OTHER; note = N1-methyl pseudouridine
  modified_base 1227: mod_base = OTHER; note = N1-methyl pseudouridine
  modified_base 1228: mod_base = OTHER; note = N1-methyl pseudouridine
  modified_base 1229: mod_base = OTHER; note = N1-methyl pseudouridine
  modified_base 1243: mod_base = OTHER; note = N1-methyl pseudouridine
  modified_base 1250: mod_base = OTHER; note = N1-methyl pseudouridine
  modified_base 1251: mod_base = OTHER; note = N1-methyl pseudouridine
  modified_base 1258: mod_base = OTHER; note = N1-methyl pseudouridine
  modified_base 1273: mod_base = OTHER; note = N1-methyl pseudouridine
  modified_base 1274: mod_base = OTHER; note = N1-methyl pseudouridine
  modified_base 1276: mod_base = OTHER; note = N1-methyl pseudouridine
  modified_base 1288: mod_base = OTHER; note = N1-methyl pseudouridine
  modified_base 1290: mod_base = OTHER; note = N1-methyl pseudouridine
  modified_base 1296: mod_base = OTHER; note = N1-methyl pseudouridine
  modified_base 1305: mod_base = OTHER; note = N1-methyl pseudouridine
  modified_base 1306: mod_base = OTHER; note = N1-methyl pseudouridine
  modified_base 1315: mod_base = OTHER; note = N1-methyl pseudouridine
  modified_base 1318: mod_base = OTHER; note = N1-methyl pseudouridine
  modified_base 1319: mod_base = OTHER; note = N1-methyl pseudouridine
  modified_base 1327: mod_base = OTHER; note = N1-methyl pseudouridine
  modified_base 1331: mod_base = OTHER; note = N1-methyl pseudouridine
  modified_base 1346: mod_base = OTHER; note = N1-methyl pseudouridine
  modified_base 1351: mod_base = OTHER; note = N1-methyl pseudouridine
  modified_base 1353: mod_base = OTHER; note = N1-methyl pseudouridine
  modified_base 1354: mod_base = OTHER; note = N1-methyl pseudouridine
  modified_base 1363: mod_base = OTHER; note = N1-methyl pseudouridine
  modified_base 1366: mod_base = OTHER; note = N1-methyl pseudouridine
  modified_base 1372: mod_base = OTHER; note = N1-methyl pseudouridine
  modified_base 1374: mod_base = OTHER; note = N1-methyl pseudouridine
  modified_base 1378: mod_base = OTHER; note = N1-methyl pseudouridine
  modified_base 1382: mod_base = OTHER; note = N1-methyl pseudouridine
  modified_base 1384: mod_base = OTHER; note = N1-methyl pseudouridine
  modified_base 1395: mod_base = OTHER; note = N1-methyl pseudouridine
  modified_base 1396: mod_base = OTHER; note = N1-methyl pseudouridine
  modified_base 1397: mod_base = OTHER; note = N1-methyl pseudouridine
  modified_base 1407: mod_base = OTHER; note = N1-methyl pseudouridine
  modified_base 1408: mod_base = OTHER; note = N1-methyl pseudouridine
  modified_base 1414: mod_base = OTHER; note = N1-methyl pseudouridine
  modified_base 1418: mod_base = OTHER; note = N1-methyl pseudouridine
  modified_base 1432: mod_base = OTHER; note = N1-methyl pseudouridine
  modified_base 1438: mod_base = OTHER; note = N1-methyl pseudouridine
  modified_base 1440: mod_base = OTHER; note = N1-methyl pseudouridine
  modified_base 1452: mod_base = OTHER; note = N1-methyl pseudouridine
  modified_base 1457: mod_base = OTHER; note = N1-methyl pseudouridine
  modified_base 1460: mod_base = OTHER; note = N1-methyl pseudouridine
  modified_base 1465: mod_base = OTHER; note = N1-methyl pseudouridine
  modified_base 1469: mod_base = OTHER; note = N1-methyl pseudouridine
  modified_base 1472: mod_base = OTHER; note = N1-methyl pseudouridine
  modified_base 1474: mod_base = OTHER; note = N1-methyl pseudouridine
  modified_base 1477: mod_base = OTHER; note = N1-methyl pseudouridine
  modified_base 1486: mod_base = OTHER; note = N1-methyl pseudouridine
  modified_base 1497: mod_base = OTHER; note = N1-methyl pseudouridine
  modified_base 1499: mod_base = OTHER; note = N1-methyl pseudouridine
  modified_base 1507: mod_base = OTHER; note = N1-methyl pseudouridine
  modified_base 1509: mod_base = OTHER; note = N1-methyl pseudouridine
  modified_base 1510: mod_base = OTHER; note = N1-methyl pseudouridine
  modified_base 1511: mod_base = OTHER; note = N1-methyl pseudouridine
  modified_base 1513: mod_base = OTHER; note = N1-methyl pseudouridine
  modified_base 1526: mod_base = OTHER; note = N1-methyl pseudouridine
  modified_base 1528: mod_base = OTHER; note = N1-methyl pseudouridine
  modified_base 1530: mod_base = OTHER; note = N1-methyl pseudouridine
  modified_base 1540: mod_base = OTHER; note = N1-methyl pseudouridine
  modified_base 1543: mod_base = OTHER; note = N1-methyl pseudouridine
  modified_base 1546: mod_base = OTHER; note = N1-methyl pseudouridine
  modified_base 1553: mod_base = OTHER; note = N1-methyl pseudouridine
  modified_base 1555: mod_base = OTHER; note = N1-methyl pseudouridine
  modified_base 1558: mod_base = OTHER; note = N1-methyl pseudouridine
  modified_base 1564: mod_base = OTHER; note = N1-methyl pseudouridine
  modified_base 1571: mod_base = OTHER; note = N1-methyl pseudouridine
  modified_base 1576: mod_base = OTHER; note = N1-methyl pseudouridine
  modified_base 1591: mod_base = OTHER; note = N1-methyl pseudouridine
  modified_base 1598: mod_base = OTHER; note = N1-methyl pseudouridine
  modified_base 1603: mod_base = OTHER; note = N1-methyl pseudouridine
  modified_base 1606: mod_base = OTHER; note = N1-methyl pseudouridine
  modified_base 1607: mod_base = OTHER; note = N1-methyl pseudouridine
  modified_base 1614: mod_base = OTHER; note = N1-methyl pseudouridine
  modified_base 1628: mod_base = OTHER; note = N1-methyl pseudouridine
  modified_base 1636: mod_base = OTHER; note = N1-methyl pseudouridine
  modified_base 1642: mod_base = OTHER; note = N1-methyl pseudouridine
  modified_base 1645: mod_base = OTHER; note = N1-methyl pseudouridine
  modified_base 1652: mod_base = OTHER; note = N1-methyl pseudouridine
  modified_base 1654: mod_base = OTHER; note = N1-methyl pseudouridine
  modified_base 1655: mod_base = OTHER; note = N1-methyl pseudouridine
  modified_base 1657: mod_base = OTHER; note = N1-methyl pseudouridine
  modified_base 1669: mod_base = OTHER; note = N1-methyl pseudouridine
  modified_base 1680: mod_base = OTHER; note = N1-methyl pseudouridine
  modified_base 1690: mod_base = OTHER; note = N1-methyl pseudouridine
  modified_base 1692: mod_base = OTHER; note = N1-methyl pseudouridine
  modified_base 1693: mod_base = OTHER; note = N1-methyl pseudouridine
  modified_base 1695: mod_base = OTHER; note = N1-methyl pseudouridine
  modified_base 1696: mod_base = OTHER; note = N1-methyl pseudouridine
  modified_base 1704: mod_base = OTHER; note = N1-methyl pseudouridine
  modified_base 1712: mod_base = OTHER; note = N1-methyl pseudouridine
  modified_base 1715: mod_base = OTHER; note = N1-methyl pseudouridine
  modified_base 1716: mod_base = OTHER; note = N1-methyl pseudouridine
  modified_base 1725: mod_base = OTHER; note = N1-methyl pseudouridine
  modified_base 1729: mod_base = OTHER; note = N1-methyl pseudouridine
  modified_base 1730: mod_base = OTHER; note = N1-methyl pseudouridine
  modified_base 1743: mod_base = OTHER; note = N1-methyl pseudouridine
  modified_base 1755: mod_base = OTHER; note = N1-methyl pseudouridine
  modified_base 1756: mod_base = OTHER; note = N1-methyl pseudouridine
  modified_base 1758: mod_base = OTHER; note = N1-methyl pseudouridine
  modified_base 1764: mod_base = OTHER; note = N1-methyl pseudouridine
  modified_base 1765: mod_base = OTHER; note = N1-methyl pseudouridine
  modified_base 1768: mod_base = OTHER; note = N1-methyl pseudouridine
  modified_base 1769: mod_base = OTHER; note = N1-methyl pseudouridine
  modified_base 1777: mod_base = OTHER; note = N1-methyl pseudouridine
  modified_base 1780: mod_base = OTHER; note = N1-methyl pseudouridine
  modified_base 1789: mod_base = OTHER; note = N1-methyl pseudouridine
  modified_base 1807: mod_base = OTHER; note = N1-methyl pseudouridine
  modified_base 1810: mod_base = OTHER; note = N1-methyl pseudouridine
  modified_base 1813: mod_base = OTHER; note = N1-methyl pseudouridine
  modified_base 1819: mod_base = OTHER; note = N1-methyl pseudouridine
  modified_base 1832: mod_base = OTHER; note = N1-methyl pseudouridine
  modified_base 1834: mod_base = OTHER; note = N1-methyl pseudouridine
  modified_base 1837: mod_base = OTHER; note = N1-methyl pseudouridine
  modified_base 1853: mod_base = OTHER; note = N1-methyl pseudouridine
  modified_base 1854: mod_base = OTHER; note = N1-methyl pseudouridine
  modified_base 1855: mod_base = OTHER; note = N1-methyl pseudouridine
  modified_base 1866: mod_base = OTHER; note = N1-methyl pseudouridine
  modified_base 1870: mod_base = OTHER; note = N1-methyl pseudouridine
  modified_base 1877: mod_base = OTHER; note = N1-methyl pseudouridine
  modified_base 1882: mod_base = OTHER; note = N1-methyl pseudouridine
  modified_base 1883: mod_base = OTHER; note = N1-methyl pseudouridine
  modified_base 1888: mod_base = OTHER; note = N1-methyl pseudouridine
  modified_base 1897: mod_base = OTHER; note = N1-methyl pseudouridine
  modified_base 1906: mod_base = OTHER; note = N1-methyl pseudouridine
  modified_base 1909: mod_base = OTHER; note = N1-methyl pseudouridine
  modified_base 1925: mod_base = OTHER; note = N1-methyl pseudouridine
  modified_base 1926: mod_base = OTHER; note = N1-methyl pseudouridine
  modified_base 1927: mod_base = OTHER; note = N1-methyl pseudouridine
  modified_base 1929: mod_base = OTHER; note = N1-methyl pseudouridine
  modified_base 1935: mod_base = OTHER; note = N1-methyl pseudouridine
  modified_base 1936: mod_base = OTHER; note = N1-methyl pseudouridine
  modified_base 1939: mod_base = OTHER; note = N1-methyl pseudouridine
  modified_base 1960: mod_base = OTHER; note = N1-methyl pseudouridine
  modified_base 1969: mod_base = OTHER; note = N1-methyl pseudouridine
  modified_base 1972: mod_base = OTHER; note = N1-methyl pseudouridine
  modified_base 1977: mod_base = OTHER; note = N1-methyl pseudouridine
  modified_base 1978: mod_base = OTHER; note = N1-methyl pseudouridine
  modified_base 1984: mod_base = OTHER; note = N1-methyl pseudouridine
  modified_base 1985: mod_base = OTHER; note = N1-methyl pseudouridine
  modified_base 1989: mod_base = OTHER; note = N1-methyl pseudouridine
  modified_base 1992: mod_base = OTHER; note = N1-methyl pseudouridine
  modified_base 1996: mod_base = OTHER; note = N1-methyl pseudouridine
  modified_base 2005: mod_base = OTHER; note = N1-methyl pseudouridine
  modified_base 2019: mod_base = OTHER; note = N1-methyl pseudouridine
  modified_base 2025: mod_base = OTHER; note = N1-methyl pseudouridine
  modified_base 2026: mod_base = OTHER; note = N1-methyl pseudouridine
  modified_base 2031: mod_base = OTHER; note = N1-methyl pseudouridine
  modified_base 2035: mod_base = OTHER; note = N1-methyl pseudouridine
  modified_base 2046: mod_base = OTHER; note = N1-methyl pseudouridine
  modified_base 2059: mod_base = OTHER; note = N1-methyl pseudouridine
  modified_base 2060: mod_base = OTHER; note = N1-methyl pseudouridine
  modified_base 2063: mod_base = OTHER; note = N1-methyl pseudouridine
  modified_base 2067: mod_base = OTHER; note = N1-methyl pseudouridine
  modified_base 2073: mod_base = OTHER; note = N1-methyl pseudouridine
  modified_base 2074: mod_base = OTHER; note = N1-methyl pseudouridine
  modified_base 2083: mod_base = OTHER; note = N1-methyl pseudouridine
  modified_base 2086: mod_base = OTHER; note = N1-methyl pseudouridine
  modified_base 2100: mod_base = OTHER; note = N1-methyl pseudouridine
  modified_base 2109: mod_base = OTHER; note = N1-methyl pseudouridine
  modified_base 2112: mod_base = OTHER; note = N1-methyl pseudouridine
  modified_base 2113: mod_base = OTHER; note = N1-methyl pseudouridine
  modified_base 2116: mod_base = OTHER; note = N1-methyl pseudouridine
  modified_base 2125: mod_base = OTHER; note = N1-methyl pseudouridine
  modified_base 2133: mod_base = OTHER; note = N1-methyl pseudouridine
  modified_base 2134: mod_base = OTHER; note = N1-methyl pseudouridine
  modified_base 2145: mod_base = OTHER; note = N1-methyl pseudouridine
  modified_base 2146: mod_base = OTHER; note = N1-methyl pseudouridine
  modified_base 2150: mod_base = OTHER; note = N1-methyl pseudouridine
  modified_base 2161: mod_base = OTHER; note = N1-methyl pseudouridine
  modified_base 2164: mod_base = OTHER; note = N1-methyl pseudouridine
  modified_base 2165: mod_base = OTHER; note = N1-methyl pseudouridine
  modified_base 2168: mod_base = OTHER; note = N1-methyl pseudouridine
  modified_base 2174: mod_base = OTHER; note = N1-methyl pseudouridine
  modified_base 2175: mod_base = OTHER; note = N1-methyl pseudouridine
  modified_base 2179: mod_base = OTHER; note = N1-methyl pseudouridine
  modified_base 2182: mod_base = OTHER; note = N1-methyl pseudouridine
  modified_base 2183: mod_base = OTHER; note = N1-methyl pseudouridine
  modified_base 2184: mod_base = OTHER; note = N1-methyl pseudouridine
  modified_base 2190: mod_base = OTHER; note = N1-methyl pseudouridine
  modified_base 2193: mod_base = OTHER; note = N1-methyl pseudouridine
  modified_base 2194: mod_base = OTHER; note = N1-methyl pseudouridine
  modified_base 2198: mod_base = OTHER; note = N1-methyl pseudouridine
  modified_base 2200: mod_base = OTHER; note = N1-methyl pseudouridine
  modified_base 2202: mod_base = OTHER; note = N1-methyl pseudouridine
  modified_base 2212: mod_base = OTHER; note = N1-methyl pseudouridine
  modified_base 2213: mod_base = OTHER; note = N1-methyl pseudouridine
  modified_base 2221: mod_base = OTHER; note = N1-methyl pseudouridine
  modified_base 2226: mod_base = OTHER; note = N1-methyl pseudouridine
  modified_base 2228: mod_base = OTHER; note = N1-methyl pseudouridine
  modified_base 2230: mod_base = OTHER; note = N1-methyl pseudouridine
  modified_base 2242: mod_base = OTHER; note = N1-methyl pseudouridine
  modified_base 2256: mod_base = OTHER; note = N1-methyl pseudouridine
  modified_base 2257: mod_base = OTHER; note = N1-methyl pseudouridine
  modified_base 2258: mod_base = OTHER; note = N1-methyl pseudouridine
  modified_base 2260: mod_base = OTHER; note = N1-methyl pseudouridine
  modified_base 2261: mod_base = OTHER; note = N1-methyl pseudouridine
  modified_base 2262: mod_base = OTHER; note = N1-methyl pseudouridine
  modified_base 2284: mod_base = OTHER; note = N1-methyl pseudouridine
  modified_base 2287: mod_base = OTHER; note = N1-methyl pseudouridine
  modified_base 2293: mod_base = OTHER; note = N1-methyl pseudouridine
  modified_base 2295: mod_base = OTHER; note = N1-methyl pseudouridine
  modified_base 2296: mod_base = OTHER; note = N1-methyl pseudouridine
  modified_base 2298: mod_base = OTHER; note = N1-methyl pseudouridine
  modified_base 2299: mod_base = OTHER; note = N1-methyl pseudouridine
  modified_base 2317: mod_base = OTHER; note = N1-methyl pseudouridine
  modified_base 2323: mod_base = OTHER; note = N1-methyl pseudouridine
  modified_base 2332: mod_base = OTHER; note = N1-methyl pseudouridine
  modified_base 2343: mod_base = OTHER; note = N1-methyl pseudouridine
  modified_base 2346: mod_base = OTHER; note = N1-methyl pseudouridine
  modified_base 2347: mod_base = OTHER; note = N1-methyl pseudouridine
  modified_base 2348: mod_base = OTHER; note = N1-methyl pseudouridine
  modified_base 2356: mod_base = OTHER; note = N1-methyl pseudouridine
  modified_base 2361: mod_base = OTHER; note = N1-methyl pseudouridine
  modified_base 2364: mod_base = OTHER; note = N1-methyl pseudouridine
  modified_base 2365: mod_base = OTHER; note = N1-methyl pseudouridine
  modified_base 2366: mod_base = OTHER; note = N1-methyl pseudouridine
  modified_base 2369: mod_base = OTHER; note = N1-methyl pseudouridine
  modified_base 2370: mod_base = OTHER; note = N1-methyl pseudouridine
  modified_base 2374: mod_base = OTHER; note = N1-methyl pseudouridine
  modified_base 2380: mod_base = OTHER; note = N1-methyl pseudouridine
  modified_base 2382: mod_base = OTHER; note = N1-methyl pseudouridine
  modified_base 2389: mod_base = OTHER; note = N1-methyl pseudouridine
  modified_base 2396: mod_base = OTHER; note = N1-methyl pseudouridine
  modified_base 2400: mod_base = OTHER; note = N1-methyl pseudouridine
  modified_base 2401: mod_base = OTHER; note = N1-methyl pseudouridine
  modified_base 2413: mod_base = OTHER; note = N1-methyl pseudouridine
  modified_base 2421: mod_base = OTHER; note = N1-methyl pseudouridine
  modified_base 2429: mod_base = OTHER; note = N1-methyl pseudouridine
  modified_base 2431: mod_base = OTHER; note = N1-methyl pseudouridine
  modified_base 2434: mod_base = OTHER; note = N1-methyl pseudouridine
  modified_base 2440: mod_base = OTHER; note = N1-methyl pseudouridine
  modified_base 2443: mod_base = OTHER; note = N1-methyl pseudouridine
  modified_base 2444: mod_base = OTHER; note = N1-methyl pseudouridine
  modified_base 2450: mod_base = OTHER; note = N1-methyl pseudouridine
  modified_base 2456: mod_base = OTHER; note = N1-methyl pseudouridine
  modified_base 2457: mod_base = OTHER; note = N1-methyl pseudouridine
  modified_base 2458: mod_base = OTHER; note = N1-methyl pseudouridine
  modified_base 2461: mod_base = OTHER; note = N1-methyl pseudouridine
  modified_base 2483: mod_base = OTHER; note = N1-methyl pseudouridine
  modified_base 2485: mod_base = OTHER; note = N1-methyl pseudouridine
  modified_base 2488: mod_base = OTHER; note = N1-methyl pseudouridine
  modified_base 2497: mod_base = OTHER; note = N1-methyl pseudouridine
  modified_base 2498: mod_base = OTHER; note = N1-methyl pseudouridine
  modified_base 2500: mod_base = OTHER; note = N1-methyl pseudouridine
  modified_base 2503: mod_base = OTHER; note = N1-methyl pseudouridine
  modified_base 2509: mod_base = OTHER; note = N1-methyl pseudouridine
  modified_base 2515: mod_base = OTHER; note = N1-methyl pseudouridine
  modified_base 2517: mod_base = OTHER; note = N1-methyl pseudouridine
  modified_base 2518: mod_base = OTHER; note = N1-methyl pseudouridine
  modified_base 2525: mod_base = OTHER; note = N1-methyl pseudouridine
  modified_base 2533: mod_base = OTHER; note = N1-methyl pseudouridine
  modified_base 2536: mod_base = OTHER; note = N1-methyl pseudouridine
  modified_base 2548: mod_base = OTHER; note = N1-methyl pseudouridine
  modified_base 2556: mod_base = OTHER; note = N1-methyl pseudouridine
  modified_base 2566: mod_base = OTHER; note = N1-methyl pseudouridine
  modified_base 2568: mod_base = OTHER; note = N1-methyl pseudouridine
  modified_base 2569: mod_base = OTHER; note = N1-methyl pseudouridine
  modified_base 2581: mod_base = OTHER; note = N1-methyl pseudouridine
  modified_base 2584: mod_base = OTHER; note = N1-methyl pseudouridine
  modified_base 2593: mod_base = OTHER; note = N1-methyl pseudouridine
  modified_base 2607: mod_base = OTHER; note = N1-methyl pseudouridine
  modified_base 2616: mod_base = OTHER; note = N1-methyl pseudouridine
  modified_base 2626: mod_base = OTHER; note = N1-methyl pseudouridine
  modified_base 2628: mod_base = OTHER; note = N1-methyl pseudouridine
  modified_base 2638: mod_base = OTHER; note = N1-methyl pseudouridine
  modified_base 2641: mod_base = OTHER; note = N1-methyl pseudouridine
  modified_base 2650: mod_base = OTHER; note = N1-methyl pseudouridine
  modified_base 2651: mod_base = OTHER; note = N1-methyl pseudouridine
  modified_base 2664: mod_base = OTHER; note = N1-methyl pseudouridine
  modified_base 2677: mod_base = OTHER; note = N1-methyl pseudouridine
  modified_base 2678: mod_base = OTHER; note = N1-methyl pseudouridine
  modified_base 2680: mod_base = OTHER; note = N1-methyl pseudouridine
  modified_base 2685: mod_base = OTHER; note = N1-methyl pseudouridine
  modified_base 2686: mod_base = OTHER; note = N1-methyl pseudouridine
  modified_base 2689: mod_base = OTHER; note = N1-methyl pseudouridine
  modified_base 2694: mod_base = OTHER; note = N1-methyl pseudouridine
  modified_base 2703: mod_base = OTHER; note = N1-methyl pseudouridine
  modified_base 2704: mod_base = OTHER; note = N1-methyl pseudouridine
  modified_base 2718: mod_base = OTHER; note = N1-methyl pseudouridine
  modified_base 2719: mod_base = OTHER; note = N1-methyl pseudouridine
  modified_base 2722: mod_base = OTHER; note = N1-methyl pseudouridine
  modified_base 2728: mod_base = OTHER; note = N1-methyl pseudouridine
  modified_base 2731: mod_base = OTHER; note = N1-methyl pseudouridine
  modified_base 2742: mod_base = OTHER; note = N1-methyl pseudouridine
  modified_base 2746: mod_base = OTHER; note = N1-methyl pseudouridine
  modified_base 2751: mod_base = OTHER; note = N1-methyl pseudouridine
  modified_base 2752: mod_base = OTHER; note = N1-methyl pseudouridine
  modified_base 2764: mod_base = OTHER; note = N1-methyl pseudouridine
  modified_base 2765: mod_base = OTHER; note = N1-methyl pseudouridine
  modified_base 2779: mod_base = OTHER; note = N1-methyl pseudouridine
  modified_base 2781: mod_base = OTHER; note = N1-methyl pseudouridine
  modified_base 2795: mod_base = OTHER; note = N1-methyl pseudouridine
  modified_base 2796: mod_base = OTHER; note = N1-methyl pseudouridine
  modified_base 2800: mod_base = OTHER; note = N1-methyl pseudouridine
  modified_base 2812: mod_base = OTHER; note = N1-methyl pseudouridine
  modified_base 2819: mod_base = OTHER; note = N1-methyl pseudouridine
  modified_base 2821: mod_base = OTHER; note = N1-methyl pseudouridine
  modified_base 2825: mod_base = OTHER; note = N1-methyl pseudouridine
  modified_base 2831: mod_base = OTHER; note = N1-methyl pseudouridine
  modified_base 2839: mod_base = OTHER; note = N1-methyl pseudouridine
  modified_base 2851: mod_base = OTHER; note = N1-methyl pseudouridine
  modified_base 2854: mod_base = OTHER; note = N1-methyl pseudouridine
  modified_base 2863: mod_base = OTHER; note = N1-methyl pseudouridine
  modified_base 2869: mod_base = OTHER; note = N1-methyl pseudouridine
  modified_base 2872: mod_base = OTHER; note = N1-methyl pseudouridine
  modified_base 2881: mod_base = OTHER; note = N1-methyl pseudouridine
  modified_base 2884: mod_base = OTHER; note = N1-methyl pseudouridine
  modified_base 2890: mod_base = OTHER; note = N1-methyl pseudouridine
  modified_base 2893: mod_base = OTHER; note = N1-methyl pseudouridine
  modified_base 2909: mod_base = OTHER; note = N1-methyl pseudouridine
  modified_base 2917: mod_base = OTHER; note = N1-methyl pseudouridine
  modified_base 2920: mod_base = OTHER; note = N1-methyl pseudouridine
  modified_base 2923: mod_base = OTHER; note = N1-methyl pseudouridine
  modified_base 2929: mod_base = OTHER; note = N1-methyl pseudouridine
  modified_base 2983: mod_base = OTHER; note = N1-methyl pseudouridine
  modified_base 2992: mod_base = OTHER; note = N1-methyl pseudouridine
  modified_base 3004: mod_base = OTHER; note = N1-methyl pseudouridine
  modified_base 3013: mod_base = OTHER; note = N1-methyl pseudouridine
  modified_base 3014: mod_base = OTHER; note = N1-methyl pseudouridine
  modified_base 3025: mod_base = OTHER; note = N1-methyl pseudouridine
  modified_base 3028: mod_base = OTHER; note = N1-methyl pseudouridine
  modified_base 3043: mod_base = OTHER; note = N1-methyl pseudouridine
  modified_base 3053: mod_base = OTHER; note = N1-methyl pseudouridine
  modified_base 3058: mod_base = OTHER; note = N1-methyl pseudouridine
  modified_base 3059: mod_base = OTHER; note = N1-methyl pseudouridine
  modified_base 3073: mod_base = OTHER; note = N1-methyl pseudouridine
  modified_base 3075: mod_base = OTHER; note = N1-methyl pseudouridine
  modified_base 3079: mod_base = OTHER; note = N1-methyl pseudouridine
  modified_base 3081: mod_base = OTHER; note = N1-methyl pseudouridine
  modified_base 3084: mod_base = OTHER; note = N1-methyl pseudouridine
  modified_base 3086: mod_base = OTHER; note = N1-methyl pseudouridine
  modified_base 3088: mod_base = OTHER; note = N1-methyl pseudouridine
  modified_base 3104: mod_base = OTHER; note = N1-methyl pseudouridine
  modified_base 3106: mod_base = OTHER; note = N1-methyl pseudouridine
  modified_base 3108: mod_base = OTHER; note = N1-methyl pseudouridine
  modified_base 3112: mod_base = OTHER; note = N1-methyl pseudouridine
  modified_base 3123: mod_base = OTHER; note = N1-methyl pseudouridine
  modified_base 3124: mod_base = OTHER; note = N1-methyl pseudouridine
  modified_base 3130: mod_base = OTHER; note = N1-methyl pseudouridine
  modified_base 3134: mod_base = OTHER; note = N1-methyl pseudouridine
  modified_base 3139: mod_base = OTHER; note = N1-methyl pseudouridine
  modified_base 3141: mod_base = OTHER; note = N1-methyl pseudouridine
  modified_base 3147: mod_base = OTHER; note = N1-methyl pseudouridine
  modified_base 3152: mod_base = OTHER; note = N1-methyl pseudouridine
  modified_base 3154: mod_base = OTHER; note = N1-methyl pseudouridine
  modified_base 3158: mod_base = OTHER; note = N1-methyl pseudouridine
  modified_base 3163: mod_base = OTHER; note = N1-methyl pseudouridine
  modified_base 3164: mod_base = OTHER; note = N1-methyl pseudouridine
  modified_base 3166: mod_base = OTHER; note = N1-methyl pseudouridine
  modified_base 3177: mod_base = OTHER; note = N1-methyl pseudouridine
  modified_base 3178: mod_base = OTHER; note = N1-methyl pseudouridine
  modified_base 3179: mod_base = OTHER; note = N1-methyl pseudouridine
  modified_base 3181: mod_base = OTHER; note = N1-methyl pseudouridine
  modified_base 3191: mod_base = OTHER; note = N1-methyl pseudouridine
  modified_base 3192: mod_base = OTHER; note = N1-methyl pseudouridine
  modified_base 3196: mod_base = OTHER; note = N1-methyl pseudouridine
  modified_base 3197: mod_base = OTHER; note = N1-methyl pseudouridine
  modified_base 3200: mod_base = OTHER; note = N1-methyl pseudouridine
  modified_base 3208: mod_base = OTHER; note = N1-methyl pseudouridine
  modified_base 3211: mod_base = OTHER; note = N1-methyl pseudouridine
  modified_base 3219: mod_base = OTHER; note = N1-methyl pseudouridine
  modified_base 3245: mod_base = OTHER; note = N1-methyl pseudouridine
  modified_base 3250: mod_base = OTHER; note = N1-methyl pseudouridine
  modified_base 3265: mod_base = OTHER; note = N1-methyl pseudouridine
  modified_base 3268: mod_base = OTHER; note = N1-methyl pseudouridine
  modified_base 3277: mod_base = OTHER; note = N1-methyl pseudouridine
  modified_base 3284: mod_base = OTHER; note = N1-methyl pseudouridine
  modified_base 3285: mod_base = OTHER; note = N1-methyl pseudouridine
  modified_base 3288: mod_base = OTHER; note = N1-methyl pseudouridine
  modified_base 3298: mod_base = OTHER; note = N1-methyl pseudouridine
  modified_base 3300: mod_base = OTHER; note = N1-methyl pseudouridine
  modified_base 3301: mod_base = OTHER; note = N1-methyl pseudouridine
  modified_base 3313: mod_base = OTHER; note = N1-methyl pseudouridine
  modified_base 3316: mod_base = OTHER; note = N1-methyl pseudouridine
  modified_base 3330: mod_base = OTHER; note = N1-methyl pseudouridine
  modified_base 3331: mod_base = OTHER; note = N1-methyl pseudouridine
  modified_base 3340: mod_base = OTHER; note = N1-methyl pseudouridine
  modified_base 3362: mod_base = OTHER; note = N1-methyl pseudouridine
  modified_base 3364: mod_base = OTHER; note = N1-methyl pseudouridine
  modified_base 3365: mod_base = OTHER; note = N1-methyl pseudouridine
  modified_base 3366: mod_base = OTHER; note = N1-methyl pseudouridine
  modified_base 3373: mod_base = OTHER; note = N1-methyl pseudouridine
  modified_base 3387: mod_base = OTHER; note = N1-methyl pseudouridine
  modified_base 3388: mod_base = OTHER; note = N1-methyl pseudouridine
  modified_base 3389: mod_base = OTHER; note = N1-methyl pseudouridine
  modified_base 3391: mod_base = OTHER; note = N1-methyl pseudouridine
  modified_base 3403: mod_base = OTHER; note = N1-methyl pseudouridine
  modified_base 3406: mod_base = OTHER; note = N1-methyl pseudouridine
  modified_base 3421: mod_base = OTHER; note = N1-methyl pseudouridine
  modified_base 3425: mod_base = OTHER; note = N1-methyl pseudouridine
  modified_base 3433: mod_base = OTHER; note = N1-methyl pseudouridine
  modified_base 3442: mod_base = OTHER; note = N1-methyl pseudouridine
  modified_base 3445: mod_base = OTHER; note = N1-methyl pseudouridine
  modified_base 3450: mod_base = OTHER; note = N1-methyl pseudouridine
  modified_base 3452: mod_base = OTHER; note = N1-methyl pseudouridine
  modified_base 3457: mod_base = OTHER; note = N1-methyl pseudouridine
  modified_base 3461: mod_base = OTHER; note = N1-methyl pseudouridine
  modified_base 3468: mod_base = OTHER; note = N1-methyl pseudouridine
  modified_base 3487: mod_base = OTHER; note = N1-methyl pseudouridine
  modified_base 3490: mod_base = OTHER; note = N1-methyl pseudouridine
  modified_base 3491: mod_base = OTHER; note = N1-methyl pseudouridine
  modified_base 3499: mod_base = OTHER; note = N1-methyl pseudouridine
  modified_base 3505: mod_base = OTHER; note = N1-methyl pseudouridine
  modified_base 3508: mod_base = OTHER; note = N1-methyl pseudouridine
  modified_base 3509: mod_base = OTHER; note = N1-methyl pseudouridine
  modified_base 3514: mod_base = OTHER; note = N1-methyl pseudouridine
  modified_base 3519: mod_base = OTHER; note = N1-methyl pseudouridine
  modified_base 3526: mod_base = OTHER; note = N1-methyl pseudouridine
  modified_base 3529: mod_base = OTHER; note = N1-methyl pseudouridine
  modified_base 3531: mod_base = OTHER; note = N1-methyl pseudouridine
  modified_base 3537: mod_base = OTHER; note = N1-methyl pseudouridine
  modified_base 3538: mod_base = OTHER; note = N1-methyl pseudouridine
  modified_base 3549: mod_base = OTHER; note = N1-methyl pseudouridine
  modified_base 3550: mod_base = OTHER; note = N1-methyl pseudouridine
  modified_base 3555: mod_base = OTHER; note = N1-methyl pseudouridine
  modified_base 3556: mod_base = OTHER; note = N1-methyl pseudouridine
  modified_base 3558: mod_base = OTHER; note = N1-methyl pseudouridine
  modified_base 3560: mod_base = OTHER; note = N1-methyl pseudouridine
  modified_base 3565: mod_base = OTHER; note = N1-methyl pseudouridine
  modified_base 3566: mod_base = OTHER; note = N1-methyl pseudouridine
  modified_base 3574: mod_base = OTHER; note = N1-methyl pseudouridine
  modified_base 3582: mod_base = OTHER; note = N1-methyl pseudouridine
  modified_base 3596: mod_base = OTHER; note = N1-methyl pseudouridine
  modified_base 3603: mod_base = OTHER; note = N1-methyl pseudouridine
  modified_base 3607: mod_base = OTHER; note = N1-methyl pseudouridine
  modified_base 3616: mod_base = OTHER; note = N1-methyl pseudouridine
  modified_base 3619: mod_base = OTHER; note = N1-methyl pseudouridine
  modified_base 3623: mod_base = OTHER; note = N1-methyl pseudouridine
  modified_base 3631: mod_base = OTHER; note = N1-methyl pseudouridine
  modified_base 3634: mod_base = OTHER; note = N1-methyl pseudouridine
  modified_base 3635: mod_base = OTHER; note = N1-methyl pseudouridine
  modified_base 3642: mod_base = OTHER; note = N1-methyl pseudouridine
  modified_base 3647: mod_base = OTHER; note = N1-methyl pseudouridine
  modified_base 3652: mod_base = OTHER; note = N1-methyl pseudouridine
  modified_base 3657: mod_base = OTHER; note = N1-methyl pseudouridine
  modified_base 3663: mod_base = OTHER; note = N1-methyl pseudouridine
  modified_base 3664: mod_base = OTHER; note = N1-methyl pseudouridine
  modified_base 3667: mod_base = OTHER; note = N1-methyl pseudouridine
  modified_base 3669: mod_base = OTHER; note = N1-methyl pseudouridine
  modified_base 3678: mod_base = OTHER; note = N1-methyl pseudouridine
  modified_base 3685: mod_base = OTHER; note = N1-methyl pseudouridine
  modified_base 3687: mod_base = OTHER; note = N1-methyl pseudouridine
  modified_base 3694: mod_base = OTHER; note = N1-methyl pseudouridine
  modified_base 3703: mod_base = OTHER; note = N1-methyl pseudouridine
  modified_base 3706: mod_base = OTHER; note = N1-methyl pseudouridine
  modified_base 3714: mod_base = OTHER; note = N1-methyl pseudouridine
  modified_base 3727: mod_base = OTHER; note = N1-methyl pseudouridine
  modified_base 3747: mod_base = OTHER; note = N1-methyl pseudouridine
  modified_base 3750: mod_base = OTHER; note = N1-methyl pseudouridine
  modified_base 3751: mod_base = OTHER; note = N1-methyl pseudouridine
  modified_base 3753: mod_base = OTHER; note = N1-methyl pseudouridine
  modified_base 3754: mod_base = OTHER; note = N1-methyl pseudouridine
  modified_base 3756: mod_base = OTHER; note = N1-methyl pseudouridine
  modified_base 3759: mod_base = OTHER; note = N1-methyl pseudouridine
  modified_base 3766: mod_base = OTHER; note = N1-methyl pseudouridine
  modified_base 3769: mod_base = OTHER; note = N1-methyl pseudouridine
  modified_base 3774: mod_base = OTHER; note = N1-methyl pseudouridine
  modified_base 3775: mod_base = OTHER; note = N1-methyl pseudouridine
  modified_base 3777: mod_base = OTHER; note = N1-methyl pseudouridine
  modified_base 3778: mod_base = OTHER; note = N1-methyl pseudouridine
  modified_base 3790: mod_base = OTHER; note = N1-methyl pseudouridine
  modified_base 3796: mod_base = OTHER; note = N1-methyl pseudouridine
  modified_base 3797: mod_base = OTHER; note = N1-methyl pseudouridine
  modified_base 3811: mod_base = OTHER; note = N1-methyl pseudouridine
  modified_base 3812: mod_base = OTHER; note = N1-methyl pseudouridine
  modified_base 3825: mod_base = OTHER; note = N1-methyl pseudouridine
  modified_base 3826: mod_base = OTHER; note = N1-methyl pseudouridine
  modified_base 3829: mod_base = OTHER; note = N1-methyl pseudouridine
  modified_base 3830: mod_base = OTHER; note = N1-methyl pseudouridine
  modified_base 3836: mod_base = OTHER; note = N1-methyl pseudouridine
  modified_base 3856: mod_base = OTHER; note = N1-methyl pseudouridine
  modified_base 3857: mod_base = OTHER; note = N1-methyl pseudouridine
  modified_base 3859: mod_base = OTHER; note = N1-methyl pseudouridine
  modified_base 3861: mod_base = OTHER; note = N1-methyl pseudouridine
  modified_base 3866: mod_base = OTHER; note = N1-methyl pseudouridine
  modified_base 3879: mod_base = OTHER; note = N1-methyl pseudouridine
  modified_base 3880: mod_base = OTHER; note = N1-methyl pseudouridine
  modified_base 3881: mod_base = OTHER; note = N1-methyl pseudouridine
  modified_base 3887: mod_base = OTHER; note = N1-methyl pseudouridine
  modified_base 3889: mod_base = OTHER; note = N1-methyl pseudouridine
  modified_base 3898: mod_base = OTHER; note = N1-methyl pseudouridine
  modified_base 3900: mod_base = OTHER; note = N1-methyl pseudouridine
  modified_base 3901: mod_base = OTHER; note = N1-methyl pseudouridine
  modified_base 3903: mod_base = OTHER; note = N1-methyl pseudouridine
  modified_base 3907: mod_base = OTHER; note = N1-methyl pseudouridine
  modified_base 3916: mod_base = OTHER; note = N1-methyl pseudouridine
  modified_base 3922: mod_base = OTHER; note = N1-methyl pseudouridine
  modified_base 3923: mod_base = OTHER; note = N1-methyl pseudouridine
  modified_base 3925: mod_base = OTHER; note = N1-methyl pseudouridine
  modified_base 3940: mod_base = OTHER; note = N1-methyl pseudouridine
  modified_base 3954: mod_base = OTHER; note = N1-methyl pseudouridine
  modified_base 3955: mod_base = OTHER; note = N1-methyl pseudouridine
  modified_base 3970: mod_base = OTHER; note = N1-methyl pseudouridine
  modified_base 3973: mod_base = OTHER; note = N1-methyl pseudouridine
  modified_base 3986: mod_base = OTHER; note = N1-methyl pseudouridine
  modified_base 3987: mod_base = OTHER; note = N1-methyl pseudouridine
  modified_base 3997: mod_base = OTHER; note = N1-methyl pseudouridine
  modified_base 4000: mod_base = OTHER; note = N1-methyl pseudouridine
  modified_base 4017: mod_base = OTHER; note = N1-methyl pseudouridine
  modified_base 4032: mod_base = OTHER; note = N1-methyl pseudouridine
  modified_base 4034: mod_base = OTHER; note = N1-methyl pseudouridine
  modified_base 4041: mod_base = OTHER; note = N1-methyl pseudouridine
  modified_base 4042: mod_base = OTHER; note = N1-methyl pseudouridine
  modified_base 4047: mod_base = OTHER; note = N1-methyl pseudouridine
  modified_base 4055: mod_base = OTHER; note = N1-methyl pseudouridine
  modified_base 4057: mod_base = OTHER; note = N1-methyl pseudouridine
  modified_base 4062: mod_base = OTHER; note = N1-methyl pseudouridine
  modified_base 4065: mod_base = OTHER; note = N1-methyl pseudouridine
  modified_base 4069: mod_base = OTHER; note = N1-methyl pseudouridine
  modified_base 4072: mod_base = OTHER; note = N1-methyl pseudouridine
  modified_base 4075: mod_base = OTHER; note = N1-methyl pseudouridine
  modified_base 4078: mod_base = OTHER; note = N1-methyl pseudouridine
  modified_base 4087: mod_base = OTHER; note = N1-methyl pseudouridine
  modified_base 4101: mod_base = OTHER; note = N1-methyl pseudouridine
  modified_base 4111: mod_base = OTHER; note = N1-methyl pseudouridine
  modified_base 4116: mod_base = OTHER; note = N1-methyl pseudouridine
  modified_base 4120: mod_base = OTHER; note = N1-methyl pseudouridine
  modified_base 4129: mod_base = OTHER; note = N1-methyl pseudouridine
  modified_base 4132: mod_base = OTHER; note = N1-methyl pseudouridine
  modified_base 4138: mod_base = OTHER; note = N1-methyl pseudouridine
  modified_base 4144: mod_base = OTHER; note = N1-methyl pseudouridine
  modified_base 4145: mod_base = OTHER; note = N1-methyl pseudouridine
  modified_base 4147: mod_base = OTHER; note = N1-methyl pseudouridine
  modified_base 4155: mod_base = OTHER; note = N1-methyl pseudouridine
  modified_base 4161: mod_base = OTHER; note = N1-methyl pseudouridine
  modified_base 4162: mod_base = OTHER; note = N1-methyl pseudouridine
  modified_base 4177: mod_base = OTHER; note = N1-methyl pseudouridine
  modified_base 4178: mod_base = OTHER; note = N1-methyl pseudouridine
  modified_base 4182: mod_base = OTHER; note = N1-methyl pseudouridine
  modified_base 4183: mod_base = OTHER; note = N1-methyl pseudouridine
  modified_base 4186: mod_base = OTHER; note = N1-methyl pseudouridine
  modified_base 4199: mod_base = OTHER; note = N1-methyl pseudouridine
  modified_base 4200: mod_base = OTHER; note = N1-methyl pseudouridine
  modified_base 4210: mod_base = OTHER; note = N1-methyl pseudouridine
  modified_base 4220: mod_base = OTHER; note = N1-methyl pseudouridine
  modified_base 4222: mod_base = OTHER; note = N1-methyl pseudouridine
  modified_base 4225: mod_base = OTHER; note = N1-methyl pseudouridine
  modified_base 4226: mod_base = OTHER; note = N1-methyl pseudouridine
  modified_base 4228: mod_base = OTHER; note = N1-methyl pseudouridine
  modified_base 4229: mod_base = OTHER; note = N1-methyl pseudouridine
  modified_base 4234: mod_base = OTHER; note = N1-methyl pseudouridine
  modified_base 4242: mod_base = OTHER; note = N1-methyl pseudouridine
  modified_base 4244: mod_base = OTHER; note = N1-methyl pseudouridine
  modified_base 4245: mod_base = OTHER; note = N1-methyl pseudouridine
  modified_base 4249: mod_base = OTHER; note = N1-methyl pseudouridine
  modified_base 4251: mod_base = OTHER; note = N1-methyl pseudouridine
  modified_base 4252: mod_base = OTHER; note = N1-methyl pseudouridine
  modified_base 4258: mod_base = OTHER; note = N1-methyl pseudouridine
  modified_base 4265: mod_base = OTHER; note = N1-methyl pseudouridine
  modified_base 4279: mod_base = OTHER; note = N1-methyl pseudouridine
  modified_base 4281: mod_base = OTHER; note = N1-methyl pseudouridine
  modified_base 4282: mod_base = OTHER; note = N1-methyl pseudouridine
  modified_base 4287: mod_base = OTHER; note = N1-methyl pseudouridine
  modified_base 4300: mod_base = OTHER; note = N1-methyl pseudouridine
  modified_base 4318: mod_base = OTHER; note = N1-methyl pseudouridine
  modified_base 4323: mod_base = OTHER; note = N1-methyl pseudouridine
  modified_base 4324: mod_base = OTHER; note = N1-methyl pseudouridine
  modified_base 4328: mod_base = OTHER; note = N1-methyl pseudouridine
  modified_base 4329: mod_base = OTHER; note = N1-methyl pseudouridine
  modified_base 4335: mod_base = OTHER; note = N1-methyl pseudouridine
  modified_base 4339: mod_base = OTHER; note = N1-methyl pseudouridine
  modified_base 4344: mod_base = OTHER; note = N1-methyl pseudouridine
  modified_base 4345: mod_base = OTHER; note = N1-methyl pseudouridine
  modified_base 4346: mod_base = OTHER; note = N1-methyl pseudouridine
  modified_base 4348: mod_base = OTHER; note = N1-methyl pseudouridine
  modified_base 4350: mod_base = OTHER; note = N1-methyl pseudouridine
  modified_base 4354: mod_base = OTHER; note = N1-methyl pseudouridine
  modified_base 4365: mod_base = OTHER; note = N1-methyl pseudouridine
  modified_base 4375: mod_base = OTHER; note = N1-methyl pseudouridine
  modified_base 4382: mod_base = OTHER; note = N1-methyl pseudouridine
  modified_base 4383: mod_base = OTHER; note = N1-methyl pseudouridine
  modified_base 4411: mod_base = OTHER; note = N1-methyl pseudouridine
  modified_base 4413: mod_base = OTHER; note = N1-methyl pseudouridine
  modified_base 4414: mod_base = OTHER; note = N1-methyl pseudouridine
  modified_base 4417: mod_base = OTHER; note = N1-methyl pseudouridine
  modified_base 4434: mod_base = OTHER; note = N1-methyl pseudouridine
  modified_base 4438: mod_base = OTHER; note = N1-methyl pseudouridine
  modified_base 4442: mod_base = OTHER; note = N1-methyl pseudouridine
  modified_base 4447: mod_base = OTHER; note = N1-methyl pseudouridine
  modified_base 4450: mod_base = OTHER; note = N1-methyl pseudouridine
  modified_base 4459: mod_base = OTHER; note = N1-methyl pseudouridine
  modified_base 4461: mod_base = OTHER; note = N1-methyl pseudouridine
  modified_base 4467: mod_base = OTHER; note = N1-methyl pseudouridine
  modified_base 4468: mod_base = OTHER; note = N1-methyl pseudouridine
  modified_base 4470: mod_base = OTHER; note = N1-methyl pseudouridine
  modified_base 4480: mod_base = OTHER; note = N1-methyl pseudouridine
  modified_base 4483: mod_base = OTHER; note = N1-methyl pseudouridine
  modified_base 4486: mod_base = OTHER; note = N1-methyl pseudouridine
  modified_base 4501: mod_base = OTHER; note = N1-methyl pseudouridine
  modified_base 4505: mod_base = OTHER; note = N1-methyl pseudouridine
  modified_base 4510: mod_base = OTHER; note = N1-methyl pseudouridine
  modified_base 4513: mod_base = OTHER; note = N1-methyl pseudouridine
  modified_base 4515: mod_base = OTHER; note = N1-methyl pseudouridine
  modified_base 4521: mod_base = OTHER; note = N1-methyl pseudouridine
  modified_base 4546: mod_base = OTHER; note = N1-methyl pseudouridine
  modified_base 4559: mod_base = OTHER; note = N1-methyl pseudouridine
  modified_base 4567: mod_base = OTHER; note = N1-methyl pseudouridine
  modified_base 4568: mod_base = OTHER; note = N1-methyl pseudouridine
  modified_base 4570: mod_base = OTHER; note = N1-methyl pseudouridine
  modified_base 4576: mod_base = OTHER; note = N1-methyl pseudouridine
  modified_base 4578: mod_base = OTHER; note = N1-methyl pseudouridine
  modified_base 4579: mod_base = OTHER; note = N1-methyl pseudouridine
  modified_base 4585: mod_base = OTHER; note = N1-methyl pseudouridine
  modified_base 4589: mod_base = OTHER; note = N1-methyl pseudouridine
  modified_base 4594: mod_base = OTHER; note = N1-methyl pseudouridine
  modified_base 4595: mod_base = OTHER; note = N1-methyl pseudouridine
  modified_base 4604: mod_base = OTHER; note = N1-methyl pseudouridine
  modified_base 4611: mod_base = OTHER; note = N1-methyl pseudouridine
  modified_base 4612: mod_base = OTHER; note = N1-methyl pseudouridine
  modified_base 4617: mod_base = OTHER; note = N1-methyl pseudouridine
  modified_base 4620: mod_base = OTHER; note = N1-methyl pseudouridine
  modified_base 4621: mod_base = OTHER; note = N1-methyl pseudouridine
  modified_base 4633: mod_base = OTHER; note = N1-methyl pseudouridine
  modified_base 4647: mod_base = OTHER; note = N1-methyl pseudouridine
  modified_base 4652: mod_base = OTHER; note = N1-methyl pseudouridine
  modified_base 4653: mod_base = OTHER; note = N1-methyl pseudouridine
  modified_base 4666: mod_base = OTHER; note = N1-methyl pseudouridine
  modified_base 4669: mod_base = OTHER; note = N1-methyl pseudouridine
  modified_base 4681: mod_base = OTHER; note = N1-methyl pseudouridine
  modified_base 4684: mod_base = OTHER; note = N1-methyl pseudouridine
  modified_base 4692: mod_base = OTHER; note = N1-methyl pseudouridine
  modified_base 4696: mod_base = OTHER; note = N1-methyl pseudouridine
  modified_base 4700: mod_base = OTHER; note = N1-methyl pseudouridine
  modified_base 4705: mod_base = OTHER; note = N1-methyl pseudouridine
  modified_base 4707: mod_base = OTHER; note = N1-methyl pseudouridine
  modified_base 4709: mod_base = OTHER; note = N1-methyl pseudouridine
  modified_base 4715: mod_base = OTHER; note = N1-methyl pseudouridine
  modified_base 4720: mod_base = OTHER; note = N1-methyl pseudouridine
  modified_base 4721: mod_base = OTHER; note = N1-methyl pseudouridine
  modified_base 4726: mod_base = OTHER; note = N1-methyl pseudouridine
  modified_base 4728: mod_base = OTHER; note = N1-methyl pseudouridine
  modified_base 4734: mod_base = OTHER; note = N1-methyl pseudouridine
  modified_base 4735: mod_base = OTHER; note = N1-methyl pseudouridine
  modified_base 4757: mod_base = OTHER; note = N1-methyl pseudouridine
  modified_base 4772: mod_base = OTHER; note = N1-methyl pseudouridine
  modified_base 4776: mod_base = OTHER; note = N1-methyl pseudouridine
  modified_base 4782: mod_base = OTHER; note = N1-methyl pseudouridine
  modified_base 4783: mod_base = OTHER; note = N1-methyl pseudouridine
  modified_base 4788: mod_base = OTHER; note = N1-methyl pseudouridine
  modified_base 4810: mod_base = OTHER; note = N1-methyl pseudouridine
  modified_base 4812: mod_base = OTHER; note = N1-methyl pseudouridine
  modified_base 4823: mod_base = OTHER; note = N1-methyl pseudouridine
  modified_base 4824: mod_base = OTHER; note = N1-methyl pseudouridine
  modified_base 4827: mod_base = OTHER; note = N1-methyl pseudouridine
  modified_base 4828: mod_base = OTHER; note = N1-methyl pseudouridine
  modified_base 4833: mod_base = OTHER; note = N1-methyl pseudouridine
  modified_base 4837: mod_base = OTHER; note = N1-methyl pseudouridine
  modified_base 4838: mod_base = OTHER; note = N1-methyl pseudouridine
  modified_base 4840: mod_base = OTHER; note = N1-methyl pseudouridine
  modified_base 4848: mod_base = OTHER; note = N1-methyl pseudouridine
  modified_base 4849: mod_base = OTHER; note = N1-methyl pseudouridine
  modified_base 4853: mod_base = OTHER; note = N1-methyl pseudouridine
  modified_base 4854: mod_base = OTHER; note = N1-methyl pseudouridine
  modified_base 4856: mod_base = OTHER; note = N1-methyl pseudouridine
  modified_base 4862: mod_base = OTHER; note = N1-methyl pseudouridine
  modified_base 4867: mod_base = OTHER; note = N1-methyl pseudouridine
  modified_base 4868: mod_base = OTHER; note = N1-methyl pseudouridine
  modified_base 4870: mod_base = OTHER; note = N1-methyl pseudouridine
  modified_base 4871: mod_base = OTHER; note = N1-methyl pseudouridine
  modified_base 4873: mod_base = OTHER; note = N1-methyl pseudouridine
  modified_base 4875: mod_base = OTHER; note = N1-methyl pseudouridine
  modified_base 4879: mod_base = OTHER; note = N1-methyl pseudouridine
  modified_base 4880: mod_base = OTHER; note = N1-methyl pseudouridine
  modified_base 4886: mod_base = OTHER; note = N1-methyl pseudouridine
  modified_base 4888: mod_base = OTHER; note = N1-methyl pseudouridine
  modified_base 4892: mod_base = OTHER; note = N1-methyl pseudouridine
  modified_base 4894: mod_base = OTHER; note = N1-methyl pseudouridine
  modified_base 4895: mod_base = OTHER; note = N1-methyl pseudouridine
  modified_base 4898: mod_base = OTHER; note = N1-methyl pseudouridine
  modified_base 4900: mod_base = OTHER; note = N1-methyl pseudouridine
  modified_base 4901: mod_base = OTHER; note = N1-methyl pseudouridine
  modified_base 4902: mod_base = OTHER; note = N1-methyl pseudouridine
  modified_base 4906: mod_base = OTHER; note = N1-methyl pseudouridine
  modified_base 4913: mod_base = OTHER; note = N1-methyl pseudouridine
  modified_base 4917: mod_base = OTHER; note = N1-methyl pseudouridine
  modified_base 4924: mod_base = OTHER; note = N1-methyl pseudouridine
  modified_base 4926: mod_base = OTHER; note = N1-methyl pseudouridine
aggaaataagagagaaaagaagagtaagaagaaatataagagccaccatgtccgaagtcgaattcagccacgagtactggatgagacatgcactgaccctcgcgaagagagctcgggatgagagggaagtgccagtgggagctgtgctggtgctcaacaacagggtcattggggaaggatggaacagggccattggacttcacgatccgacggctcatgcggaaatcatggcactgagacagggcggtcttgtgatgcagaactatcgcctgattgatgccactctgtacgtgaccttcgaaccttgcgtgatgtgcgccggtgccatgatccactcacgcatcggtcgggtggtgttcggcgtgcgaaacgctaagactggagccgccggatcactgatggatgtgctccatcaccccgggatgaaccacagggtggagatcaccgaaggcattctggccgacgaatgcgcagccctgttgtgtcgcttcttccggatgcctcgaagagtgttcaacgcgcagaagaaggcgcagagctccactgactctggaggttcctcgggcggatcgtcagggtccgaaactcctggaacctcggagtcagcaactccggaatcctcaggaggctccagcggaggctccgataagaagtacagcatcgggcttgccatcggaaccaactcggtcggctgggctgtgatcactgacgagtacaaggtcccttccaaaaagttcaaagtgctcggcaacactgatcggcactcgattaagaagaacctgatcggtgcactgctgttcgactctggggagactgcggaagcaactcgcctgaagaggactgcgcgcagacggtacaccaggcgcaagaaccggatctgctacttgcaagagattttcagcaacgagatggccaaggtcgacgactcgtttttccaccggctcgaggaaagcttcctggtggaggaagataagaagcatgagcgccatcccatcttcggaaacatcgtggacgaagtggcctaccatgagaagtacccgaccatctaccatctgcgcaagaagctcgtggacagcactgacaaagccgacttgcgcctgatctaccttgccctggcccacatgatcaagttcagagggcacttcctgatcgagggcgacctgaacccggacaattccgacgtggataagctgttcatccaactggtacaaacttacaaccagctgtttgaggagaacccgatcaacgcttccggcgtggacgcgaaggccattctgagcgcacggctgtccaagtcccggagattagaaaacctgattgcccaactgcctggagaaaagaagaatggcctgttcggaaacctgatcgccctctcgctcggtctgacccccaactttaagagcaacttcgacctggctgaggacgcgaagctccagctgtccaaggacacctacgatgatgacctcgataatctcctcgcccaaatcggcgaccaatatgcggacctgtttctggccgccaagaatctgtccgacgccatcctcctgagcgatatcctgcgcgtgaacactgaaatcaccaaggccccactgagcgctagcatgattaagcgctacgacgaacaccatcaggacctcaccctgctgaaggctcttgtgcggcagcagctcccagagaagtacaaggagatcttcttcgaccaatcgaagaatggttacgccggctacattgacggaggagcgtcacaggaggagttctacaagttcattaagccaatcctggagaagatggacggaaccgaggaactgctcgtgaagctgaacagagaagatctactgcgcaagcagcgcactttcgacaacggatcgatcccacatcagattcacctgggagagctgcacgcgatcctgcggagacaggaagatttctacccgttcctgaaggacaaccgcgagaagatcgaaaagatcctgaccttccgcattccgtactacgtgggacccctcgcaagaggaaactcgcggttcgcctggatgaccaggaagtcggaagaaaccattactccgtggaacttcgaggaagtggtggacaagggcgcctcagcgcaatccttcatcgaacggatgaccaacttcgacaagaacttgcctaacgagaaagtgcttcctaagcattccctcctttacgaatacttcactgtgtacaacgagcttaccaaggtcaaatatgtgaccgagggcatgcgcaagccggcctttctttccggggagcaaaagaaggccatcgtggacctgttgttcaagaccaaccggaaggtcaccgtcaagcagctgaaggaggactactttaagaaaatcgagtgctttgattccgtcgaaatctccggagtggaagatagattcaacgccagcctaggcacctaccacgatctgctcaagatcattaaggataaggatttcctggacaacgaggagaacgaggatatcctggaggacattgtgctgaccctgacactgttcgaagatcgcgaaatgatcgaggagcggctgaaaacatacgcccacctgttcgacgacaaggtcatgaagcagctcaagcggaggaggtacacgggatggggaaggctgtcccggaagctgatcaacgggattagagacaagcagtccggaaagaccattctggacttcctcaagtcggacggcttcgcgaaccggaacttcatgcaactgatccacgacgactccctgacgttcaaggaggacattcagaaggcccaagtgtccggacagggagattcactgcacgaacacatcgccaatctggctggaagtccggccatcaagaaaggcatcctgcaaaccgtgaaggtcgtggacgagctcgtgaaggtcatgggccgccacaagcctgagaacatcgtgatcgaaatggcccgggagaaccagaccacgcagaaagggcagaagaacagccgcgagaggatgaagagaatcgaggaaggaatcaaggaacttggaagccagatcctgaaggaacaccccgtggaaaacactcagcttcaaaacgaaaagctgtacctctactatctgcaaaacggacgggatatgtacgtggaccaggaattggacatcaatcgcctgtccgactacgatgtggatcacattgtgccgcagagctttctgaaggacgattcaattgataacaaggtgctcacccggtccgacaagaaccggggcaaaagcgataacgtgccgagcgaagaggtggtcaagaagatgaagaattactggcggcagctcttgaacgccaaactgatcacccagcggaagttcgacaacctgaccaaggccgaaaggggcggtctttccgaactggacaaggccgggtttatcaagcgccaactggtggaaacccggcagatcactaagcacgtggcccagatactggactctaggatgaataccaaatacgacgagaacgacaagctgattcgcgaagtcaaagtcattaccctgaaatccaagctcgtgtccgacttccggaaggacttccagttctataaggttcgcgaaatcaacaactaccaccacgcccatgacgcgtacctgaacgccgtcgtgggtaccgccctgattaagaagtaccctaagctcgagtccgagttcgtctacggagactacaaagtgtacgacgtgcggaagatgatcgccaagtccgagcaggaaatagggaaggccaccgccaagtacttcttctactccaacatcatgaacttcttcaagaccgagatcacccttgccaacggggagattcggaagcgcccgttgattgagactaacggagaaaccggcgaaattgtgtgggataagggcagagactttgcgactgtgcgcaaagtcttgtcaatgccccaagtcaacattgtcaaaaagaccgaagtgcaaaccggcggcttcagcaaggaaagcatcctgcccaagcgcaattccgacaagctcatcgcccggaagaaggactgggaccccaagaaatatggaggcttcgactcccccactgtggcctactccgtcctggtggtcgcgaaagtggaaaagggaaagtcgaagaagctcaagtccgtgaaggagctcctggggatcaccattatggaacggtccagcttcgagaagaacccgattgacttcctggaagccaagggttacaaggaggtcaagaaggatctgattattaagctgccgaagtattccctcttcgaactcgaaaatggccgcaagcgaatgttggcatcggcgggagagctccagaagggaaacgaactggccttgccttccaaatacgtgaactttctgtacctggccagccactacgagaagctgaagggttcccccgaggacaacgagcagaagcagctgttcgtggagcagcacaagcactacctggatgagatcatcgaacagatctcggaattctccaagagagtgatcctggccgacgcgaacctggataaggtcctgtccgcgtacaacaagcaccgggacaagcccatccgggagcaggctgagaacattatccacctgttcaccctcactaaccttggagcgcctgccgcattcaagtacttcgacacaaccatcgacagaaagcgctacacttccaccaaggaggtgctggacgccaccctgatccaccagtccatcactgggctctatgagactcgcattgacctgtcccagttgggaggggacgaaggagccgataagagaaccgccgatgggtccgaattcgagtcgcccaagaagaagcggaaagtgtaagcggccgcttaattaagctgccttctgcggggcttgccttctggccatgcccttcttctctcccttgcacctgtacctcttggtctttgaataaagcctgagtaggaagtctaga

SEQ ID NO: 2162 - RNA, 501 nt, synthetic construct
  source 1..501: mol_type = other RNA
  modified_base 2: mod_base = OTHER; note = N1-methyl pseudouridine
  modified_base 4: mod_base = OTHER; note = N1-methyl pseudouridine
  modified_base 11: mod_base = OTHER; note = N1-methyl pseudouridine
  modified_base 16: mod_base = OTHER; note = N1-methyl pseudouridine
  modified_base 17: mod_base = OTHER; note = N1-methyl pseudouridine
  modified_base 28: mod_base = OTHER; note = N1-methyl pseudouridine
  modified_base 31: mod_base = OTHER; note = N1-methyl pseudouridine
  modified_base 35: mod_base = OTHER; note = N1-methyl pseudouridine
  modified_base 42: mod_base = OTHER; note = N1-methyl pseudouridine
  modified_base 47: mod_base = OTHER; note = N1-methyl pseudouridine
  modified_base 53: mod_base = OTHER; note = N1-methyl pseudouridine
  modified_base 66: mod_base = OTHER; note = N1-methyl pseudouridine
  modified_base 72: mod_base = OTHER; note = N1-methyl pseudouridine
  modified_base 83: mod_base = OTHER; note = N1-methyl pseudouridine
  modified_base 89: mod_base = OTHER; note = N1-methyl pseudouridine
  modified_base 96: mod_base = OTHER; note = N1-methyl pseudouridine
  modified_base 98: mod_base = OTHER; note = N1-methyl pseudouridine
  modified_base 101: mod_base = OTHER; note = N1-methyl pseudouridine
  modified_base 104: mod_base = OTHER; note = N1-methyl pseudouridine
  modified_base 107: mod_base = OTHER; note = N1-methyl pseudouridine
  modified_base 119: mod_base = OTHER; note = N1-methyl pseudouridine
  modified_base 122: mod_base = OTHER; note = N1-methyl pseudouridine
  modified_base 123: mod_base = OTHER; note = N1-methyl pseudouridine
  modified_base 133: mod_base = OTHER; note = N1-methyl pseudouridine
  modified_base 146: mod_base = OTHER; note = N1-methyl pseudouridine
  modified_base 147: mod_base = OTHER; note = N1-methyl pseudouridine
  modified_base 152: mod_base = OTHER; note = N1-methyl pseudouridine
  modified_base 153: mod_base = OTHER; note = N1-methyl pseudouridine
  modified_base 159: mod_base = OTHER; note = N1-methyl pseudouridine
  modified_base 168: mod_base = OTHER; note = N1-methyl pseudouridine
  modified_base 171: mod_base = OTHER; note = N1-methyl pseudouridine
  modified_base 179: mod_base = OTHER; note = N1-methyl pseudouridine
  modified_base 182: mod_base = OTHER; note = N1-methyl pseudouridine
  modified_base 188: mod_base = OTHER; note = N1-methyl pseudouridine
  modified_base 201: mod_base = OTHER; note = N1-methyl pseudouridine
  modified_base 203: mod_base = OTHER; note = N1-methyl pseudouridine
  modified_base 204: mod_base = OTHER; note = N1-methyl pseudouridine
  modified_base 206: mod_base = OTHER; note = N1-methyl pseudouridine
  modified_base 209: mod_base = OTHER; note = N1-methyl pseudouridine
  modified_base 217: mod_base = OTHER; note = N1-methyl pseudouridine
  modified_base 219: mod_base = OTHER; note = N1-methyl pseudouridine
  modified_base 224: mod_base = OTHER; note = N1-methyl pseudouridine
  modified_base 227: mod_base = OTHER; note = N1-methyl pseudouridine
  modified_base 228: mod_base = OTHER; note = N1-methyl pseudouridine
  modified_base 231: mod_base = OTHER; note = N1-methyl pseudouridine
  modified_base 237: mod_base = OTHER; note = N1-methyl pseudouridine
  modified_base 239: mod_base = OTHER; note = N1-methyl pseudouridine
  modified_base 241: mod_base = OTHER; note = N1-methyl pseudouridine
  modified_base 245: mod_base = OTHER; note = N1-methyl pseudouridine
  modified_base 250: mod_base = OTHER; note = N1-methyl pseudouridine
  modified_base 251: mod_base = OTHER; note = N1-methyl pseudouridine
  modified_base 258: mod_base = OTHER; note = N1-methyl pseudouridine
  modified_base 259: mod_base = OTHER; note = N1-methyl pseudouridine
  modified_base 263: mod_base = OTHER; note = N1-methyl pseudouridine
  modified_base 266: mod_base = OTHER; note = N1-methyl pseudouridine
  modified_base 268: mod_base = OTHER; note = N1-methyl pseudouridine
  modified_base 276: mod_base = OTHER; note = N1-methyl pseudouridine
  modified_base 281: mod_base = OTHER; note = N1-methyl pseudouridine
  modified_base 284: mod_base = OTHER; note = N1-methyl pseudouridine
  modified_base 289: mod_base = OTHER; note = N1-methyl pseudouridine
  modified_base 296: mod_base = OTHER; note = N1-methyl pseudouridine
  modified_base 300: mod_base = OTHER; note = N1-methyl pseudouridine
  modified_base 305: mod_base = OTHER; note = N1-methyl pseudouridine
  modified_base 308: mod_base = OTHER; note = N1-methyl pseudouridine
  modified_base 310: mod_base = OTHER; note = N1-methyl pseudouridine
  modified_base 311: mod_base = OTHER; note = N1-methyl pseudouridine
  modified_base 317: mod_base = OTHER; note = N1-methyl pseudouridine
  modified_base 327: mod_base = OTHER; note = N1-methyl pseudouridine
  modified_base 333: mod_base = OTHER; note = N1-methyl pseudouridine
  modified_base 346: mod_base = OTHER; note = N1-methyl pseudouridine
  modified_base 350: mod_base = OTHER; note = N1-methyl pseudouridine
  modified_base 353: mod_base = OTHER; note = N1-methyl pseudouridine
  modified_base 357: mod_base = OTHER; note = N1-methyl pseudouridine
  modified_base 359: mod_base = OTHER; note = N1-methyl pseudouridine
  modified_base 362: mod_base = OTHER; note = N1-methyl pseudouridine
  modified_base 366: mod_base = OTHER; note = N1-methyl pseudouridine
  modified_base 377: mod_base = OTHER; note = N1-methyl pseudouridine
  modified_base 389: mod_base = OTHER; note = N1-methyl pseudouridine
  modified_base 395: mod_base = OTHER; note = N1-methyl pseudouridine
  modified_base 407: mod_base = OTHER; note = N1-methyl pseudouridine
  modified_base 408: mod_base = OTHER; note = N1-methyl pseudouridine
  modified_base 410: mod_base = OTHER; note = N1-methyl pseudouridine
  modified_base 421: mod_base = OTHER; note = N1-methyl pseudouridine
  modified_base 431: mod_base = OTHER; note = N1-methyl pseudouridine
  modified_base 433: mod_base = OTHER; note = N1-methyl pseudouridine
  modified_base 434: mod_base = OTHER; note = N1-methyl pseudouridine
  modified_base 436: mod_base = OTHER; note = N1-methyl pseudouridine
  modified_base 438: mod_base = OTHER; note = N1-methyl pseudouridine
  modified_base 442: mod_base = OTHER; note = N1-methyl pseudouridine
  modified_base 443: mod_base = OTHER; note = N1-methyl pseudouridine
  modified_base 445: mod_base = OTHER; note = N1-methyl pseudouridine
  modified_base 446: mod_base = OTHER; note = N1-methyl pseudouridine
  modified_base 452: mod_base = OTHER; note = N1-methyl pseudouridine
  modified_base 456: mod_base = OTHER; note = N1-methyl pseudouridine
  modified_base 464: mod_base = OTHER; note = N1-methyl pseudouridine
  modified_base 466: mod_base = OTHER; note = N1-methyl pseudouridine
  modified_base 467: mod_base = OTHER; note = N1-methyl pseudouridine
  modified_base 493: mod_base = OTHER; note = N1-methyl pseudouridine
  modified_base 498: mod_base = OTHER; note = N1-methyl pseudouridine
atgtccgaagtcgaattcagccacgagtactggatgagacatgcactgaccctcgcgaagagagctcgggatgagagggaagtgccagtgggagctgtgctggtgctcaacaacagggtcattggggaaggatggaacagggccattggacttcacgatccgacggctcatgcggaaatcatggcactgagacagggcggtcttgtgatgcagaactatcgcctgattgatgccactctgtacgtgaccttcgaaccttgcgtgatgtgcgccggtgccatgatccactcacgcatcggtcgggtggtgttcggcgtgcgaaacgctaagactggagccgccggatcactgatggatgtgctccatcaccccgggatgaaccacagggtggagatcaccgaaggcattctggccgacgaatgcgcagccctgttgtgtcgcttcttccggatgcctcgaagagtgttcaacgcgcagaagaaggcgcagagctccactgac

SEQ ID NO: 2163 - RNA, 96 nt, synthetic construct
  source 1..96: mol_type = other RNA
  modified_base 1: mod_base = OTHER; note = N1-methyl pseudouridine
  modified_base 3: mod_base = OTHER; note = N1-methyl pseudouridine
  modified_base 9: mod_base = OTHER; note = N1-methyl pseudouridine
  modified_base 10: mod_base = OTHER; note = N1-methyl pseudouridine
  modified_base 13: mod_base = OTHER; note = N1-methyl pseudouridine
  modified_base 22: mod_base = OTHER; note = N1-methyl pseudouridine
  modified_base 25: mod_base = OTHER; note = N1-methyl pseudouridine
  modified_base 31: mod_base = OTHER; note = N1-methyl pseudouridine
  modified_base 39: mod_base = OTHER; note = N1-methyl pseudouridine
  modified_base 42: mod_base = OTHER; note = N1-methyl pseudouridine
  modified_base 49: mod_base = OTHER; note = N1-methyl pseudouridine
  modified_base 55: mod_base = OTHER; note = N1-methyl pseudouridine
  modified_base 63: mod_base = OTHER; note = N1-methyl pseudouridine
  modified_base 70: mod_base = OTHER; note = N1-methyl pseudouridine
  modified_base 73: mod_base = OTHER; note = N1-methyl pseudouridine
  modified_base 82: mod_base = OTHER; note = N1-methyl pseudouridine
  modified_base 94: mod_base = OTHER; note = N1-methyl pseudouridine
tctggaggttcctcgggcggatcgtcagggtccgaaactcctggaacctcggagtcagcaactccggaatcctcaggaggctccagcggaggctcc

SEQ ID NO: 2164 - RNA, 4101 nt, synthetic construct
  source 1..4101: mol_type = other RNA
  modified_base 3: mod_base = OTHER; note = N1-methyl pseudouridine
  modified_base 10: mod_base = OTHER; note = N1-methyl pseudouridine
  modified_base 17: mod_base = OTHER; note = N1-methyl pseudouridine
  modified_base 23: mod_base = OTHER; note = N1-methyl pseudouridine
  modified_base 24: mod_base = OTHER; note = N1-methyl pseudouridine
  modified_base 29: mod_base = OTHER; note = N1-methyl pseudouridine
  modified_base 40: mod_base = OTHER; note = N1-methyl pseudouridine
  modified_base 44: mod_base = OTHER; note = N1-methyl pseudouridine
  modified_base 49: mod_base = OTHER; note = N1-methyl pseudouridine
  modified_base 54: mod_base = OTHER; note = N1-methyl pseudouridine
  modified_base 56: mod_base = OTHER; note = N1-methyl pseudouridine
  modified_base 59: mod_base = OTHER; note = N1-methyl pseudouridine
  modified_base 63: mod_base = OTHER; note = N1-methyl pseudouridine
  modified_base 70: mod_base = OTHER; note = N1-methyl pseudouridine
  modified_base 77: mod_base = OTHER; note = N1-methyl pseudouridine
  modified_base 81: mod_base = OTHER; note = N1-methyl pseudouridine
  modified_base 82: mod_base = OTHER; note = N1-methyl pseudouridine
  modified_base 91: mod_base = OTHER; note = N1-methyl pseudouridine
  modified_base 92: mod_base = OTHER; note = N1-methyl pseudouridine
  modified_base 98: mod_base = OTHER; note = N1-methyl pseudouridine
  modified_base 101: mod_base = OTHER; note = N1-methyl pseudouridine
  modified_base 111: mod_base = OTHER; note = N1-methyl pseudouridine
  modified_base 114: mod_base = OTHER; note = N1-methyl pseudouridine
  modified_base 121: mod_base = OTHER; note = N1-methyl pseudouridine
  modified_base 125: mod_base = OTHER; note = N1-methyl pseudouridine
  modified_base 126: mod_base = OTHER; note = N1-methyl pseudouridine
  modified_base 137: mod_base = OTHER; note = N1-methyl pseudouridine
  modified_base 140: mod_base = OTHER; note = N1-methyl pseudouridine
  modified_base 144: mod_base = OTHER; note = N1-methyl pseudouridine
  modified_base 149: mod_base = OTHER; note = N1-methyl pseudouridine
  modified_base 152: mod_base = OTHER; note = N1-methyl pseudouridine
  modified_base 154: mod_base = OTHER; note = N1-methyl pseudouridine
  modified_base 155: mod_base = OTHER; note = N1-methyl pseudouridine
  modified_base 160: mod_base = OTHER; note = N1-methyl pseudouridine
  modified_base 162: mod_base = OTHER; note = N1-methyl pseudouridine
  modified_base 171: mod_base = OTHER; note = N1-methyl pseudouridine
  modified_base 183: mod_base = OTHER; note = N1-methyl pseudouridine
  modified_base 188: mod_base = OTHER; note = N1-methyl pseudouridine
  modified_base 198: mod_base = OTHER; note = N1-methyl pseudouridine
  modified_base 211: mod_base = OTHER; note = N1-methyl pseudouridine
  modified_base 233: mod_base = OTHER; note = N1-methyl pseudouridine
  modified_base 235: mod_base = OTHER; note = N1-methyl pseudouridine
  modified_base 238: mod_base = OTHER; note = N1-methyl pseudouridine
  modified_base 241: mod_base = OTHER; note = N1-methyl pseudouridine
  modified_base 242: mod_base = OTHER; note = N1-methyl pseudouridine
  modified_base 251: mod_base = OTHER; note = N1-methyl pseudouridine
  modified_base 252: mod_base = OTHER; note = N1-methyl pseudouridine
  modified_base 253: mod_base = OTHER; note = N1-methyl pseudouridine
  modified_base 254: mod_base = OTHER; note = N1-methyl pseudouridine
  modified_base 266: mod_base = OTHER; note = N1-methyl pseudouridine
  modified_base 275: mod_base = OTHER; note = N1-methyl pseudouridine
  modified_base 283: mod_base = OTHER; note = N1-methyl pseudouridine
  modified_base 286: mod_base = OTHER; note = N1-methyl pseudouridine
  modified_base 287: mod_base = OTHER; note = N1-methyl pseudouridine
  modified_base 288: mod_base = OTHER; note = N1-methyl pseudouridine
  modified_base 289: mod_base = OTHER; note = N1-methyl pseudouridine
  modified_base 290: mod_base = OTHER; note = N1-methyl pseudouridine
  modified_base 299: mod_base = OTHER; note = N1-methyl pseudouridine
  modified_base 310: mod_base = OTHER; note = N1-methyl pseudouridine
  modified_base 311: mod_base = OTHER; note = N1-methyl pseudouridine
  modified_base 314: mod_base = OTHER; note = N1-methyl pseudouridine
  modified_base 317: mod_base = OTHER; note = N1-methyl pseudouridine
  modified_base 327: mod_base = OTHER; note = N1-methyl pseudouridine
  modified_base 336: mod_base = OTHER; note = N1-methyl pseudouridine
  modified_base 345: mod_base = OTHER; note = N1-methyl pseudouridine
  modified_base 350: mod_base = OTHER; note = N1-methyl pseudouridine
  modified_base 352: mod_base = OTHER; note = N1-methyl pseudouridine
  modified_base 353: mod_base = OTHER; note = N1-methyl pseudouridine
  modified_base 362: mod_base = OTHER; note = N1-methyl pseudouridine
  modified_base 365: mod_base = OTHER; note = N1-methyl pseudouridine
  modified_base 374: mod_base = OTHER; note = N1-methyl pseudouridine
  modified_base 379: mod_base = OTHER; note = N1-methyl pseudouridine
  modified_base 384: mod_base = OTHER; note = N1-methyl pseudouridine
  modified_base 391: mod_base = OTHER; note = N1-methyl pseudouridine
  modified_base 401: mod_base = OTHER; note = N1-methyl pseudouridine
  modified_base 403: mod_base = OTHER; note = N1-methyl pseudouridine
  modified_base 408: mod_base = OTHER; note = N1-methyl pseudouridine
  modified_base 410: mod_base = OTHER; note = N1-methyl pseudouridine
  modified_base 422: mod_base = OTHER; note = N1-methyl pseudouridine
  modified_base 425: mod_base = OTHER; note = N1-methyl pseudouridine
  modified_base 435: mod_base = OTHER; note = N1-methyl pseudouridine
  modified_base 448: mod_base = OTHER; note = N1-methyl pseudouridine
  modified_base 449: mod_base = OTHER; note = N1-methyl pseudouridine
  modified_base 455: mod_base = OTHER; note = N1-methyl pseudouridine
  modified_base 458: mod_base = OTHER; note = N1-methyl pseudouridine
  modified_base 460: mod_base = OTHER; note = N1-methyl pseudouridine
  modified_base 464: mod_base = OTHER; note = N1-methyl pseudouridine
  modified_base 465: mod_base = OTHER; note = N1-methyl pseudouridine
  modified_base 470: mod_base = OTHER; note = N1-methyl pseudouridine
  modified_base 479: mod_base = OTHER; note = N1-methyl pseudouridine
  modified_base 482: mod_base = OTHER; note = N1-methyl pseudouridine
  modified_base 487: mod_base = OTHER; note = N1-methyl pseudouridine
  modified_base 488: mod_base = OTHER; note = N1-methyl pseudouridine
  modified_base 499: mod_base = OTHER; note = N1-methyl pseudouridine
  modified_base 500: mod_base = OTHER; note = N1-methyl pseudouridine
  modified_base 503: mod_base = OTHER; note = N1-methyl pseudouridine
  modified_base 506: mod_base = OTHER; note = N1-methyl pseudouridine
  modified_base 518: mod_base = OTHER; note = N1-methyl pseudouridine
  modified_base 531: mod_base = OTHER; note = N1-methyl pseudouridine
  modified_base 532: mod_base = OTHER; note = N1-methyl pseudouridine
  modified_base 539: mod_base = OTHER; note = N1-methyl pseudouridine
  modified_base 543: mod_base = OTHER; note = N1-methyl pseudouridine
  modified_base 548: mod_base = OTHER; note = N1-methyl pseudouridine
  modified_base 550: mod_base = OTHER; note = N1-methyl pseudouridine
  modified_base 551: mod_base = OTHER; note = N1-methyl pseudouridine
  modified_base 554: mod_base = OTHER; note = N1-methyl pseudouridine
  modified_base 560: mod_base = OTHER; note = N1-methyl pseudouridine
  modified_base 563: mod_base = OTHER; note = N1-methyl pseudouridine
  modified_base 570: mod_base = OTHER; note = N1-methyl pseudouridine
  modified_base 571: mod_base = OTHER; note = N1-methyl pseudouridine
  modified_base 581: mod_base = OTHER; note = N1-methyl pseudouridine
  modified_base 583: mod_base = OTHER; note = N1-methyl pseudouridine
  modified_base 584: mod_base = OTHER; note = N1-methyl pseudouridine
  modified_base 585: mod_base = OTHER; note = N1-methyl pseudouridine
  modified_base 599: mod_base = OTHER; note = N1-methyl pseudouridine
  modified_base 606: mod_base = OTHER; note = N1-methyl pseudouridine
  modified_base 607: mod_base = OTHER; note = N1-methyl pseudouridine
  modified_base 614: mod_base = OTHER; note = N1-methyl pseudouridine
  modified_base 629: mod_base = OTHER; note = N1-methyl pseudouridine
  modified_base 630: mod_base = OTHER; note = N1-methyl pseudouridine
  modified_base 632: mod_base = OTHER; note = N1-methyl pseudouridine
  modified_base 644: mod_base = OTHER; note = N1-methyl pseudouridine
  modified_base 646: mod_base = OTHER; note = N1-methyl pseudouridine
  modified_base 652: mod_base = OTHER; note = N1-methyl pseudouridine
  modified_base 661: mod_base = OTHER; note = N1-methyl pseudouridine
  modified_base 662: mod_base = OTHER; note = N1-methyl pseudouridine
  modified_base 671: mod_base = OTHER; note = N1-methyl pseudouridine
  modified_base 674: mod_base = OTHER; note = N1-methyl pseudouridine
  modified_base 675: mod_base = OTHER; note = N1-methyl pseudouridine
  modified_base 683: mod_base = OTHER; note = N1-methyl pseudouridine
  modified_base 687: mod_base = OTHER; note = N1-methyl pseudouridine
  modified_base 702: mod_base = OTHER; note = N1-methyl pseudouridine
  modified_base 707: mod_base = OTHER; note = N1-methyl pseudouridine
  modified_base 709: mod_base = OTHER; note = N1-methyl pseudouridine
  modified_base 710: mod_base = OTHER; note = N1-methyl pseudouridine
  modified_base 719: mod_base = OTHER; note = N1-methyl pseudouridine
  modified_base 722: mod_base = OTHER; note = N1-methyl pseudouridine
  modified_base 728: mod_base = OTHER; note = N1-methyl pseudouridine
  modified_base 730: mod_base = OTHER; note = N1-methyl pseudouridine
  modified_base 734: mod_base = OTHER; note = N1-methyl pseudouridine
  modified_base 738: mod_base = OTHER; note = N1-methyl pseudouridine
  modified_base 740: mod_base = OTHER; note = N1-methyl pseudouridine
  modified_base 751: mod_base = OTHER; note = N1-methyl pseudouridine
  modified_base 752: mod_base = OTHER; note = N1-methyl pseudouridine
  modified_base 753: mod_base = OTHER; note = N1-methyl pseudouridine
  modified_base 763: mod_base = OTHER; note = N1-methyl pseudouridine
  modified_base 764: mod_base = OTHER; note = N1-methyl pseudouridine
  modified_base 770: mod_base = OTHER; note = N1-methyl pseudouridine
  modified_base 774: mod_base = OTHER; note = N1-methyl pseudouridine
  modified_base 788: mod_base = OTHER; note = N1-methyl pseudouridine
  modified_base 794: mod_base = OTHER; note = N1-methyl pseudouridine
  modified_base 796: mod_base = OTHER; note = N1-methyl pseudouridine
  modified_base 808: mod_base = OTHER; note = N1-methyl pseudouridine
  modified_base 813: mod_base = OTHER; note = N1-methyl pseudouridine
  modified_base 816: mod_base = OTHER; note = N1-methyl pseudouridine
  modified_base 821: mod_base = OTHER; note = N1-methyl pseudouridine
  modified_base 825: mod_base = OTHER; note = N1-methyl pseudouridine
  modified_base 828: mod_base = OTHER; note = N1-methyl pseudouridine
  modified_base 830: mod_base = OTHER; note = N1-methyl pseudouridine
  modified_base 833: mod_base = OTHER; note = N1-methyl pseudouridine
  modified_base 842: mod_base = OTHER; note = N1-methyl pseudouridine
  modified_base 853: mod_base = OTHER; note = N1-methyl pseudouridine
  modified_base 855: mod_base = OTHER; note = N1-methyl pseudouridine
  modified_base 863: mod_base = OTHER; note = N1-methyl pseudouridine
  modified_base 865: mod_base = OTHER; note = N1-methyl pseudouridine
  modified_base 866: mod_base = OTHER; note = N1-methyl pseudouridine
  modified_base 867: mod_base = OTHER; note = N1-methyl pseudouridine
  modified_base 869: mod_base = OTHER; note = N1-methyl pseudouridine
  modified_base 882: mod_base = OTHER; note = N1-methyl pseudouridine
  modified_base 884: mod_base = OTHER; note = N1-methyl pseudouridine
  modified_base 886: mod_base = OTHER; note = N1-methyl pseudouridine
  modified_base 896: mod_base = OTHER; note = N1-methyl pseudouridine
  modified_base 899: mod_base = OTHER; note = N1-methyl pseudouridine
  modified_base 902: mod_base = OTHER; note = N1-methyl pseudouridine
  modified_base 909: mod_base = OTHER; note = N1-methyl pseudouridine
  modified_base 911: mod_base = OTHER; note = N1-methyl pseudouridine
  modified_base 914: mod_base = OTHER; note = N1-methyl pseudouridine
  modified_base 920: mod_base = OTHER; note = N1-methyl pseudouridine
  modified_base 927: mod_base = OTHER; note = N1-methyl pseudouridine
  modified_base 932: mod_base = OTHER; note = N1-methyl pseudouridine
  modified_base 947: mod_base = OTHER; note = N1-methyl pseudouridine
  modified_base 954: mod_base = OTHER; note = N1-methyl pseudouridine
  modified_base 959: mod_base = OTHER; note = N1-methyl pseudouridine
  modified_base 962: mod_base = OTHER; note = N1-methyl pseudouridine
  modified_base 963: mod_base = OTHER; note = N1-methyl pseudouridine
  modified_base 970: mod_base = OTHER; note = N1-methyl pseudouridine
  modified_base 984: mod_base = OTHER; note = N1-methyl pseudouridine
  modified_base 992: mod_base = OTHER; note = N1-methyl pseudouridine
  modified_base 998: mod_base = OTHER; note = N1-methyl pseudouridine
  modified_base 1001: mod_base = OTHER; note = N1-methyl pseudouridine
  modified_base 1008: mod_base = OTHER; note = N1-methyl pseudouridine
  modified_base 1010: mod_base = OTHER; note = N1-methyl pseudouridine
  modified_base 1011: mod_base = OTHER; note = N1-methyl pseudouridine
  modified_base 1013: mod_base = OTHER; note = N1-methyl pseudouridine
  modified_base 1025: mod_base = OTHER; note = N1-methyl pseudouridine
  modified_base 1036: mod_base = OTHER; note = N1-methyl pseudouridine
  modified_base 1046: mod_base = OTHER; note = N1-methyl pseudouridine
  modified_base 1048: mod_base = OTHER; note = N1-methyl pseudouridine
  modified_base 1049: mod_base = OTHER; note = N1-methyl pseudouridine
  modified_base 1051: mod_base = OTHER; note = N1-methyl pseudouridine
  modified_base 1052: mod_base = OTHER; note = N1-methyl pseudouridine
  modified_base 1060: mod_base = OTHER; note = N1-methyl pseudouridine
  modified_base 1068: mod_base = OTHER; note = N1-methyl pseudouridine
  modified_base 1071: mod_base = OTHER; note = N1-methyl pseudouridine
  modified_base 1072: mod_base = OTHER; note = N1-methyl pseudouridine
  modified_base 1081: mod_base = OTHER; note = N1-methyl pseudouridine
  modified_base 1085: mod_base = OTHER; note = N1-methyl pseudouridine
  modified_base 1086: mod_base = OTHER; note = N1-methyl pseudouridine
  modified_base 1099: mod_base = OTHER; note = N1-methyl pseudouridine
  modified_base 1111: mod_base = OTHER; note = N1-methyl pseudouridine
  modified_base 1112: mod_base = OTHER; note = N1-methyl pseudouridine
  modified_base 1114: mod_base = OTHER; note = N1-methyl pseudouridine
  modified_base 1120: mod_base = OTHER; note = N1-methyl pseudouridine
  modified_base 1121: mod_base = OTHER; note = N1-methyl pseudouridine
  modified_base 1124: mod_base = OTHER; note = N1-methyl pseudouridine
  modified_base 1125: mod_base = OTHER; note = N1-methyl pseudouridine
  modified_base 1133: mod_base = OTHER; note = N1-methyl pseudouridine
  modified_base 1136: mod_base = OTHER; note = N1-methyl pseudouridine
  modified_base 1145: mod_base = OTHER; note = N1-methyl pseudouridine
  modified_base 1163: mod_base = OTHER; note = N1-methyl pseudouridine
  modified_base 1166: mod_base = OTHER; note = N1-methyl pseudouridine
  modified_base 1169: mod_base = OTHER; note = N1-methyl pseudouridine
  modified_base 1175: mod_base = OTHER; note = N1-methyl pseudouridine
  modified_base 1188: mod_base = OTHER; note = N1-methyl pseudouridine
  modified_base 1190: mod_base = OTHER; note = N1-methyl pseudouridine
  modified_base 1193: mod_base = OTHER; note = N1-methyl pseudouridine
  modified_base 1209: mod_base = OTHER; note = N1-methyl pseudouridine
  modified_base 1210: mod_base = OTHER; note = N1-methyl pseudouridine
  modified_base 1211: mod_base = OTHER; note = N1-methyl pseudouridine
  modified_base 1222: mod_base = OTHER; note = N1-methyl pseudouridine
  modified_base 1226: mod_base = OTHER; note = N1-methyl pseudouridine
  modified_base 1233: mod_base = OTHER; note = N1-methyl pseudouridine
  modified_base 1238: mod_base = OTHER; note = N1-methyl pseudouridine
  modified_base 1239: mod_base = OTHER; note = N1-methyl pseudouridine
  modified_base 1244: mod_base = OTHER; note = N1-methyl pseudouridine
  modified_base 1253: mod_base = OTHER; note = N1-methyl pseudouridine
  modified_base 1262: mod_base = OTHER; note = N1-methyl pseudouridine
  modified_base 1265: mod_base = OTHER; note = N1-methyl pseudouridine
  modified_base 1281: mod_base = OTHER; note = N1-methyl pseudouridine
  modified_base 1282: mod_base = OTHER; note = N1-methyl pseudouridine
  modified_base 1283: mod_base = OTHER; note = N1-methyl pseudouridine
  modified_base 1285: mod_base = OTHER; note = N1-methyl pseudouridine
  modified_base 1291: mod_base = OTHER; note = N1-methyl pseudouridine
  modified_base 1292: mod_base = OTHER; note = N1-methyl pseudouridine
  modified_base 1295: mod_base = OTHER; note = N1-methyl pseudouridine
  modified_base 1316: mod_base = OTHER; note = N1-methyl pseudouridine
  modified_base 1325: mod_base = OTHER; note = N1-methyl pseudouridine
  modified_base 1328: mod_base = OTHER; note = N1-methyl pseudouridine
  modified_base 1333: mod_base = OTHER; note = N1-methyl pseudouridine
  modified_base 1334: mod_base = OTHER; note = N1-methyl pseudouridine
  modified_base 1340: mod_base = OTHER; note = N1-methyl pseudouridine
  modified_base 1341: mod_base = OTHER; note = N1-methyl pseudouridine
  modified_base 1345: mod_base = OTHER; note = N1-methyl pseudouridine
  modified_base 1348: mod_base = OTHER; note = N1-methyl pseudouridine
  modified_base 1352: mod_base = OTHER; note = N1-methyl pseudouridine
  modified_base 1361: mod_base = OTHER; note = N1-methyl pseudouridine
  modified_base 1375: mod_base = OTHER; note = N1-methyl pseudouridine
  modified_base 1381: mod_base = OTHER; note = N1-methyl pseudouridine
  modified_base 1382: mod_base = OTHER; note = N1-methyl pseudouridine
  modified_base 1387: mod_base = OTHER; note = N1-methyl pseudouridine
  modified_base 1391: mod_base = OTHER; note = N1-methyl pseudouridine
  modified_base 1402: mod_base = OTHER; note = N1-methyl pseudouridine
  modified_base 1415: mod_base = OTHER; note = N1-methyl pseudouridine
  modified_base 1416: mod_base = OTHER; note = N1-methyl pseudouridine
  modified_base 1419: mod_base = OTHER; note = N1-methyl pseudouridine
  modified_base 1423: mod_base = OTHER; note = N1-methyl pseudouridine
  modified_base 1429: mod_base = OTHER; note = N1-methyl pseudouridine
  modified_base 1430: mod_base = OTHER; note = N1-methyl pseudouridine
  modified_base 1439: mod_base = OTHER; note = N1-methyl pseudouridine
  modified_base 1442: mod_base = OTHER; note = N1-methyl pseudouridine
  modified_base 1456: mod_base = OTHER; note = N1-methyl pseudouridine
  modified_base 1465: mod_base = OTHER; note = N1-methyl pseudouridine
  modified_base 1468: mod_base = OTHER; note = N1-methyl pseudouridine
  modified_base 1469: mod_base = OTHER; note = N1-methyl pseudouridine
  modified_base 1472: mod_base = OTHER; note = N1-methyl pseudouridine
  modified_base 1481: mod_base = OTHER; note = N1-methyl pseudouridine
  modified_base 1489: mod_base = OTHER; note = N1-methyl pseudouridine
  modified_base 1490: mod_base = OTHER; note = N1-methyl pseudouridine
  modified_base 1501: mod_base = OTHER; note = N1-methyl pseudouridine
  modified_base 1502: mod_base = OTHER; note = N1-methyl pseudouridine
  modified_base 1506: mod_base = OTHER; note = N1-methyl pseudouridine
  modified_base 1517: mod_base = OTHER; note = N1-methyl pseudouridine
  modified_base 1520: mod_base = OTHER; note = N1-methyl pseudouridine
  modified_base 1521: mod_base = OTHER; note = N1-methyl pseudouridine
  modified_base 1524: mod_base = OTHER; note = N1-methyl pseudouridine
  modified_base 1530: mod_base = OTHER; note = N1-methyl pseudouridine
  modified_base 1531: mod_base = OTHER; note = N1-methyl pseudouridine
  modified_base 1535: mod_base = OTHER; note = N1-methyl pseudouridine
  modified_base 1538: mod_base = OTHER; note = N1-methyl pseudouridine
  modified_base 1539: mod_base = OTHER; note = N1-methyl pseudouridine
  modified_base 1540: mod_base = OTHER; note = N1-methyl pseudouridine
  modified_base 1546: mod_base = OTHER; note = N1-methyl pseudouridine
  modified_base 1549: mod_base = OTHER; note = N1-methyl pseudouridine
  modified_base 1550: mod_base = OTHER; note = N1-methyl pseudouridine
  modified_base 1554: mod_base = OTHER; note = N1-methyl pseudouridine
  modified_base 1556: mod_base = OTHER; note = N1-methyl pseudouridine
  modified_base 1558: mod_base = OTHER; note = N1-methyl pseudouridine
  modified_base 1568: mod_base = OTHER; note = N1-methyl pseudouridine
  modified_base 1569: mod_base = OTHER; note = N1-methyl pseudouridine
  modified_base 1577: mod_base = OTHER; note = N1-methyl pseudouridine
  modified_base 1582: mod_base = OTHER; note = N1-methyl pseudouridine
  modified_base 1584: mod_base = OTHER; note = N1-methyl pseudouridine
  modified_base 1586: mod_base = OTHER; note = N1-methyl pseudouridine
  modified_base 1598: mod_base = OTHER; note = N1-methyl pseudouridine
  modified_base 1612: mod_base = OTHER; note = N1-methyl pseudouridine
  modified_base 1613: mod_base = OTHER; note = N1-methyl pseudouridine
  modified_base 1614: mod_base = OTHER; note = N1-methyl pseudouridine
  modified_base 1616: mod_base = OTHER; note = N1-methyl pseudouridine
  modified_base 1617: mod_base = OTHER; note = N1-methyl pseudouridine
  modified_base 1618: mod_base = OTHER; note = N1-methyl pseudouridine
  modified_base 1640: mod_base = OTHER; note = N1-methyl pseudouridine
  modified_base 1643: mod_base = OTHER; note = N1-methyl pseudouridine
  modified_base 1649: mod_base = OTHER; note = N1-methyl pseudouridine
  modified_base 1651: mod_base = OTHER; note = N1-methyl pseudouridine
  modified_base 1652: mod_base = OTHER; note = N1-methyl pseudouridine
  modified_base 1654: mod_base = OTHER; note = N1-methyl pseudouridine
  modified_base 1655: mod_base = OTHER; note = N1-methyl pseudouridine
  modified_base 1673: mod_base = OTHER; note = N1-methyl pseudouridine
  modified_base 1679: mod_base = OTHER; note = N1-methyl pseudouridine
  modified_base 1688: mod_base = OTHER; note = N1-methyl pseudouridine
  modified_base 1699: mod_base = OTHER; note = N1-methyl pseudouridine
  modified_base 1702: mod_base = OTHER; note = N1-methyl pseudouridine
  modified_base 1703: mod_base = OTHER; note = N1-methyl pseudouridine
  modified_base 1704: mod_base = OTHER; note = N1-methyl pseudouridine
  modified_base 1712: mod_base = OTHER; note = N1-methyl pseudouridine
  modified_base 1717: mod_base = OTHER; note = N1-methyl pseudouridine
  modified_base 1720: mod_base = OTHER; note = N1-methyl pseudouridine
  modified_base 1721: mod_base = OTHER; note = N1-methyl pseudouridine
  modified_base 1722: mod_base = OTHER; note = N1-methyl pseudouridine
  modified_base 1725: mod_base = OTHER; note = N1-methyl pseudouridine
  modified_base 1726: mod_base = OTHER; note = N1-methyl pseudouridine
  modified_base 1730: mod_base = OTHER; note = N1-methyl pseudouridine
  modified_base 1736: mod_base = OTHER; note = N1-methyl pseudouridine
  modified_base 1738: mod_base = OTHER; note = N1-methyl pseudouridine
  modified_base 1745: mod_base = OTHER; note = N1-methyl pseudouridine
  modified_base 1752: mod_base = OTHER; note = N1-methyl pseudouridine
  modified_base 1756: mod_base = OTHER; note = N1-methyl pseudouridine
  modified_base 1757: mod_base = OTHER; note = N1-methyl pseudouridine
  modified_base 1769: mod_base = OTHER; note = N1-methyl pseudouridine
  modified_base 1777: mod_base = OTHER; note = N1-methyl pseudouridine
  modified_base 1785: mod_base = OTHER; note = N1-methyl pseudouridine
  modified_base 1787: mod_base = OTHER; note = N1-methyl pseudouridine
  modified_base 1790: mod_base = OTHER; note = N1-methyl pseudouridine
  modified_base 1796: mod_base = OTHER; note = N1-methyl pseudouridine
  modified_base 1799: mod_base = OTHER; note = N1-methyl pseudouridine
  modified_base 1800: mod_base = OTHER; note = N1-methyl pseudouridine
  modified_base 1806: mod_base = OTHER; note = N1-methyl pseudouridine
  modified_base 1812: mod_base = OTHER; note = N1-methyl pseudouridine
  modified_base 1813: mod_base = OTHER; note = N1-methyl pseudouridine
  modified_base 1814: mod_base = OTHER; note = N1-methyl pseudouridine
  modified_base 1817: mod_base = OTHER; note = N1-methyl pseudouridine
  modified_base 1839: mod_base = OTHER; note = N1-methyl pseudouridine
  modified_base 1841: mod_base = OTHER; note = N1-methyl pseudouridine
  modified_base 1844: mod_base = OTHER; note = N1-methyl pseudouridine
  modified_base 1853: mod_base = OTHER; note = N1-methyl pseudouridine
  modified_base 1854: mod_base = OTHER; note = N1-methyl pseudouridine
  modified_base 1856: mod_base = OTHER; note = N1-methyl pseudouridine
  modified_base 1859: mod_base = OTHER; note = N1-methyl pseudouridine
  modified_base 1865: mod_base = OTHER; note = N1-methyl pseudouridine
  modified_base 1871: mod_base = OTHER; note = N1-methyl pseudouridine
  modified_base 1873: mod_base = OTHER; note = N1-methyl pseudouridine
  modified_base 1874: mod_base = OTHER; note = N1-methyl pseudouridine
  modified_base 1881: mod_base = OTHER; note = N1-methyl pseudouridine
  modified_base 1889: mod_base = OTHER; note = N1-methyl pseudouridine
  modified_base 1892: mod_base = OTHER; note = N1-methyl pseudouridine
  modified_base 1904: mod_base = OTHER; note = N1-methyl pseudouridine
  modified_base 1912: mod_base = OTHER; note = N1-methyl pseudouridine
  modified_base 1922: mod_base = OTHER; note = N1-methyl pseudouridine
  modified_base 1924: mod_base = OTHER; note = N1-methyl pseudouridine
  modified_base 1925: mod_base = OTHER; note = N1-methyl pseudouridine
  modified_base 1937: mod_base = OTHER; note = N1-methyl pseudouridine
  modified_base 1940: mod_base = OTHER; note = N1-methyl pseudouridine
  modified_base 1949: mod_base = OTHER; note = N1-methyl pseudouridine
  modified_base 1963: mod_base = OTHER; note = N1-methyl pseudouridine
  modified_base 1972: mod_base = OTHER; note = N1-methyl pseudouridine
  modified_base 1982: mod_base = OTHER; note = N1-methyl pseudouridine
  modified_base 1984: mod_base = OTHER; note = N1-methyl pseudouridine
  modified_base 1994: mod_base = OTHER; note = N1-methyl pseudouridine
  modified_base 1997: mod_base = OTHER; note = N1-methyl pseudouridine
  modified_base 2006: mod_base = OTHER; note = N1-methyl pseudouridine
  modified_base 2007: mod_base = OTHER; note = N1-methyl pseudouridine
  modified_base 2020: mod_base = OTHER; note = N1-methyl pseudouridine
  modified_base 2033: mod_base = OTHER; note = N1-methyl pseudouridine
  modified_base 2034: mod_base = OTHER; note = N1-methyl pseudouridine
  modified_base 2036: mod_base = OTHER; note = N1-methyl pseudouridine
  modified_base 2041: mod_base = OTHER; note = N1-methyl pseudouridine
  modified_base 2042: mod_base = OTHER; note = N1-methyl pseudouridine
  modified_base 2045: mod_base = OTHER; note = N1-methyl pseudouridine
  modified_base 2050: mod_base = OTHER; note = N1-methyl pseudouridine
  modified_base 2059: mod_base = OTHER; note = N1-methyl pseudouridine
  modified_base 2060: mod_base = OTHER; note = N1-methyl pseudouridine
  modified_base 2074: mod_base = OTHER; note = N1-methyl pseudouridine
  modified_base 2075: mod_base = OTHER; note = N1-methyl pseudouridine
  modified_base 2078: mod_base = OTHER; note = N1-methyl pseudouridine
  modified_base 2084: mod_base = OTHER; note = N1-methyl pseudouridine
  modified_base 2087: mod_base = OTHER; note = N1-methyl pseudouridine
  modified_base 2098: mod_base = OTHER; note = N1-methyl pseudouridine
  modified_base 2102: mod_base = OTHER; note = N1-methyl pseudouridine
  modified_base 2107: mod_base = OTHER; note = N1-methyl pseudouridine
  modified_base 2108: mod_base = OTHER; note = N1-methyl pseudouridine
  modified_base 2120: mod_base = OTHER; note = N1-methyl pseudouridine
  modified_base 2121: mod_base = OTHER; note = N1-methyl pseudouridine
  modified_base 2135: mod_base = OTHER; note = N1-methyl pseudouridine
  modified_base 2137: mod_base = OTHER; note = N1-methyl pseudouridine
  modified_base 2151: mod_base = OTHER; note = N1-methyl pseudouridine
  modified_base 2152: mod_base = OTHER; note = N1-methyl pseudouridine
  modified_base 2156: mod_base = OTHER; note = N1-methyl pseudouridine
  modified_base 2168: mod_base = OTHER; note = N1-methyl pseudouridine
  modified_base 2175: mod_base = OTHER; note = N1-methyl pseudouridine
  modified_base 2177: mod_base = OTHER; note = N1-methyl pseudouridine
  modified_base 2181: mod_base = OTHER; note = N1-methyl pseudouridine
  modified_base 2187: mod_base = OTHER; note = N1-methyl pseudouridine
  modified_base 2195: mod_base = OTHER; note = N1-methyl pseudouridine
  modified_base 2207: mod_base = OTHER; note = N1-methyl pseudouridine
  modified_base 2210: mod_base = OTHER; note = N1-methyl pseudouridine
  modified_base 2219: mod_base = OTHER; note = N1-methyl pseudouridine
  modified_base 2225: mod_base = OTHER; note = N1-methyl pseudouridine
  modified_base 2228: mod_base = OTHER; note = N1-methyl pseudouridine
  modified_base 2237: mod_base = OTHER; note = N1-methyl pseudouridine
  modified_base 2240: mod_base = OTHER; note = N1-methyl pseudouridine
  modified_base 2246: mod_base = OTHER; note = N1-methyl pseudouridine
  modified_base 2249: mod_base = OTHER; note = N1-methyl pseudouridine
  modified_base 2265: mod_base = OTHER; note = N1-methyl pseudouridine
  modified_base 2273: mod_base = OTHER; note = N1-methyl pseudouridine
  modified_base 2276: mod_base = OTHER; note = N1-methyl pseudouridine
  modified_base 2279: mod_base = OTHER; note = N1-methyl pseudouridine
  modified_base 2285: mod_base = OTHER; note = N1-methyl pseudouridine
  modified_base 2339: mod_base = OTHER; note = N1-methyl pseudouridine
  modified_base 2348: mod_base = OTHER; note = N1-methyl pseudouridine
  modified_base 2360: mod_base = OTHER; note = N1-methyl pseudouridine
  modified_base 2369: mod_base = OTHER; note = N1-methyl pseudouridine
  modified_base 2370: mod_base = OTHER; note = N1-methyl pseudouridine
  modified_base 2381: mod_base = OTHER; note = N1-methyl pseudouridine
  modified_base 2384: mod_base = OTHER; note = N1-methyl pseudouridine
  modified_base 2399: mod_base = OTHER; note = N1-methyl pseudouridine
  modified_base 2409: mod_base = OTHER; note = N1-methyl pseudouridine
  modified_base 2414: mod_base = OTHER; note = N1-methyl pseudouridine
  modified_base 2415: mod_base = OTHER; note = N1-methyl pseudouridine
  modified_base 2429: mod_base = OTHER; note = N1-methyl pseudouridine
  modified_base 2431: mod_base = OTHER; note = N1-methyl pseudouridine
  modified_base 2435: mod_base = OTHER; note = N1-methyl pseudouridine
  modified_base 2437: mod_base = OTHER; note = N1-methyl pseudouridine
  modified_base 2440: mod_base = OTHER; note = N1-methyl pseudouridine
  modified_base 2442: mod_base = OTHER; note = N1-methyl pseudouridine
  modified_base 2444: mod_base = OTHER; note = N1-methyl pseudouridine
  modified_base 2460: mod_base = OTHER; note = N1-methyl pseudouridine
  modified_base 2462: mod_base = OTHER; note = N1-methyl pseudouridine
  modified_base 2464: mod_base = OTHER; note = N1-methyl pseudouridine
  modified_base 2468: mod_base = OTHER; note = N1-methyl pseudouridine
  modified_base 2479: mod_base = OTHER; note = N1-methyl pseudouridine
  modified_base 2480: mod_base = OTHER; note = N1-methyl pseudouridine
  modified_base 2486: mod_base = OTHER; note = N1-methyl pseudouridine
  modified_base 2490: mod_base = OTHER; note = N1-methyl pseudouridine
  modified_base 2495: mod_base = OTHER; note = N1-methyl pseudouridine
  modified_base 2497: mod_base = OTHER; note = N1-methyl pseudouridine
  modified_base 2503: mod_base = OTHER; note = N1-methyl pseudouridine
  modified_base 2508: mod_base = OTHER; note = N1-methyl pseudouridine
  modified_base 2510: mod_base = OTHER; note = N1-methyl pseudouridine
  modified_base 2514: mod_base = OTHER; note = N1-methyl pseudouridine
  modified_base 2519: mod_base = OTHER; note = N1-methyl pseudouridine
  modified_base 2520: mod_base = OTHER; note = N1-methyl pseudouridine
  modified_base 2522: mod_base = OTHER; note = N1-methyl pseudouridine
  modified_base 2533: mod_base = OTHER; note = N1-methyl pseudouridine
  modified_base 2534: mod_base = OTHER; note = N1-methyl pseudouridine
  modified_base 2535: mod_base = OTHER; note = N1-methyl pseudouridine
  modified_base 2537: mod_base = OTHER; note = N1-methyl pseudouridine
  modified_base 2547: mod_base = OTHER; note = N1-methyl pseudouridine
  modified_base 2548: mod_base = OTHER; note = N1-methyl pseudouridine
  modified_base 2552: mod_base = OTHER; note = N1-methyl pseudouridine
  modified_base 2553: mod_base = OTHER; note = N1-methyl pseudouridine
  modified_base 2556: mod_base = OTHER; note = N1-methyl pseudouridine
  modified_base 2564: mod_base = OTHER; note = N1-methyl pseudouridine
  modified_base 2567: mod_base = OTHER; note = N1-methyl pseudouridine
  modified_base 2575: mod_base = OTHER; note = N1-methyl pseudouridine
  modified_base 2601: mod_base = OTHER; note = N1-methyl pseudouridine
  modified_base 2606: mod_base = OTHER; note = N1-methyl pseudouridine
  modified_base 2621: mod_base = OTHER; note = N1-methyl pseudouridine
  modified_base 2624: mod_base = OTHER; note = N1-methyl pseudouridine
  modified_base 2633: mod_base = OTHER; note = N1-methyl pseudouridine
  modified_base 2640: mod_base = OTHER; note = N1-methyl pseudouridine
  modified_base 2641: mod_base = OTHER; note = N1-methyl pseudouridine
  modified_base 2644: mod_base = OTHER; note = N1-methyl pseudouridine
  modified_base 2654: mod_base = OTHER; note = N1-methyl pseudouridine
  modified_base 2656: mod_base = OTHER; note = N1-methyl pseudouridine
  modified_base 2657: mod_base = OTHER; note = N1-methyl pseudouridine
  modified_base 2669: mod_base = OTHER; note = N1-methyl pseudouridine
  modified_base 2672: mod_base = OTHER; note = N1-methyl pseudouridine
  modified_base 2686: mod_base = OTHER; note = N1-methyl pseudouridine
  modified_base 2687: mod_base = OTHER; note = N1-methyl pseudouridine
  modified_base 2696: mod_base = OTHER; note = N1-methyl pseudouridine
  modified_base 2718: mod_base = OTHER; note = N1-methyl pseudouridine
  modified_base 2720: mod_base = OTHER; note = N1-methyl pseudouridine
  modified_base 2721: mod_base = OTHER; note = N1-methyl pseudouridine
  modified_base 2722: mod_base = OTHER; note = N1-methyl pseudouridine
  modified_base 2729: mod_base = OTHER; note = N1-methyl pseudouridine
  modified_base 2743: mod_base = OTHER; note = N1-methyl pseudouridine
  modified_base 2744: mod_base = OTHER; note = N1-methyl pseudouridine
  modified_base 2745: mod_base = OTHER; note = N1-methyl pseudouridine
  modified_base 2747: mod_base = OTHER; note = N1-methyl pseudouridine
  modified_base 2759: mod_base = OTHER; note = N1-methyl pseudouridine
  modified_base 2762: mod_base = OTHER; note = N1-methyl pseudouridine
  modified_base 2777: mod_base = OTHER; note = N1-methyl pseudouridine
  modified_base 2781: mod_base = OTHER; note = N1-methyl pseudouridine
  modified_base 2789: mod_base = OTHER; note = N1-methyl pseudouridine
  modified_base 2798: mod_base = OTHER; note = N1-methyl pseudouridine
  modified_base 2801: mod_base = OTHER; note = N1-methyl pseudouridine
  modified_base 2806: mod_base = OTHER; note = N1-methyl pseudouridine
  modified_base 2808: mod_base = OTHER; note = N1-methyl pseudouridine
  modified_base 2813: mod_base = OTHER; note = N1-methyl pseudouridine
  modified_base 2817: mod_base = OTHER; note = N1-methyl pseudouridine
  modified_base 2824: mod_base = OTHER; note = N1-methyl pseudouridine
  modified_base 2843: mod_base = OTHER; note = N1-methyl pseudouridine
  modified_base 2846: mod_base = OTHER; note = N1-methyl pseudouridine
  modified_base 2847: mod_base = OTHER; note = N1-methyl pseudouridine
  modified_base 2855: mod_base = OTHER; note = N1-methyl pseudouridine
  modified_base 2861: mod_base = OTHER; note = N1-methyl pseudouridine
  modified_base 2864: mod_base = OTHER; note = N1-methyl pseudouridine
  modified_base 2865: mod_base = OTHER; note = N1-methyl pseudouridine
  modified_base 2870: mod_base = OTHER; note = N1-methyl pseudouridine
  modified_base 2875: mod_base = OTHER; note = N1-methyl pseudouridine
  modified_base 2882: mod_base = OTHER; note = N1-methyl pseudouridine
  modified_base 2885: mod_base = OTHER; note = N1-methyl pseudouridine
  modified_base 2887: mod_base = OTHER; note = N1-methyl pseudouridine
  modified_base 2893: mod_base = OTHER; note = N1-methyl pseudouridine
  modified_base 2894: mod_base = OTHER; note = N1-methyl pseudouridine
  modified_base 2905: mod_base = OTHER; note = N1-methyl pseudouridine
  modified_base 2906: mod_base = OTHER; note = N1-methyl pseudouridine
  modified_base 2911: mod_base = OTHER; note = N1-methyl pseudouridine
  modified_base 2912: mod_base = OTHER; note = N1-methyl pseudouridine
  modified_base 2914: mod_base = OTHER; note = N1-methyl pseudouridine
  modified_base 2916: mod_base = OTHER; note = N1-methyl pseudouridine
  modified_base 2921: mod_base = OTHER; note = N1-methyl pseudouridine
  modified_base 2922: mod_base = OTHER; note = N1-methyl pseudouridine
  modified_base 2930: mod_base = OTHER; note = N1-methyl pseudouridine
  modified_base 2938: mod_base = OTHER; note = N1-methyl pseudouridine
  modified_base 2952: mod_base = OTHER; note = N1-methyl pseudouridine
  modified_base 2959: mod_base = OTHER; note = N1-methyl pseudouridine
  modified_base 2963: mod_base = OTHER; note = N1-methyl pseudouridine
  modified_base 2972: mod_base = OTHER; note = N1-methyl pseudouridine
  modified_base 2975: mod_base = OTHER; note = N1-methyl pseudouridine
  modified_base 2979: mod_base = OTHER; note = N1-methyl pseudouridine
  modified_base 2987: mod_base = OTHER; note = N1-methyl pseudouridine
  modified_base 2990: mod_base = OTHER; note = N1-methyl pseudouridine
  modified_base 2991: mod_base = OTHER; note = N1-methyl pseudouridine
  modified_base 2998: mod_base = OTHER; note = N1-methyl pseudouridine
  modified_base 3003: mod_base = OTHER; note = N1-methyl pseudouridine
  modified_base 3008: mod_base = OTHER; note = N1-methyl pseudouridine
  modified_base 3013: mod_base = OTHER; note = N1-methyl pseudouridine
  modified_base 3019: mod_base = OTHER; note = N1-methyl pseudouridine
  modified_base 3020: mod_base = OTHER; note = N1-methyl pseudouridine
  modified_base 3023: mod_base = OTHER; note = N1-methyl pseudouridine
  modified_base 3025: mod_base = OTHER; note = N1-methyl pseudouridine
  modified_base 3034: mod_base = OTHER; note = N1-methyl pseudouridine
  modified_base 3041: mod_base = OTHER; note = N1-methyl pseudouridine
  modified_base 3043: mod_base = OTHER; note = N1-methyl pseudouridine
  modified_base 3050: mod_base = OTHER; note = N1-methyl pseudouridine
  modified_base 3059: mod_base = OTHER; note = N1-methyl pseudouridine
  modified_base 3062: mod_base = OTHER; note = N1-methyl pseudouridine
  modified_base 3070: mod_base = OTHER; note = N1-methyl pseudouridine
  modified_base 3083: mod_base = OTHER; note = N1-methyl pseudouridine
  modified_base 3103: mod_base = OTHER; note = N1-methyl pseudouridine
  modified_base 3106: mod_base = OTHER; note = N1-methyl pseudouridine
  modified_base 3107: mod_base = OTHER; note = N1-methyl pseudouridine
  modified_base 3109: mod_base = OTHER; note = N1-methyl pseudouridine
  modified_base 3110: mod_base = OTHER; note = N1-methyl pseudouridine
  modified_base 3112: mod_base = OTHER; note = N1-methyl pseudouridine
  modified_base 3115: mod_base = OTHER; note = N1-methyl pseudouridine
  modified_base 3122: mod_base = OTHER; note = N1-methyl pseudouridine
  modified_base 3125: mod_base = OTHER; note = N1-methyl pseudouridine
  modified_base 3130: mod_base = OTHER; note = N1-methyl pseudouridine
  modified_base 3131: mod_base = OTHER; note = N1-methyl pseudouridine
  modified_base 3133: mod_base = OTHER; note = N1-methyl pseudouridine
  modified_base 3134: mod_base = OTHER; note = N1-methyl pseudouridine
  modified_base 3146: mod_base = OTHER; note = N1-methyl pseudouridine
  modified_base 3152: mod_base = OTHER; note = N1-methyl pseudouridine
  modified_base 3153: mod_base = OTHER; note = N1-methyl pseudouridine
  modified_base 3167: mod_base = OTHER; note = N1-methyl pseudouridine
  modified_base 3168: mod_base = OTHER; note = N1-methyl pseudouridine
  modified_base 3181: mod_base = OTHER; note = N1-methyl pseudouridine
  modified_base 3182: mod_base = OTHER; note = N1-methyl pseudouridine
  modified_base 3185: mod_base = OTHER; note = N1-methyl pseudouridine
  modified_base 3186: mod_base = OTHER; note = N1-methyl pseudouridine
  modified_base 3192: mod_base = OTHER; note = N1-methyl pseudouridine
  modified_base 3212: mod_base = OTHER; note = N1-methyl pseudouridine
  modified_base 3213: mod_base = OTHER; note = N1-methyl pseudouridine
  modified_base 3215: mod_base = OTHER; note = N1-methyl pseudouridine
  modified_base 3217: mod_base = OTHER; note = N1-methyl pseudouridine
  modified_base 3222: mod_base = OTHER; note = N1-methyl pseudouridine
  modified_base 3235: mod_base = OTHER; note = N1-methyl pseudouridine
  modified_base 3236: mod_base = OTHER; note = N1-methyl pseudouridine
  modified_base 3237: mod_base = OTHER; note = N1-methyl pseudouridine
  modified_base 3243: mod_base = OTHER; note = N1-methyl pseudouridine
  modified_base 3245: mod_base = OTHER; note = N1-methyl pseudouridine
  modified_base 3254: mod_base = OTHER; note = N1-methyl pseudouridine
  modified_base 3256: mod_base = OTHER; note = N1-methyl pseudouridine
  modified_base 3257: mod_base = OTHER; note = N1-methyl pseudouridine
  modified_base 3259: mod_base = OTHER; note = N1-methyl pseudouridine
  modified_base 3263: mod_base = OTHER; note = N1-methyl pseudouridine
  modified_base 3272: mod_base = OTHER; note = N1-methyl pseudouridine
  modified_base 3278: mod_base = OTHER; note = N1-methyl pseudouridine
  modified_base 3279: mod_base = OTHER; note = N1-methyl pseudouridine
  modified_base 3281: mod_base = OTHER; note = N1-methyl pseudouridine
  modified_base 3296: mod_base = OTHER; note = N1-methyl pseudouridine
  modified_base 3310: mod_base = OTHER; note = N1-methyl pseudouridine
  modified_base 3311: mod_base = OTHER; note = N1-methyl pseudouridine
  modified_base 3326: mod_base = OTHER; note = N1-methyl pseudouridine
  modified_base 3329: mod_base = OTHER; note = N1-methyl pseudouridine
  modified_base 3342: mod_base = OTHER; note = N1-methyl pseudouridine
  modified_base 3343: mod_base = OTHER; note = N1-methyl pseudouridine
  modified_base 3353: mod_base = OTHER; note = N1-methyl pseudouridine
  modified_base 3356: mod_base = OTHER; note = N1-methyl pseudouridine
  modified_base 3373: mod_base = OTHER; note = N1-methyl pseudouridine
  modified_base 3388: mod_base = OTHER; note = N1-methyl pseudouridine
  modified_base 3390: mod_base = OTHER; note = N1-methyl pseudouridine
  modified_base 3397: mod_base = OTHER; note = N1-methyl pseudouridine
  modified_base 3398: mod_base = OTHER; note = N1-methyl pseudouridine
  modified_base 3403: mod_base = OTHER; note = N1-methyl pseudouridine
  modified_base 3411: mod_base = OTHER; note = N1-methyl pseudouridine
  modified_base 3413: mod_base = OTHER; note = N1-methyl pseudouridine
  modified_base 3418: mod_base = OTHER; note = N1-methyl pseudouridine
  modified_base 3421: mod_base = OTHER; note = N1-methyl pseudouridine
  modified_base 3425: mod_base = OTHER; note = N1-methyl pseudouridine
  modified_base 3428: mod_base = OTHER; note = N1-methyl pseudouridine
  modified_base 3431: mod_base = OTHER; note = N1-methyl pseudouridine
  modified_base 3434: mod_base = OTHER; note = N1-methyl pseudouridine
  modified_base 3443: mod_base = OTHER; note = N1-methyl pseudouridine
  modified_base 3457: mod_base = OTHER; note = N1-methyl pseudouridine
  modified_base 3467: mod_base = OTHER; note = N1-methyl pseudouridine
  modified_base 3472: mod_base = OTHER; note = N1-methyl pseudouridine
  modified_base 3476: mod_base = OTHER; note = N1-methyl pseudouridine
  modified_base 3485: mod_base = OTHER; note = N1-methyl pseudouridine
  modified_base 3488: mod_base = OTHER; note = N1-methyl pseudouridine
  modified_base 3494: mod_base = OTHER; note = N1-methyl pseudouridine
  modified_base 3500: mod_base = OTHER; note = N1-methyl pseudouridine
  modified_base 3501: mod_base = OTHER; note = N1-methyl pseudouridine
  modified_base 3503: mod_base = OTHER; note = N1-methyl pseudouridine
  modified_base 3511: mod_base = OTHER; note = N1-methyl pseudouridine
  modified_base 3517: mod_base = OTHER; note = N1-methyl pseudouridine
  modified_base 3518: mod_base = OTHER; note = N1-methyl pseudouridine
  modified_base 3533: mod_base = OTHER; note = N1-methyl pseudouridine
  modified_base 3534: mod_base = OTHER; note = N1-methyl pseudouridine
  modified_base 3538: mod_base = OTHER; note = N1-methyl pseudouridine
  modified_base 3539: mod_base = OTHER; note = N1-methyl pseudouridine
  modified_base 3542: mod_base = OTHER; note = N1-methyl pseudouridine
  modified_base 3555: mod_base = OTHER; note = N1-methyl pseudouridine
  modified_base 3556: mod_base = OTHER; note = N1-methyl pseudouridine
  modified_base 3566: mod_base = OTHER; note = N1-methyl pseudouridine
  modified_base 3576: mod_base = OTHER; note = N1-methyl pseudouridine
  modified_base 3578: mod_base = OTHER; note = N1-methyl pseudouridine
  modified_base 3581: mod_base = OTHER; note = N1-methyl pseudouridine
  modified_base 3582: mod_base = OTHER; note = N1-methyl pseudouridine
  modified_base 3584: mod_base = OTHER; note = N1-methyl pseudouridine
  modified_base 3585: mod_base = OTHER; note = N1-methyl pseudouridine
  modified_base 3590: mod_base = OTHER; note = N1-methyl pseudouridine
  modified_base 3598: mod_base = OTHER; note = N1-methyl pseudouridine
  modified_base 3600: mod_base = OTHER; note = N1-methyl pseudouridine
  modified_base 3601: mod_base = OTHER; note = N1-methyl pseudouridine
  modified_base 3605: mod_base = OTHER; note = N1-methyl pseudouridine
  modified_base 3607: mod_base = OTHER; note = N1-methyl pseudouridine
  modified_base 3608: mod_base = OTHER; note = N1-methyl pseudouridine
  modified_base 3614: mod_base = OTHER; note = N1-methyl pseudouridine
  modified_base 3621: mod_base = OTHER; note = N1-methyl pseudouridine
  modified_base 3635: mod_base = OTHER; note = N1-methyl pseudouridine
  modified_base 3637: mod_base = OTHER; note = N1-methyl pseudouridine
  modified_base 3638: mod_base = OTHER; note = N1-methyl pseudouridine
  modified_base 3643: mod_base = OTHER; note = N1-methyl pseudouridine
  modified_base 3656: mod_base = OTHER; note = N1-methyl pseudouridine
  modified_base 3674: mod_base = OTHER; note = N1-methyl pseudouridine
  modified_base 3679: mod_base = OTHER; note = N1-methyl pseudouridine
  modified_base 3680: mod_base = OTHER; note = N1-methyl pseudouridine
  modified_base 3684: mod_base = OTHER; note = N1-methyl pseudouridine
  modified_base 3685: mod_base = OTHER; note = N1-methyl pseudouridine
  modified_base 3691: mod_base = OTHER; note = N1-methyl pseudouridine
  modified_base 3695: mod_base = OTHER; note = N1-methyl pseudouridine
  modified_base 3700: mod_base = OTHER; note = N1-methyl pseudouridine
  modified_base 3701: mod_base = OTHER; note = N1-methyl pseudouridine
  modified_base 3702: mod_base = OTHER; note = N1-methyl pseudouridine
  modified_base 3704: mod_base = OTHER; note = N1-methyl pseudouridine
  modified_base 3706: mod_base = OTHER; note = N1-methyl pseudouridine
  modified_base 3710: mod_base = OTHER; note = N1-methyl pseudouridine
  modified_base 3721: mod_base = OTHER; note = N1-methyl pseudouridine
  modified_base 3731: mod_base = OTHER; note = N1-methyl pseudouridine
  modified_base 3738: mod_base = OTHER; note = N1-methyl pseudouridine
  modified_base 3739: mod_base = OTHER; note = N1-methyl pseudouridine
  modified_base 3767: mod_base = OTHER; note = N1-methyl pseudouridine
  modified_base 3769: mod_base = OTHER; note = N1-methyl pseudouridine
  modified_base 3770: mod_base = OTHER; note = N1-methyl pseudouridine
  modified_base 3773: mod_base = OTHER; note = N1-methyl pseudouridine
  modified_base 3790: mod_base = OTHER; note = N1-methyl pseudouridine
  modified_base 3794: mod_base = OTHER; note = N1-methyl pseudouridine
  modified_base 3798: mod_base = OTHER; note = N1-methyl pseudouridine
  modified_base 3803: mod_base = OTHER; note = N1-methyl pseudouridine
  modified_base 3806: mod_base = OTHER; note = N1-methyl pseudouridine
  modified_base 3815: mod_base = OTHER; note = N1-methyl pseudouridine
  modified_base 3817: mod_base = OTHER; note = N1-methyl pseudouridine
  modified_base 3823: mod_base = OTHER; note = N1-methyl pseudouridine
  modified_base 3824: mod_base = OTHER; note = N1-methyl pseudouridine
  modified_base 3826: mod_base = OTHER; note = N1-methyl pseudouridine
  modified_base 3836: mod_base = OTHER; note = N1-methyl pseudouridine
  modified_base 3839: mod_base = OTHER; note = N1-methyl pseudouridine
  modified_base 3842: mod_base = OTHER; note = N1-methyl pseudouridine
  modified_base 3857: mod_base = OTHER; note = N1-methyl pseudouridine
  modified_base 3861: mod_base = OTHER; note = N1-methyl pseudouridine
  modified_base 3866: mod_base = OTHER; note = N1-methyl pseudouridine
  modified_base 3869: mod_base = OTHER; note = N1-methyl pseudouridine
  modified_base 3871: mod_base = OTHER; note = N1-methyl pseudouridine
  modified_base 3877: mod_base = OTHER; note = N1-methyl pseudouridine
  modified_base 3902: mod_base = OTHER; note = N1-methyl pseudouridine
  modified_base 3915: mod_base = OTHER; note = N1-methyl pseudouridine
  modified_base 3923: mod_base = OTHER; note = N1-methyl pseudouridine
  modified_base 3924: mod_base = OTHER; note = N1-methyl pseudouridine
  modified_base 3926: mod_base = OTHER; note = N1-methyl pseudouridine
  modified_base 3932: mod_base = OTHER; note = N1-methyl pseudouridine
  modified_base 3934: mod_base = OTHER; note = N1-methyl pseudouridine
  modified_base 3935: mod_base = OTHER; note = N1-methyl pseudouridine
  modified_base 3941: mod_base = OTHER; note = N1-methyl pseudouridine
  modified_base 3945: mod_base = OTHER; note = N1-methyl pseudouridine
  modified_base 3950: mod_base = OTHER; note = N1-methyl pseudouridine
  modified_base 3951: mod_base = OTHER; note = N1-methyl pseudouridine
  modified_base 3960: mod_base = OTHER; note = N1-methyl pseudouridine
  modified_base 3967: mod_base = OTHER; note = N1-methyl pseudouridine
  modified_base 3968: mod_base = OTHER; note = N1-methyl pseudouridine
  modified_base 3973: mod_base = OTHER; note = N1-methyl pseudouridine
  modified_base 3976: mod_base = OTHER; note = N1-methyl pseudouridine
  modified_base 3977: mod_base = OTHER; note = N1-methyl pseudouridine
  modified_base 3989: mod_base = OTHER; note = N1-methyl pseudouridine
  modified_base 4003: mod_base = OTHER; note = N1-methyl pseudouridine
  modified_base 4008: mod_base = OTHER; note = N1-methyl pseudouridine
  modified_base 4009: mod_base = OTHER; note = N1-methyl pseudouridine
  modified_base 4022: mod_base = OTHER; note = N1-methyl pseudouridine
  modified_base 4025: mod_base = OTHER; note = N1-methyl pseudouridine
  modified_base 4037: mod_base = OTHER; note = N1-methyl pseudouridine
  modified_base 4040: mod_base = OTHER; note = N1-methyl pseudouridine
  modified_base 4048: mod_base = OTHER; note = N1-methyl pseudouridine
  modified_base 4052: mod_base = OTHER; note = N1-methyl pseudouridine
  modified_base 4056: mod_base = OTHER; note = N1-methyl pseudouridine
  modified_base 4061: mod_base = OTHER; note = N1-methyl pseudouridine
  modified_base 4063: mod_base = OTHER; note = N1-methyl pseudouridine
  modified_base 4065: mod_base = OTHER; note = N1-methyl pseudouridine
  modified_base 4071: mod_base = OTHER; note = N1-methyl pseudouridine
  modified_base 4076: mod_base = OTHER; note = N1-methyl pseudouridine
  modified_base 4077: mod_base = OTHER; note = N1-methyl pseudouridine
  modified_base 4082: mod_base = OTHER; note = N1-methyl pseudouridine
  modified_base 4084: mod_base = OTHER; note = N1-methyl pseudouridine
  modified_base 4090: mod_base = OTHER; note = N1-methyl pseudouridine
  modified_base 4091: mod_base = OTHER; note = N1-methyl pseudouridine
gataagaagtacagcatcgggcttgccatcggaaccaactcggtcggctgggctgtgatcactgacgagtacaaggtcccttccaaaaagttcaaagtgctcggcaacactgatcggcactcgattaagaagaacctgatcggtgcactgctgttcgactctggggagactgcggaagcaactcgcctgaagaggactgcgcgcagacggtacaccaggcgcaagaaccggatctgctacttgcaagagattttcagcaacgagatggccaaggtcgacgactcgtttttccaccggctcgaggaaagcttcctggtggaggaagataagaagcatgagcgccatcccatcttcggaaacatcgtggacgaagtggcctaccatgagaagtacccgaccatctaccatctgcgcaagaagctcgtggacagcactgacaaagccgacttgcgcctgatctaccttgccctggcccacatgatcaagttcagagggcacttcctgatcgagggcgacctgaacccggacaattccgacgtggataagctgttcatccaactggtacaaacttacaaccagctgtttgaggagaacccgatcaacgcttccggcgtggacgcgaaggccattctgagcgcacggctgtccaagtcccggagattagaaaacctgattgcccaactgcctggagaaaagaagaatggcctgttcggaaacctgatcgccctctcgctcggtctgacccccaactttaagagcaacttcgacctggctgaggacgcgaagctccagctgtccaaggacacctacgatgatgacctcgataatctcctcgcccaaatcggcgaccaatatgcggacctgtttctggccgccaagaatctgtccgacgccatcctcctgagcgatatcctgcgcgtgaacactgaaatcaccaaggccccactgagcgctagcatgattaagcgctacgacgaacaccatcaggacctcaccctgctgaaggctcttgtgcggcagcagctcccagagaagtacaaggagatcttcttcgaccaatcgaagaatggttacgccggctacattgacggaggagcgtcacaggaggagttctacaagttcattaagccaatcctggagaagatggacggaaccgaggaactgctcgtgaagctgaacagagaagatctactgcgcaagcagcgcactttcgacaacggatcgatcccacatcagattcacctgggagagctgcacgcgatcctgcggagacaggaagatttctacccgttcctgaaggacaaccgcgagaagatcgaaaagatcctgaccttccgcattccgtactacgtgggacccctcgcaagaggaaactcgcggttcgcctggatgaccaggaagtcggaagaaaccattactccgtggaacttcgaggaagtggtggacaagggcgcctcagcgcaatccttcatcgaacggatgaccaacttcgacaagaacttgcctaacgagaaagtgcttcctaagcattccctcctttacgaatacttcactgtgtacaacgagcttaccaaggtcaaatatgtgaccgagggcatgcgcaagccggcctttctttccggggagcaaaagaaggccatcgtggacctgttgttcaagaccaaccggaaggtcaccgtcaagcagctgaaggaggactactttaagaaaatcgagtgctttgattccgtcgaaatctccggagtggaagatagattcaacgccagcctaggcacctaccacgatctgctcaagatcattaaggataaggatttcctggacaacgaggagaacgaggatatcctggaggacattgtgctgaccctgacactgttcgaagatcgcgaaatgatcgaggagcggctgaaaacatacgcccacctgttcgacgacaaggtcatgaagcagctcaagcggaggaggtacacgggatggggaaggctgtcccggaagctgatcaacgggattagagacaagcagtccggaaagaccattctggacttcctcaagtcggacggcttcgcgaaccggaacttcatgcaactgatccacgacgactccctgacgttcaaggaggacattcagaaggcccaagtgtccggacagggagattcactgcacgaacacatcgccaatctggctggaagtccggccatcaagaaaggcatcctgcaaaccgtgaaggtcgtggacgagctcgtgaaggtcatgggccgccacaagcctgagaacatcgtgatcgaaatggcccgggagaaccagaccacgcagaaagggcagaagaacagccgcgagaggatgaagagaatcgaggaaggaatcaaggaacttggaagccagatcctgaaggaacaccccgtggaaaacactcagcttcaaaacgaaaagctgtacctctactatctgcaaaacggacgggatatgtacgtggaccaggaattggacatcaatcgcctgtccgactacgatgtggatcacattgtgccgcagagctttctgaaggacgattcaattgataacaaggtgctcacccggtccgacaagaaccggggcaaaagcgataacgtgccgagcgaagaggtggtcaagaagatgaagaattactggcggcagctcttgaacgccaaactgatcacccagcggaagttcgacaacctgaccaaggccgaaaggggcggtctttccgaactggacaaggccgggtttatcaagcgccaactggtggaaacccggcagatcactaagcacgtggcccagatactggactctaggatgaataccaaatacgacgagaacgacaagctgattcgcgaagtcaaagtcattaccctgaaatccaagctcgtgtccgacttccggaaggacttccagttctataaggttcgcgaaatcaacaactaccaccacgcccatgacgcgtacctgaacgccgtcgtgggtaccgccctgattaagaagtaccctaagctcgagtccgagttcgtctacggagactacaaagtgtacgacgtgcggaagatgatcgccaagtccgagcaggaaatagggaaggccaccgccaagtacttcttctactccaacatcatgaacttcttcaagaccgagatcacccttgccaacggggagattcggaagcgcccgttgattgagactaacggagaaaccggcgaaattgtgtgggataagggcagagactttgcgactgtgcgcaaagtcttgtcaatgccccaagtcaacattgtcaaaaagaccgaagtgcaaaccggcggcttcagcaaggaaagcatcctgcccaagcgcaattccgacaagctcatcgcccggaagaaggactgggaccccaagaaatatggaggcttcgactcccccactgtggcctactccgtcctggtggtcgcgaaagtggaaaagggaaagtcgaagaagctcaagtccgtgaaggagctcctggggatcaccattatggaacggtccagcttcgagaagaacccgattgacttcctggaagccaagggttacaaggaggtcaagaaggatctgattattaagctgccgaagtattccctcttcgaactcgaaaatggccgcaagcgaatgttggcatcggcgggagagctccagaagggaaacgaactggccttgccttccaaatacgtgaactttctgtacctggccagccactacgagaagctgaagggttcccccgaggacaacgagcagaagcagctgttcgtggagcagcacaagcactacctggatgagatcatcgaacagatctcggaattctccaagagagtgatcctggccgacgcgaacctggataaggtcctgtccgcgtacaacaagcaccgggacaagcccatccgggagcaggctgagaacattatccacctgttcaccctcactaaccttggagcgcctgccgcattcaagtacttcgacacaaccatcgacagaaagcgctacacttccaccaaggaggtgctggacgccaccctgatccaccagtccatcactgggctctatgagactcgcattgacctgtcccagttgggaggggac

SEQ ID NO: 2165 - protein, 1367 aa, synthetic construct; identical to SEQ ID NO: 40

SEQ ID NO: 2166 - RNA, 12 nt, synthetic construct
  source 1..12: mol_type = other RNA
  modified_base 12: mod_base = OTHER; note = N1-methyl pseudouridine
gaaggagccgat

SEQ ID NO: 2167 - RNA, 57 nt, synthetic construct
  source 1..57: mol_type = other RNA
  modified_base 15: mod_base = OTHER; note = N1-methyl pseudouridine
  modified_base 19: mod_base = OTHER; note = N1-methyl pseudouridine
  modified_base 25: mod_base = OTHER; note = N1-methyl pseudouridine
  modified_base 26: mod_base = OTHER; note = N1-methyl pseudouridine
  modified_base 31: mod_base = OTHER; note = N1-methyl pseudouridine
  modified_base 53: mod_base = OTHER; note = N1-methyl pseudouridine
  modified_base 55: mod_base = OTHER; note = N1-methyl pseudouridine
aagagaaccgccgatgggtccgaattcgagtcgcccaagaagaagcggaaagtgtaa

SEQ ID NO: 2168 - RNA, 4929 nt, synthetic construct
  source 1..4929: mol_type = other RNA
  modified_base 7: mod_base = OTHER; note = N1-methyl pseudouridine
  modified_base 25: mod_base = OTHER; note = N1-methyl pseudouridine
  modified_base 35: mod_base = OTHER; note = N1-methyl pseudouridine
  modified_base 37: mod_base = OTHER; note = N1-methyl pseudouridine
  modified_base 49: mod_base = OTHER; note = N1-methyl pseudouridine
  modified_base 51: mod_base = OTHER; note = N1-methyl pseudouridine
  modified_base 58: mod_base = OTHER; note = N1-methyl pseudouridine
  modified_base 63: mod_base = OTHER; note = N1-methyl pseudouridine
  modified_base 64: mod_base = OTHER; note = N1-methyl pseudouridine
  modified_base 66: mod_base = OTHER; note = N1-methyl pseudouridine
  modified_base 75: mod_base = OTHER; note = N1-methyl pseudouridine
  modified_base 77: mod_base = OTHER; note = N1-methyl pseudouridine
  modified_base 78: mod_base = OTHER; note = N1-methyl pseudouridine
  modified_base 82: mod_base = OTHER; note = N1-methyl pseudouridine
  modified_base 92: mod_base = OTHER; note = N1-methyl pseudouridine
  modified_base 94: mod_base = OTHER; note = N1-methyl pseudouridine
  modified_base 100: mod_base = OTHER; note = N1-methyl pseudouridine
  modified_base 113: mod_base = OTHER; note = N1-methyl pseudouridine
  modified_base 119: mod_base = OTHER; note = N1-methyl pseudouridine
  modified_base 130: mod_base = OTHER; note = N1-methyl pseudouridine
  modified_base 136: mod_base = OTHER; note = N1-methyl pseudouridine
  modified_base 145: mod_base = OTHER; note = N1-methyl pseudouridine
  modified_base 148: mod_base = OTHER; note = N1-methyl pseudouridine
  modified_base 151: mod_base = OTHER; note = N1-methyl pseudouridine
  modified_base 154: mod_base = OTHER; note = N1-methyl pseudouridine
  modified_base 161: mod_base = OTHER; note = N1-methyl pseudouridine
  modified_base 166: mod_base = OTHER; note = N1-methyl pseudouridine
  modified_base 169: mod_base = OTHER; note = N1-methyl pseudouridine
  modified_base 180: mod_base = OTHER; note = N1-methyl pseudouridine
  modified_base 185: mod_base = OTHER; note = N1-methyl pseudouridine
  modified_base 193: mod_base = OTHER; note = N1-methyl pseudouridine
  modified_base 194: mod_base = OTHER; note = N1-methyl pseudouridine
  modified_base 199: mod_base = OTHER; note = N1-methyl pseudouridine
  modified_base 203: mod_base = OTHER; note = N1-methyl pseudouridine
  modified_base 206: mod_base = OTHER; note = N1-methyl pseudouridine
  modified_base 212: mod_base = OTHER; note = N1-methyl pseudouridine
  modified_base 226: mod_base = OTHER; note = N1-methyl pseudouridine
  modified_base 227: mod_base = OTHER; note = N1-methyl pseudouridine
  modified_base 229: mod_base = OTHER; note = N1-methyl pseudouridine
  modified_base 233: mod_base = OTHER; note = N1-methyl pseudouridine
  modified_base 235: mod_base = OTHER; note = N1-methyl pseudouridine
  modified_base 236: mod_base = OTHER; note = N1-methyl pseudouridine
  modified_base 250: mod_base = OTHER; note = N1-methyl pseudouridine
  modified_base 253: mod_base = OTHER; note = N1-methyl pseudouridine
  modified_base 256: mod_base = OTHER; note = N1-methyl pseudouridine
  modified_base 263: mod_base = OTHER; note = N1-methyl pseudouridine
  modified_base 264: mod_base = OTHER; note = N1-methyl pseudouridine
  modified_base 271: mod_base = OTHER; note = N1-methyl pseudouridine
  modified_base 274: mod_base = OTHER; note = N1-methyl pseudouridine
  modified_base 275: mod_base = OTHER; note = N1-methyl pseudouridine
  modified_base 286: mod_base = OTHER; note = N1-methyl pseudouridine
  modified_base 287: mod_base = OTHER; note = N1-methyl pseudouridine
  modified_base 288: mod_base = OTHER; note = N1-methyl pseudouridine
  modified_base 292: mod_base = OTHER; note = N1-methyl pseudouridine
  modified_base 297: mod_base = OTHER; note = N1-methyl pseudouridine
  modified_base 298: mod_base = OTHER; note = N1-methyl pseudouridine
  modified_base 299: mod_base = OTHER; note = N1-methyl pseudouridine
  modified_base 306: mod_base = OTHER; note = N1-methyl pseudouridine
  modified_base 310: mod_base = OTHER; note = N1-methyl pseudouridine
  modified_base 311: mod_base = OTHER; note = N1-methyl pseudouridine
  modified_base 313: mod_base = OTHER; note = N1-methyl pseudouridine
  modified_base 315: mod_base = OTHER; note = N1-methyl pseudouridine
  modified_base 328: mod_base = OTHER; note = N1-methyl pseudouridine
  modified_base 331: mod_base = OTHER; note = N1-methyl pseudouridine
  modified_base 336: mod_base = OTHER; note = N1-methyl pseudouridine
  modified_base 338: mod_base = OTHER; note = N1-methyl pseudouridine
  modified_base 343: mod_base = OTHER; note = N1-methyl pseudouridine
  modified_base 352: mod_base = OTHER; note = N1-methyl pseudouridine
  modified_base 355: mod_base = OTHER; note = N1-methyl pseudouridine
  modified_base 356: mod_base = OTHER; note = N1-methyl pseudouridine
  modified_base 357: mod_base = OTHER; note = N1-methyl pseudouridine
  modified_base 358: mod_base = OTHER; note = N1-methyl pseudouridine
  modified_base 364: mod_base = OTHER; note = N1-methyl pseudouridine
  modified_base 371: mod_base = OTHER; note = N1-methyl pseudouridine
  modified_base 380: mod_base = OTHER; note = N1-methyl pseudouridine
  modified_base 393: mod_base = OTHER; note = N1-methyl pseudouridine
  modified_base 395: mod_base = OTHER; note = N1-methyl pseudouridine
  modified_base 397: mod_base = OTHER; note = N1-methyl pseudouridine
  modified_base 400: mod_base = OTHER; note = N1-methyl pseudouridine
  modified_base 406: mod_base = OTHER; note = N1-methyl pseudouridine
  modified_base 409: mod_base = OTHER; note = N1-methyl pseudouridine
  modified_base 416: mod_base = OTHER; note = N1-methyl pseudouridine
  modified_base 424: mod_base = OTHER; note = N1-methyl pseudouridine
  modified_base 436: mod_base = OTHER; note = N1-methyl pseudouridine
  modified_base 442: mod_base = OTHER; note = N1-methyl pseudouridine
  modified_base 454: mod_base = OTHER; note = N1-methyl pseudouridine
  modified_base 456: mod_base = OTHER; note = N1-methyl pseudouridine
  modified_base 457: mod_base = OTHER; note = N1-methyl pseudouridine
  modified_base 468: mod_base = OTHER; note = N1-methyl pseudouridine
  modified_base 470: mod_base = OTHER; note = N1-methyl pseudouridine
  modified_base 473: mod_base = OTHER; note = N1-methyl pseudouridine
  modified_base 478: mod_base = OTHER; note = N1-methyl pseudouridine
  modified_base 481: mod_base = OTHER; note = N1-methyl pseudouridine
  modified_base 482: mod_base = OTHER; note = N1-methyl pseudouridine
  modified_base 483: mod_base = OTHER; note = N1-methyl pseudouridine
  modified_base 489: mod_base = OTHER; note = N1-methyl pseudouridine
  modified_base 490: mod_base = OTHER; note = N1-methyl pseudouridine
  modified_base 492: mod_base = OTHER; note = N1-methyl pseudouridine
  modified_base 493: mod_base = OTHER; note = N1-methyl pseudouridine
  modified_base 499: mod_base = OTHER; note = N1-methyl pseudouridine
  modified_base 511: mod_base = OTHER; note = N1-methyl pseudouridine
  modified_base 513: mod_base = OTHER; note = N1-methyl pseudouridine
  modified_base 514: mod_base = OTHER; note = N1-methyl pseudouridine
  modified_base 537: mod_base = OTHER; note = N1-methyl pseudouridine
  modified_base 545: mod_base = OTHER; note = N1-methyl pseudouridine
  modified_base 548: mod_base = OTHER; note = N1-methyl pseudouridine
  modified_base 551: mod_base = OTHER; note = N1-methyl pseudouridine
  modified_base 560: mod_base = OTHER; note = N1-methyl pseudouridine
  modified_base 561: mod_base = OTHER; note = N1-methyl pseudouridine
  modified_base 570: mod_base = OTHER; note = N1-methyl pseudouridine
  modified_base 572: mod_base = OTHER; note = N1-methyl pseudouridine
  modified_base 575: mod_base = OTHER; note = N1-methyl pseudouridine
  modified_base 579: mod_base = OTHER; note = N1-methyl pseudouridine
  modified_base 597: mod_base = OTHER; note = N1-methyl pseudouridine
  modified_base 603: mod_base = OTHER; note = N1-methyl pseudouridine
  modified_base 611: mod_base = OTHER; note = N1-methyl pseudouridine
  modified_base 620: mod_base = OTHER; note = N1-methyl pseudouridine
  modified_base 621: mod_base = OTHER; note = N1-methyl pseudouridine
  modified_base 630: mod_base = OTHER; note = N1-methyl pseudouridine
  modified_base 633: mod_base = OTHER; note = N1-methyl pseudouridine
  modified_base 654: mod_base = OTHER; note = N1-methyl pseudouridine
  modified_base 657: mod_base = OTHER; note = N1-methyl pseudouridine
  modified_base 661: mod_base = OTHER; note = N1-methyl pseudouridine
  modified_base 662: mod_base = OTHER; note = N1-methyl pseudouridine
  modified_base 665: mod_base = OTHER; note = N1-methyl pseudouridine
  modified_base 667: mod_base = OTHER; note = N1-methyl pseudouridine
  modified_base 673: mod_base = OTHER; note = N1-methyl pseudouridine
  modified_base 677: mod_base = OTHER; note = N1-methyl pseudouridine
  modified_base 683: mod_base = OTHER; note = N1-methyl pseudouridine
  modified_base 686: mod_base = OTHER; note = N1-methyl pseudouridine
  modified_base 688: mod_base = OTHER; note = N1-methyl pseudouridine
  modified_base 689: mod_base = OTHER; note = N1-methyl pseudouridine
  modified_base 693: mod_base = OTHER; note = N1-methyl pseudouridine
  modified_base 698: mod_base = OTHER; note = N1-methyl pseudouridine
  modified_base 700: mod_base = OTHER; note = N1-methyl pseudouridine
  modified_base 703: mod_base = OTHER; note = N1-methyl pseudouridine
  modified_base 707: mod_base = OTHER; note = N1-methyl pseudouridine
  modified_base 714: mod_base = OTHER; note = N1-methyl pseudouridine
  modified_base 716: mod_base = OTHER; note = N1-methyl pseudouridine
  modified_base 721: mod_base = OTHER; note = N1-methyl pseudouridine
  modified_base 728: mod_base = OTHER; note = N1-methyl pseudouridine
  modified_base 735: mod_base = OTHER; note = N1-methyl pseudouridine
  modified_base 736: mod_base = OTHER; note = N1-methyl pseudouridine
  modified_base 742: mod_base = OTHER; note = N1-methyl pseudouridine
  modified_base 745: mod_base = OTHER; note = N1-methyl pseudouridine
  modified_base 764: mod_base = OTHER; note = N1-methyl pseudouridine
  modified_base 769: mod_base = OTHER; note = N1-methyl pseudouridine
  modified_base 781: mod_base = OTHER; note = N1-methyl pseudouridine
  modified_base 784: mod_base = OTHER; note = N1-methyl pseudouridine
  modified_base 788: mod_base = OTHER; note = N1-methyl pseudouridine
  modified_base 793: mod_base = OTHER; note = N1-methyl pseudouridine
  modified_base 795: mod_base = OTHER; note = N1-methyl pseudouridine
  modified_base 796: mod_base = OTHER; note = N1-methyl pseudouridine
  modified_base 798: mod_base = OTHER; note = N1-methyl pseudouridine
  modified_base 799: mod_base = OTHER; note = N1-methyl pseudouridine
  modified_base 800: mod_base = OTHER; note = N1-methyl pseudouridine
  modified_base 804: mod_base = OTHER; note = N1-methyl pseudouridine
  modified_base 832: mod_base = OTHER; note = N1-methyl pseudouridine
  modified_base 833: mod_base = OTHER; note = N1-methyl pseudouridine
  modified_base 845: mod_base = OTHER; note = N1-methyl pseudouridine
  modified_base 855: mod_base = OTHER; note = N1-methyl pseudouridine
  modified_base 872: mod_base = OTHER; note = N1-methyl pseudouridine
  modified_base 877: mod_base = OTHER; note = N1-methyl pseudouridine
  modified_base 878: mod_base = OTHER; note = N1-methyl pseudouridine
  modified_base 879: mod_base = OTHER; note = N1-methyl pseudouridine
  modified_base 881: mod_base = OTHER; note = N1-methyl pseudouridine
  modified_base 882: mod_base = OTHER; note = N1-methyl pseudouridine
  modified_base 886: mod_base = OTHER; note = N1-methyl pseudouridine
  modified_base 895: mod_base = OTHER; note = N1-methyl pseudouridine
  modified_base 897: mod_base = OTHER; note = N1-methyl pseudouridine
  modified_base 898: mod_base = OTHER; note = N1-methyl pseudouridine
  modified_base 899: mod_base = OTHER; note = N1-methyl pseudouridine
  modified_base 910: mod_base = OTHER; note = N1-methyl pseudouridine
  modified_base 919: mod_base = OTHER; note = N1-methyl pseudouridine
  modified_base 920: mod_base = OTHER; note = N1-methyl pseudouridine
  modified_base 926: mod_base = OTHER; note = N1-methyl pseudouridine
  modified_base 927: mod_base = OTHER; note = N1-methyl pseudouridine
  modified_base 930: mod_base = OTHER; note = N1-methyl pseudouridine
  modified_base 931: mod_base = OTHER; note = N1-methyl pseudouridine
  modified_base 933: mod_base = OTHER; note = N1-methyl pseudouridine
  modified_base 934: mod_base = OTHER; note = N1-methyl pseudouridine
  modified_base 943: mod_base = OTHER; note = N1-methyl pseudouridine
  modified_base 944: mod_base = OTHER; note = N1-methyl pseudouridine
  modified_base 951: mod_base = OTHER; note = N1-methyl pseudouridine
  modified_base 953: mod_base = OTHER; note = N1-methyl pseudouridine
  modified_base 954: mod_base = OTHER; note = N1-methyl pseudouridine
  modified_base 955: mod_base = OTHER; note = N1-methyl pseudouridine
  modified_base 958: mod_base = OTHER; note = N1-methyl pseudouridine
  modified_base 961: mod_base = OTHER; note = N1-methyl pseudouridine
  modified_base 980: mod_base = OTHER; note = N1-methyl pseudouridine
  modified_base 994: mod_base = OTHER; note = N1-methyl pseudouridine
  modified_base 996: mod_base = OTHER; note = N1-methyl pseudouridine
  modified_base 997: mod_base = OTHER; note = N1-methyl pseudouridine
  modified_base 998: mod_base = OTHER; note = N1-methyl pseudouridine
  modified_base 1004: mod_base = OTHER; note = N1-methyl pseudouridine
  modified_base 1006: mod_base = OTHER; note = N1-methyl pseudouridine
  modified_base 1009: mod_base = OTHER; note = N1-methyl pseudouridine
  modified_base 1018: mod_base = OTHER; note = N1-methyl pseudouridine
  modified_base 1023: mod_base = OTHER; note = N1-methyl pseudouridine
  modified_base 1028: mod_base = OTHER; note = N1-methyl pseudouridine
  modified_base 1035: mod_base = OTHER; note = N1-methyl pseudouridine
  modified_base 1040: mod_base = OTHER; note = N1-methyl pseudouridine
  modified_base 1045: mod_base = OTHER; note = N1-methyl pseudouridine
  modified_base 1047: mod_base = OTHER; note = N1-methyl pseudouridine
  modified_base 1049: mod_base = OTHER; note = N1-methyl pseudouridine
  modified_base 1052: mod_base = OTHER; note = N1-methyl pseudouridine
  modified_base 1054: mod_base = OTHER; note = N1-methyl pseudouridine
  modified_base 1055: mod_base = OTHER; note = N1-methyl pseudouridine
  modified_base 1066: mod_base = OTHER; note = N1-methyl pseudouridine
  modified_base 1067: mod_base = OTHER; note = N1-methyl pseudouridine
  modified_base 1069: mod_base = OTHER; note = N1-methyl pseudouridine
  modified_base 1073: mod_base = OTHER; note = N1-methyl pseudouridine
  modified_base 1074: mod_base = OTHER; note = N1-methyl pseudouridine
  modified_base 1082: mod_base = OTHER; note = N1-methyl pseudouridine
  modified_base 1091: mod_base = OTHER; note = N1-methyl pseudouridine
  modified_base 1093: mod_base = OTHER; note = N1-methyl pseudouridine
  modified_base 1098: mod_base = OTHER; note = N1-methyl pseudouridine
  modified_base 1099: mod_base = OTHER; note = N1-methyl pseudouridine
  modified_base 1102: mod_base = OTHER; note = N1-methyl pseudouridine
  modified_base 1104: mod_base = OTHER; note = N1-methyl pseudouridine
  modified_base 1106: mod_base = OTHER; note = N1-methyl pseudouridine
  modified_base 1108: mod_base = OTHER; note = N1-methyl pseudouridine
  modified_base 1114: mod_base = OTHER; note = N1-methyl pseudouridine
  modified_base 1123: mod_base = OTHER; note = N1-methyl pseudouridine
  modified_base 1126: mod_base = OTHER; note = N1-methyl pseudouridine
  modified_base 1131: mod_base = OTHER; note = N1-methyl pseudouridine
  modified_base 1132: mod_base = OTHER; note = N1-methyl pseudouridine
  modified_base 1133: mod_base = OTHER; note = N1-methyl pseudouridine
  modified_base 1139: mod_base = OTHER; note = N1-methyl pseudouridine
  modified_base 1143: mod_base = OTHER; note = N1-methyl pseudouridine
  modified_base 1144: mod_base = OTHER; note = N1-methyl pseudouridine
  modified_base 1145: mod_base = OTHER; note = N1-methyl pseudouridine
  modified_base 1147: mod_base = OTHER; note = N1-methyl pseudouridine
  modified_base 1148: mod_base = OTHER; note = N1-methyl pseudouridine
  modified_base 1150: mod_base = OTHER; note = N1-methyl pseudouridine
  modified_base 1160: mod_base = OTHER; note = N1-methyl pseudouridine
  modified_base 1162: mod_base = OTHER; note = N1-methyl pseudouridine
  modified_base 1163: mod_base = OTHER; note = N1-methyl pseudouridine
  modified_base 1166: mod_base = OTHER; note = N1-methyl pseudouridine
  modified_base 1176: mod_base = OTHER; note = N1-methyl pseudouridine
  modified_base 1183: mod_base = OTHER; note = N1-methyl pseudouridine
  modified_base 1187: mod_base = OTHER; note = N1-methyl pseudouridine
  modified_base 1192: mod_base = OTHER; note = N1-methyl pseudouridine
  modified_base 1194: mod_base = OTHER; note = N1-methyl pseudouridine
  modified_base 1195: mod_base = OTHER; note = N1-methyl pseudouridine
  modified_base 1198: mod_base = OTHER; note = N1-methyl pseudouridine
  modified_base 1204: mod_base = OTHER; note = N1-methyl pseudouridine
  modified_base 1207: mod_base = OTHER; note = N1-methyl pseudouridine
  modified_base 1215: mod_base = OTHER; note = N1-methyl pseudouridine
  modified_base 1217: mod_base = OTHER; note = N1-methyl pseudouridine
  modified_base 1225: mod_base = OTHER; note = N1-methyl pseudouridine
  modified_base 1227: mod_base = OTHER; note = N1-methyl pseudouridine
  modified_base 1228: mod_base = OTHER; note = N1-methyl pseudouridine
  modified_base 1238: mod_base = OTHER; note = N1-methyl pseudouridine
  modified_base 1243: mod_base = OTHER; note = N1-methyl pseudouridine
  modified_base 1247: mod_base = OTHER; note = N1-methyl pseudouridine
  modified_base 1251: mod_base = OTHER; note = N1-methyl pseudouridine
  modified_base 1253: mod_base = OTHER; note = N1-methyl pseudouridine
  modified_base 1258: mod_base = OTHER; note = N1-methyl pseudouridine
  modified_base 1273: mod_base = OTHER; note = N1-methyl pseudouridine
  modified_base 1276: mod_base = OTHER; note = N1-methyl pseudouridine
  modified_base 1278: mod_base = OTHER; note = N1-methyl pseudouridine
  modified_base 1288: mod_base = OTHER; note = N1-methyl pseudouridine
  modified_base 1289: mod_base = OTHER; note = N1-methyl pseudouridine
  modified_base 1292: mod_base = OTHER; note = N1-methyl pseudouridine
  modified_base 1296: mod_base = OTHER; note = N1-methyl pseudouridine
  modified_base 1298: mod_base = OTHER; note = N1-methyl pseudouridine
  modified_base 1306: mod_base = OTHER; note = N1-methyl pseudouridine
  modified_base 1307: mod_base = OTHER; note = N1-methyl pseudouridine
  modified_base 1315: mod_base = OTHER; note = N1-methyl pseudouridine
  modified_base 1318: mod_base = OTHER; note = N1-methyl pseudouridine
  modified_base 1326: mod_base = OTHER; note = N1-methyl pseudouridine
  modified_base 1327: mod_base = OTHER; note = N1-methyl pseudouridine
  modified_base 1346: mod_base = OTHER; note = N1-methyl pseudouridine
  modified_base 1350: mod_base = OTHER; note = N1-methyl pseudouridine
  modified_base 1351: mod_base = OTHER; note = N1-methyl pseudouridine
  modified_base 1353: mod_base = OTHER; note = N1-methyl pseudouridine
  modified_base 1354: mod_base = OTHER; note = N1-methyl pseudouridine
  modified_base 1355: mod_base = OTHER; note = N1-methyl pseudouridine
  modified_base 1358: mod_base = OTHER; note = N1-methyl pseudouridine
  modified_base 1363: mod_base = OTHER; note = N1-methyl pseudouridine
  modified_base 1364: mod_base = OTHER; note = N1-methyl pseudouridine
  modified_base 1366: mod_base = OTHER; note = N1-methyl pseudouridine
  modified_base 1367: mod_base = OTHER; note = N1-methyl pseudouridine
  modified_base 1372: mod_base = OTHER; note = N1-methyl pseudouridine
  modified_base 1376: mod_base = OTHER; note = N1-methyl pseudouridine
  modified_base 1378: mod_base = OTHER; note = N1-methyl pseudouridine
  modified_base 1384: mod_base = OTHER; note = N1-methyl pseudouridine
  modified_base 1385: mod_base = OTHER; note = N1-methyl pseudouridine
  modified_base 1391: mod_base = OTHER; note = N1-methyl pseudouridine
  modified_base 1395: mod_base = OTHER; note = N1-methyl pseudouridine
  modified_base 1396: mod_base = OTHER; note = N1-methyl pseudouridine
  modified_base 1401: mod_base = OTHER; note = N1-methyl pseudouridine
  modified_base 1407: mod_base = OTHER; note = N1-methyl pseudouridine
  modified_base 1408: mod_base = OTHER; note = N1-methyl pseudouridine
  modified_base 1412: mod_base = OTHER; note = N1-methyl pseudouridine
  modified_base 1414: mod_base = OTHER; note = N1-methyl pseudouridine
  modified_base 1415: mod_base = OTHER; note = N1-methyl pseudouridine
  modified_base 1432: mod_base = OTHER; note = N1-methyl pseudouridine
  modified_base 1438: mod_base = OTHER; note = N1-methyl pseudouridine
  modified_base 1439: mod_base = OTHER; note = N1-methyl pseudouridine
  modified_base 1448: mod_base = OTHER; note = N1-methyl pseudouridine
  modified_base 1452: mod_base = OTHER; note = N1-methyl pseudouridine
  modified_base 1457: mod_base = OTHER; note = N1-methyl pseudouridine
  modified_base 1463: mod_base = OTHER; note = N1-methyl pseudouridine
  modified_base 1465: mod_base = OTHER; note = N1-methyl pseudouridine
  modified_base 1466: mod_base = OTHER; note = N1-methyl pseudouridine
  modified_base 1469: mod_base = OTHER; note = N1-methyl pseudouridine
  modified_base 1474: mod_base = OTHER; note = N1-methyl pseudouridine
  modified_base 1477: mod_base = OTHER; note = N1-methyl pseudouridine
  modified_base 1486: mod_base = OTHER; note = N1-methyl pseudouridine
  modified_base 1497: mod_base = OTHER; note = N1-methyl pseudouridine
  modified_base 1507: mod_base = OTHER; note = N1-methyl pseudouridine
  modified_base 1508: mod_base = OTHER; note = N1-methyl pseudouridine
  modified_base 1509: mod_base = OTHER; note = N1-methyl pseudouridine
  modified_base 1510: mod_base = OTHER; note = N1-methyl pseudouridine
  modified_base 1512: mod_base = OTHER; note = N1-methyl pseudouridine
  modified_base 1513: mod_base = OTHER; note = N1-methyl pseudouridine
  modified_base 1526: mod_base = OTHER; note = N1-methyl pseudouridine
  modified_base 1527: mod_base = OTHER; note = N1-methyl pseudouridine
  modified_base 1528: mod_base = OTHER; note = N1-methyl pseudouridine
  modified_base 1530: mod_base = OTHER; note = N1-methyl pseudouridine
  modified_base 1540: mod_base = OTHER; note = N1-methyl pseudouridine
  modified_base 1543: mod_base = OTHER; note = N1-methyl pseudouridine
  modified_base 1545: mod_base = OTHER; note = N1-methyl pseudouridine
  modified_base 1546: mod_base = OTHER; note = N1-methyl pseudouridine
  modified_base 1555: mod_base = OTHER; note = N1-methyl pseudouridine
  modified_base 1558: mod_base = OTHER; note = N1-methyl pseudouridine
  modified_base 1564: mod_base = OTHER; note = N1-methyl pseudouridine
  modified_base 1571: mod_base = OTHER; note = N1-methyl pseudouridine
  modified_base 1576: mod_base = OTHER; note = N1-methyl pseudouridine
  modified_base 1577: mod_base = OTHER; note = N1-methyl pseudouridine
  modified_base 1580: mod_base = OTHER; note = N1-methyl pseudouridine
  modified_base 1591: mod_base = OTHER; note = N1-methyl pseudouridine
  modified_base 1592: mod_base = OTHER; note = N1-methyl pseudouridine
  modified_base 1593: mod_base = OTHER; note = N1-methyl pseudouridine
  modified_base 1603: mod_base = OTHER; note = N1-methyl pseudouridine
  modified_base 1606: mod_base = OTHER; note = N1-methyl pseudouridine
  modified_base 1614: mod_base = OTHER; note = N1-methyl pseudouridine
  modified_base 1619: mod_base = OTHER; note = N1-methyl pseudouridine
  modified_base 1625: mod_base = OTHER; note = N1-methyl pseudouridine
  modified_base 1628: mod_base = OTHER; note = N1-methyl pseudouridine
  modified_base 1634: mod_base = OTHER; note = N1-methyl pseudouridine
  modified_base 1636: mod_base = OTHER; note = N1-methyl pseudouridine
  modified_base 1642: mod_base = OTHER; note = N1-methyl pseudouridine
  modified_base 1645: mod_base = OTHER; note = N1-methyl pseudouridine
  modified_base 1646: mod_base = OTHER; note = N1-methyl pseudouridine
  modified_base 1654: mod_base = OTHER; note = N1-methyl pseudouridine
  modified_base 1655: mod_base = OTHER; note = N1-methyl pseudouridine
  modified_base 1657: mod_base = OTHER; note = N1-methyl pseudouridine
  modified_base 1668: mod_base = OTHER; note = N1-methyl pseudouridine
  modified_base 1669: mod_base = OTHER; note = N1-methyl pseudouridine
  modified_base 1673: mod_base = OTHER; note = N1-methyl pseudouridine
  modified_base 1680: mod_base = OTHER; note = N1-methyl pseudouridine
  modified_base 1682: mod_base = OTHER; note = N1-methyl pseudouridine
  modified_base 1690: mod_base = OTHER; note = N1-methyl pseudouridine
  modified_base 1692: mod_base = OTHER; note = N1-methyl pseudouridine
  modified_base 1693: mod_base = OTHER; note = N1-methyl pseudouridine
  modified_base 1694: mod_base = OTHER; note = N1-methyl pseudouridine
  modified_base 1695: mod_base = OTHER; note = N1-methyl pseudouridine
  modified_base 1696: mod_base = OTHER; note = N1-methyl pseudouridine
  modified_base 1715: mod_base = OTHER; note = N1-methyl pseudouridine
  modified_base 1716: mod_base = OTHER; note = N1-methyl pseudouridine
  modified_base 1718: mod_base = OTHER; note = N1-methyl pseudouridine
  modified_base 1721: mod_base = OTHER; note = N1-methyl pseudouridine
  modified_base 1725: mod_base = OTHER; note = N1-methyl pseudouridine
  modified_base 1729: mod_base = OTHER; note = N1-methyl pseudouridine
  modified_base 1742: mod_base = OTHER; note = N1-methyl pseudouridine
  modified_base 1743: mod_base = OTHER; note = N1-methyl pseudouridine
  modified_base 1745: mod_base = OTHER; note = N1-methyl pseudouridine
  modified_base 1755: mod_base = OTHER; note = N1-methyl pseudouridine
  modified_base 1756: mod_base = OTHER; note = N1-methyl pseudouridine
  modified_base 1758: mod_base = OTHER; note = N1-methyl pseudouridine
  modified_base 1764: mod_base = OTHER; note = N1-methyl pseudouridine
  modified_base 1765: mod_base = OTHER; note = N1-methyl pseudouridine
  modified_base 1766: mod_base = OTHER; note = N1-methyl pseudouridine
  modified_base 1768: mod_base = OTHER; note = N1-methyl pseudouridine
  modified_base 1777: mod_base = OTHER; note = N1-methyl pseudouridine
  modified_base 1778: mod_base = OTHER; note = N1-methyl pseudouridine
  modified_base 1780: mod_base = OTHER; note = N1-methyl pseudouridine
  modified_base 1789: mod_base = OTHER; note = N1-methyl pseudouridine
  modified_base 1793: mod_base = OTHER; note = N1-methyl pseudouridine
  modified_base 1807: mod_base = OTHER; note = N1-methyl pseudouridine
  modified_base 1809: mod_base = OTHER; note = N1-methyl pseudouridine
  modified_base 1810: mod_base = OTHER; note = N1-methyl pseudouridine
  modified_base 1813: mod_base = OTHER; note = N1-methyl pseudouridine
  modified_base 1819: mod_base = OTHER; note = N1-methyl pseudouridine
  modified_base 1834: mod_base = OTHER; note = N1-methyl pseudouridine
  modified_base 1837: mod_base = OTHER; note = N1-methyl pseudouridine
  modified_base 1854: mod_base = OTHER; note = N1-methyl pseudouridine
  modified_base 1855: mod_base = OTHER; note = N1-methyl pseudouridine
  modified_base 1859: mod_base = OTHER; note = N1-methyl pseudouridine
  modified_base 1862: mod_base = OTHER; note = N1-methyl pseudouridine
  modified_base 1870: mod_base = OTHER; note = N1-methyl pseudouridine
  modified_base 1882: mod_base = OTHER; note = N1-methyl pseudouridine
  modified_base 1883: mod_base = OTHER; note = N1-methyl pseudouridine
  modified_base 1886: mod_base = OTHER; note = N1-methyl pseudouridine
  modified_base 1887: mod_base = OTHER; note = N1-methyl pseudouridine
  modified_base 1888: mod_base = OTHER; note = N1-methyl pseudouridine
  modified_base 1892: mod_base = OTHER; note = N1-methyl pseudouridine
  modified_base 1897: mod_base = OTHER; note = N1-methyl pseudouridine
  modified_base 1901: mod_base = OTHER; note = N1-methyl pseudouridine
  modified_base 1906: mod_base = OTHER; note = N1-methyl pseudouridine
  modified_base 1908: mod_base = OTHER; note = N1-methyl pseudouridine
  modified_base 1909: mod_base = OTHER; note = N1-methyl pseudouridine
  modified_base 1925: mod_base = OTHER; note = N1-methyl pseudouridine
  modified_base 1926: mod_base = OTHER; note = N1-methyl pseudouridine
  modified_base 1927: mod_base = OTHER; note = N1-methyl pseudouridine
  modified_base 1928: mod_base = OTHER; note = N1-methyl pseudouridine
  modified_base 1929: mod_base = OTHER; note = N1-methyl pseudouridine
  modified_base 1935: mod_base = OTHER; note = N1-methyl pseudouridine
  modified_base 1936: mod_base = OTHER; note = N1-methyl pseudouridine
  modified_base 1939: mod_base = OTHER; note = N1-methyl pseudouridine
  modified_base 1949: mod_base = OTHER; note = N1-methyl pseudouridine
  modified_base 1960: mod_base = OTHER; note = N1-methyl pseudouridine
  modified_base 1961: mod_base = OTHER; note = N1-methyl pseudouridine
  modified_base 1969: mod_base = OTHER; note = N1-methyl pseudouridine
  modified_base 1972: mod_base = OTHER; note = N1-methyl pseudouridine
  modified_base 1973: mod_base = OTHER; note = N1-methyl pseudouridine
  modified_base 1977: mod_base = OTHER; note = N1-methyl pseudouridine
  modified_base 1978: mod_base = OTHER; note = N1-methyl pseudouridine
  modified_base 1979: mod_base = OTHER; note = N1-methyl pseudouridine
  modified_base 1984: mod_base = OTHER; note = N1-methyl pseudouridine
  modified_base 1985: mod_base = OTHER; note = N1-methyl pseudouridine
  modified_base 1989: mod_base = OTHER; note = N1-methyl pseudouridine
  modified_base 1991: mod_base = OTHER; note = N1-methyl pseudouridine
  modified_base 1992: mod_base = OTHER; note = N1-methyl pseudouridine
  modified_base 1996: mod_base = OTHER; note = N1-methyl pseudouridine
  modified_base 2005: mod_base = OTHER; note = N1-methyl pseudouridine
  modified_base 2015: mod_base = OTHER; note = N1-methyl pseudouridine
  modified_base 2018: mod_base = OTHER; note = N1-methyl pseudouridine
  modified_base 2019: mod_base = OTHER; note = N1-methyl pseudouridine
  modified_base 2021: mod_base = OTHER; note = N1-methyl pseudouridine
  modified_base 2025: mod_base = OTHER; note = N1-methyl pseudouridine
  modified_base 2026: mod_base = OTHER; note = N1-methyl pseudouridine
  modified_base 2027: mod_base = OTHER; note = N1-methyl pseudouridine
  modified_base 2031: mod_base = OTHER; note = N1-methyl pseudouridine
  modified_base 2035: mod_base = OTHER; note = N1-methyl pseudouridine
  modified_base 2059: mod_base = OTHER; note = N1-methyl pseudouridine
  modified_base 2067: mod_base = OTHER; note = N1-methyl pseudouridine
  modified_base 2073: mod_base = OTHER; note = N1-methyl pseudouridine
  modified_base 2074: mod_base = OTHER; note = N1-methyl pseudouridine
  modified_base 2075: mod_base = OTHER; note = N1-methyl pseudouridine
  modified_base 2083: mod_base = OTHER; note = N1-methyl pseudouridine
  modified_base 2086: mod_base = OTHER; note = N1-methyl pseudouridine
  modified_base 2090: mod_base = OTHER; note = N1-methyl pseudouridine
  modified_base 2096: mod_base = OTHER; note = N1-methyl pseudouridine
  modified_base 2109: mod_base = OTHER; note = N1-methyl pseudouridine
  modified_base 2112: mod_base = OTHER; note = N1-methyl pseudouridine
  modified_base 2113: mod_base = OTHER; note = N1-methyl pseudouridine
  modified_base 2114: mod_base = OTHER; note = N1-methyl pseudouridine
  modified_base 2116: mod_base = OTHER; note = N1-methyl pseudouridine
  modified_base 2125: mod_base = OTHER; note = N1-methyl pseudouridine
  modified_base 2129: mod_base = OTHER; note = N1-methyl pseudouridine
  modified_base 2132: mod_base = OTHER; note = N1-methyl pseudouridine
  modified_base 2133: mod_base = OTHER; note = N1-methyl pseudouridine
  modified_base 2134: mod_base = OTHER; note = N1-methyl pseudouridine
  modified_base 2138: mod_base = OTHER; note = N1-methyl pseudouridine
  modified_base 2144: mod_base = OTHER; note = N1-methyl pseudouridine
  modified_base 2146: mod_base = OTHER; note = N1-methyl pseudouridine
  modified_base 2153: mod_base = OTHER; note = N1-methyl pseudouridine
  modified_base 2161: mod_base = OTHER; note = N1-methyl pseudouridine
  modified_base 2163: mod_base = OTHER; note = N1-methyl pseudouridine
  modified_base 2164: mod_base = OTHER; note = N1-methyl pseudouridine
  modified_base 2174: mod_base = OTHER; note = N1-methyl pseudouridine
  modified_base 2179: mod_base = OTHER; note = N1-methyl pseudouridine
  modified_base 2180: mod_base = OTHER; note = N1-methyl pseudouridine
  modified_base 2181: mod_base = OTHER; note = N1-methyl pseudouridine
  modified_base 2182: mod_base = OTHER; note = N1-methyl pseudouridine
  modified_base 2184: mod_base = OTHER; note = N1-methyl pseudouridine
  modified_base 2186: mod_base = OTHER; note = N1-methyl pseudouridine
  modified_base 2190: mod_base = OTHER; note = N1-methyl pseudouridine
  modified_base 2192: mod_base = OTHER; note = N1-methyl pseudouridine
  modified_base 2193: mod_base = OTHER; note = N1-methyl pseudouridine
  modified_base 2194: mod_base = OTHER; note = N1-methyl pseudouridine
  modified_base 2195: mod_base = OTHER; note = N1-methyl pseudouridine
  modified_base 2198: mod_base = OTHER; note = N1-methyl pseudouridine
  modified_base 2200: mod_base = OTHER; note = N1-methyl pseudouridine
  modified_base 2202: mod_base = OTHER; note = N1-methyl pseudouridine
  modified_base 2212: mod_base = OTHER; note = N1-methyl pseudouridine
  modified_base 2221: mod_base = OTHER; note = N1-methyl pseudouridine
  modified_base 2226: mod_base = OTHER; note = N1-methyl pseudouridine
  modified_base 2228: mod_base = OTHER; note = N1-methyl pseudouridine
  modified_base 2230: mod_base = OTHER; note = N1-methyl pseudouridine
  modified_base 2234: mod_base = OTHER; note = N1-methyl pseudouridine
  modified_base 2242: mod_base = OTHER; note = N1-methyl pseudouridine
  modified_base 2256: mod_base = OTHER; note = N1-methyl pseudouridine
  modified_base 2257: mod_base = OTHER; note = N1-methyl pseudouridine
  modified_base 2258: mod_base = OTHER; note = N1-methyl pseudouridine
  modified_base 2259: mod_base = OTHER; note = N1-methyl pseudouridine
  modified_base 2260: mod_base = OTHER; note = N1-methyl pseudouridine
  modified_base 2282: mod_base = OTHER; note = N1-methyl pseudouridine
  modified_base 2284: mod_base = OTHER; note = N1-methyl pseudouridine
  modified_base 2285: mod_base = OTHER; note = N1-methyl pseudouridine
  modified_base 2287: mod_base = OTHER; note = N1-methyl pseudouridine
  modified_base 2292: mod_base = OTHER; note = N1-methyl pseudouridine
  modified_base 2293: mod_base = OTHER; note = N1-methyl pseudouridine
  modified_base 2296: mod_base = OTHER; note = N1-methyl pseudouridine
  modified_base 2297: mod_base = OTHER; note = N1-methyl pseudouridine
  modified_base 2298: mod_base = OTHER; note = N1-methyl pseudouridine
  modified_base 2299: mod_base = OTHER; note = N1-methyl pseudouridine
  modified_base 2300: mod_base = OTHER; note = N1-methyl pseudouridine
  modified_base 2309: mod_base = OTHER; note = N1-methyl pseudouridine
  modified_base 2317: mod_base = OTHER; note = N1-methyl pseudouridine
  modified_base 2318: mod_base = OTHER; note = N1-methyl pseudouridine
  modified_base 2323: mod_base = OTHER; note = N1-methyl pseudouridine
  modified_base 2332: mod_base = OTHER; note = N1-methyl pseudouridine
  modified_base 2343: mod_base = OTHER; note = N1-methyl pseudouridine
  modified_base 2346: mod_base = OTHER; note = N1-methyl pseudouridine
  modified_base 2347: mod_base = OTHER; note = N1-methyl pseudouridine
  modified_base 2348: mod_base = OTHER; note = N1-methyl pseudouridine
  modified_base 2356: mod_base = OTHER; note = N1-methyl pseudouridine
  modified_base 2361: mod_base = OTHER; note = N1-methyl pseudouridine
  modified_base 2364: mod_base = OTHER; note = N1-methyl pseudouridine
  modified_base 2365: mod_base = OTHER; note = N1-methyl pseudouridine
  modified_base 2366: mod_base = OTHER; note = N1-methyl pseudouridine
  modified_base 2370: mod_base = OTHER; note = N1-methyl pseudouridine
  modified_base 2372: mod_base = OTHER; note = N1-methyl pseudouridine
  modified_base 2374: mod_base = OTHER; note = N1-methyl pseudouridine
  modified_base 2380: mod_base = OTHER; note = N1-methyl pseudouridine
  modified_base 2381: mod_base = OTHER; note = N1-methyl pseudouridine
  modified_base 2384: mod_base = OTHER; note = N1-methyl pseudouridine
  modified_base 2389: mod_base = OTHER; note = N1-methyl pseudouridine
  modified_base 2396: mod_base = OTHER; note = N1-methyl pseudouridine
  modified_base 2400: mod_base = OTHER; note = N1-methyl pseudouridine
  modified_base 2401: mod_base = OTHER; note = N1-methyl pseudouridine
  modified_base 2405: mod_base = OTHER; note = N1-methyl pseudouridine
  modified_base 2413: mod_base = OTHER; note = N1-methyl pseudouridine
  modified_base 2421: mod_base = OTHER; note = N1-methyl pseudouridine
  modified_base 2429: mod_base = OTHER; note = N1-methyl pseudouridine
  modified_base 2431: mod_base = OTHER; note = N1-methyl pseudouridine
  modified_base 2433: mod_base = OTHER; note = N1-methyl pseudouridine
  modified_base 2434: mod_base = OTHER; note = N1-methyl pseudouridine
  modified_base 2440: mod_base = OTHER; note = N1-methyl pseudouridine
  modified_base 2441: mod_base = OTHER; note = N1-methyl pseudouridine
  modified_base 2443: mod_base = OTHER; note = N1-methyl pseudouridine
  modified_base 2450: mod_base = OTHER; note = N1-methyl pseudouridine
  modified_base 2456: mod_base = OTHER; note = N1-methyl pseudouridine
  modified_base 2457: mod_base = OTHER; note = N1-methyl pseudouridine
  modified_base 2458: mod_base = OTHER; note = N1-methyl pseudouridine
  modified_base 2459: mod_base = OTHER; note = N1-methyl pseudouridine
  modified_base 2461: mod_base = OTHER; note = N1-methyl pseudouridine
  modified_base 2477: mod_base = OTHER; note = N1-methyl pseudouridine
  modified_base 2485: mod_base = OTHER; note = N1-methyl pseudouridine
  modified_base 2487: mod_base = OTHER; note = N1-methyl pseudouridine
  modified_base 2488: mod_base = OTHER; note = N1-methyl pseudouridine
  modified_base 2495: mod_base = OTHER; note = N1-methyl pseudouridine
  modified_base 2497: mod_base = OTHER; note = N1-methyl pseudouridine
  modified_base 2498: mod_base = OTHER; note = N1-methyl pseudouridine
  modified_base 2500: mod_base = OTHER; note = N1-methyl pseudouridine
  modified_base 2501: mod_base = OTHER; note = N1-methyl pseudouridine
  modified_base 2502: mod_base = OTHER; note = N1-methyl pseudouridine
  modified_base 2503: mod_base = OTHER; note = N1-methyl pseudouridine
  modified_base 2507: mod_base = OTHER; note = N1-methyl pseudouridine
  modified_base 2508: mod_base = OTHER; note = N1-methyl pseudouridine
  modified_base 2509: mod_base = OTHER; note = N1-methyl pseudouridine
  modified_base 2513: mod_base = OTHER; note = N1-methyl pseudouridine
  modified_base 2515: mod_base = OTHER; note = N1-methyl pseudouridine
  modified_base 2516: mod_base = OTHER; note = N1-methyl pseudouridine
  modified_base 2517: mod_base = OTHER; note = N1-methyl pseudouridine
  modified_base 2518: mod_base = OTHER; note = N1-methyl pseudouridine
  modified_base 2525: mod_base = OTHER; note = N1-methyl pseudouridine
  modified_base 2533: mod_base = OTHER; note = N1-methyl pseudouridine
  modified_base 2536: mod_base = OTHER; note = N1-methyl pseudouridine
  modified_base 2547: mod_base = OTHER; note = N1-methyl pseudouridine
  modified_base 2548: mod_base = OTHER; note = N1-methyl pseudouridine
  modified_base 2555: mod_base = OTHER; note = N1-methyl pseudouridine
  modified_base 2556: mod_base = OTHER; note = N1-methyl pseudouridine
  modified_base 2558: mod_base = OTHER; note = N1-methyl pseudouridine
  modified_base 2564: mod_base = OTHER; note = N1-methyl pseudouridine
  modified_base 2566: mod_base = OTHER; note = N1-methyl pseudouridine
  modified_base 2567: mod_base = OTHER; note = N1-methyl pseudouridine
  modified_base 2568: mod_base = OTHER; note = N1-methyl pseudouridine
  modified_base 2569: mod_base = OTHER; note = N1-methyl pseudouridine
  modified_base 2570: mod_base = OTHER; note = N1-methyl pseudouridine
  modified_base 2573: mod_base = OTHER; note = N1-methyl pseudouridine
  modified_base 2581: mod_base = OTHER; note = N1-methyl pseudouridine
  modified_base 2582: mod_base = OTHER; note = N1-methyl pseudouridine
  modified_base 2584: mod_base = OTHER; note = N1-methyl pseudouridine
  modified_base 2593: mod_base = OTHER; note = N1-methyl pseudouridine
  modified_base 2607: mod_base = OTHER; note = N1-methyl pseudouridine
  modified_base 2609: mod_base = OTHER; note = N1-methyl pseudouridine
  modified_base 2612: mod_base = OTHER; note = N1-methyl pseudouridine
  modified_base 2615: mod_base = OTHER; note = N1-methyl pseudouridine
  modified_base 2616: mod_base = OTHER; note = N1-methyl pseudouridine
  modified_base 2626: mod_base = OTHER; note = N1-methyl pseudouridine
  modified_base 2628: mod_base = OTHER; note = N1-methyl pseudouridine
  modified_base 2638: mod_base = OTHER; note = N1-methyl pseudouridine
  modified_base 2641: mod_base = OTHER; note = N1-methyl pseudouridine
  modified_base 2642: mod_base = OTHER; note = N1-methyl pseudouridine
  modified_base 2650: mod_base = OTHER; note = N1-methyl pseudouridine
  modified_base 2666: mod_base = OTHER; note = N1-methyl pseudouridine
  modified_base 2669: mod_base = OTHER; note = N1-methyl pseudouridine
  modified_base 2677: mod_base = OTHER; note = N1-methyl pseudouridine
  modified_base 2678: mod_base = OTHER; note = N1-methyl pseudouridine
  modified_base 2679: mod_base = OTHER; note = N1-methyl pseudouridine
  modified_base 2680: mod_base = OTHER; note = N1-methyl pseudouridine
  modified_base 2685: mod_base = OTHER; note = N1-methyl pseudouridine
  modified_base 2686: mod_base = OTHER; note = N1-methyl pseudouridine
  modified_base 2689: mod_base = OTHER; note = N1-methyl pseudouridine
  modified_base 2690: mod_base = OTHER; note = N1-methyl pseudouridine
  modified_base 2703: mod_base = OTHER; note = N1-methyl pseudouridine
  modified_base 2704: mod_base = OTHER; note = N1-methyl pseudouridine
  modified_base 2705: mod_base = OTHER; note = N1-methyl pseudouridine
  modified_base 2711: mod_base = OTHER; note = N1-methyl pseudouridine
  modified_base 2718: mod_base = OTHER; note = N1-methyl pseudouridine
  modified_base 2719: mod_base = OTHER; note = N1-methyl pseudouridine
  modified_base 2722: mod_base = OTHER; note = N1-methyl pseudouridine
  modified_base 2727: mod_base = OTHER; note = N1-methyl pseudouridine
  modified_base 2728: mod_base = OTHER; note = N1-methyl pseudouridine
  modified_base 2731: mod_base = OTHER; note = N1-methyl pseudouridine
  modified_base 2735: mod_base = OTHER; note = N1-methyl pseudouridine
  modified_base 2738: mod_base = OTHER; note = N1-methyl pseudouridine
  modified_base 2741: mod_base = OTHER; note = N1-methyl pseudouridine
  modified_base 2742: mod_base = OTHER; note = N1-methyl pseudouridine
  modified_base 2744: mod_base = OTHER; note = N1-methyl pseudouridine
  modified_base 2745: mod_base = OTHER; note = N1-methyl pseudouridine
  modified_base 2746: mod_base = OTHER; note = N1-methyl pseudouridine
  modified_base 2751: mod_base = OTHER; note = N1-methyl pseudouridine
  modified_base 2752: mod_base = OTHER; note = N1-methyl pseudouridine
  modified_base 2753: mod_base = OTHER; note = N1-methyl pseudouridine
  modified_base 2762: mod_base = OTHER; note = N1-methyl pseudouridine
  modified_base 2764: mod_base = OTHER; note = N1-methyl pseudouridine
  modified_base 2779: mod_base = OTHER; note = N1-methyl pseudouridine
  modified_base 2783: mod_base = OTHER; note = N1-methyl pseudouridine
  modified_base 2795: mod_base = OTHER; note = N1-methyl pseudouridine
  modified_base 2798: mod_base = OTHER; note = N1-methyl pseudouridine
  modified_base 2800: mod_base = OTHER; note = N1-methyl pseudouridine
  modified_base 2804: mod_base = OTHER; note = N1-methyl pseudouridine
  modified_base 2812: mod_base = OTHER; note = N1-methyl pseudouridine
  modified_base 2813: mod_base = OTHER; note = N1-methyl pseudouridine
  modified_base 2821: mod_base = OTHER; note = N1-methyl pseudouridine
  modified_base 2822: mod_base = OTHER; note = N1-methyl pseudouridine
  modified_base 2829: mod_base = OTHER; note = N1-methyl pseudouridine
  modified_base 2839: mod_base = OTHER; note = N1-methyl pseudouridine
  modified_base 2849: mod_base = OTHER; note = N1-methyl pseudouridine
  modified_base 2851: mod_base = OTHER; note = N1-methyl pseudouridine
  modified_base 2854: mod_base = OTHER; note = N1-methyl pseudouridine
  modified_base 2863: mod_base = OTHER; note = N1-methyl pseudouridine
  modified_base 2869: mod_base = OTHER; note = N1-methyl pseudouridine
  modified_base 2872: mod_base = OTHER; note = N1-methyl pseudouridine
  modified_base 2876: mod_base = OTHER; note = N1-methyl pseudouridine
  modified_base 2881: mod_base = OTHER; note = N1-methyl pseudouridine
  modified_base 2882: mod_base = OTHER; note = N1-methyl pseudouridine
  modified_base 2884: mod_base = OTHER; note = N1-methyl pseudouridine
  modified_base 2890: mod_base = OTHER; note = N1-methyl pseudouridine
  modified_base 2893: mod_base = OTHER; note = N1-methyl pseudouridine
  modified_base 2903: mod_base = OTHER; note = N1-methyl pseudouridine
  modified_base 2909: mod_base = OTHER; note = N1-methyl pseudouridine
  modified_base 2915: mod_base = OTHER; note = N1-methyl pseudouridine
  modified_base 2917: mod_base = OTHER; note = N1-methyl pseudouridine
  modified_base 2918: mod_base = OTHER; note = N1-methyl pseudouridine
  modified_base 2920: mod_base = OTHER; note = N1-methyl pseudouridine
  modified_base 2923: mod_base = OTHER; note = N1-methyl pseudouridine
  modified_base 2929: mod_base = OTHER; note = N1-methyl pseudouridine
  modified_base 2933: mod_base = OTHER; note = N1-methyl pseudouridine
  modified_base 2942: mod_base = OTHER; note = N1-methyl pseudouridine
  modified_base 2951: mod_base = OTHER; note = N1-methyl pseudouridine
  modified_base 2960: mod_base = OTHER; note = N1-methyl pseudouridine
  modified_base 2969: mod_base = OTHER; note = N1-methyl pseudouridine
  modified_base 2970: mod_base = OTHER; note = N1-methyl pseudouridine
  modified_base 2983: mod_base = OTHER; note = N1-methyl pseudouridine
  modified_base 2992: mod_base = OTHER; note = N1-methyl pseudouridine
  modified_base 3004: mod_base = OTHER; note = N1-methyl pseudouridine
  modified_base 3005: mod_base = OTHER; note = N1-methyl pseudouridine
  modified_base 3013: mod_base = OTHER; note = N1-methyl pseudouridine
  modified_base 3018: mod_base = OTHER; note = N1-methyl pseudouridine
  modified_base 3025: mod_base = OTHER; note = N1-methyl pseudouridine
  modified_base 3027: mod_base = OTHER; note = N1-methyl pseudouridine
  modified_base 3028: mod_base = OTHER; note = N1-methyl pseudouridine
  modified_base 3038: mod_base = OTHER; note = N1-methyl pseudouridine
  modified_base 3041: mod_base = OTHER; note = N1-methyl pseudouridine
  modified_base 3043: mod_base = OTHER; note = N1-methyl pseudouridine
  modified_base 3058: mod_base = OTHER; note = N1-methyl pseudouridine
  modified_base 3059: mod_base = OTHER; note = N1-methyl pseudouridine
  modified_base 3073: mod_base = OTHER; note = N1-methyl pseudouridine
  modified_base 3075: mod_base = OTHER; note = N1-methyl pseudouridine
  modified_base 3079: mod_base = OTHER; note = N1-methyl pseudouridine
  modified_base 3081: mod_base = OTHER; note = N1-methyl pseudouridine
  modified_base 3083: mod_base = OTHER; note = N1-methyl pseudouridine
  modified_base 3084: mod_base = OTHER; note = N1-methyl pseudouridine
  modified_base 3086: mod_base = OTHER; note = N1-methyl pseudouridine
  modified_base 3088: mod_base = OTHER; note = N1-methyl pseudouridine
  modified_base 3095: mod_base = OTHER; note = N1-methyl pseudouridine
  modified_base 3106: mod_base = OTHER; note = N1-methyl pseudouridine
  modified_base 3108: mod_base = OTHER; note = N1-methyl pseudouridine
  modified_base 3110: mod_base = OTHER; note = N1-methyl pseudouridine
  modified_base 3112: mod_base = OTHER; note = N1-methyl pseudouridine
  modified_base 3124: mod_base = OTHER; note = N1-methyl pseudouridine
  modified_base 3128: mod_base = OTHER; note = N1-methyl pseudouridine
  modified_base 3130: mod_base = OTHER; note = N1-methyl pseudouridine
  modified_base 3134: mod_base = OTHER; note = N1-methyl pseudouridine
  modified_base 3138: mod_base = OTHER; note = N1-methyl pseudouridine
  modified_base 3139: mod_base = OTHER; note = N1-methyl pseudouridine
  modified_base 3141: mod_base = OTHER; note = N1-methyl pseudouridine
  modified_base 3146: mod_base = OTHER; note = N1-methyl pseudouridine
  modified_base 3147: mod_base = OTHER; note = N1-methyl pseudouridine
  modified_base 3149: mod_base = OTHER; note = N1-methyl pseudouridine
  modified_base 3152: mod_base = OTHER; note = N1-methyl pseudouridine
  modified_base 3154: mod_base = OTHER; note = N1-methyl pseudouridine
  modified_base 3158: mod_base = OTHER; note = N1-methyl pseudouridine
  modified_base 3163: mod_base = OTHER; note = N1-methyl pseudouridine
  modified_base 3166: mod_base = OTHER; note = N1-methyl pseudouridine
  modified_base 3174: mod_base = OTHER; note = N1-methyl pseudouridine
  modified_base 3177: mod_base = OTHER; note = N1-methyl pseudouridine
  modified_base 3178: mod_base = OTHER; note = N1-methyl pseudouridine
  modified_base 3180: mod_base = OTHER; note = N1-methyl pseudouridine
  modified_base 3181: mod_base = OTHER; note = N1-methyl pseudouridine
  modified_base 3191: mod_base = OTHER; note = N1-methyl pseudouridine
  modified_base 3194: mod_base = OTHER; note = N1-methyl pseudouridine
  modified_base 3196: mod_base = OTHER; note = N1-methyl pseudouridine
  modified_base 3197: mod_base = OTHER; note = N1-methyl pseudouridine
  modified_base 3203: mod_base = OTHER; note = N1-methyl pseudouridine
  modified_base 3208: mod_base = OTHER; note = N1-methyl pseudouridine
  modified_base 3211: mod_base = OTHER; note = N1-methyl pseudouridine
  modified_base 3212: mod_base = OTHER; note = N1-methyl pseudouridine
  modified_base 3219: mod_base = OTHER; note = N1-methyl pseudouridine
  modified_base 3240: mod_base = OTHER; note = N1-methyl pseudouridine
  modified_base 3245: mod_base = OTHER; note = N1-methyl pseudouridine
  modified_base 3250: mod_base = OTHER; note = N1-methyl pseudouridine
  modified_base 3257: mod_base = OTHER; note = N1-methyl pseudouridine
  modified_base 3265: mod_base = OTHER; note = N1-methyl pseudouridine
  modified_base 3268: mod_base = OTHER; note = N1-methyl pseudouridine
  modified_base 3277: mod_base = OTHER; note = N1-methyl pseudouridine
  modified_base 3284: mod_base = OTHER; note = N1-methyl pseudouridine
  modified_base 3285: mod_base = OTHER; note = N1-methyl pseudouridine
  modified_base 3287: mod_base = OTHER; note = N1-methyl pseudouridine
  modified_base 3288: mod_base = OTHER; note = N1-methyl pseudouridine
  modified_base 3298: mod_base = OTHER; note = N1-methyl pseudouridine
  modified_base 3301: mod_base = OTHER; note = N1-methyl pseudouridine
  modified_base 3313: mod_base = OTHER; note = N1-methyl pseudouridine
  modified_base 3314: mod_base = OTHER; note = N1-methyl pseudouridine
  modified_base 3316: mod_base = OTHER; note = N1-methyl pseudouridine
  modified_base 3317: mod_base = OTHER; note = N1-methyl pseudouridine
  modified_base 3320: mod_base = OTHER; note = N1-methyl pseudouridine
  modified_base 3330: mod_base = OTHER; note = N1-methyl pseudouridine
  modified_base 3331: mod_base = OTHER; note = N1-methyl pseudouridine
  modified_base 3335: mod_base = OTHER; note = N1-methyl pseudouridine
  modified_base 3340: mod_base = OTHER; note = N1-methyl pseudouridine
  modified_base 3341: mod_base = OTHER; note = N1-methyl pseudouridine
  modified_base 3350: mod_base = OTHER; note = N1-methyl pseudouridine
  modified_base 3363: mod_base = OTHER; note = N1-methyl pseudouridine
  modified_base 3364: mod_base = OTHER; note = N1-methyl pseudouridine
  modified_base 3366: mod_base = OTHER; note = N1-methyl pseudouridine
  modified_base 3368: mod_base = OTHER; note = N1-methyl pseudouridine
  modified_base 3373: mod_base = OTHER; note = N1-methyl pseudouridine
  modified_base 3377: mod_base = OTHER; note = N1-methyl pseudouridine
  modified_base 3383: mod_base = OTHER; note = N1-methyl pseudouridine
  modified_base 3387: mod_base = OTHER; note = N1-methyl pseudouridine
  modified_base 3388: mod_base = OTHER; note = N1-methyl pseudouridine
  modified_base 3391: mod_base = OTHER; note = N1-methyl pseudouridine
  modified_base 3403: mod_base = OTHER; note = N1-methyl pseudouridine
  modified_base 3404: mod_base = OTHER; note = N1-methyl pseudouridine
  modified_base 3406: mod_base = OTHER; note = N1-methyl pseudouridine
  modified_base 3413: mod_base = OTHER; note = N1-methyl pseudouridine
  modified_base 3421: mod_base = OTHER; note = N1-methyl pseudouridine
  modified_base 3433: mod_base = OTHER; note = N1-methyl pseudouridine
  modified_base 3434: mod_base = OTHER; note = N1-methyl pseudouridine
  modified_base 3442: mod_base = OTHER; note = N1-methyl pseudouridine
  modified_base 3445: mod_base = OTHER; note = N1-methyl pseudouridine
  modified_base 3446: mod_base = OTHER; note = N1-methyl pseudouridine
  modified_base 3449: mod_base = OTHER; note = N1-methyl pseudouridine
  modified_base 3450: mod_base = OTHER; note = N1-methyl pseudouridine
  modified_base 3457: mod_base = OTHER; note = N1-methyl pseudouridine
  modified_base 3464: mod_base = OTHER; note = N1-methyl pseudouridine
  modified_base 3468: mod_base = OTHER; note = N1-methyl pseudouridine
  modified_base 3470: mod_base = OTHER; note = N1-methyl pseudouridine
  modified_base 3473: mod_base = OTHER; note = N1-methyl pseudouridine
  modified_base 3482: mod_base = OTHER; note = N1-methyl pseudouridine
  modified_base 3487: mod_base = OTHER; note = N1-methyl pseudouridine
  modified_base 3490: mod_base = OTHER; note = N1-methyl pseudouridine
  modified_base 3499: mod_base = OTHER; note = N1-methyl pseudouridine
  modified_base 3505: mod_base = OTHER; note = N1-methyl pseudouridine
  modified_base 3508: mod_base = OTHER; note = N1-methyl pseudouridine
  modified_base 3514: mod_base = OTHER; note = N1-methyl pseudouridine
  modified_base 3515: mod_base = OTHER; note = N1-methyl pseudouridine
  modified_base 3519: mod_base = OTHER; note = N1-methyl pseudouridine
  modified_base 3526: mod_base = OTHER; note = N1-methyl pseudouridine
  modified_base 3529: mod_base = OTHER; note = N1-methyl pseudouridine
  modified_base 3536: mod_base = OTHER; note = N1-methyl pseudouridine
  modified_base 3537: mod_base = OTHER; note = N1-methyl pseudouridine
  modified_base 3538: mod_base = OTHER; note = N1-methyl pseudouridine
  modified_base 3539: mod_base = OTHER; note = N1-methyl pseudouridine
  modified_base 3549: mod_base = OTHER; note = N1-methyl pseudouridine
  modified_base 3550: mod_base = OTHER; note = N1-methyl pseudouridine
  modified_base 3555: mod_base = OTHER; note = N1-methyl pseudouridine
  modified_base 3556: mod_base = OTHER; note = N1-methyl pseudouridine
  modified_base 3557: mod_base = OTHER; note = N1-methyl pseudouridine
  modified_base 3558: mod_base = OTHER; note = N1-methyl pseudouridine
  modified_base 3560: mod_base = OTHER; note = N1-methyl pseudouridine
  modified_base 3565: mod_base = OTHER; note = N1-methyl pseudouridine
  modified_base 3574: mod_base = OTHER; note = N1-methyl pseudouridine
  modified_base 3581: mod_base = OTHER; note = N1-methyl pseudouridine
  modified_base 3582: mod_base = OTHER; note = N1-methyl pseudouridine
  modified_base 3584: mod_base = OTHER; note = N1-methyl pseudouridine
  modified_base 3587: mod_base = OTHER; note = N1-methyl pseudouridine
  modified_base 3596: mod_base = OTHER; note = N1-methyl pseudouridine
  modified_base 3602: mod_base = OTHER; note = N1-methyl pseudouridine
  modified_base 3603: mod_base = OTHER; note = N1-methyl pseudouridine
  modified_base 3607: mod_base = OTHER; note = N1-methyl pseudouridine
  modified_base 3616: mod_base = OTHER; note = N1-methyl pseudouridine
  modified_base 3617: mod_base = OTHER; note = N1-methyl pseudouridine
  modified_base 3619: mod_base = OTHER; note = N1-methyl pseudouridine
  modified_base 3631: mod_base = OTHER; note = N1-methyl pseudouridine
  modified_base 3632: mod_base = OTHER; note = N1-methyl pseudouridine
  modified_base 3634: mod_base = OTHER; note = N1-methyl pseudouridine
  modified_base 3642: mod_base = OTHER; note = N1-methyl pseudouridine
  modified_base 3651: mod_base = OTHER; note = N1-methyl pseudouridine
  modified_base 3652: mod_base = OTHER; note = N1-methyl pseudouridine
  modified_base 3659: mod_base = OTHER; note = N1-methyl pseudouridine
  modified_base 3663: mod_base = OTHER; note = N1-methyl pseudouridine
  modified_base 3664: mod_base = OTHER; note = N1-methyl pseudouridine
  modified_base 3665: mod_base = OTHER; note = N1-methyl pseudouridine
  modified_base 3667: mod_base = OTHER; note = N1-methyl pseudouridine
  modified_base 3669: mod_base = OTHER; note = N1-methyl pseudouridine
  modified_base 3671: mod_base = OTHER; note = N1-methyl pseudouridine
  modified_base 3678: mod_base = OTHER; note = N1-methyl pseudouridine
  modified_base 3680: mod_base = OTHER; note = N1-methyl pseudouridine
  modified_base 3685: mod_base = OTHER; note = N1-methyl pseudouridine
  modified_base 3687: mod_base = OTHER; note = N1-methyl pseudouridine
  modified_base 3692: mod_base = OTHER; note = N1-methyl pseudouridine
  modified_base 3694: mod_base = OTHER; note = N1-methyl pseudouridine
  modified_base 3703: mod_base = OTHER; note = N1-methyl pseudouridine
  modified_base 3706: mod_base = OTHER; note = N1-methyl pseudouridine
  modified_base 3707: mod_base = OTHER; note = N1-methyl pseudouridine
  modified_base 3714: mod_base = OTHER; note = N1-methyl pseudouridine
  modified_base 3727: mod_base = OTHER; note = N1-methyl pseudouridine
  modified_base 3731: mod_base = OTHER; note = N1-methyl pseudouridine
  modified_base 3740: mod_base = OTHER; note = N1-methyl pseudouridine
  modified_base 3743: mod_base = OTHER; note = N1-methyl pseudouridine
  modified_base 3747: mod_base = OTHER; note = N1-methyl pseudouridine
  modified_base 3750: mod_base = OTHER; note = N1-methyl pseudouridine
  modified_base 3751: mod_base = OTHER; note = N1-methyl pseudouridine
  modified_base 3753: mod_base = OTHER; note = N1-methyl pseudouridine
  modified_base 3754: mod_base = OTHER; note = N1-methyl pseudouridine
  modified_base 3755: mod_base = OTHER; note = N1-methyl pseudouridine
  modified_base 3756: mod_base = OTHER; note = N1-methyl pseudouridine
  modified_base 3759: mod_base = OTHER; note = N1-methyl pseudouridine
  modified_base 3764: mod_base = OTHER; note = N1-methyl pseudouridine
  modified_base 3766: mod_base = OTHER; note = N1-methyl pseudouridine
  modified_base 3767: mod_base = OTHER; note = N1-methyl pseudouridine
  modified_base 3769: mod_base = OTHER; note = N1-methyl pseudouridine
  modified_base 3774: mod_base = OTHER; note = N1-methyl pseudouridine
  modified_base 3775: mod_base = OTHER; note = N1-methyl pseudouridine
  modified_base 3776: mod_base = OTHER; note = N1-methyl pseudouridine
  modified_base 3777: mod_base = OTHER; note = N1-methyl pseudouridine
  modified_base 3778: mod_base = OTHER; note = N1-methyl pseudouridine
  modified_base 3790: mod_base = OTHER; note = N1-methyl pseudouridine
  modified_base 3794: mod_base = OTHER; note = N1-methyl pseudouridine
  modified_base 3796: mod_base = OTHER; note = N1-methyl pseudouridine
  modified_base 3800: mod_base = OTHER; note = N1-methyl pseudouridine
  modified_base 3811: mod_base = OTHER; note = N1-methyl pseudouridine
  modified_base 3812: mod_base = OTHER; note = N1-methyl pseudouridine
  modified_base 3825: mod_base = OTHER; note = N1-methyl pseudouridine
  modified_base 3826: mod_base = OTHER; note = N1-methyl pseudouridine
  modified_base 3829: mod_base = OTHER; note = N1-methyl pseudouridine
  modified_base 3839: mod_base = OTHER; note = N1-methyl pseudouridine
  modified_base 3848: mod_base = OTHER; note = N1-methyl pseudouridine
  modified_base 3851: mod_base = OTHER; note = N1-methyl pseudouridine
  modified_base 3856: mod_base = OTHER; note = N1-methyl pseudouridine
  modified_base 3859: mod_base = OTHER; note = N1-methyl pseudouridine
  modified_base 3860: mod_base = OTHER; note = N1-methyl pseudouridine
  modified_base 3861: mod_base = OTHER; note = N1-methyl pseudouridine
  modified_base 3878: mod_base = OTHER; note = N1-methyl pseudouridine
  modified_base 3879: mod_base = OTHER; note = N1-methyl pseudouridine
  modified_base 3880: mod_base = OTHER; note = N1-methyl pseudouridine
  modified_base 3889: mod_base = OTHER; note = N1-methyl pseudouridine
  modified_base 3898: mod_base = OTHER; note = N1-methyl pseudouridine
  modified_base 3901: mod_base = OTHER; note = N1-methyl pseudouridine
  modified_base 3903: mod_base = OTHER; note = N1-methyl pseudouridine
  modified_base 3907: mod_base = OTHER; note = N1-methyl pseudouridine
  modified_base 3916: mod_base = OTHER; note = N1-methyl pseudouridine
  modified_base 3920: mod_base = OTHER; note = N1-methyl pseudouridine
  modified_base 3922: mod_base = OTHER; note = N1-methyl pseudouridine
  modified_base 3925: mod_base = OTHER; note = N1-methyl pseudouridine
  modified_base 3940: mod_base = OTHER; note = N1-methyl pseudouridine
  modified_base 3953: mod_base = OTHER; note = N1-methyl pseudouridine
  modified_base 3954: mod_base = OTHER; note = N1-methyl pseudouridine
  modified_base 3955: mod_base = OTHER; note = N1-methyl pseudouridine
  modified_base 3957: mod_base = OTHER; note = N1-methyl pseudouridine
  modified_base 3966: mod_base = OTHER; note = N1-methyl pseudouridine
  modified_base 3970: mod_base = OTHER; note = N1-methyl pseudouridine
  modified_base 3973: mod_base = OTHER; note = N1-methyl pseudouridine
  modified_base 3986: mod_base = OTHER; note = N1-methyl pseudouridine
  modified_base 3987: mod_base = OTHER; note = N1-methyl pseudouridine
  modified_base 3997: mod_base = OTHER; note = N1-methyl pseudouridine
  modified_base 4000: mod_base = OTHER; note = N1-methyl pseudouridine
  modified_base 4004: mod_base = OTHER; note = N1-methyl pseudouridine
  modified_base 4017: mod_base = OTHER; note = N1-methyl pseudouridine
  modified_base 4022: mod_base = OTHER; note = N1-methyl pseudouridine
  modified_base 4032: mod_base = OTHER; note = N1-methyl pseudouridine
  modified_base 4034: mod_base = OTHER; note = N1-methyl pseudouridine
  modified_base 4041: mod_base = OTHER; note = N1-methyl pseudouridine
  modified_base 4042: mod_base = OTHER; note = N1-methyl pseudouridine
  modified_base 4043: mod_base = OTHER; note = N1-methyl pseudouridine
  modified_base 4046: mod_base = OTHER; note = N1-methyl pseudouridine
  modified_base 4047: mod_base = OTHER; note = N1-methyl pseudouridine
  modified_base 4057: mod_base = OTHER; note = N1-methyl pseudouridine
  modified_base 4062: mod_base = OTHER; note = N1-methyl pseudouridine
  modified_base 4064: mod_base = OTHER; note = N1-methyl pseudouridine
  modified_base 4065: mod_base = OTHER; note = N1-methyl pseudouridine
  modified_base 4069: mod_base = OTHER; note = N1-methyl pseudouridine
  modified_base 4072: mod_base = OTHER; note = N1-methyl pseudouridine
  modified_base 4075: mod_base = OTHER; note = N1-methyl pseudouridine
  modified_base 4078: mod_base = OTHER; note = N1-methyl pseudouridine
  modified_base 4082: mod_base = OTHER; note = N1-methyl pseudouridine
  modified_base 4087: mod_base = OTHER; note = N1-methyl pseudouridine
  modified_base 4101: mod_base = OTHER; note = N1-methyl pseudouridine
  modified_base 4103: mod_base = OTHER; note = N1-methyl pseudouridine
  modified_base 4111: mod_base = OTHER; note = N1-methyl pseudouridine
  modified_base 4112: mod_base = OTHER; note = N1-methyl pseudouridine
  modified_base 4116: mod_base = OTHER; note = N1-methyl pseudouridine
  modified_base 4118: mod_base = OTHER; note = N1-methyl pseudouridine
  modified_base 4120: mod_base = OTHER; note = N1-methyl pseudouridine
  modified_base 4129: mod_base = OTHER; note = N1-methyl pseudouridine
  modified_base 4132: mod_base = OTHER; note = N1-methyl pseudouridine
  modified_base 4138: mod_base = OTHER; note = N1-methyl pseudouridine
  modified_base 4144: mod_base = OTHER; note = N1-methyl pseudouridine
  modified_base 4145: mod_base = OTHER; note = N1-methyl pseudouridine
  modified_base 4147: mod_base = OTHER; note = N1-methyl pseudouridine
  modified_base 4157: mod_base = OTHER; note = N1-methyl pseudouridine
  modified_base 4161: mod_base = OTHER; note = N1-methyl pseudouridine
  modified_base 4162: mod_base = OTHER; note = N1-methyl pseudouridine
  modified_base 4175: mod_base = OTHER; note = N1-methyl pseudouridine
  modified_base 4177: mod_base = OTHER; note = N1-methyl pseudouridine
  modified_base 4181: mod_base = OTHER; note = N1-methyl pseudouridine
  modified_base 4182: mod_base = OTHER; note = N1-methyl pseudouridine
  modified_base 4183: mod_base = OTHER; note = N1-methyl pseudouridine
  modified_base 4184: mod_base = OTHER; note = N1-methyl pseudouridine
  modified_base 4186: mod_base = OTHER; note = N1-methyl pseudouridine
  modified_base 4200: mod_base = OTHER; note = N1-methyl pseudouridine
  modified_base 4202: mod_base = OTHER; note = N1-methyl pseudouridine
  modified_base 4210: mod_base = OTHER; note = N1-methyl pseudouridine
  modified_base 4211: mod_base = OTHER; note = N1-methyl pseudouridine
  modified_base 4220: mod_base = OTHER; note = N1-methyl pseudouridine
  modified_base 4222: mod_base = OTHER; note = N1-methyl pseudouridine
  modified_base 4225: mod_base = OTHER; note = N1-methyl pseudouridine
  modified_base 4228: mod_base = OTHER; note = N1-methyl pseudouridine
  modified_base 4234: mod_base = OTHER; note = N1-methyl pseudouridine
  modified_base 4242: mod_base = OTHER; note = N1-methyl pseudouridine
  modified_base 4244: mod_base = OTHER; note = N1-methyl pseudouridine
  modified_base 4247: mod_base = OTHER; note = N1-methyl pseudouridine
  modified_base 4249: mod_base = OTHER; note = N1-methyl pseudouridine
  modified_base 4250: mod_base = OTHER; note = N1-methyl pseudouridine
  modified_base 4251: mod_base = OTHER; note = N1-methyl pseudouridine
  modified_base 4252: mod_base = OTHER; note = N1-methyl pseudouridine
  modified_base 4253: mod_base = OTHER; note = N1-methyl pseudouridine
  modified_base 4257: mod_base = OTHER; note = N1-methyl pseudouridine
  modified_base 4258: mod_base = OTHER; note = N1-methyl pseudouridine
  modified_base 4279: mod_base = OTHER; note = N1-methyl pseudouridine
  modified_base 4282: mod_base = OTHER; note = N1-methyl pseudouridine
  modified_base 4283: mod_base = OTHER; note = N1-methyl pseudouridine
  modified_base 4287: mod_base = OTHER; note = N1-methyl pseudouridine
  modified_base 4289: mod_base = OTHER; note = N1-methyl pseudouridine
  modified_base 4295: mod_base = OTHER; note = N1-methyl pseudouridine
  modified_base 4299: mod_base = OTHER; note = N1-methyl pseudouridine
  modified_base 4300: mod_base = OTHER; note = N1-methyl pseudouridine
  modified_base 4313: mod_base = OTHER; note = N1-methyl pseudouridine
  modified_base 4318: mod_base = OTHER; note = N1-methyl pseudouridine
  modified_base 4323: mod_base = OTHER; note = N1-methyl pseudouridine
  modified_base 4324: mod_base = OTHER; note = N1-methyl pseudouridine
  modified_base 4329: mod_base = OTHER; note = N1-methyl pseudouridine
  modified_base 4335: mod_base = OTHER; note = N1-methyl pseudouridine
  modified_base 4337: mod_base = OTHER; note = N1-methyl pseudouridine
  modified_base 4339: mod_base = OTHER; note = N1-methyl pseudouridine
  modified_base 4343: mod_base = OTHER; note = N1-methyl pseudouridine
  modified_base 4344: mod_base = OTHER; note = N1-methyl pseudouridine
  modified_base 4345: mod_base = OTHER; note = N1-methyl pseudouridine
  modified_base 4347: mod_base = OTHER; note = N1-methyl pseudouridine
  modified_base 4348: mod_base = OTHER; note = N1-methyl pseudouridine
  modified_base 4350: mod_base = OTHER; note = N1-methyl pseudouridine
  modified_base 4354: mod_base = OTHER; note = N1-methyl pseudouridine
  modified_base 4355: mod_base = OTHER; note = N1-methyl pseudouridine
  modified_base 4361: mod_base = OTHER; note = N1-methyl pseudouridine
  modified_base 4365: mod_base = OTHER; note = N1-methyl pseudouridine
  modified_base 4367: mod_base = OTHER; note = N1-methyl pseudouridine
  modified_base 4375: mod_base = OTHER; note = N1-methyl pseudouridine
  modified_base 4394: mod_base = OTHER; note = N1-methyl pseudouridine
  modified_base 4397: mod_base = OTHER; note = N1-methyl pseudouridine
  modified_base 4410: mod_base = OTHER; note = N1-methyl pseudouridine
  modified_base 4411: mod_base = OTHER; note = N1-methyl pseudouridine
  modified_base 4413: mod_base = OTHER; note = N1-methyl pseudouridine
  modified_base 4414: mod_base = OTHER; note = N1-methyl pseudouridine
  modified_base 4417: mod_base = OTHER; note = N1-methyl pseudouridine
  modified_base 4418: mod_base = OTHER; note = N1-methyl pseudouridine
  modified_base 4427: mod_base = OTHER; note = N1-methyl pseudouridine
  modified_base 4433: mod_base = OTHER; note = N1-methyl pseudouridine
  modified_base 4434: mod_base = OTHER; note = N1-methyl pseudouridine
  modified_base 4436: mod_base = OTHER; note = N1-methyl pseudouridine
  modified_base 4437: mod_base = OTHER; note = N1-methyl pseudouridine
  modified_base 4438: mod_base = OTHER; note = N1-methyl pseudouridine
  modified_base 4447: mod_base = OTHER; note = N1-methyl pseudouridine
  modified_base 4450: mod_base = OTHER; note = N1-methyl pseudouridine
  modified_base 4459: mod_base = OTHER; note = N1-methyl pseudouridine
  modified_base 4467: mod_base = OTHER; note = N1-methyl pseudouridine
  modified_base 4468: mod_base = OTHER; note = N1-methyl pseudouridine
  modified_base 4480: mod_base = OTHER; note = N1-methyl pseudouridine
  modified_base 4483: mod_base = OTHER; note = N1-methyl pseudouridine
  modified_base 4486: mod_base = OTHER; note = N1-methyl pseudouridine
aggaaataagagagaaaagaagagtaagaagaaatataagagccaccatgtcagaagtagaattctcccacgagtattggatgagacacgctctcacactcgccaagcgagctagggatgaaagggaagtaccagtgggggccgtactggtactcaacaatagggtcataggagaggggtggaatcgagcaattgggctgcatgatcccactgcacacgcggagattatggctcttagacaagggggcctggtgatgcagaattaccgcctcattgacgcaaccctttacgtgacatttgagccatgcgttatgtgcgcgggcgcaatgatacactctaggataggccgcgtagttttcggagtccgaaatgcgaagactggggcggccggatctctgatggacgtgctccaccatccaggcatgaaccaccgagtggagataacggaaggcatcttggcggacgaatgtgctgcgctcctttgcaggttcttccggatgccaagacgggtattcaacgcgcagaagaaggcacagtcaagcactgatagtggcggcagttccggaggatctagtgggtccgaaacgccagggacctccgaatccgcaactcccgaaagttcaggaggctcctccggcggcagcgacaagaagtactccattggtctggcgatcggtacgaatagtgttgggtgggctgtaataactgacgagtataaggtgcccagtaagaagttcaaagtcctggggaacacagaccgacatagcatcaagaagaacctgataggtgcgctcttgtttgactccggagagacagcagaagccacacgacttaaacgaaccgctcgaaggcggtacacacggcgaaagaataggatttgttacctgcaggagatatttagcaacgagatggcaaaggttgacgattccttcttccaccggcttgaagagtctttcctggtggaggaggacaagaaacatgaacgccaccccatatttggcaatatagtggacgaagtagcataccatgagaaataccctaccatatatcatcttcgaaagaagcttgtagattcaacggataaagcagatctcaggttgatatatctggcactggcacacatgatcaagtttcgaggtcactttcttatcgagggcgatcttaatccggacaactccgacgtggataagctgttcatccagctcgtccaaacgtataaccaactcttcgaggagaatccgatcaatgcctctggagtggacgcgaaagcgatactctcagcaaggcttagtaagtctcgccggcttgagaacctcatcgcacagttgccaggagagaagaagaatggcttgtttggtaaccttattgcactcagtctcggccttacacctaacttcaagtccaacttcgatcttgccgaggacgccaagctccagcttagcaaggatacctacgatgacgatcttgataacctgctggcccagataggcgaccagtacgcggaccttttcttggcagcaaagaatttgtccgacgccatcctcttgagcgacatcctccgggtaaacactgaaattactaaggcgccactttccgccagcatgatcaagagatacgatgagcatcatcaggatctgaccctgcttaaagcgcttgtacgccagcaattgcctgagaagtataaagaaatctttttcgaccaaagcaagaacggttatgctggctacatagacggcggggcttctcaggaggaattctacaagtttatcaagccgattctcgagaagatggatggaacagaggagctgttggtgaaactgaaccgggaggacctgctcagaaagcagcggaccttcgataatgggagcatcccgcaccagattcatttgggtgagctgcatgcaatcttgcgcaggcaagaagatttttaccccttcctcaaggacaatagagagaagattgagaagatccttacgtttaggattccgtattacgtaggcccgctcgcacgcggtaattctcgctttgcgtggatgacacgaaagagcgaggaaaccataacaccctggaactttgaagaggtcgtcgataagggtgccagcgcacaatcatttatcgaacgaatgactaatttcgataagaatctcccaaatgagaaggtgttgccaaagcatagccttttgtatgagtattttactgtatacaacgagctcaccaaggtgaaatatgtcactgaagggatgcgcaagccggcctttttgagcggagaacagaagaaagctattgtagacttgctttttaagacgaatagaaaggttacggtcaagcagctcaaagaagactactttaagaagatagaatgctttgactctgtcgagattagtggggtagaggatcgattcaatgcaagcctggggacataccacgatctcttgaagattatcaaggataaggattttctggacaacgaagagaatgaagacatcttggaagatattgttttgactttgactcttttcgaagatcgcgagatgatagaggaaaggttgaagacttatgcccatctttttgatgacaaggttatgaaacaactgaagagacggcgatatactggttgggggagactctcacgaaagctcattaacggcatccgggacaaacagagtggtaagacgattttggacttccttaagagcgacgggtttgcgaataggaacttcatgcagttgatccatgatgattctttgacctttaaggaggatatacagaaggcacaagtcagtggacaaggagatagtctgcatgagcacattgccaaccttgcgggctccccagccatcaagaagggtatcctgcaaaccgtcaaagtagtagatgaacttgtgaaagtcatgggacgacataagcctgagaatattgtgatcgaaatggctagggagaatcagacgactcagaagggtcagaagaattccagggaacggatgaagagaatagaggagggaattaaggaactcgggtcacaaatattgaaggagcatcctgtagagaacacacagcttcagaacgagaagctgtacctgtattatctccagaatggcagagacatgtatgtcgaccaagaactggatatcaatcgcttgtccgattatgatgtagatcacatagtcccacaatccttcttgaaagacgatagtattgacaataaggtacttacgagatccgacaagaaccgcggaaagtccgataacgtaccgagtgaagaagtggtaaagaagatgaagaattattggaggcagctcctcaacgccaaacttattactcagagaaagttcgataaccttacgaaagctgagcgaggcgggttgtctgagctcgataaagctggattcataaagcggcagcttgtggaaactagacagatcacaaagcacgttgcacagatccttgattccagaatgaacactaaatatgatgagaacgataagctgatacgcgaggtgaaagtaataacacttaagtcaaagctggtaagcgattttcgcaaagacttccaattttataaggtcagagagataaacaattatcatcacgcgcatgacgcttacctgaacgcagttgtggggacagcacttataaagaaatacccaaagttggaaagtgaatttgtctatggagactataaggtatacgatgtacggaagatgattgcgaagtcagagcaagaaatcggtaaggcaactgctaagtacttcttttactcaaatattatgaactttttcaagacggaaatcactctggctaacggagaaattcggaagaggcccttgatagagacgaatggggagactggtgagatcgtttgggacaaagggcgagatttcgcaacggtccgaaaggtgctctcaatgccacaagtcaatatagtcaagaagacagaggtacaaacaggaggtttctccaaggaatcaatactcccaaagcggaattccgacaaactgatagctagaaagaaggactgggatccgaagaagtatggagggtttgattccccaacagtagcgtattcagtactggtggtagctaaggtggagaaaggcaagtctaagaagcttaagtctgtcaaagagctgctcggcatcaccattatggagcgcagtagcttcgagaagaaccctatagattttctggaagccaaaggatataaggaggttaagaaggatctcatcatcaaactcccgaagtatagtctttttgagttggagaacggacgaaagcgcatgcttgcgtctgcgggtgaattgcagaaaggaaatgagctcgccttgccgtcaaagtatgtcaatttcttgtaccttgcgagtcactatgagaagctgaaaggaagcccagaagataatgaacagaagcaattgttcgttgaacaacataagcattatttggacgagatcatcgagcaaatcagcgagttcagcaagcgcgtcatacttgcggacgccaatctggacaaagtgctgtccgcctataacaaacatagggacaaacctatacgagagcaggcagagaatataatacatctcttcacacttactaatcttggagctccagccgcattcaagtattttgacacgactatagatcgcaagcgatatacctctacgaaagaagttctggacgctactcttatacatcaatccattacgggcctgtacgagacgaggattgacttgtcacagcttggtggtgacgagggtgcagacaagcgaacagcggacgggtcagaattcgaaagccccaagaagaagcggaaagtttaagcggccgcttaattaagctgccttctgcggggcttgccttctggccatgcccttcttctctcccttgcacctgtacctcttggtctttgaataaagcctgagtaggaagtctaga

SEQ ID NO: 2169 - RNA, 501 nt, synthetic construct
  source 1..501: mol_type = other RNA
  modified_base 2: mod_base = OTHER; note = N1-methyl pseudouridine
  modified_base 4: mod_base = OTHER; note = N1-methyl pseudouridine
  modified_base 11: mod_base = OTHER; note = N1-methyl pseudouridine
  modified_base 16: mod_base = OTHER; note = N1-methyl pseudouridine
  modified_base 17: mod_base = OTHER; note = N1-methyl pseudouridine
  modified_base 19: mod_base = OTHER; note = N1-methyl pseudouridine
  modified_base 28: mod_base = OTHER; note = N1-methyl pseudouridine
  modified_base 30: mod_base = OTHER; note = N1-methyl pseudouridine
  modified_base 31: mod_base = OTHER; note = N1-methyl pseudouridine
  modified_base 35: mod_base = OTHER; note = N1-methyl pseudouridine
  modified_base 45: mod_base = OTHER; note = N1-methyl pseudouridine
  modified_base 47: mod_base = OTHER; note = N1-methyl pseudouridine
  modified_base 53: mod_base = OTHER; note = N1-methyl pseudouridine
  modified_base 66: mod_base = OTHER; note = N1-methyl pseudouridine
  modified_base 72: mod_base = OTHER; note = N1-methyl pseudouridine
  modified_base 83: mod_base = OTHER; note = N1-methyl pseudouridine
  modified_base 89: mod_base = OTHER; note = N1-methyl pseudouridine
  modified_base 98: mod_base = OTHER; note = N1-methyl pseudouridine
  modified_base 101: mod_base = OTHER; note = N1-methyl pseudouridine
  modified_base 104: mod_base = OTHER; note = N1-methyl pseudouridine
  modified_base 107: mod_base = OTHER; note = N1-methyl pseudouridine
  modified_base 114: mod_base = OTHER; note = N1-methyl pseudouridine
  modified_base 119: mod_base = OTHER; note = N1-methyl pseudouridine
  modified_base 122: mod_base = OTHER; note = N1-methyl pseudouridine
  modified_base 133: mod_base = OTHER; note = N1-methyl pseudouridine
  modified_base 138: mod_base = OTHER; note = N1-methyl pseudouridine
  modified_base 146: mod_base = OTHER; note = N1-methyl pseudouridine
  modified_base 147: mod_base = OTHER; note = N1-methyl pseudouridine
  modified_base 152: mod_base = OTHER; note = N1-methyl pseudouridine
  modified_base 156: mod_base = OTHER; note = N1-methyl pseudouridine
  modified_base 159: mod_base = OTHER; note = N1-methyl pseudouridine
  modified_base 165: mod_base = OTHER; note = N1-methyl pseudouridine
  modified_base 179: mod_base = OTHER; note = N1-methyl pseudouridine
  modified_base 180: mod_base = OTHER; note = N1-methyl pseudouridine
  modified_base 182: mod_base = OTHER; note = N1-methyl pseudouridine
  modified_base 186: mod_base = OTHER; note = N1-methyl pseudouridine
  modified_base 188: mod_base = OTHER; note = N1-methyl pseudouridine
  modified_base 189: mod_base = OTHER; note = N1-methyl pseudouridine
  modified_base 203: mod_base = OTHER; note = N1-methyl pseudouridine
  modified_base 206: mod_base = OTHER; note = N1-methyl pseudouridine
  modified_base 209: mod_base = OTHER; note = N1-methyl pseudouridine
  modified_base 216: mod_base = OTHER; note = N1-methyl pseudouridine
  modified_base 217: mod_base = OTHER; note = N1-methyl pseudouridine
  modified_base 224: mod_base = OTHER; note = N1-methyl pseudouridine
  modified_base 227: mod_base = OTHER; note = N1-methyl pseudouridine
  modified_base 228: mod_base = OTHER; note = N1-methyl pseudouridine
  modified_base 239: mod_base = OTHER; note = N1-methyl pseudouridine
  modified_base 240: mod_base = OTHER; note = N1-methyl pseudouridine
  modified_base 241: mod_base = OTHER; note = N1-methyl pseudouridine
  modified_base 245: mod_base = OTHER; note = N1-methyl pseudouridine
  modified_base 250: mod_base = OTHER; note = N1-methyl pseudouridine
  modified_base 251: mod_base = OTHER; note = N1-methyl pseudouridine
  modified_base 252: mod_base = OTHER; note = N1-methyl pseudouridine
  modified_base 259: mod_base = OTHER; note = N1-methyl pseudouridine
  modified_base 263: mod_base = OTHER; note = N1-methyl pseudouridine
  modified_base 264: mod_base = OTHER; note = N1-methyl pseudouridine
  modified_base 266: mod_base = OTHER; note = N1-methyl pseudouridine
  modified_base 268: mod_base = OTHER; note = N1-methyl pseudouridine
  modified_base 281: mod_base = OTHER; note = N1-methyl pseudouridine
  modified_base 284: mod_base = OTHER; note = N1-methyl pseudouridine
  modified_base 289: mod_base = OTHER; note = N1-methyl pseudouridine
  modified_base 291: mod_base = OTHER; note = N1-methyl pseudouridine
  modified_base 296: mod_base = OTHER; note = N1-methyl pseudouridine
  modified_base 305: mod_base = OTHER; note = N1-methyl pseudouridine
  modified_base 308: mod_base = OTHER; note = N1-methyl pseudouridine
  modified_base 309: mod_base = OTHER; note = N1-methyl pseudouridine
  modified_base 310: mod_base = OTHER; note = N1-methyl pseudouridine
  modified_base 311: mod_base = OTHER; note = N1-methyl pseudouridine
  modified_base 317: mod_base = OTHER; note = N1-methyl pseudouridine
  modified_base 324: mod_base = OTHER; note = N1-methyl pseudouridine
  modified_base 333: mod_base = OTHER; note = N1-methyl pseudouridine
  modified_base 346: mod_base = OTHER; note = N1-methyl pseudouridine
  modified_base 348: mod_base = OTHER; note = N1-methyl pseudouridine
  modified_base 350: mod_base = OTHER; note = N1-methyl pseudouridine
  modified_base 353: mod_base = OTHER; note = N1-methyl pseudouridine
  modified_base 359: mod_base = OTHER; note = N1-methyl pseudouridine
  modified_base 362: mod_base = OTHER; note = N1-methyl pseudouridine
  modified_base 369: mod_base = OTHER; note = N1-methyl pseudouridine
  modified_base 377: mod_base = OTHER; note = N1-methyl pseudouridine
  modified_base 389: mod_base = OTHER; note = N1-methyl pseudouridine
  modified_base 395: mod_base = OTHER; note = N1-methyl pseudouridine
  modified_base 407: mod_base = OTHER; note = N1-methyl pseudouridine
  modified_base 409: mod_base = OTHER; note = N1-methyl pseudouridine
  modified_base 410: mod_base = OTHER; note = N1-methyl pseudouridine
  modified_base 421: mod_base = OTHER; note = N1-methyl pseudouridine
  modified_base 423: mod_base = OTHER; note = N1-methyl pseudouridine
  modified_base 426: mod_base = OTHER; note = N1-methyl pseudouridine
  modified_base 431: mod_base = OTHER; note = N1-methyl pseudouridine
  modified_base 434: mod_base = OTHER; note = N1-methyl pseudouridine
  modified_base 435: mod_base = OTHER; note = N1-methyl pseudouridine
  modified_base 436: mod_base = OTHER; note = N1-methyl pseudouridine
  modified_base 442: mod_base = OTHER; note = N1-methyl pseudouridine
  modified_base 443: mod_base = OTHER; note = N1-methyl pseudouridine
  modified_base 445: mod_base = OTHER; note = N1-methyl pseudouridine
  modified_base 446: mod_base = OTHER; note = N1-methyl pseudouridine
  modified_base 452: mod_base = OTHER; note = N1-methyl pseudouridine
  modified_base 464: mod_base = OTHER; note = N1-methyl pseudouridine
  modified_base 466: mod_base = OTHER; note = N1-methyl pseudouridine
  modified_base 467: mod_base = OTHER; note = N1-methyl pseudouridine
  modified_base 490: mod_base = OTHER; note = N1-methyl pseudouridine
  modified_base 498: mod_base = OTHER; note = N1-methyl pseudouridine
  modified_base 501: mod_base = OTHER; note = N1-methyl pseudouridine
atgtcagaagtagaattctcccacgagtattggatgagacacgctctcacactcgccaagcgagctagggatgaaagggaagtaccagtgggggccgtactggtactcaacaatagggtcataggagaggggtggaatcgagcaattgggctgcatgatcccactgcacacgcggagattatggctcttagacaagggggcctggtgatgcagaattaccgcctcattgacgcaaccctttacgtgacatttgagccatgcgttatgtgcgcgggcgcaatgatacactctaggataggccgcgtagttttcggagtccgaaatgcgaagactggggcggccggatctctgatggacgtgctccaccatccaggcatgaaccaccgagtggagataacggaaggcatcttggcggacgaatgtgctgcgctcctttgcaggttcttccggatgccaagacgggtattcaacgcgcagaagaaggcacagtcaagcactgat

SEQ ID NO: 2170 - RNA, 96 nt, synthetic construct
  source 1..96: mol_type = other RNA
  modified_base 3: mod_base = OTHER; note = N1-methyl pseudouridine
  modified_base 12: mod_base = OTHER; note = N1-methyl pseudouridine
  modified_base 13: mod_base = OTHER; note = N1-methyl pseudouridine
  modified_base 22: mod_base = OTHER; note = N1-methyl pseudouridine
  modified_base 24: mod_base = OTHER; note = N1-methyl pseudouridine
  modified_base 27: mod_base = OTHER; note = N1-methyl pseudouridine
  modified_base 31: mod_base = OTHER; note = N1-methyl pseudouridine
  modified_base 49: mod_base = OTHER; note = N1-methyl pseudouridine
  modified_base 55: mod_base = OTHER; note = N1-methyl pseudouridine
  modified_base 63: mod_base = OTHER; note = N1-methyl pseudouridine
  modified_base 72: mod_base = OTHER; note = N1-methyl pseudouridine
  modified_base 73: mod_base = OTHER; note = N1-methyl pseudouridine
  modified_base 82: mod_base = OTHER; note = N1-methyl pseudouridine
  modified_base 85: mod_base = OTHER; note = N1-methyl pseudouridine
agtggcggcagttccggaggatctagtgggtccgaaacgccagggacctccgaatccgcaactcccgaaagttcaggaggctcctccggcggcagc

SEQ ID NO: 2171 - RNA, 4101 nt, synthetic construct
  source 1..4101: mol_type = other RNA
  modified_base 10: mod_base = OTHER; note = N1-methyl pseudouridine
  modified_base 13: mod_base = OTHER; note = N1-methyl pseudouridine
  modified_base 17: mod_base = OTHER; note = N1-methyl pseudouridine
  modified_base 18: mod_base = OTHER; note = N1-methyl pseudouridine
  modified_base 21: mod_base = OTHER; note = N1-methyl pseudouridine
  modified_base 23: mod_base = OTHER; note = N1-methyl pseudouridine
  modified_base 29: mod_base = OTHER; note = N1-methyl pseudouridine
  modified_base 33: mod_base = OTHER; note = N1-methyl pseudouridine
  modified_base 39: mod_base = OTHER; note = N1-methyl pseudouridine
  modified_base 42: mod_base = OTHER; note = N1-methyl pseudouridine
  modified_base 44: mod_base = OTHER; note = N1-methyl pseudouridine
  modified_base 45: mod_base = OTHER; note = N1-methyl pseudouridine
  modified_base 49: mod_base = OTHER; note = N1-methyl pseudouridine
  modified_base 54: mod_base = OTHER; note = N1-methyl pseudouridine
  modified_base 56: mod_base = OTHER; note = N1-methyl pseudouridine
  modified_base 59: mod_base = OTHER; note = N1-methyl pseudouridine
  modified_base 63: mod_base = OTHER; note = N1-methyl pseudouridine
  modified_base 70: mod_base = OTHER; note = N1-methyl pseudouridine
  modified_base 72: mod_base = OTHER; note = N1-methyl pseudouridine
  modified_base 77: mod_base = OTHER; note = N1-methyl pseudouridine
  modified_base 84: mod_base = OTHER; note = N1-methyl pseudouridine
  modified_base 91: mod_base = OTHER; note = N1-methyl pseudouridine
  modified_base 92: mod_base = OTHER; note = N1-methyl pseudouridine
  modified_base 98: mod_base = OTHER; note = N1-methyl pseudouridine
  modified_base 101: mod_base = OTHER; note = N1-methyl pseudouridine
  modified_base 120: mod_base = OTHER; note = N1-methyl pseudouridine
  modified_base 125: mod_base = OTHER; note = N1-methyl pseudouridine
  modified_base 137: mod_base = OTHER; note = N1-methyl pseudouridine
  modified_base 140: mod_base = OTHER; note = N1-methyl pseudouridine
  modified_base 144: mod_base = OTHER; note = N1-methyl pseudouridine
  modified_base 149: mod_base = OTHER; note = N1-methyl pseudouridine
  modified_base 151: mod_base = OTHER; note = N1-methyl pseudouridine
  modified_base 152: mod_base = OTHER; note = N1-methyl pseudouridine
  modified_base 154: mod_base = OTHER; note = N1-methyl pseudouridine
  modified_base 155: mod_base = OTHER; note = N1-methyl pseudouridine
  modified_base 156: mod_base = OTHER; note = N1-methyl pseudouridine
  modified_base 160: mod_base = OTHER; note = N1-methyl pseudouridine
  modified_base 188: mod_base = OTHER; note = N1-methyl pseudouridine
  modified_base 189: mod_base = OTHER; note = N1-methyl pseudouridine
  modified_base 201: mod_base = OTHER; note = N1-methyl pseudouridine
  modified_base 211: mod_base = OTHER; note = N1-methyl pseudouridine
  modified_base 228: mod_base = OTHER; note = N1-methyl pseudouridine
  modified_base 233: mod_base = OTHER; note = N1-methyl pseudouridine
  modified_base 234: mod_base = OTHER; note = N1-methyl pseudouridine
  modified_base 235: mod_base = OTHER; note = N1-methyl pseudouridine
  modified_base 237: mod_base = OTHER; note = N1-methyl pseudouridine
  modified_base 238: mod_base = OTHER; note = N1-methyl pseudouridine
  modified_base 242: mod_base = OTHER; note = N1-methyl pseudouridine
  modified_base 251: mod_base = OTHER; note = N1-methyl pseudouridine
  modified_base 253: mod_base = OTHER; note = N1-methyl pseudouridine
  modified_base 254: mod_base = OTHER; note = N1-methyl pseudouridine
  modified_base 255: mod_base = OTHER; note = N1-methyl pseudouridine
  modified_base 266: mod_base = OTHER; note = N1-methyl pseudouridine
  modified_base 275: mod_base = OTHER; note = N1-methyl pseudouridine
  modified_base 276: mod_base = OTHER; note = N1-methyl pseudouridine
  modified_base 282: mod_base = OTHER; note = N1-methyl pseudouridine
  modified_base 283: mod_base = OTHER; note = N1-methyl pseudouridine
  modified_base 286: mod_base = OTHER; note = N1-methyl pseudouridine
  modified_base 287: mod_base = OTHER; note = N1-methyl pseudouridine
  modified_base 289: mod_base = OTHER; note = N1-methyl pseudouridine
  modified_base 290: mod_base = OTHER; note = N1-methyl pseudouridine
  modified_base 299: mod_base = OTHER; note = N1-methyl pseudouridine
  modified_base 300: mod_base = OTHER; note = N1-methyl pseudouridine
  modified_base 307: mod_base = OTHER; note = N1-methyl pseudouridine
  modified_base 309: mod_base = OTHER; note = N1-methyl pseudouridine
  modified_base 310: mod_base = OTHER; note = N1-methyl pseudouridine
  modified_base 311: mod_base = OTHER; note = N1-methyl pseudouridine
  modified_base 314: mod_base = OTHER; note = N1-methyl pseudouridine
  modified_base 317: mod_base = OTHER; note = N1-methyl pseudouridine
  modified_base 336: mod_base = OTHER; note = N1-methyl pseudouridine
  modified_base 350: mod_base = OTHER; note = N1-methyl pseudouridine
  modified_base 352: mod_base = OTHER; note = N1-methyl pseudouridine
  modified_base 353: mod_base = OTHER; note = N1-methyl pseudouridine
  modified_base 354: mod_base = OTHER; note = N1-methyl pseudouridine
  modified_base 360: mod_base = OTHER; note = N1-methyl pseudouridine
  modified_base 362: mod_base = OTHER; note = N1-methyl pseudouridine
  modified_base 365: mod_base = OTHER; note = N1-methyl pseudouridine
  modified_base 374: mod_base = OTHER; note = N1-methyl pseudouridine
  modified_base 379: mod_base = OTHER; note = N1-methyl pseudouridine
  modified_base 384: mod_base = OTHER; note = N1-methyl pseudouridine
  modified_base 391: mod_base = OTHER; note = N1-methyl pseudouridine
  modified_base 396: mod_base = OTHER; note = N1-methyl pseudouridine
  modified_base 401: mod_base = OTHER; note = N1-methyl pseudouridine
  modified_base 403: mod_base = OTHER; note = N1-methyl pseudouridine
  modified_base 405: mod_base = OTHER; note = N1-methyl pseudouridine
  modified_base 408: mod_base = OTHER; note = N1-methyl pseudouridine
  modified_base 410: mod_base = OTHER; note = N1-methyl pseudouridine
  modified_base 411: mod_base = OTHER; note = N1-methyl pseudouridine
  modified_base 422: mod_base = OTHER; note = N1-methyl pseudouridine
  modified_base 423: mod_base = OTHER; note = N1-methyl pseudouridine
  modified_base 425: mod_base = OTHER; note = N1-methyl pseudouridine
  modified_base 429: mod_base = OTHER; note = N1-methyl pseudouridine
  modified_base 430: mod_base = OTHER; note = N1-methyl pseudouridine
  modified_base 438: mod_base = OTHER; note = N1-methyl pseudouridine
  modified_base 447: mod_base = OTHER; note = N1-methyl pseudouridine
  modified_base 449: mod_base = OTHER; note = N1-methyl pseudouridine
  modified_base 454: mod_base = OTHER; note = N1-methyl pseudouridine
  modified_base 455: mod_base = OTHER; note = N1-methyl pseudouridine
  modified_base 458: mod_base = OTHER; note = N1-methyl pseudouridine
  modified_base 460: mod_base = OTHER; note = N1-methyl pseudouridine
  modified_base 462: mod_base = OTHER; note = N1-methyl pseudouridine
  modified_base 464: mod_base = OTHER; note = N1-methyl pseudouridine
  modified_base 470: mod_base = OTHER; note = N1-methyl pseudouridine
  modified_base 479: mod_base = OTHER; note = N1-methyl pseudouridine
  modified_base 482: mod_base = OTHER; note = N1-methyl pseudouridine
  modified_base 487: mod_base = OTHER; note = N1-methyl pseudouridine
  modified_base 488: mod_base = OTHER; note = N1-methyl pseudouridine
  modified_base 489: mod_base = OTHER; note = N1-methyl pseudouridine
  modified_base 495: mod_base = OTHER; note = N1-methyl pseudouridine
  modified_base 499: mod_base = OTHER; note = N1-methyl pseudouridine
  modified_base 500: mod_base = OTHER; note = N1-methyl pseudouridine
  modified_base 501: mod_base = OTHER; note = N1-methyl pseudouridine
  modified_base 503: mod_base = OTHER; note = N1-methyl pseudouridine
  modified_base 504: mod_base = OTHER; note = N1-methyl pseudouridine
  modified_base 506: mod_base = OTHER; note = N1-methyl pseudouridine
  modified_base 516: mod_base = OTHER; note = N1-methyl pseudouridine
  modified_base 518: mod_base = OTHER; note = N1-methyl pseudouridine
  modified_base 519: mod_base = OTHER; note = N1-methyl pseudouridine
  modified_base 522: mod_base = OTHER; note = N1-methyl pseudouridine
  modified_base 532: mod_base = OTHER; note = N1-methyl pseudouridine
  modified_base 539: mod_base = OTHER; note = N1-methyl pseudouridine
  modified_base 543: mod_base = OTHER; note = N1-methyl pseudouridine
  modified_base 548: mod_base = OTHER; note = N1-methyl pseudouridine
  modified_base 550: mod_base = OTHER; note = N1-methyl pseudouridine
  modified_base 551: mod_base = OTHER; note = N1-methyl pseudouridine
  modified_base 554: mod_base = OTHER; note = N1-methyl pseudouridine
  modified_base 560: mod_base = OTHER; note = N1-methyl pseudouridine
  modified_base 563: mod_base = OTHER; note = N1-methyl pseudouridine
  modified_base 571: mod_base = OTHER; note = N1-methyl pseudouridine
  modified_base 573: mod_base = OTHER; note = N1-methyl pseudouridine
  modified_base 581: mod_base = OTHER; note = N1-methyl pseudouridine
  modified_base 583: mod_base = OTHER; note = N1-methyl pseudouridine
  modified_base 584: mod_base = OTHER; note = N1-methyl pseudouridine
  modified_base 594: mod_base = OTHER; note = N1-methyl pseudouridine
  modified_base 599: mod_base = OTHER; note = N1-methyl pseudouridine
  modified_base 603: mod_base = OTHER; note = N1-methyl pseudouridine
  modified_base 607: mod_base = OTHER; note = N1-methyl pseudouridine
  modified_base 609: mod_base = OTHER; note = N1-methyl pseudouridine
  modified_base 614: mod_base = OTHER; note = N1-methyl pseudouridine
  modified_base 629: mod_base = OTHER; note = N1-methyl pseudouridine
  modified_base 632: mod_base = OTHER; note = N1-methyl pseudouridine
  modified_base 634: mod_base = OTHER; note = N1-methyl pseudouridine
  modified_base 644: mod_base = OTHER; note = N1-methyl pseudouridine
  modified_base 645: mod_base = OTHER; note = N1-methyl pseudouridine
  modified_base 648: mod_base = OTHER; note = N1-methyl pseudouridine
  modified_base 652: mod_base = OTHER; note = N1-methyl pseudouridine
  modified_base 654: mod_base = OTHER; note = N1-methyl pseudouridine
  modified_base 662: mod_base = OTHER; note = N1-methyl pseudouridine
  modified_base 663: mod_base = OTHER; note = N1-methyl pseudouridine
  modified_base 671: mod_base = OTHER; note = N1-methyl pseudouridine
  modified_base 674: mod_base = OTHER; note = N1-methyl pseudouridine
  modified_base 682: mod_base = OTHER; note = N1-methyl pseudouridine
  modified_base 683: mod_base = OTHER; note = N1-methyl pseudouridine
  modified_base 702: mod_base = OTHER; note = N1-methyl pseudouridine
  modified_base 706: mod_base = OTHER; note = N1-methyl pseudouridine
  modified_base 707: mod_base = OTHER; note = N1-methyl pseudouridine
  modified_base 709: mod_base = OTHER; note = N1-methyl pseudouridine
  modified_base 710: mod_base = OTHER; note = N1-methyl pseudouridine
  modified_base 711: mod_base = OTHER; note = N1-methyl pseudouridine
  modified_base 714: mod_base = OTHER; note = N1-methyl pseudouridine
  modified_base 719: mod_base = OTHER; note = N1-methyl pseudouridine
  modified_base 720: mod_base = OTHER; note = N1-methyl pseudouridine
  modified_base 722: mod_base = OTHER; note = N1-methyl pseudouridine
  modified_base 723: mod_base = OTHER; note = N1-methyl pseudouridine
  modified_base 728: mod_base = OTHER; note = N1-methyl pseudouridine
  modified_base 732: mod_base = OTHER; note = N1-methyl pseudouridine
  modified_base 734: mod_base = OTHER; note = N1-methyl pseudouridine
  modified_base 740: mod_base = OTHER; note = N1-methyl pseudouridine
  modified_base 741: mod_base = OTHER; note = N1-methyl pseudouridine
  modified_base 747: mod_base = OTHER; note = N1-methyl pseudouridine
  modified_base 751: mod_base = OTHER; note = N1-methyl pseudouridine
  modified_base 752: mod_base = OTHER; note = N1-methyl pseudouridine
  modified_base 757: mod_base = OTHER; note = N1-methyl pseudouridine
  modified_base 763: mod_base = OTHER; note = N1-methyl pseudouridine
  modified_base 764: mod_base = OTHER; note = N1-methyl pseudouridine
  modified_base 768: mod_base = OTHER; note = N1-methyl pseudouridine
  modified_base 770: mod_base = OTHER; note = N1-methyl pseudouridine
  modified_base 771: mod_base = OTHER; note = N1-methyl pseudouridine
  modified_base 788: mod_base = OTHER; note = N1-methyl pseudouridine
  modified_base 794: mod_base = OTHER; note = N1-methyl pseudouridine
  modified_base 795: mod_base = OTHER; note = N1-methyl pseudouridine
  modified_base 804: mod_base = OTHER; note = N1-methyl pseudouridine
  modified_base 808: mod_base = OTHER; note = N1-methyl pseudouridine
  modified_base 813: mod_base = OTHER; note = N1-methyl pseudouridine
  modified_base 819: mod_base = OTHER; note = N1-methyl pseudouridine
  modified_base 821: mod_base = OTHER; note = N1-methyl pseudouridine
  modified_base 822: mod_base = OTHER; note = N1-methyl pseudouridine
  modified_base 825: mod_base = OTHER; note = N1-methyl pseudouridine
  modified_base 830: mod_base = OTHER; note = N1-methyl pseudouridine
  modified_base 833: mod_base = OTHER; note = N1-methyl pseudouridine
  modified_base 842: mod_base = OTHER; note = N1-methyl pseudouridine
  modified_base 853: mod_base = OTHER; note = N1-methyl pseudouridine
  modified_base 863: mod_base = OTHER; note = N1-methyl pseudouridine
  modified_base 864: mod_base = OTHER; note = N1-methyl pseudouridine
  modified_base 865: mod_base = OTHER; note = N1-methyl pseudouridine
  modified_base 866: mod_base = OTHER; note = N1-methyl pseudouridine
  modified_base 868: mod_base = OTHER; note = N1-methyl pseudouridine
  modified_base 869: mod_base = OTHER; note = N1-methyl pseudouridine
  modified_base 882: mod_base = OTHER; note = N1-methyl pseudouridine
  modified_base 883: mod_base = OTHER; note = N1-methyl pseudouridine
  modified_base 884: mod_base = OTHER; note = N1-methyl pseudouridine
  modified_base 886: mod_base = OTHER; note = N1-methyl pseudouridine
  modified_base 896: mod_base = OTHER; note = N1-methyl pseudouridine
  modified_base 899: mod_base = OTHER; note = N1-methyl pseudouridine
  modified_base 901: mod_base = OTHER; note = N1-methyl pseudouridine
  modified_base 902: mod_base = OTHER; note = N1-methyl pseudouridine
  modified_base 911: mod_base = OTHER; note = N1-methyl pseudouridine
  modified_base 914: mod_base = OTHER; note = N1-methyl pseudouridine
  modified_base 920: mod_base = OTHER; note = N1-methyl pseudouridine
  modified_base 927: mod_base = OTHER; note = N1-methyl pseudouridine
  modified_base 932: mod_base = OTHER; note = N1-methyl pseudouridine
  modified_base 933: mod_base = OTHER; note = N1-methyl pseudouridine
  modified_base 936: mod_base = OTHER; note = N1-methyl pseudouridine
  modified_base 947: mod_base = OTHER; note = N1-methyl pseudouridine
  modified_base 948: mod_base = OTHER; note = N1-methyl pseudouridine
  modified_base 949: mod_base = OTHER; note = N1-methyl pseudouridine
  modified_base 959: mod_base = OTHER; note = N1-methyl pseudouridine
  modified_base 962: mod_base = OTHER; note = N1-methyl pseudouridine
  modified_base 970: mod_base = OTHER; note = N1-methyl pseudouridine
  modified_base 975: mod_base = OTHER; note = N1-methyl pseudouridine
  modified_base 981: mod_base = OTHER; note = N1-methyl pseudouridine
  modified_base 984: mod_base = OTHER; note = N1-methyl pseudouridine
  modified_base 990: mod_base = OTHER; note = N1-methyl pseudouridine
  modified_base 992: mod_base = OTHER; note = N1-methyl pseudouridine
  modified_base 998: mod_base = OTHER; note = N1-methyl pseudouridine
  modified_base 1001: mod_base = OTHER; note = N1-methyl pseudouridine
  modified_base 1002: mod_base = OTHER; note = N1-methyl pseudouridine
  modified_base 1010: mod_base = OTHER; note = N1-methyl pseudouridine
  modified_base 1011: mod_base = OTHER; note = N1-methyl pseudouridine
  modified_base 1013: mod_base = OTHER; note = N1-methyl pseudouridine
  modified_base 1024: mod_base = OTHER; note = N1-methyl pseudouridine
  modified_base 1025: mod_base = OTHER; note = N1-methyl pseudouridine
  modified_base 1029: mod_base = OTHER; note = N1-methyl pseudouridine
  modified_base 1036: mod_base = OTHER; note = N1-methyl pseudouridine
  modified_base 1038: mod_base = OTHER; note = N1-methyl pseudouridine
  modified_base 1046: mod_base = OTHER; note = N1-methyl pseudouridine
  modified_base 1048: mod_base = OTHER; note = N1-methyl pseudouridine
  modified_base 1049: mod_base = OTHER; note = N1-methyl pseudouridine
  modified_base 1050: mod_base = OTHER; note = N1-methyl pseudouridine
  modified_base 1051: mod_base = OTHER; note = N1-methyl pseudouridine
  modified_base 1052: mod_base = OTHER; note = N1-methyl pseudouridine
  modified_base 1071: mod_base = OTHER; note = N1-methyl pseudouridine
  modified_base 1072: mod_base = OTHER; note = N1-methyl pseudouridine
  modified_base 1074: mod_base = OTHER; note = N1-methyl pseudouridine
  modified_base 1077: mod_base = OTHER; note = N1-methyl pseudouridine
  modified_base 1081: mod_base = OTHER; note = N1-methyl pseudouridine
  modified_base 1085: mod_base = OTHER; note = N1-methyl pseudouridine
  modified_base 1098: mod_base = OTHER; note = N1-methyl pseudouridine
  modified_base 1099: mod_base = OTHER; note = N1-methyl pseudouridine
  modified_base 1101: mod_base = OTHER; note = N1-methyl pseudouridine
  modified_base 1111: mod_base = OTHER; note = N1-methyl pseudouridine
  modified_base 1112: mod_base = OTHER; note = N1-methyl pseudouridine
  modified_base 1114: mod_base = OTHER; note = N1-methyl pseudouridine
  modified_base 1120: mod_base = OTHER; note = N1-methyl pseudouridine
  modified_base 1121: mod_base = OTHER; note = N1-methyl pseudouridine
  modified_base 1122: mod_base = OTHER; note = N1-methyl pseudouridine
  modified_base 1124: mod_base = OTHER; note = N1-methyl pseudouridine
  modified_base 1133: mod_base = OTHER; note = N1-methyl pseudouridine
  modified_base 1134: mod_base = OTHER; note = N1-methyl pseudouridine
  modified_base 1136: mod_base = OTHER; note = N1-methyl pseudouridine
  modified_base 1145: mod_base = OTHER; note = N1-methyl pseudouridine
  modified_base 1149: mod_base = OTHER; note = N1-methyl pseudouridine
  modified_base 1163: mod_base = OTHER; note = N1-methyl pseudouridine
  modified_base 1165: mod_base = OTHER; note = N1-methyl pseudouridine
  modified_base 1166: mod_base = OTHER; note = N1-methyl pseudouridine
  modified_base 1169: mod_base = OTHER; note = N1-methyl pseudouridine
  modified_base 1175: mod_base = OTHER; note = N1-methyl pseudouridine
  modified_base 1190: mod_base = OTHER; note = N1-methyl pseudouridine
  modified_base 1193: mod_base = OTHER; note = N1-methyl pseudouridine
  modified_base 1210: mod_base = OTHER; note = N1-methyl pseudouridine
  modified_base 1211: mod_base = OTHER; note = N1-methyl pseudouridine
  modified_base 1215: mod_base = OTHER; note = N1-methyl pseudouridine
  modified_base 1218: mod_base = OTHER; note = N1-methyl pseudouridine
  modified_base 1226: mod_base = OTHER; note = N1-methyl pseudouridine
  modified_base 1238: mod_base = OTHER; note = N1-methyl pseudouridine
  modified_base 1239: mod_base = OTHER; note = N1-methyl pseudouridine
  modified_base 1242: mod_base = OTHER; note = N1-methyl pseudouridine
  modified_base 1243: mod_base = OTHER; note = N1-methyl pseudouridine
  modified_base 1244: mod_base = OTHER; note = N1-methyl pseudouridine
  modified_base 1248: mod_base = OTHER; note = N1-methyl pseudouridine
  modified_base 1253: mod_base = OTHER; note = N1-methyl pseudouridine
  modified_base 1257: mod_base = OTHER; note = N1-methyl pseudouridine
  modified_base 1262: mod_base = OTHER; note = N1-methyl pseudouridine
  modified_base 1264: mod_base = OTHER; note = N1-methyl pseudouridine
  modified_base 1265: mod_base = OTHER; note = N1-methyl pseudouridine
  modified_base 1281: mod_base = OTHER; note = N1-methyl pseudouridine
  modified_base 1282: mod_base = OTHER; note = N1-methyl pseudouridine
  modified_base 1283: mod_base = OTHER; note = N1-methyl pseudouridine
  modified_base 1284: mod_base = OTHER; note = N1-methyl pseudouridine
  modified_base 1285: mod_base = OTHER; note = N1-methyl pseudouridine
  modified_base 1291: mod_base = OTHER; note = N1-methyl pseudouridine
  modified_base 1292: mod_base = OTHER; note = N1-methyl pseudouridine
  modified_base 1295: mod_base = OTHER; note = N1-methyl pseudouridine
  modified_base 1305: mod_base = OTHER; note = N1-methyl pseudouridine
  modified_base 1316: mod_base = OTHER; note = N1-methyl pseudouridine
  modified_base 1317: mod_base = OTHER; note = N1-methyl pseudouridine
  modified_base 1325: mod_base = OTHER; note = N1-methyl pseudouridine
  modified_base 1328: mod_base = OTHER; note = N1-methyl pseudouridine
  modified_base 1329: mod_base = OTHER; note = N1-methyl pseudouridine
  modified_base 1333: mod_base = OTHER; note = N1-methyl pseudouridine
  modified_base 1334: mod_base = OTHER; note = N1-methyl pseudouridine
  modified_base 1335: mod_base = OTHER; note = N1-methyl pseudouridine
  modified_base 1340: mod_base = OTHER; note = N1-methyl pseudouridine
  modified_base 1341: mod_base = OTHER; note = N1-methyl pseudouridine
  modified_base 1345: mod_base = OTHER; note = N1-methyl pseudouridine
  modified_base 1347: mod_base = OTHER; note = N1-methyl pseudouridine
  modified_base 1348: mod_base = OTHER; note = N1-methyl pseudouridine
  modified_base 1352: mod_base = OTHER; note = N1-methyl pseudouridine
  modified_base 1361: mod_base = OTHER; note = N1-methyl pseudouridine
  modified_base 1371: mod_base = OTHER; note = N1-methyl pseudouridine
  modified_base 1374: mod_base = OTHER; note = N1-methyl pseudouridine
  modified_base 1375: mod_base = OTHER; note = N1-methyl pseudouridine
  modified_base 1377: mod_base = OTHER; note = N1-methyl pseudouridine
  modified_base 1381: mod_base = OTHER; note = N1-methyl pseudouridine
  modified_base 1382: mod_base = OTHER; note = N1-methyl pseudouridine
  modified_base 1383: mod_base = OTHER; note = N1-methyl pseudouridine
  modified_base 1387: mod_base = OTHER; note = N1-methyl pseudouridine
  modified_base 1391: mod_base = OTHER; note = N1-methyl pseudouridine
  modified_base 1415: mod_base = OTHER; note = N1-methyl pseudouridine
  modified_base 1423: mod_base = OTHER; note = N1-methyl pseudouridine
  modified_base 1429: mod_base = OTHER; note = N1-methyl pseudouridine
  modified_base 1430: mod_base = OTHER; note = N1-methyl pseudouridine
  modified_base 1431: mod_base = OTHER; note = N1-methyl pseudouridine
  modified_base 1439: mod_base = OTHER; note = N1-methyl pseudouridine
  modified_base 1442: mod_base = OTHER; note = N1-methyl pseudouridine
  modified_base 1446: mod_base = OTHER; note = N1-methyl pseudouridine
  modified_base 1452: mod_base = OTHER; note = N1-methyl pseudouridine
  modified_base 1465: mod_base = OTHER; note = N1-methyl pseudouridine
  modified_base 1468: mod_base = OTHER; note = N1-methyl pseudouridine
  modified_base 1469: mod_base = OTHER; note = N1-methyl pseudouridine
  modified_base 1470: mod_base = OTHER; note = N1-methyl pseudouridine
  modified_base 1472: mod_base = OTHER; note = N1-methyl pseudouridine
  modified_base 1481: mod_base = OTHER; note = N1-methyl pseudouridine
  modified_base 1485: mod_base = OTHER; note = N1-methyl pseudouridine
  modified_base 1488: mod_base = OTHER; note = N1-methyl pseudouridine
  modified_base 1489: mod_base = OTHER; note = N1-methyl pseudouridine
  modified_base 1490: mod_base = OTHER; note = N1-methyl pseudouridine
  modified_base 1494: mod_base = OTHER; note = N1-methyl pseudouridine
  modified_base 1500: mod_base = OTHER; note = N1-methyl pseudouridine
  modified_base 1502: mod_base = OTHER; note = N1-methyl pseudouridine
  modified_base 1509: mod_base = OTHER; note = N1-methyl pseudouridine
  modified_base 1517: mod_base = OTHER; note = N1-methyl pseudouridine
  modified_base 1519: mod_base = OTHER; note = N1-methyl pseudouridine
  modified_base 1520: mod_base = OTHER; note = N1-methyl pseudouridine
  modified_base 1530: mod_base = OTHER; note = N1-methyl pseudouridine
  modified_base 1535: mod_base = OTHER; note = N1-methyl pseudouridine
  modified_base 1536: mod_base = OTHER; note = N1-methyl pseudouridine
  modified_base 1537: mod_base = OTHER; note = N1-methyl pseudouridine
  modified_base 1538: mod_base = OTHER; note = N1-methyl pseudouridine
  modified_base 1540: mod_base = OTHER; note = N1-methyl pseudouridine
  modified_base 1542: mod_base = OTHER; note = N1-methyl pseudouridine
  modified_base 1546: mod_base = OTHER; note = N1-methyl pseudouridine
  modified_base 1548: mod_base = OTHER; note = N1-methyl pseudouridine
  modified_base 1549: mod_base = OTHER; note = N1-methyl pseudouridine
  modified_base 1550: mod_base = OTHER; note = N1-methyl pseudouridine
  modified_base 1551: mod_base = OTHER; note = N1-methyl pseudouridine
  modified_base 1554: mod_base = OTHER; note = N1-methyl pseudouridine
  modified_base 1556: mod_base = OTHER; note = N1-methyl pseudouridine
  modified_base 1558: mod_base = OTHER; note = N1-methyl pseudouridine
  modified_base 1568: mod_base = OTHER; note = N1-methyl pseudouridine
  modified_base 1577: mod_base = OTHER; note = N1-methyl pseudouridine
  modified_base 1582: mod_base = OTHER; note = N1-methyl pseudouridine
  modified_base 1584: mod_base = OTHER; note = N1-methyl pseudouridine
  modified_base 1586: mod_base = OTHER; note = N1-methyl pseudouridine
  modified_base 1590: mod_base = OTHER; note = N1-methyl pseudouridine
  modified_base 1598: mod_base = OTHER; note = N1-methyl pseudouridine
  modified_base 1612: mod_base = OTHER; note = N1-methyl pseudouridine
  modified_base 1613: mod_base = OTHER; note = N1-methyl pseudouridine
  modified_base 1614: mod_base = OTHER; note = N1-methyl pseudouridine
  modified_base 1615: mod_base = OTHER; note = N1-methyl pseudouridine
  modified_base 1616: mod_base = OTHER; note = N1-methyl pseudouridine
  modified_base 1638: mod_base = OTHER; note = N1-methyl pseudouridine
  modified_base 1640: mod_base = OTHER; note = N1-methyl pseudouridine
  modified_base 1641: mod_base = OTHER; note = N1-methyl pseudouridine
  modified_base 1643: mod_base = OTHER; note = N1-methyl pseudouridine
  modified_base 1648: mod_base = OTHER; note = N1-methyl pseudouridine
  modified_base 1649: mod_base = OTHER; note = N1-methyl pseudouridine
  modified_base 1652: mod_base = OTHER; note = N1-methyl pseudouridine
  modified_base 1653: mod_base = OTHER; note = N1-methyl pseudouridine
  modified_base 1654: mod_base = OTHER; note = N1-methyl pseudouridine
  modified_base 1655: mod_base = OTHER; note = N1-methyl pseudouridine
  modified_base 1656: mod_base = OTHER; note = N1-methyl pseudouridine
  modified_base 1665: mod_base = OTHER; note = N1-methyl pseudouridine
  modified_base 1673: mod_base = OTHER; note = N1-methyl pseudouridine
  modified_base 1674: mod_base = OTHER; note = N1-methyl pseudouridine
  modified_base 1679: mod_base = OTHER; note = N1-methyl pseudouridine
  modified_base 1688: mod_base = OTHER; note = N1-methyl pseudouridine
  modified_base 1699: mod_base = OTHER; note = N1-methyl pseudouridine
  modified_base 1702: mod_base = OTHER; note = N1-methyl pseudouridine
  modified_base 1703: mod_base = OTHER; note = N1-methyl pseudouridine
  modified_base 1704: mod_base = OTHER; note = N1-methyl pseudouridine
  modified_base 1712: mod_base = OTHER; note = N1-methyl pseudouridine
  modified_base 1717: mod_base = OTHER; note = N1-methyl pseudouridine
  modified_base 1720: mod_base = OTHER; note = N1-methyl pseudouridine
  modified_base 1721: mod_base = OTHER; note = N1-methyl pseudouridine
  modified_base 1722: mod_base = OTHER; note = N1-methyl pseudouridine
  modified_base 1726: mod_base = OTHER; note = N1-methyl pseudouridine
  modified_base 1728: mod_base = OTHER; note = N1-methyl pseudouridine
  modified_base 1730: mod_base = OTHER; note = N1-methyl pseudouridine
  modified_base 1736: mod_base = OTHER; note = N1-methyl pseudouridine
  modified_base 1737: mod_base = OTHER; note = N1-methyl pseudouridine
  modified_base 1740: mod_base = OTHER; note = N1-methyl pseudouridine
  modified_base 1745: mod_base = OTHER; note = N1-methyl pseudouridine
  modified_base 1752: mod_base = OTHER; note = N1-methyl pseudouridine
  modified_base 1756: mod_base = OTHER; note = N1-methyl pseudouridine
  modified_base 1757: mod_base = OTHER; note = N1-methyl pseudouridine
  modified_base 1761: mod_base = OTHER; note = N1-methyl pseudouridine
  modified_base 1769: mod_base = OTHER; note = N1-methyl pseudouridine
  modified_base 1777: mod_base = OTHER; note = N1-methyl pseudouridine
  modified_base 1785: mod_base = OTHER; note = N1-methyl pseudouridine
  modified_base 1787: mod_base = OTHER; note = N1-methyl pseudouridine
  modified_base 1789: mod_base = OTHER; note = N1-methyl pseudouridine
  modified_base 1790: mod_base = OTHER; note = N1-methyl pseudouridine
  modified_base 1796: mod_base = OTHER; note = N1-methyl pseudouridine
  modified_base 1797: mod_base = OTHER; note = N1-methyl pseudouridine
  modified_base 1799: mod_base = OTHER; note = N1-methyl pseudouridine
  modified_base 1806: mod_base = OTHER; note = N1-methyl pseudouridine
  modified_base 1812: mod_base = OTHER; note = N1-methyl pseudouridine
  modified_base 1813: mod_base = OTHER; note = N1-methyl pseudouridine
  modified_base 1814: mod_base = OTHER; note = N1-methyl pseudouridine
  modified_base 1815: mod_base = OTHER; note = N1-methyl pseudouridine
  modified_base 1817: mod_base = OTHER; note = N1-methyl pseudouridine
  modified_base 1833: mod_base = OTHER; note = N1-methyl pseudouridine
  modified_base 1841: mod_base = OTHER; note = N1-methyl pseudouridine
  modified_base 1843: mod_base = OTHER; note = N1-methyl pseudouridine
  modified_base 1844: mod_base = OTHER; note = N1-methyl pseudouridine
  modified_base 1851: mod_base = OTHER; note = N1-methyl pseudouridine
  modified_base 1853: mod_base = OTHER; note = N1-methyl pseudouridine
  modified_base 1854: mod_base = OTHER; note = N1-methyl pseudouridine
  modified_base 1856: mod_base = OTHER; note = N1-methyl pseudouridine
  modified_base 1857: mod_base = OTHER; note = N1-methyl pseudouridine
  modified_base 1858: mod_base = OTHER; note = N1-methyl pseudouridine
  modified_base 1859: mod_base = OTHER; note = N1-methyl pseudouridine
  modified_base 1863: mod_base = OTHER; note = N1-methyl pseudouridine
  modified_base 1864: mod_base = OTHER; note = N1-methyl pseudouridine
  modified_base 1865: mod_base = OTHER; note = N1-methyl pseudouridine
  modified_base 1869: mod_base = OTHER; note = N1-methyl pseudouridine
  modified_base 1871: mod_base = OTHER; note = N1-methyl pseudouridine
  modified_base 1872: mod_base = OTHER; note = N1-methyl pseudouridine
  modified_base 1873: mod_base = OTHER; note = N1-methyl pseudouridine
  modified_base 1874: mod_base = OTHER; note = N1-methyl pseudouridine
  modified_base 1881: mod_base = OTHER; note = N1-methyl pseudouridine
  modified_base 1889: mod_base = OTHER; note = N1-methyl pseudouridine
  modified_base 1892: mod_base = OTHER; note = N1-methyl pseudouridine
  modified_base 1903: mod_base = OTHER; note = N1-methyl pseudouridine
  modified_base 1904: mod_base = OTHER; note = N1-methyl pseudouridine
  modified_base 1911: mod_base = OTHER; note = N1-methyl pseudouridine
  modified_base 1912: mod_base = OTHER; note = N1-methyl pseudouridine
  modified_base 1914: mod_base = OTHER; note = N1-methyl pseudouridine
  modified_base 1920: mod_base = OTHER; note = N1-methyl pseudouridine
  modified_base 1922: mod_base = OTHER; note = N1-methyl pseudouridine
  modified_base 1923: mod_base = OTHER; note = N1-methyl pseudouridine
  modified_base 1924: mod_base = OTHER; note = N1-methyl pseudouridine
  modified_base 1925: mod_base = OTHER; note = N1-methyl pseudouridine
  modified_base 1926: mod_base = OTHER; note = N1-methyl pseudouridine
  modified_base 1929: mod_base = OTHER; note = N1-methyl pseudouridine
  modified_base 1937: mod_base = OTHER; note = N1-methyl pseudouridine
  modified_base 1938: mod_base = OTHER; note = N1-methyl pseudouridine
  modified_base 1940: mod_base = OTHER; note = N1-methyl pseudouridine
  modified_base 1949: mod_base = OTHER; note = N1-methyl pseudouridine
  modified_base 1963: mod_base = OTHER; note = N1-methyl pseudouridine
  modified_base 1965: mod_base = OTHER; note = N1-methyl pseudouridine
  modified_base 1968: mod_base = OTHER; note = N1-methyl pseudouridine
  modified_base 1971: mod_base = OTHER; note = N1-methyl pseudouridine
  modified_base 1972: mod_base = OTHER; note = N1-methyl pseudouridine
  modified_base 1982: mod_base = OTHER; note = N1-methyl pseudouridine
  modified_base 1984: mod_base = OTHER; note = N1-methyl pseudouridine
  modified_base 1994: mod_base = OTHER; note = N1-methyl pseudouridine
  modified_base 1997: mod_base = OTHER; note = N1-methyl pseudouridine
  modified_base 1998: mod_base = OTHER; note = N1-methyl pseudouridine
  modified_base 2006: mod_base = OTHER; note = N1-methyl pseudouridine
  modified_base 2022: mod_base = OTHER; note = N1-methyl pseudouridine
  modified_base 2025: mod_base = OTHER; note = N1-methyl pseudouridine
  modified_base 2033: mod_base = OTHER; note = N1-methyl pseudouridine
  modified_base 2034: mod_base = OTHER; note = N1-methyl pseudouridine
  modified_base 2035: mod_base = OTHER; note = N1-methyl pseudouridine
  modified_base 2036: mod_base = OTHER; note = N1-methyl pseudouridine
  modified_base 2041: mod_base = OTHER; note = N1-methyl pseudouridine
  modified_base 2042: mod_base = OTHER; note = N1-methyl pseudouridine
  modified_base 2045: mod_base = OTHER; note = N1-methyl pseudouridine
  modified_base 2046: mod_base = OTHER; note = N1-methyl pseudouridine
  modified_base 2059: mod_base = OTHER; note = N1-methyl pseudouridine
  modified_base 2060: mod_base = OTHER; note = N1-methyl pseudouridine
  modified_base 2061: mod_base = OTHER; note = N1-methyl pseudouridine
  modified_base 2067: mod_base = OTHER; note = N1-methyl pseudouridine
  modified_base 2074: mod_base = OTHER; note = N1-methyl pseudouridine
  modified_base 2075: mod_base = OTHER; note = N1-methyl pseudouridine
  modified_base 2078: mod_base = OTHER; note = N1-methyl pseudouridine
  modified_base 2083: mod_base = OTHER; note = N1-methyl pseudouridine
  modified_base 2084: mod_base = OTHER; note = N1-methyl pseudouridine
  modified_base 2087: mod_base = OTHER; note = N1-methyl pseudouridine
  modified_base 2091: mod_base = OTHER; note = N1-methyl pseudouridine
  modified_base 2094: mod_base = OTHER; note = N1-methyl pseudouridine
  modified_base 2097: mod_base = OTHER; note = N1-methyl pseudouridine
  modified_base 2098: mod_base = OTHER; note = N1-methyl pseudouridine
  modified_base 2100: mod_base = OTHER; note = N1-methyl pseudouridine
  modified_base 2101: mod_base = OTHER; note = N1-methyl pseudouridine
  modified_base 2102: mod_base = OTHER; note = N1-methyl pseudouridine
  modified_base 2107: mod_base = OTHER; note = N1-methyl pseudouridine
  modified_base 2108: mod_base = OTHER; note = N1-methyl pseudouridine
  modified_base 2109: mod_base = OTHER; note = N1-methyl pseudouridine
  modified_base 2118: mod_base = OTHER; note = N1-methyl pseudouridine
  modified_base 2120: mod_base = OTHER; note = N1-methyl pseudouridine
  modified_base 2135: mod_base = OTHER; note = N1-methyl pseudouridine
  modified_base 2139: mod_base = OTHER; note = N1-methyl pseudouridine
  modified_base 2151: mod_base = OTHER; note = N1-methyl pseudouridine
  modified_base 2154: mod_base = OTHER; note = N1-methyl pseudouridine
  modified_base 2156: mod_base = OTHER; note = N1-methyl pseudouridine
  modified_base 2160: mod_base = OTHER; note = N1-methyl pseudouridine
  modified_base 2168: mod_base = OTHER; note = N1-methyl pseudouridine
  modified_base 2169: mod_base = OTHER; note = N1-methyl pseudouridine
  modified_base 2177: mod_base = OTHER; note = N1-methyl pseudouridine
  modified_base 2178: mod_base = OTHER; note = N1-methyl pseudouridine
  modified_base 2185: mod_base = OTHER; note = N1-methyl pseudouridine
  modified_base 2195: mod_base = OTHER; note = N1-methyl pseudouridine
  modified_base 2205: mod_base = OTHER; note = N1-methyl pseudouridine
  modified_base 2207: mod_base = OTHER; note = N1-methyl pseudouridine
  modified_base 2210: mod_base = OTHER; note = N1-methyl pseudouridine
  modified_base 2219: mod_base = OTHER; note = N1-methyl pseudouridine
  modified_base 2225: mod_base = OTHER; note = N1-methyl pseudouridine
  modified_base 2228: mod_base = OTHER; note = N1-methyl pseudouridine
  modified_base 2232: mod_base = OTHER; note = N1-methyl pseudouridine
  modified_base 2237: mod_base = OTHER; note = N1-methyl pseudouridine
  modified_base 2238: mod_base = OTHER; note = N1-methyl pseudouridine
  modified_base 2240: mod_base = OTHER; note = N1-methyl pseudouridine
  modified_base 2246: mod_base = OTHER; note = N1-methyl pseudouridine
  modified_base 2249: mod_base = OTHER; note = N1-methyl pseudouridine
  modified_base 2259: mod_base = OTHER; note = N1-methyl pseudouridine
  modified_base 2265: mod_base = OTHER; note = N1-methyl pseudouridine
  modified_base 2271: mod_base = OTHER; note = N1-methyl pseudouridine
  modified_base 2273: mod_base = OTHER; note = N1-methyl pseudouridine
  modified_base 2274: mod_base = OTHER; note = N1-methyl pseudouridine
  modified_base 2276: mod_base = OTHER; note = N1-methyl pseudouridine
  modified_base 2279: mod_base = OTHER; note = N1-methyl pseudouridine
  modified_base 2285: mod_base = OTHER; note = N1-methyl pseudouridine
  modified_base 2289: mod_base = OTHER; note = N1-methyl pseudouridine
  modified_base 2298: mod_base = OTHER; note = N1-methyl pseudouridine
  modified_base 2307: mod_base = OTHER; note = N1-methyl pseudouridine
  modified_base 2316: mod_base = OTHER; note = N1-methyl pseudouridine
  modified_base 2325: mod_base = OTHER; note = N1-methyl pseudouridine
  modified_base 2326: mod_base = OTHER; note = N1-methyl pseudouridine
  modified_base 2339: mod_base = OTHER; note = N1-methyl pseudouridine
  modified_base 2348: mod_base = OTHER; note = N1-methyl pseudouridine
  modified_base 2360: mod_base = OTHER; note = N1-methyl pseudouridine
  modified_base 2361: mod_base = OTHER; note = N1-methyl pseudouridine
  modified_base 2369: mod_base = OTHER; note = N1-methyl pseudouridine
  modified_base 2374: mod_base = OTHER; note = N1-methyl pseudouridine
  modified_base 2381: mod_base = OTHER; note = N1-methyl pseudouridine
  modified_base 2383: mod_base = OTHER; note = N1-methyl pseudouridine
  modified_base 2384: mod_base = OTHER; note = N1-methyl pseudouridine
  modified_base 2394: mod_base = OTHER; note = N1-methyl pseudouridine
  modified_base 2397: mod_base = OTHER; note = N1-methyl pseudouridine
  modified_base 2399: mod_base = OTHER; note = N1-methyl pseudouridine
  modified_base 2414: mod_base = OTHER; note = N1-methyl pseudouridine
  modified_base 2415: mod_base = OTHER; note = N1-methyl pseudouridine
  modified_base 2429: mod_base = OTHER; note = N1-methyl pseudouridine
  modified_base 2431: mod_base = OTHER; note = N1-methyl pseudouridine
  modified_base 2435: mod_base = OTHER; note = N1-methyl pseudouridine
  modified_base 2437: mod_base = OTHER; note = N1-methyl pseudouridine
  modified_base 2439: mod_base = OTHER; note = N1-methyl pseudouridine
  modified_base 2440: mod_base = OTHER; note = N1-methyl pseudouridine
  modified_base 2442: mod_base = OTHER; note = N1-methyl pseudouridine
  modified_base 2444: mod_base = OTHER; note = N1-methyl pseudouridine
  modified_base 2451: mod_base = OTHER; note = N1-methyl pseudouridine
  modified_base 2462: mod_base = OTHER; note = N1-methyl pseudouridine
  modified_base 2464: mod_base = OTHER; note = N1-methyl pseudouridine
  modified_base 2466: mod_base = OTHER; note = N1-methyl pseudouridine
  modified_base 2468: mod_base = OTHER; note = N1-methyl pseudouridine
  modified_base 2480: mod_base = OTHER; note = N1-methyl pseudouridine
  modified_base 2484: mod_base = OTHER; note = N1-methyl pseudouridine
  modified_base 2486: mod_base = OTHER; note = N1-methyl pseudouridine
  modified_base 2490: mod_base = OTHER; note = N1-methyl pseudouridine
  modified_base 2494: mod_base = OTHER; note = N1-methyl pseudouridine
  modified_base 2495: mod_base = OTHER; note = N1-methyl pseudouridine
  modified_base 2497: mod_base = OTHER; note = N1-methyl pseudouridine
  modified_base 2502: mod_base = OTHER; note = N1-methyl pseudouridine
  modified_base 2503: mod_base = OTHER; note = N1-methyl pseudouridine
  modified_base 2505: mod_base = OTHER; note = N1-methyl pseudouridine
  modified_base 2508: mod_base = OTHER; note = N1-methyl pseudouridine
  modified_base 2510: mod_base = OTHER; note = N1-methyl pseudouridine
  modified_base 2514: mod_base = OTHER; note = N1-methyl pseudouridine
  modified_base 2519: mod_base = OTHER; note = N1-methyl pseudouridine
  modified_base 2522: mod_base = OTHER; note = N1-methyl pseudouridine
  modified_base 2530: mod_base = OTHER; note = N1-methyl pseudouridine
  modified_base 2533: mod_base = OTHER; note = N1-methyl pseudouridine
  modified_base 2534: mod_base = OTHER; note = N1-methyl pseudouridine
  modified_base 2536: mod_base = OTHER; note = N1-methyl pseudouridine
  modified_base 2537: mod_base = OTHER; note = N1-methyl pseudouridine
  modified_base 2547: mod_base = OTHER; note = N1-methyl pseudouridine
  modified_base 2550: mod_base = OTHER; note = N1-methyl pseudouridine
  modified_base 2552: mod_base = OTHER; note = N1-methyl pseudouridine
  modified_base 2553: mod_base = OTHER; note = N1-methyl pseudouridine
  modified_base 2559: mod_base = OTHER; note = N1-methyl pseudouridine
  modified_base 2564: mod_base = OTHER; note = N1-methyl pseudouridine
  modified_base 2567: mod_base = OTHER; note = N1-methyl pseudouridine
  modified_base 2568: mod_base = OTHER; note = N1-methyl pseudouridine
  modified_base 2575: mod_base = OTHER; note = N1-methyl pseudouridine
  modified_base 2596: mod_base = OTHER; note = N1-methyl pseudouridine
  modified_base 2601: mod_base = OTHER; note = N1-methyl pseudouridine
  modified_base 2606: mod_base = OTHER; note = N1-methyl pseudouridine
  modified_base 2613: mod_base = OTHER; note = N1-methyl pseudouridine
  modified_base 2621: mod_base = OTHER; note = N1-methyl pseudouridine
  modified_base 2624: mod_base = OTHER; note = N1-methyl pseudouridine
  modified_base 2633: mod_base = OTHER; note = N1-methyl pseudouridine
  modified_base 2640: mod_base = OTHER; note = N1-methyl pseudouridine
  modified_base 2641: mod_base = OTHER; note = N1-methyl pseudouridine
  modified_base 2643: mod_base = OTHER; note = N1-methyl pseudouridine
  modified_base 2644: mod_base = OTHER; note = N1-methyl pseudouridine
  modified_base 2654: mod_base = OTHER; note = N1-methyl pseudouridine
  modified_base 2657: mod_base = OTHER; note = N1-methyl pseudouridine
  modified_base 2669: mod_base = OTHER; note = N1-methyl pseudouridine
  modified_base 2670: mod_base = OTHER; note = N1-methyl pseudouridine
  modified_base 2672: mod_base = OTHER; note = N1-methyl pseudouridine
  modified_base 2673: mod_base = OTHER; note = N1-methyl pseudouridine
  modified_base 2676: mod_base = OTHER; note = N1-methyl pseudouridine
  modified_base 2686: mod_base = OTHER; note = N1-methyl pseudouridine
  modified_base 2687: mod_base = OTHER; note = N1-methyl pseudouridine
  modified_base 2691: mod_base = OTHER; note = N1-methyl pseudouridine
  modified_base 2696: mod_base = OTHER; note = N1-methyl pseudouridine
  modified_base 2697: mod_base = OTHER; note = N1-methyl pseudouridine
  modified_base 2706: mod_base = OTHER; note = N1-methyl pseudouridine
  modified_base 2719: mod_base = OTHER; note = N1-methyl pseudouridine
  modified_base 2720: mod_base = OTHER; note = N1-methyl pseudouridine
  modified_base 2722: mod_base = OTHER; note = N1-methyl pseudouridine
  modified_base 2724: mod_base = OTHER; note = N1-methyl pseudouridine
  modified_base 2729: mod_base = OTHER; note = N1-methyl pseudouridine
  modified_base 2733: mod_base = OTHER; note = N1-methyl pseudouridine
  modified_base 2739: mod_base = OTHER; note = N1-methyl pseudouridine
  modified_base 2743: mod_base = OTHER; note = N1-methyl pseudouridine
  modified_base 2744: mod_base = OTHER; note = N1-methyl pseudouridine
  modified_base 2747: mod_base = OTHER; note = N1-methyl pseudouridine
  modified_base 2759: mod_base = OTHER; note = N1-methyl pseudouridine
  modified_base 2760: mod_base = OTHER; note = N1-methyl pseudouridine
  modified_base 2762: mod_base = OTHER; note = N1-methyl pseudouridine
  modified_base 2769: mod_base = OTHER; note = N1-methyl pseudouridine
  modified_base 2777: mod_base = OTHER; note = N1-methyl pseudouridine
  modified_base 2789: mod_base = OTHER; note = N1-methyl pseudouridine
  modified_base 2790: mod_base = OTHER; note = N1-methyl pseudouridine
  modified_base 2798: mod_base = OTHER; note = N1-methyl pseudouridine
  modified_base 2801: mod_base = OTHER; note = N1-methyl pseudouridine
  modified_base 2802: mod_base = OTHER; note = N1-methyl pseudouridine
  modified_base 2805: mod_base = OTHER; note = N1-methyl pseudouridine
  modified_base 2806: mod_base = OTHER; note = N1-methyl pseudouridine
  modified_base 2813: mod_base = OTHER; note = N1-methyl pseudouridine
  modified_base 2820: mod_base = OTHER; note = N1-methyl pseudouridine
  modified_base 2824: mod_base = OTHER; note = N1-methyl pseudouridine
  modified_base 2826: mod_base = OTHER; note = N1-methyl pseudouridine
  modified_base 2829: mod_base = OTHER; note = N1-methyl pseudouridine
  modified_base 2838: mod_base = OTHER; note = N1-methyl pseudouridine
  modified_base 2843: mod_base = OTHER; note = N1-methyl pseudouridine
  modified_base 2846: mod_base = OTHER; note = N1-methyl pseudouridine
  modified_base 2855: mod_base = OTHER; note = N1-methyl pseudouridine
  modified_base 2861: mod_base = OTHER; note = N1-methyl pseudouridine
  modified_base 2864: mod_base = OTHER; note = N1-methyl pseudouridine
  modified_base 2870: mod_base = OTHER; note = N1-methyl pseudouridine
  modified_base 2871: mod_base = OTHER; note = N1-methyl pseudouridine
  modified_base 2875: mod_base = OTHER; note = N1-methyl pseudouridine
  modified_base 2882: mod_base = OTHER; note = N1-methyl pseudouridine
  modified_base 2885: mod_base = OTHER; note = N1-methyl pseudouridine
  modified_base 2892: mod_base = OTHER; note = N1-methyl pseudouridine
  modified_base 2893: mod_base = OTHER; note = N1-methyl pseudouridine
  modified_base 2894: mod_base = OTHER; note = N1-methyl pseudouridine
  modified_base 2895: mod_base = OTHER; note = N1-methyl pseudouridine
  modified_base 2905: mod_base = OTHER; note = N1-methyl pseudouridine
  modified_base 2906: mod_base = OTHER; note = N1-methyl pseudouridine
  modified_base 2911: mod_base = OTHER; note = N1-methyl pseudouridine
  modified_base 2912: mod_base = OTHER; note = N1-methyl pseudouridine
  modified_base 2913: mod_base = OTHER; note = N1-methyl pseudouridine
  modified_base 2914: mod_base = OTHER; note = N1-methyl pseudouridine
  modified_base 2916: mod_base = OTHER; note = N1-methyl pseudouridine
  modified_base 2921: mod_base = OTHER; note = N1-methyl pseudouridine
  modified_base 2930: mod_base = OTHER; note = N1-methyl pseudouridine
  modified_base 2937: mod_base = OTHER; note = N1-methyl pseudouridine
  modified_base 2938: mod_base = OTHER; note = N1-methyl pseudouridine
  modified_base 2940: mod_base = OTHER; note = N1-methyl pseudouridine
  modified_base 2943: mod_base = OTHER; note = N1-methyl pseudouridine
  modified_base 2952: mod_base = OTHER; note = N1-methyl pseudouridine
  modified_base 2958: mod_base = OTHER; note = N1-methyl pseudouridine
  modified_base 2959: mod_base = OTHER; note = N1-methyl pseudouridine
  modified_base 2963: mod_base = OTHER; note = N1-methyl pseudouridine
  modified_base 2972: mod_base = OTHER; note = N1-methyl pseudouridine
  modified_base 2973: mod_base = OTHER; note = N1-methyl pseudouridine
  modified_base 2975: mod_base = OTHER; note = N1-methyl pseudouridine
  modified_base 2987: mod_base = OTHER; note = N1-methyl pseudouridine
  modified_base 2988: mod_base = OTHER; note = N1-methyl pseudouridine
  modified_base 2990: mod_base = OTHER; note = N1-methyl pseudouridine
  modified_base 2998: mod_base = OTHER; note = N1-methyl pseudouridine
  modified_base 3007: mod_base = OTHER; note = N1-methyl pseudouridine
  modified_base 3008: mod_base = OTHER; note = N1-methyl pseudouridine
  modified_base 3015: mod_base = OTHER; note = N1-methyl pseudouridine
  modified_base 3019: mod_base = OTHER; note = N1-methyl pseudouridine
  modified_base 3020: mod_base = OTHER; note = N1-methyl pseudouridine
  modified_base 3021: mod_base = OTHER; note = N1-methyl pseudouridine
  modified_base 3023: mod_base = OTHER; note = N1-methyl pseudouridine
  modified_base 3025: mod_base = OTHER; note = N1-methyl pseudouridine
  modified_base 3027: mod_base = OTHER; note = N1-methyl pseudouridine
  modified_base 3034: mod_base = OTHER; note = N1-methyl pseudouridine
  modified_base 3036: mod_base = OTHER; note = N1-methyl pseudouridine
  modified_base 3041: mod_base = OTHER; note = N1-methyl pseudouridine
  modified_base 3043: mod_base = OTHER; note = N1-methyl pseudouridine
  modified_base 3048: mod_base = OTHER; note = N1-methyl pseudouridine
  modified_base 3050: mod_base = OTHER; note = N1-methyl pseudouridine
  modified_base 3059: mod_base = OTHER; note = N1-methyl pseudouridine
  modified_base 3062: mod_base = OTHER; note = N1-methyl pseudouridine
  modified_base 3063: mod_base = OTHER; note = N1-methyl pseudouridine
  modified_base 3070: mod_base = OTHER; note = N1-methyl pseudouridine
  modified_base 3083: mod_base = OTHER; note = N1-methyl pseudouridine
  modified_base 3087: mod_base = OTHER; note = N1-methyl pseudouridine
  modified_base 3096: mod_base = OTHER; note = N1-methyl pseudouridine
  modified_base 3099: mod_base = OTHER; note = N1-methyl pseudouridine
  modified_base 3103: mod_base = OTHER; note = N1-methyl pseudouridine
  modified_base 3106: mod_base = OTHER; note = N1-methyl pseudouridine
  modified_base 3107: mod_base = OTHER; note = N1-methyl pseudouridine
  modified_base 3109: mod_base = OTHER; note = N1-methyl pseudouridine
  modified_base 3110: mod_base = OTHER; note = N1-methyl pseudouridine
  modified_base 3111: mod_base = OTHER; note = N1-methyl pseudouridine
  modified_base 3112: mod_base = OTHER; note = N1-methyl pseudouridine
  modified_base 3115: mod_base = OTHER; note = N1-methyl pseudouridine
  modified_base 3120: mod_base = OTHER; note = N1-methyl pseudouridine
  modified_base 3122: mod_base = OTHER; note = N1-methyl pseudouridine
  modified_base 3123: mod_base = OTHER; note = N1-methyl pseudouridine
  modified_base 3125: mod_base = OTHER; note = N1-methyl pseudouridine
  modified_base 3130: mod_base = OTHER; note = N1-methyl pseudouridine
  modified_base 3131: mod_base = OTHER; note = N1-methyl pseudouridine
  modified_base 3132: mod_base = OTHER; note = N1-methyl pseudouridine
  modified_base 3133: mod_base = OTHER; note = N1-methyl pseudouridine
  modified_base 3134: mod_base = OTHER; note = N1-methyl pseudouridine
  modified_base 3146: mod_base = OTHER; note = N1-methyl pseudouridine
  modified_base 3150: mod_base = OTHER; note = N1-methyl pseudouridine
  modified_base 3152: mod_base = OTHER; note = N1-methyl pseudouridine
  modified_base 3156: mod_base = OTHER; note = N1-methyl pseudouridine
  modified_base 3167: mod_base = OTHER; note = N1-methyl pseudouridine
  modified_base 3168: mod_base = OTHER; note = N1-methyl pseudouridine
  modified_base 3181: mod_base = OTHER; note = N1-methyl pseudouridine
  modified_base 3182: mod_base = OTHER; note = N1-methyl pseudouridine
  modified_base 3185: mod_base = OTHER; note = N1-methyl pseudouridine
  modified_base 3195: mod_base = OTHER; note = N1-methyl pseudouridine
  modified_base 3204: mod_base = OTHER; note = N1-methyl pseudouridine
  modified_base 3207: mod_base = OTHER; note = N1-methyl pseudouridine
  modified_base 3212: mod_base = OTHER; note = N1-methyl pseudouridine
  modified_base 3215: mod_base = OTHER; note = N1-methyl pseudouridine
  modified_base 3216: mod_base = OTHER; note = N1-methyl pseudouridine
  modified_base 3217: mod_base = OTHER; note = N1-methyl pseudouridine
  modified_base 3234: mod_base = OTHER; note = N1-methyl pseudouridine
  modified_base 3235: mod_base = OTHER; note = N1-methyl pseudouridine
  modified_base 3236: mod_base = OTHER; note = N1-methyl pseudouridine
  modified_base 3245: mod_base = OTHER; note = N1-methyl pseudouridine
  modified_base 3254: mod_base = OTHER; note = N1-methyl pseudouridine
  modified_base 3257: mod_base = OTHER; note = N1-methyl pseudouridine
  modified_base 3259: mod_base = OTHER; note = N1-methyl pseudouridine
  modified_base 3263: mod_base = OTHER; note = N1-methyl pseudouridine
  modified_base 3272: mod_base = OTHER; note = N1-methyl pseudouridine
  modified_base 3276: mod_base = OTHER; note = N1-methyl pseudouridine
  modified_base 3278: mod_base = OTHER; note = N1-methyl pseudouridine
  modified_base 3281: mod_base = OTHER; note = N1-methyl pseudouridine
  modified_base 3296: mod_base = OTHER; note = N1-methyl pseudouridine
  modified_base 3309: mod_base = OTHER; note = N1-methyl pseudouridine
  modified_base 3310: mod_base = OTHER; note = N1-methyl pseudouridine
  modified_base 3311: mod_base = OTHER; note = N1-methyl pseudouridine
  modified_base 3313: mod_base = OTHER; note = N1-methyl pseudouridine
  modified_base 3322: mod_base = OTHER; note = N1-methyl pseudouridine
  modified_base 3326: mod_base = OTHER; note = N1-methyl pseudouridine
  modified_base 3329: mod_base = OTHER; note = N1-methyl pseudouridine
  modified_base 3342: mod_base = OTHER; note = N1-methyl pseudouridine
  modified_base 3343: mod_base = OTHER; note = N1-methyl pseudouridine
  modified_base 3353: mod_base = OTHER; note = N1-methyl pseudouridine
  modified_base 3356: mod_base = OTHER; note = N1-methyl pseudouridine
  modified_base 3360: mod_base = OTHER; note = N1-methyl pseudouridine
  modified_base 3373: mod_base = OTHER; note = N1-methyl pseudouridine
  modified_base 3378: mod_base = OTHER; note = N1-methyl pseudouridine
  modified_base 3388: mod_base = OTHER; note = N1-methyl pseudouridine
  modified_base 3390: mod_base = OTHER; note = N1-methyl pseudouridine
  modified_base 3397: mod_base = OTHER; note = N1-methyl pseudouridine
  modified_base 3398: mod_base = OTHER; note = N1-methyl pseudouridine
  modified_base 3399: mod_base = OTHER; note = N1-methyl pseudouridine
  modified_base 3402: mod_base = OTHER; note = N1-methyl pseudouridine
  modified_base 3403: mod_base = OTHER; note = N1-methyl pseudouridine
  modified_base 3413: mod_base = OTHER; note = N1-methyl pseudouridine
  modified_base 3418: mod_base = OTHER; note = N1-methyl pseudouridine
  modified_base 3420: mod_base = OTHER; note = N1-methyl pseudouridine
  modified_base 3421: mod_base = OTHER; note = N1-methyl pseudouridine
  modified_base 3425: mod_base = OTHER; note = N1-methyl pseudouridine
  modified_base 3428: mod_base = OTHER; note = N1-methyl pseudouridine
  modified_base 3431: mod_base = OTHER; note = N1-methyl pseudouridine
  modified_base 3434: mod_base = OTHER; note = N1-methyl pseudouridine
  modified_base 3438: mod_base = OTHER; note = N1-methyl pseudouridine
  modified_base 3443: mod_base = OTHER; note = N1-methyl pseudouridine
  modified_base 3457: mod_base = OTHER; note = N1-methyl pseudouridine
  modified_base 3459: mod_base = OTHER; note = N1-methyl pseudouridine
  modified_base 3467: mod_base = OTHER; note = N1-methyl pseudouridine
  modified_base 3468: mod_base = OTHER; note = N1-methyl pseudouridine
  modified_base 3472: mod_base = OTHER; note = N1-methyl pseudouridine
  modified_base 3474: mod_base = OTHER; note = N1-methyl pseudouridine
  modified_base 3476: mod_base = OTHER; note = N1-methyl pseudouridine
  modified_base 3485: mod_base = OTHER; note = N1-methyl pseudouridine
  modified_base 3488: mod_base = OTHER; note = N1-methyl pseudouridine
  modified_base 3494: mod_base = OTHER; note = N1-methyl pseudouridine
  modified_base 3500: mod_base = OTHER; note = N1-methyl pseudouridine
  modified_base 3501: mod_base = OTHER; note = N1-methyl pseudouridine
  modified_base 3503: mod_base = OTHER; note = N1-methyl pseudouridine
  modified_base 3513: mod_base = OTHER; note = N1-methyl pseudouridine
  modified_base 3517: mod_base = OTHER; note = N1-methyl pseudouridine
  modified_base 3518: mod_base = OTHER; note = N1-methyl pseudouridine
  modified_base 3531: mod_base = OTHER; note = N1-methyl pseudouridine
  modified_base 3533: mod_base = OTHER; note = N1-methyl pseudouridine
  modified_base 3537: mod_base = OTHER; note = N1-methyl pseudouridine
  modified_base 3538: mod_base = OTHER; note = N1-methyl pseudouridine
  modified_base 3539: mod_base = OTHER; note = N1-methyl pseudouridine
  modified_base 3540: mod_base = OTHER; note = N1-methyl pseudouridine
  modified_base 3542: mod_base = OTHER; note = N1-methyl pseudouridine
  modified_base 3556: mod_base = OTHER; note = N1-methyl pseudouridine
  modified_base 3558: mod_base = OTHER; note = N1-methyl pseudouridine
  modified_base 3566: mod_base = OTHER; note = N1-methyl pseudouridine
  modified_base 3567: mod_base = OTHER; note = N1-methyl pseudouridine
  modified_base 3576: mod_base = OTHER; note = N1-methyl pseudouridine
  modified_base 3578: mod_base = OTHER; note = N1-methyl pseudouridine
  modified_base 3581: mod_base = OTHER; note = N1-methyl pseudouridine
  modified_base 3584: mod_base = OTHER; note = N1-methyl pseudouridine
  modified_base 3590: mod_base = OTHER; note = N1-methyl pseudouridine
  modified_base 3598: mod_base = OTHER; note = N1-methyl pseudouridine
  modified_base 3600: mod_base = OTHER; note = N1-methyl pseudouridine
  modified_base 3603: mod_base = OTHER; note = N1-methyl pseudouridine
  modified_base 3605: mod_base = OTHER; note = N1-methyl pseudouridine
  modified_base 3606: mod_base = OTHER; note = N1-methyl pseudouridine
  modified_base 3607: mod_base = OTHER; note = N1-methyl pseudouridine
  modified_base 3608: mod_base = OTHER; note = N1-methyl pseudouridine
  modified_base 3609: mod_base = OTHER; note = N1-methyl pseudouridine
  modified_base 3613: mod_base = OTHER; note = N1-methyl pseudouridine
  modified_base 3614: mod_base = OTHER; note = N1-methyl pseudouridine
  modified_base 3635: mod_base = OTHER; note = N1-methyl pseudouridine
  modified_base 3638: mod_base = OTHER; note = N1-methyl pseudouridine
  modified_base 3639: mod_base = OTHER; note = N1-methyl pseudouridine
  modified_base 3643: mod_base = OTHER; note = N1-methyl pseudouridine
  modified_base 3645: mod_base = OTHER; note = N1-methyl pseudouridine
  modified_base 3651: mod_base = OTHER; note = N1-methyl pseudouridine
  modified_base 3655: mod_base = OTHER; note = N1-methyl pseudouridine
  modified_base 3656: mod_base = OTHER; note = N1-methyl pseudouridine
  modified_base 3669: mod_base = OTHER; note = N1-methyl pseudouridine
  modified_base 3674: mod_base = OTHER; note = N1-methyl pseudouridine
  modified_base 3679: mod_base = OTHER; note = N1-methyl pseudouridine
  modified_base 3680: mod_base = OTHER; note = N1-methyl pseudouridine
  modified_base 3685: mod_base = OTHER; note = N1-methyl pseudouridine
  modified_base 3691: mod_base = OTHER; note = N1-methyl pseudouridine
  modified_base 3693: mod_base = OTHER; note = N1-methyl pseudouridine
  modified_base 3695: mod_base = OTHER; note = N1-methyl pseudouridine
  modified_base 3699: mod_base = OTHER; note = N1-methyl pseudouridine
  modified_base 3700: mod_base = OTHER; note = N1-methyl pseudouridine
  modified_base 3701: mod_base = OTHER; note = N1-methyl pseudouridine
  modified_base 3703: mod_base = OTHER; note = N1-methyl pseudouridine
  modified_base 3704: mod_base = OTHER; note = N1-methyl pseudouridine
  modified_base 3706: mod_base = OTHER; note = N1-methyl pseudouridine
  modified_base 3710: mod_base = OTHER; note = N1-methyl pseudouridine
  modified_base 3711: mod_base = OTHER; note = N1-methyl pseudouridine
  modified_base 3717: mod_base = OTHER; note = N1-methyl pseudouridine
  modified_base 3721: mod_base = OTHER; note = N1-methyl pseudouridine
  modified_base 3723: mod_base = OTHER; note = N1-methyl pseudouridine
  modified_base 3731: mod_base = OTHER; note = N1-methyl pseudouridine
  modified_base 3750: mod_base = OTHER; note = N1-methyl pseudouridine
  modified_base 3753: mod_base = OTHER; note = N1-methyl pseudouridine
  modified_base 3766: mod_base = OTHER; note = N1-methyl pseudouridine
  modified_base 3767: mod_base = OTHER; note = N1-methyl pseudouridine
  modified_base 3769: mod_base = OTHER; note = N1-methyl pseudouridine
  modified_base 3770: mod_base = OTHER; note = N1-methyl pseudouridine
  modified_base 3773: mod_base = OTHER; note = N1-methyl pseudouridine
  modified_base 3774: mod_base = OTHER; note = N1-methyl pseudouridine
  modified_base 3783: mod_base = OTHER; note = N1-methyl pseudouridine
  modified_base 3789: mod_base = OTHER; note = N1-methyl pseudouridine
  modified_base 3790: mod_base = OTHER; note = N1-methyl pseudouridine
  modified_base 3792: mod_base = OTHER; note = N1-methyl pseudouridine
  modified_base 3793: mod_base = OTHER; note = N1-methyl pseudouridine
  modified_base 3794: mod_base = OTHER; note = N1-methyl pseudouridine
  modified_base 3803: mod_base = OTHER; note = N1-methyl pseudouridine
  modified_base 3806: mod_base = OTHER; note = N1-methyl pseudouridine
  modified_base 3815: mod_base = OTHER; note = N1-methyl pseudouridine
  modified_base 3823: mod_base = OTHER; note = N1-methyl pseudouridine
  modified_base 3824: mod_base = OTHER; note = N1-methyl pseudouridine
  modified_base 3836: mod_base = OTHER; note = N1-methyl pseudouridine
  modified_base 3839: mod_base = OTHER; note = N1-methyl pseudouridine
  modified_base 3842: mod_base = OTHER; note = N1-methyl pseudouridine
  modified_base 3843: mod_base = OTHER; note = N1-methyl pseudouridine
  modified_base 3855: mod_base = OTHER; note = N1-methyl pseudouridine
  modified_base 3857: mod_base = OTHER; note = N1-methyl pseudouridine
  modified_base 3866: mod_base = OTHER; note = N1-methyl pseudouridine
  modified_base 3869: mod_base = OTHER; note = N1-methyl pseudouridine
  modified_base 3871: mod_base = OTHER; note = N1-methyl pseudouridine
  modified_base 3877: mod_base = OTHER; note = N1-methyl pseudouridine
  modified_base 3879: mod_base = OTHER; note = N1-methyl pseudouridine
  modified_base 3888: mod_base = OTHER; note = N1-methyl pseudouridine
  modified_base 3900: mod_base = OTHER; note = N1-methyl pseudouridine
  modified_base 3902: mod_base = OTHER; note = N1-methyl pseudouridine
  modified_base 3921: mod_base = OTHER; note = N1-methyl pseudouridine
  modified_base 3923: mod_base = OTHER; note = N1-methyl pseudouridine
  modified_base 3926: mod_base = OTHER; note = N1-methyl pseudouridine
  modified_base 3930: mod_base = OTHER; note = N1-methyl pseudouridine
  modified_base 3932: mod_base = OTHER; note = N1-methyl pseudouridine
  modified_base 3934: mod_base = OTHER; note = N1-methyl pseudouridine
  modified_base 3935: mod_base = OTHER; note = N1-methyl pseudouridine
  modified_base 3941: mod_base = OTHER; note = N1-methyl pseudouridine
  modified_base 3942: mod_base = OTHER; note = N1-methyl pseudouridine
  modified_base 3945: mod_base = OTHER; note = N1-methyl pseudouridine
  modified_base 3948: mod_base = OTHER; note = N1-methyl pseudouridine
  modified_base 3950: mod_base = OTHER; note = N1-methyl pseudouridine
  modified_base 3951: mod_base = OTHER; note = N1-methyl pseudouridine
  modified_base 3957: mod_base = OTHER; note = N1-methyl pseudouridine
  modified_base 3967: mod_base = OTHER; note = N1-methyl pseudouridine
  modified_base 3968: mod_base = OTHER; note = N1-methyl pseudouridine
  modified_base 3973: mod_base = OTHER; note = N1-methyl pseudouridine
  modified_base 3975: mod_base = OTHER; note = N1-methyl pseudouridine
  modified_base 3976: mod_base = OTHER; note = N1-methyl pseudouridine
  modified_base 3977: mod_base = OTHER; note = N1-methyl pseudouridine
  modified_base 3978: mod_base = OTHER; note = N1-methyl pseudouridine
  modified_base 3987: mod_base = OTHER; note = N1-methyl pseudouridine
  modified_base 3989: mod_base = OTHER; note = N1-methyl pseudouridine
  modified_base 3993: mod_base = OTHER; note = N1-methyl pseudouridine
  modified_base 4003: mod_base = OTHER; note = N1-methyl pseudouridine
  modified_base 4005: mod_base = OTHER; note = N1-methyl pseudouridine
  modified_base 4009: mod_base = OTHER; note = N1-methyl pseudouridine
  modified_base 4011: mod_base = OTHER; note = N1-methyl pseudouridine
  modified_base 4022: mod_base = OTHER; note = N1-methyl pseudouridine
  modified_base 4023: mod_base = OTHER; note = N1-methyl pseudouridine
  modified_base 4025: mod_base = OTHER; note = N1-methyl pseudouridine
  modified_base 4032: mod_base = OTHER; note = N1-methyl pseudouridine
  modified_base 4035: mod_base = OTHER; note = N1-methyl pseudouridine
  modified_base 4037: mod_base = OTHER; note = N1-methyl pseudouridine
  modified_base 4038: mod_base = OTHER; note = N1-methyl pseudouridine
  modified_base 4040: mod_base = OTHER; note = N1-methyl pseudouridine
  modified_base 4044: mod_base = OTHER; note = N1-methyl pseudouridine
  modified_base 4048: mod_base = OTHER; note = N1-methyl pseudouridine
  modified_base 4052: mod_base = OTHER; note = N1-methyl pseudouridine
  modified_base 4053: mod_base = OTHER; note = N1-methyl pseudouridine
  modified_base 4061: mod_base = OTHER; note = N1-methyl pseudouridine
  modified_base 4063: mod_base = OTHER; note = N1-methyl pseudouridine
  modified_base 4076: mod_base = OTHER; note = N1-methyl pseudouridine
  modified_base 4077: mod_base = OTHER; note = N1-methyl pseudouridine
  modified_base 4081: mod_base = OTHER; note = N1-methyl pseudouridine
  modified_base 4082: mod_base = OTHER; note = N1-methyl pseudouridine
  modified_base 4084: mod_base = OTHER; note = N1-methyl pseudouridine
  modified_base 4091: mod_base = OTHER; note = N1-methyl pseudouridine
  modified_base 4092: mod_base = OTHER; note = N1-methyl pseudouridine
  modified_base 4095: mod_base = OTHER; note = N1-methyl pseudouridine
  modified_base 4098: mod_base = OTHER; note = N1-methyl pseudouridine
gacaagaagtactccattggtctggcgatcggtacgaatagtgttgggtgggctgtaataactgacgagtataaggtgcccagtaagaagttcaaagtcctggggaacacagaccgacatagcatcaagaagaacctgataggtgcgctcttgtttgactccggagagacagcagaagccacacgacttaaacgaaccgctcgaaggcggtacacacggcgaaagaataggatttgttacctgcaggagatatttagcaacgagatggcaaaggttgacgattccttcttccaccggcttgaagagtctttcctggtggaggaggacaagaaacatgaacgccaccccatatttggcaatatagtggacgaagtagcataccatgagaaataccctaccatatatcatcttcgaaagaagcttgtagattcaacggataaagcagatctcaggttgatatatctggcactggcacacatgatcaagtttcgaggtcactttcttatcgagggcgatcttaatccggacaactccgacgtggataagctgttcatccagctcgtccaaacgtataaccaactcttcgaggagaatccgatcaatgcctctggagtggacgcgaaagcgatactctcagcaaggcttagtaagtctcgccggcttgagaacctcatcgcacagttgccaggagagaagaagaatggcttgtttggtaaccttattgcactcagtctcggccttacacctaacttcaagtccaacttcgatcttgccgaggacgccaagctccagcttagcaaggatacctacgatgacgatcttgataacctgctggcccagataggcgaccagtacgcggaccttttcttggcagcaaagaatttgtccgacgccatcctcttgagcgacatcctccgggtaaacactgaaattactaaggcgccactttccgccagcatgatcaagagatacgatgagcatcatcaggatctgaccctgcttaaagcgcttgtacgccagcaattgcctgagaagtataaagaaatctttttcgaccaaagcaagaacggttatgctggctacatagacggcggggcttctcaggaggaattctacaagtttatcaagccgattctcgagaagatggatggaacagaggagctgttggtgaaactgaaccgggaggacctgctcagaaagcagcggaccttcgataatgggagcatcccgcaccagattcatttgggtgagctgcatgcaatcttgcgcaggcaagaagatttttaccccttcctcaaggacaatagagagaagattgagaagatccttacgtttaggattccgtattacgtaggcccgctcgcacgcggtaattctcgctttgcgtggatgacacgaaagagcgaggaaaccataacaccctggaactttgaagaggtcgtcgataagggtgccagcgcacaatcatttatcgaacgaatgactaatttcgataagaatctcccaaatgagaaggtgttgccaaagcatagccttttgtatgagtattttactgtatacaacgagctcaccaaggtgaaatatgtcactgaagggatgcgcaagccggcctttttgagcggagaacagaagaaagctattgtagacttgctttttaagacgaatagaaaggttacggtcaagcagctcaaagaagactactttaagaagatagaatgctttgactctgtcgagattagtggggtagaggatcgattcaatgcaagcctggggacataccacgatctcttgaagattatcaaggataaggattttctggacaacgaagagaatgaagacatcttggaagatattgttttgactttgactcttttcgaagatcgcgagatgatagaggaaaggttgaagacttatgcccatctttttgatgacaaggttatgaaacaactgaagagacggcgatatactggttgggggagactctcacgaaagctcattaacggcatccgggacaaacagagtggtaagacgattttggacttccttaagagcgacgggtttgcgaataggaacttcatgcagttgatccatgatgattctttgacctttaaggaggatatacagaaggcacaagtcagtggacaaggagatagtctgcatgagcacattgccaaccttgcgggctccccagccatcaagaagggtatcctgcaaaccgtcaaagtagtagatgaacttgtgaaagtcatgggacgacataagcctgagaatattgtgatcgaaatggctagggagaatcagacgactcagaagggtcagaagaattccagggaacggatgaagagaatagaggagggaattaaggaactcgggtcacaaatattgaaggagcatcctgtagagaacacacagcttcagaacgagaagctgtacctgtattatctccagaatggcagagacatgtatgtcgaccaagaactggatatcaatcgcttgtccgattatgatgtagatcacatagtcccacaatccttcttgaaagacgatagtattgacaataaggtacttacgagatccgacaagaaccgcggaaagtccgataacgtaccgagtgaagaagtggtaaagaagatgaagaattattggaggcagctcctcaacgccaaacttattactcagagaaagttcgataaccttacgaaagctgagcgaggcgggttgtctgagctcgataaagctggattcataaagcggcagcttgtggaaactagacagatcacaaagcacgttgcacagatccttgattccagaatgaacactaaatatgatgagaacgataagctgatacgcgaggtgaaagtaataacacttaagtcaaagctggtaagcgattttcgcaaagacttccaattttataaggtcagagagataaacaattatcatcacgcgcatgacgcttacctgaacgcagttgtggggacagcacttataaagaaatacccaaagttggaaagtgaatttgtctatggagactataaggtatacgatgtacggaagatgattgcgaagtcagagcaagaaatcggtaaggcaactgctaagtacttcttttactcaaatattatgaactttttcaagacggaaatcactctggctaacggagaaattcggaagaggcccttgatagagacgaatggggagactggtgagatcgtttgggacaaagggcgagatttcgcaacggtccgaaaggtgctctcaatgccacaagtcaatatagtcaagaagacagaggtacaaacaggaggtttctccaaggaatcaatactcccaaagcggaattccgacaaactgatagctagaaagaaggactgggatccgaagaagtatggagggtttgattccccaacagtagcgtattcagtactggtggtagctaaggtggagaaaggcaagtctaagaagcttaagtctgtcaaagagctgctcggcatcaccattatggagcgcagtagcttcgagaagaaccctatagattttctggaagccaaaggatataaggaggttaagaaggatctcatcatcaaactcccgaagtatagtctttttgagttggagaacggacgaaagcgcatgcttgcgtctgcgggtgaattgcagaaaggaaatgagctcgccttgccgtcaaagtatgtcaatttcttgtaccttgcgagtcactatgagaagctgaaaggaagcccagaagataatgaacagaagcaattgttcgttgaacaacataagcattatttggacgagatcatcgagcaaatcagcgagttcagcaagcgcgtcatacttgcggacgccaatctggacaaagtgctgtccgcctataacaaacatagggacaaacctatacgagagcaggcagagaatataatacatctcttcacacttactaatcttggagctccagccgcattcaagtattttgacacgactatagatcgcaagcgatatacctctacgaaagaagttctggacgctactcttatacatcaatccattacgggcctgtacgagacgaggattgacttgtcacagcttggtggtgac

SEQ ID NO: 2172 - RNA, 12 nt, synthetic construct
  source 1..12: mol_type = other RNA
  modified_base 6: mod_base = OTHER; note = N1-methyl pseudouridine
gagggtgcagac

SEQ ID NO: 2173 - RNA, 57 nt, synthetic construct
  source 1..57: mol_type = other RNA
  modified_base 19: mod_base = OTHER; note = N1-methyl pseudouridine
  modified_base 25: mod_base = OTHER; note = N1-methyl pseudouridine
  modified_base 26: mod_base = OTHER; note = N1-methyl pseudouridine
  modified_base 53: mod_base = OTHER; note = N1-methyl pseudouridine
  modified_base 54: mod_base = OTHER; note = N1-methyl pseudouridine
  modified_base 55: mod_base = OTHER; note = N1-methyl pseudouridine
aagcgaacagcggacgggtcagaattcgaaagccccaagaagaagcggaaagtttaa

SEQ ID NO: 2174 - RNA, 4929 nt, synthetic construct
  source 1..4929: mol_type = other RNA
  modified_base 7: mod_base = OTHER; note = N1-methyl pseudouridine
  modified_base 25: mod_base = OTHER; note = N1-methyl pseudouridine
  modified_base 35: mod_base = OTHER; note = N1-methyl pseudouridine
  modified_base 37: mod_base = OTHER; note = N1-methyl pseudouridine
  modified_base 49: mod_base = OTHER; note = N1-methyl pseudouridine
  modified_base 51: mod_base = OTHER; note = N1-methyl pseudouridine
  modified_base 53: mod_base = OTHER; note = N1-methyl pseudouridine
  modified_base 58: mod_base = OTHER; note = N1-methyl pseudouridine
  modified_base 63: mod_base = OTHER; note = N1-methyl pseudouridine
  modified_base 64: mod_base = OTHER; note = N1-methyl pseudouridine
  modified_base 66: mod_base = OTHER; note = N1-methyl pseudouridine
  modified_base 75: mod_base = OTHER; note = N1-methyl pseudouridine
  modified_base 78: mod_base = OTHER; note = N1-methyl pseudouridine
  modified_base 82: mod_base = OTHER; note = N1-methyl pseudouridine
  modified_base 89: mod_base = OTHER; note = N1-methyl pseudouridine
  modified_base 92: mod_base = OTHER; note = N1-methyl pseudouridine
  modified_base 94: mod_base = OTHER; note = N1-methyl pseudouridine
  modified_base 98: mod_base = OTHER; note = N1-methyl pseudouridine
  modified_base 99: mod_base = OTHER; note = N1-methyl pseudouridine
  modified_base 100: mod_base = OTHER; note = N1-methyl pseudouridine
  modified_base 119: mod_base = OTHER; note = N1-methyl pseudouridine
  modified_base 130: mod_base = OTHER; note = N1-methyl pseudouridine
  modified_base 134: mod_base = OTHER; note = N1-methyl pseudouridine
  modified_base 136: mod_base = OTHER; note = N1-methyl pseudouridine
  modified_base 145: mod_base = OTHER; note = N1-methyl pseudouridine
  modified_base 148: mod_base = OTHER; note = N1-methyl pseudouridine
  modified_base 151: mod_base = OTHER; note = N1-methyl pseudouridine
  modified_base 154: mod_base = OTHER; note = N1-methyl pseudouridine
  modified_base 166: mod_base = OTHER; note = N1-methyl pseudouridine
  modified_base 169: mod_base = OTHER; note = N1-methyl pseudouridine
  modified_base 180: mod_base = OTHER; note = N1-methyl pseudouridine
  modified_base 193: mod_base = OTHER; note = N1-methyl pseudouridine
  modified_base 199: mod_base = OTHER; note = N1-methyl pseudouridine
  modified_base 209: mod_base = OTHER; note = N1-methyl pseudouridine
  modified_base 215: mod_base = OTHER; note = N1-methyl pseudouridine
  modified_base 226: mod_base = OTHER; note = N1-methyl pseudouridine
  modified_base 229: mod_base = OTHER; note = N1-methyl pseudouridine
  modified_base 235: mod_base = OTHER; note = N1-methyl pseudouridine
  modified_base 236: mod_base = OTHER; note = N1-methyl pseudouridine
  modified_base 250: mod_base = OTHER; note = N1-methyl pseudouridine
  modified_base 253: mod_base = OTHER; note = N1-methyl pseudouridine
  modified_base 256: mod_base = OTHER; note = N1-methyl pseudouridine
  modified_base 264: mod_base = OTHER; note = N1-methyl pseudouridine
  modified_base 271: mod_base = OTHER; note = N1-methyl pseudouridine
  modified_base 274: mod_base = OTHER; note = N1-methyl pseudouridine
  modified_base 286: mod_base = OTHER; note = N1-methyl pseudouridine
  modified_base 288: mod_base = OTHER; note = N1-methyl pseudouridine
  modified_base 292: mod_base = OTHER; note = N1-methyl pseudouridine
  modified_base 297: mod_base = OTHER; note = N1-methyl pseudouridine
  modified_base 298: mod_base = OTHER; note = N1-methyl pseudouridine
  modified_base 299: mod_base = OTHER; note = N1-methyl pseudouridine
  modified_base 305: mod_base = OTHER; note = N1-methyl pseudouridine
  modified_base 306: mod_base = OTHER; note = N1-methyl pseudouridine
  modified_base 310: mod_base = OTHER; note = N1-methyl pseudouridine
  modified_base 313: mod_base = OTHER; note = N1-methyl pseudouridine
  modified_base 315: mod_base = OTHER; note = N1-methyl pseudouridine
  modified_base 328: mod_base = OTHER; note = N1-methyl pseudouridine
  modified_base 331: mod_base = OTHER; note = N1-methyl pseudouridine
  modified_base 335: mod_base = OTHER; note = N1-methyl pseudouridine
  modified_base 343: mod_base = OTHER; note = N1-methyl pseudouridine
  modified_base 352: mod_base = OTHER; note = N1-methyl pseudouridine
  modified_base 355: mod_base = OTHER; note = N1-methyl pseudouridine
  modified_base 357: mod_base = OTHER; note = N1-methyl pseudouridine
  modified_base 358: mod_base = OTHER; note = N1-methyl pseudouridine
  modified_base 359: mod_base = OTHER; note = N1-methyl pseudouridine
  modified_base 364: mod_base = OTHER; note = N1-methyl pseudouridine
  modified_base 397: mod_base = OTHER; note = N1-methyl pseudouridine
  modified_base 398: mod_base = OTHER; note = N1-methyl pseudouridine
  modified_base 400: mod_base = OTHER; note = N1-methyl pseudouridine
  modified_base 404: mod_base = OTHER; note = N1-methyl pseudouridine
  modified_base 406: mod_base = OTHER; note = N1-methyl pseudouridine
  modified_base 409: mod_base = OTHER; note = N1-methyl pseudouridine
  modified_base 416: mod_base = OTHER; note = N1-methyl pseudouridine
  modified_base 419: mod_base = OTHER; note = N1-methyl pseudouridine
  modified_base 424: mod_base = OTHER; note = N1-methyl pseudouridine
  modified_base 436: mod_base = OTHER; note = N1-methyl pseudouridine
  modified_base 442: mod_base = OTHER; note = N1-methyl pseudouridine
  modified_base 454: mod_base = OTHER; note = N1-methyl pseudouridine
  modified_base 457: mod_base = OTHER; note = N1-methyl pseudouridine
  modified_base 461: mod_base = OTHER; note = N1-methyl pseudouridine
  modified_base 464: mod_base = OTHER; note = N1-methyl pseudouridine
  modified_base 468: mod_base = OTHER; note = N1-methyl pseudouridine
  modified_base 470: mod_base = OTHER; note = N1-methyl pseudouridine
  modified_base 476: mod_base = OTHER; note = N1-methyl pseudouridine
  modified_base 478: mod_base = OTHER; note = N1-methyl pseudouridine
  modified_base 481: mod_base = OTHER; note = N1-methyl pseudouridine
  modified_base 483: mod_base = OTHER; note = N1-methyl pseudouridine
  modified_base 489: mod_base = OTHER; note = N1-methyl pseudouridine
  modified_base 490: mod_base = OTHER; note = N1-methyl pseudouridine
  modified_base 492: mod_base = OTHER; note = N1-methyl pseudouridine
  modified_base 493: mod_base = OTHER; note = N1-methyl pseudouridine
  modified_base 494: mod_base = OTHER; note = N1-methyl pseudouridine
  modified_base 499: mod_base = OTHER; note = N1-methyl pseudouridine
  modified_base 503: mod_base = OTHER; note = N1-methyl pseudouridine
  modified_base 511: mod_base = OTHER; note = N1-methyl pseudouridine
  modified_base 513: mod_base = OTHER; note = N1-methyl pseudouridine
  modified_base 514: mod_base = OTHER; note = N1-methyl pseudouridine
  modified_base 539: mod_base = OTHER; note = N1-methyl pseudouridine
  modified_base 548: mod_base = OTHER; note = N1-methyl pseudouridine
  modified_base 590: mod_base = OTHER; note = N1-methyl pseudouridine
  modified_base 603: mod_base = OTHER; note = N1-methyl pseudouridine
  modified_base 614: mod_base = OTHER; note = N1-methyl pseudouridine
  modified_base 621: mod_base = OTHER; note = N1-methyl pseudouridine
  modified_base 623: mod_base = OTHER; note = N1-methyl pseudouridine
  modified_base 633: mod_base = OTHER; note = N1-methyl pseudouridine
  modified_base 642: mod_base = OTHER; note = N1-methyl pseudouridine
  modified_base 644: mod_base = OTHER; note = N1-methyl pseudouridine
  modified_base 654: mod_base = OTHER; note = N1-methyl pseudouridine
  modified_base 657: mod_base = OTHER; note = N1-methyl pseudouridine
  modified_base 661: mod_base = OTHER; note = N1-methyl pseudouridine
  modified_base 667: mod_base = OTHER; note = N1-methyl pseudouridine
  modified_base 673: mod_base = OTHER; note = N1-methyl pseudouridine
  modified_base 683: mod_base = OTHER; note = N1-methyl pseudouridine
  modified_base 688: mod_base = OTHER; note = N1-methyl pseudouridine
  modified_base 693: mod_base = OTHER; note = N1-methyl pseudouridine
  modified_base 700: mod_base = OTHER; note = N1-methyl pseudouridine
  modified_base 703: mod_base = OTHER; note = N1-methyl pseudouridine
  modified_base 710: mod_base = OTHER; note = N1-methyl pseudouridine
  modified_base 714: mod_base = OTHER; note = N1-methyl pseudouridine
  modified_base 716: mod_base = OTHER; note = N1-methyl pseudouridine
  modified_base 721: mod_base = OTHER; note = N1-methyl pseudouridine
  modified_base 725: mod_base = OTHER; note = N1-methyl pseudouridine
  modified_base 735: mod_base = OTHER; note = N1-methyl pseudouridine
  modified_base 736: mod_base = OTHER; note = N1-methyl pseudouridine
  modified_base 742: mod_base = OTHER; note = N1-methyl pseudouridine
  modified_base 745: mod_base = OTHER; note = N1-methyl pseudouridine
  modified_base 758: mod_base = OTHER; note = N1-methyl pseudouridine
  modified_base 769: mod_base = OTHER; note = N1-methyl pseudouridine
  modified_base 781: mod_base = OTHER; note = N1-methyl pseudouridine
  modified_base 784: mod_base = OTHER; note = N1-methyl pseudouridine
  modified_base 793: mod_base = OTHER; note = N1-methyl pseudouridine
  modified_base 796: mod_base = OTHER; note = N1-methyl pseudouridine
  modified_base 798: mod_base = OTHER; note = N1-methyl pseudouridine
  modified_base 799: mod_base = OTHER; note = N1-methyl pseudouridine
  modified_base 832: mod_base = OTHER; note = N1-methyl pseudouridine
  modified_base 855: mod_base = OTHER; note = N1-methyl pseudouridine
  modified_base 866: mod_base = OTHER; note = N1-methyl pseudouridine
  modified_base 877: mod_base = OTHER; note = N1-methyl pseudouridine
  modified_base 879: mod_base = OTHER; note = N1-methyl pseudouridine
  modified_base 881: mod_base = OTHER; note = N1-methyl pseudouridine
  modified_base 882: mod_base = OTHER; note = N1-methyl pseudouridine
  modified_base 886: mod_base = OTHER; note = N1-methyl pseudouridine
  modified_base 895: mod_base = OTHER; note = N1-methyl pseudouridine
  modified_base 897: mod_base = OTHER; note = N1-methyl pseudouridine
  modified_base 898: mod_base = OTHER; note = N1-methyl pseudouridine
  modified_base 910: mod_base = OTHER; note = N1-methyl pseudouridine
  modified_base 919: mod_base = OTHER; note = N1-methyl pseudouridine
  modified_base 927: mod_base = OTHER; note = N1-methyl pseudouridine
  modified_base 929: mod_base = OTHER; note = N1-methyl pseudouridine
  modified_base 930: mod_base = OTHER; note = N1-methyl pseudouridine
  modified_base 931: mod_base = OTHER; note = N1-methyl pseudouridine
  modified_base 933: mod_base = OTHER; note = N1-methyl pseudouridine
  modified_base 934: mod_base = OTHER; note = N1-methyl pseudouridine
  modified_base 943: mod_base = OTHER; note = N1-methyl pseudouridine
  modified_base 954: mod_base = OTHER; note = N1-methyl pseudouridine
  modified_base 955: mod_base = OTHER; note = N1-methyl pseudouridine
  modified_base 956: mod_base = OTHER; note = N1-methyl pseudouridine
  modified_base 958: mod_base = OTHER; note = N1-methyl pseudouridine
  modified_base 961: mod_base = OTHER; note = N1-methyl pseudouridine
  modified_base 980: mod_base = OTHER; note = N1-methyl pseudouridine
  modified_base 994: mod_base = OTHER; note = N1-methyl pseudouridine
  modified_base 996: mod_base = OTHER; note = N1-methyl pseudouridine
  modified_base 997: mod_base = OTHER; note = N1-methyl pseudouridine
  modified_base 998: mod_base = OTHER; note = N1-methyl pseudouridine
  modified_base 1006: mod_base = OTHER; note = N1-methyl pseudouridine
  modified_base 1009: mod_base = OTHER; note = N1-methyl pseudouridine
  modified_base 1018: mod_base = OTHER; note = N1-methyl pseudouridine
  modified_base 1023: mod_base = OTHER; note = N1-methyl pseudouridine
  modified_base 1035: mod_base = OTHER; note = N1-methyl pseudouridine
  modified_base 1045: mod_base = OTHER; note = N1-methyl pseudouridine
  modified_base 1047: mod_base = OTHER; note = N1-methyl pseudouridine
  modified_base 1049: mod_base = OTHER; note = N1-methyl pseudouridine
  modified_base 1054: mod_base = OTHER; note = N1-methyl pseudouridine
  modified_base 1066: mod_base = OTHER; note = N1-methyl pseudouridine
  modified_base 1069: mod_base = OTHER; note = N1-methyl pseudouridine
  modified_base 1082: mod_base = OTHER; note = N1-methyl pseudouridine
  modified_base 1093: mod_base = OTHER; note = N1-methyl pseudouridine
  modified_base 1099: mod_base = OTHER; note = N1-methyl pseudouridine
  modified_base 1102: mod_base = OTHER; note = N1-methyl pseudouridine
  modified_base 1104: mod_base = OTHER; note = N1-methyl pseudouridine
  modified_base 1108: mod_base = OTHER; note = N1-methyl pseudouridine
  modified_base 1114: mod_base = OTHER; note = N1-methyl pseudouridine
  modified_base 1123: mod_base = OTHER; note = N1-methyl pseudouridine
  modified_base 1126: mod_base = OTHER; note = N1-methyl pseudouridine
  modified_base 1131: mod_base = OTHER; note = N1-methyl pseudouridine
  modified_base 1132: mod_base = OTHER; note = N1-methyl pseudouridine
  modified_base 1143: mod_base = OTHER; note = N1-methyl pseudouridine
  modified_base 1144: mod_base = OTHER; note = N1-methyl pseudouridine
  modified_base 1147: mod_base = OTHER; note = N1-methyl pseudouridine
  modified_base 1150: mod_base = OTHER; note = N1-methyl pseudouridine
  modified_base 1162: mod_base = OTHER; note = N1-methyl pseudouridine
  modified_base 1172: mod_base = OTHER; note = N1-methyl pseudouridine
  modified_base 1175: mod_base = OTHER; note = N1-methyl pseudouridine
  modified_base 1181: mod_base = OTHER; note = N1-methyl pseudouridine
  modified_base 1183: mod_base = OTHER; note = N1-methyl pseudouridine
  modified_base 1187: mod_base = OTHER; note = N1-methyl pseudouridine
  modified_base 1192: mod_base = OTHER; note = N1-methyl pseudouridine
  modified_base 1194: mod_base = OTHER; note = N1-methyl pseudouridine
  modified_base 1195: mod_base = OTHER; note = N1-methyl pseudouridine
  modified_base 1198: mod_base = OTHER; note = N1-methyl pseudouridine
  modified_base 1204: mod_base = OTHER; note = N1-methyl pseudouridine
  modified_base 1207: mod_base = OTHER; note = N1-methyl pseudouridine
  modified_base 1215: mod_base = OTHER; note = N1-methyl pseudouridine
  modified_base 1225: mod_base = OTHER; note = N1-methyl pseudouridine
  modified_base 1227: mod_base = OTHER; note = N1-methyl pseudouridine
  modified_base 1228: mod_base = OTHER; note = N1-methyl pseudouridine
  modified_base 1243: mod_base = OTHER; note = N1-methyl pseudouridine
  modified_base 1251: mod_base = OTHER; note = N1-methyl pseudouridine
  modified_base 1258: mod_base = OTHER; note = N1-methyl pseudouridine
  modified_base 1259: mod_base = OTHER; note = N1-methyl pseudouridine
  modified_base 1262: mod_base = OTHER; note = N1-methyl pseudouridine
  modified_base 1273: mod_base = OTHER; note = N1-methyl pseudouridine
  modified_base 1276: mod_base = OTHER; note = N1-methyl pseudouridine
  modified_base 1278: mod_base = OTHER; note = N1-methyl pseudouridine
  modified_base 1280: mod_base = OTHER; note = N1-methyl pseudouridine
  modified_base 1283: mod_base = OTHER; note = N1-methyl pseudouridine
  modified_base 1288: mod_base = OTHER; note = N1-methyl pseudouridine
  modified_base 1292: mod_base = OTHER; note = N1-methyl pseudouridine
  modified_base 1306: mod_base = OTHER; note = N1-methyl pseudouridine
  modified_base 1315: mod_base = OTHER; note = N1-methyl pseudouridine
  modified_base 1318: mod_base = OTHER; note = N1-methyl pseudouridine
  modified_base 1327: mod_base = OTHER; note = N1-methyl pseudouridine
  modified_base 1346: mod_base = OTHER; note = N1-methyl pseudouridine
  modified_base 1351: mod_base = OTHER; note = N1-methyl pseudouridine
  modified_base 1353: mod_base = OTHER; note = N1-methyl pseudouridine
  modified_base 1354: mod_base = OTHER; note = N1-methyl pseudouridine
  modified_base 1355: mod_base = OTHER; note = N1-methyl pseudouridine
  modified_base 1363: mod_base = OTHER; note = N1-methyl pseudouridine
  modified_base 1366: mod_base = OTHER; note = N1-methyl pseudouridine
  modified_base 1367: mod_base = OTHER; note = N1-methyl pseudouridine
  modified_base 1372: mod_base = OTHER; note = N1-methyl pseudouridine
  modified_base 1374: mod_base = OTHER; note = N1-methyl pseudouridine
  modified_base 1376: mod_base = OTHER; note = N1-methyl pseudouridine
  modified_base 1378: mod_base = OTHER; note = N1-methyl pseudouridine
  modified_base 1384: mod_base = OTHER; note = N1-methyl pseudouridine
  modified_base 1385: mod_base = OTHER; note = N1-methyl pseudouridine
  modified_base 1391: mod_base = OTHER; note = N1-methyl pseudouridine
  modified_base 1395: mod_base = OTHER; note = N1-methyl pseudouridine
  modified_base 1396: mod_base = OTHER; note = N1-methyl pseudouridine
  modified_base 1407: mod_base = OTHER; note = N1-methyl pseudouridine
  modified_base 1408: mod_base = OTHER; note = N1-methyl pseudouridine
  modified_base 1409: mod_base = OTHER; note = N1-methyl pseudouridine
  modified_base 1414: mod_base = OTHER; note = N1-methyl pseudouridine
  modified_base 1432: mod_base = OTHER; note = N1-methyl pseudouridine
  modified_base 1438: mod_base = OTHER; note = N1-methyl pseudouridine
  modified_base 1440: mod_base = OTHER; note = N1-methyl pseudouridine
  modified_base 1442: mod_base = OTHER; note = N1-methyl pseudouridine
  modified_base 1448: mod_base = OTHER; note = N1-methyl pseudouridine
  modified_base 1452: mod_base = OTHER; note = N1-methyl pseudouridine
  modified_base 1463: mod_base = OTHER; note = N1-methyl pseudouridine
  modified_base 1465: mod_base = OTHER; note = N1-methyl pseudouridine
  modified_base 1474: mod_base = OTHER; note = N1-methyl pseudouridine
  modified_base 1477: mod_base = OTHER; note = N1-methyl pseudouridine
  modified_base 1486: mod_base = OTHER; note = N1-methyl pseudouridine
  modified_base 1493: mod_base = OTHER; note = N1-methyl pseudouridine
  modified_base 1497: mod_base = OTHER; note = N1-methyl pseudouridine
  modified_base 1507: mod_base = OTHER; note = N1-methyl pseudouridine
  modified_base 1509: mod_base = OTHER; note = N1-methyl pseudouridine
  modified_base 1510: mod_base = OTHER; note = N1-methyl pseudouridine
  modified_base 1513: mod_base = OTHER; note = N1-methyl pseudouridine
  modified_base 1517: mod_base = OTHER; note = N1-methyl pseudouridine
  modified_base 1526: mod_base = OTHER; note = N1-methyl pseudouridine
  modified_base 1528: mod_base = OTHER; note = N1-methyl pseudouridine
  modified_base 1530: mod_base = OTHER; note = N1-methyl pseudouridine
  modified_base 1532: mod_base = OTHER; note = N1-methyl pseudouridine
  modified_base 1540: mod_base = OTHER; note = N1-methyl pseudouridine
  modified_base 1543: mod_base = OTHER; note = N1-methyl pseudouridine
  modified_base 1544: mod_base = OTHER; note = N1-methyl pseudouridine
  modified_base 1546: mod_base = OTHER; note = N1-methyl pseudouridine
  modified_base 1548: mod_base = OTHER; note = N1-methyl pseudouridine
  modified_base 1553: mod_base = OTHER; note = N1-methyl pseudouridine
  modified_base 1555: mod_base = OTHER; note = N1-methyl pseudouridine
  modified_base 1558: mod_base = OTHER; note = N1-methyl pseudouridine
  modified_base 1564: mod_base = OTHER; note = N1-methyl pseudouridine
  modified_base 1576: mod_base = OTHER; note = N1-methyl pseudouridine
  modified_base 1586: mod_base = OTHER; note = N1-methyl pseudouridine
  modified_base 1589: mod_base = OTHER; note = N1-methyl pseudouridine
  modified_base 1591: mod_base = OTHER; note = N1-methyl pseudouridine
  modified_base 1592: mod_base = OTHER; note = N1-methyl pseudouridine
  modified_base 1595: mod_base = OTHER; note = N1-methyl pseudouridine
  modified_base 1603: mod_base = OTHER; note = N1-methyl pseudouridine
  modified_base 1606: mod_base = OTHER; note = N1-methyl pseudouridine
  modified_base 1614: mod_base = OTHER; note = N1-methyl pseudouridine
  modified_base 1616: mod_base = OTHER; note = N1-methyl pseudouridine
  modified_base 1619: mod_base = OTHER; note = N1-methyl pseudouridine
  modified_base 1634: mod_base = OTHER; note = N1-methyl pseudouridine
  modified_base 1636: mod_base = OTHER; note = N1-methyl pseudouridine
  modified_base 1642: mod_base = OTHER; note = N1-methyl pseudouridine
  modified_base 1645: mod_base = OTHER; note = N1-methyl pseudouridine
  modified_base 1654: mod_base = OTHER; note = N1-methyl pseudouridine
  modified_base 1657: mod_base = OTHER; note = N1-methyl pseudouridine
  modified_base 1669: mod_base = OTHER; note = N1-methyl pseudouridine
  modified_base 1673: mod_base = OTHER; note = N1-methyl pseudouridine
  modified_base 1680: mod_base = OTHER; note = N1-methyl pseudouridine
  modified_base 1690: mod_base = OTHER; note = N1-methyl pseudouridine
  modified_base 1691: mod_base = OTHER; note = N1-methyl pseudouridine
  modified_base 1692: mod_base = OTHER; note = N1-methyl pseudouridine
  modified_base 1693: mod_base = OTHER; note = N1-methyl pseudouridine
  modified_base 1695: mod_base = OTHER; note = N1-methyl pseudouridine
  modified_base 1696: mod_base = OTHER; note = N1-methyl pseudouridine
  modified_base 1712: mod_base = OTHER; note = N1-methyl pseudouridine
  modified_base 1716: mod_base = OTHER; note = N1-methyl pseudouridine
  modified_base 1725: mod_base = OTHER; note = N1-methyl pseudouridine
  modified_base 1729: mod_base = OTHER; note = N1-methyl pseudouridine
  modified_base 1733: mod_base = OTHER; note = N1-methyl pseudouridine
  modified_base 1755: mod_base = OTHER; note = N1-methyl pseudouridine
  modified_base 1756: mod_base = OTHER; note = N1-methyl pseudouridine
  modified_base 1757: mod_base = OTHER; note = N1-methyl pseudouridine
  modified_base 1758: mod_base = OTHER; note = N1-methyl pseudouridine
  modified_base 1764: mod_base = OTHER; note = N1-methyl pseudouridine
  modified_base 1765: mod_base = OTHER; note = N1-methyl pseudouridine
  modified_base 1766: mod_base = OTHER; note = N1-methyl pseudouridine
  modified_base 1768: mod_base = OTHER; note = N1-methyl pseudouridine
  modified_base 1777: mod_base = OTHER; note = N1-methyl pseudouridine
  modified_base 1780: mod_base = OTHER; note = N1-methyl pseudouridine
  modified_base 1789: mod_base = OTHER; note = N1-methyl pseudouridine
  modified_base 1807: mod_base = OTHER; note = N1-methyl pseudouridine
  modified_base 1810: mod_base = OTHER; note = N1-methyl pseudouridine
  modified_base 1813: mod_base = OTHER; note = N1-methyl pseudouridine
  modified_base 1819: mod_base = OTHER; note = N1-methyl pseudouridine
  modified_base 1834: mod_base = OTHER; note = N1-methyl pseudouridine
  modified_base 1837: mod_base = OTHER; note = N1-methyl pseudouridine
  modified_base 1854: mod_base = OTHER; note = N1-methyl pseudouridine
  modified_base 1855: mod_base = OTHER; note = N1-methyl pseudouridine
  modified_base 1870: mod_base = OTHER; note = N1-methyl pseudouridine
  modified_base 1874: mod_base = OTHER; note = N1-methyl pseudouridine
  modified_base 1882: mod_base = OTHER; note = N1-methyl pseudouridine
  modified_base 1888: mod_base = OTHER; note = N1-methyl pseudouridine
  modified_base 1892: mod_base = OTHER; note = N1-methyl pseudouridine
  modified_base 1897: mod_base = OTHER; note = N1-methyl pseudouridine
  modified_base 1906: mod_base = OTHER; note = N1-methyl pseudouridine
  modified_base 1909: mod_base = OTHER; note = N1-methyl pseudouridine
  modified_base 1925: mod_base = OTHER; note = N1-methyl pseudouridine
  modified_base 1926: mod_base = OTHER; note = N1-methyl pseudouridine
  modified_base 1927: mod_base = OTHER; note = N1-methyl pseudouridine
  modified_base 1929: mod_base = OTHER; note = N1-methyl pseudouridine
  modified_base 1935: mod_base = OTHER; note = N1-methyl pseudouridine
  modified_base 1936: mod_base = OTHER; note = N1-methyl pseudouridine
  modified_base 1939: mod_base = OTHER; note = N1-methyl pseudouridine
  modified_base 1960: mod_base = OTHER; note = N1-methyl pseudouridine
  modified_base 1969: mod_base = OTHER; note = N1-methyl pseudouridine
  modified_base 1972: mod_base = OTHER; note = N1-methyl pseudouridine
  modified_base 1977: mod_base = OTHER; note = N1-methyl pseudouridine
  modified_base 1978: mod_base = OTHER; note = N1-methyl pseudouridine
  modified_base 1979: mod_base = OTHER; note = N1-methyl pseudouridine
  modified_base 1984: mod_base = OTHER; note = N1-methyl pseudouridine
  modified_base 1985: mod_base = OTHER; note = N1-methyl pseudouridine
  modified_base 1989: mod_base = OTHER; note = N1-methyl pseudouridine
  modified_base 1992: mod_base = OTHER; note = N1-methyl pseudouridine
  modified_base 1996: mod_base = OTHER; note = N1-methyl pseudouridine
  modified_base 2003: mod_base = OTHER; note = N1-methyl pseudouridine
  modified_base 2005: mod_base = OTHER; note = N1-methyl pseudouridine
  modified_base 2009: mod_base = OTHER; note = N1-methyl pseudouridine
  modified_base 2019: mod_base = OTHER; note = N1-methyl pseudouridine
  modified_base 2025: mod_base = OTHER; note = N1-methyl pseudouridine
  modified_base 2026: mod_base = OTHER; note = N1-methyl pseudouridine
  modified_base 2031: mod_base = OTHER; note = N1-methyl pseudouridine
  modified_base 2035: mod_base = OTHER; note = N1-methyl pseudouridine
  modified_base 2046: mod_base = OTHER; note = N1-methyl pseudouridine
  modified_base 2059: mod_base = OTHER; note = N1-methyl pseudouridine
  modified_base 2067: mod_base = OTHER; note = N1-methyl pseudouridine
  modified_base 2073: mod_base = OTHER; note = N1-methyl pseudouridine
  modified_base 2074: mod_base = OTHER; note = N1-methyl pseudouridine
  modified_base 2075: mod_base = OTHER; note = N1-methyl pseudouridine
  modified_base 2083: mod_base = OTHER; note = N1-methyl pseudouridine
  modified_base 2086: mod_base = OTHER; note = N1-methyl pseudouridine
  modified_base 2105: mod_base = OTHER; note = N1-methyl pseudouridine
  modified_base 2112: mod_base = OTHER; note = N1-methyl pseudouridine
  modified_base 2113: mod_base = OTHER; note = N1-methyl pseudouridine
  modified_base 2114: mod_base = OTHER; note = N1-methyl pseudouridine
  modified_base 2116: mod_base = OTHER; note = N1-methyl pseudouridine
  modified_base 2125: mod_base = OTHER; note = N1-methyl pseudouridine
  modified_base 2133: mod_base = OTHER; note = N1-methyl pseudouridine
  modified_base 2134: mod_base = OTHER; note = N1-methyl pseudouridine
  modified_base 2144: mod_base = OTHER; note = N1-methyl pseudouridine
  modified_base 2146: mod_base = OTHER; note = N1-methyl pseudouridine
  modified_base 2161: mod_base = OTHER; note = N1-methyl pseudouridine
  modified_base 2164: mod_base = OTHER; note = N1-methyl pseudouridine
  modified_base 2168: mod_base = OTHER; note = N1-methyl pseudouridine
  modified_base 2175: mod_base = OTHER; note = N1-methyl pseudouridine
  modified_base 2177: mod_base = OTHER; note = N1-methyl pseudouridine
  modified_base 2179: mod_base = OTHER; note = N1-methyl pseudouridine
  modified_base 2182: mod_base = OTHER; note = N1-methyl pseudouridine
  modified_base 2184: mod_base = OTHER; note = N1-methyl pseudouridine
  modified_base 2186: mod_base = OTHER; note = N1-methyl pseudouridine
  modified_base 2190: mod_base = OTHER; note = N1-methyl pseudouridine
  modified_base 2193: mod_base = OTHER; note = N1-methyl pseudouridine
  modified_base 2194: mod_base = OTHER; note = N1-methyl pseudouridine
  modified_base 2200: mod_base = OTHER; note = N1-methyl pseudouridine
  modified_base 2201: mod_base = OTHER; note = N1-methyl pseudouridine
  modified_base 2202: mod_base = OTHER; note = N1-methyl pseudouridine
  modified_base 2212: mod_base = OTHER; note = N1-methyl pseudouridine
  modified_base 2221: mod_base = OTHER; note = N1-methyl pseudouridine
  modified_base 2226: mod_base = OTHER; note = N1-methyl pseudouridine
  modified_base 2230: mod_base = OTHER; note = N1-methyl pseudouridine
  modified_base 2242: mod_base = OTHER; note = N1-methyl pseudouridine
  modified_base 2256: mod_base = OTHER; note = N1-methyl pseudouridine
  modified_base 2257: mod_base = OTHER; note = N1-methyl pseudouridine
  modified_base 2260: mod_base = OTHER; note = N1-methyl pseudouridine
  modified_base 2282: mod_base = OTHER; note = N1-methyl pseudouridine
  modified_base 2284: mod_base = OTHER; note = N1-methyl pseudouridine
  modified_base 2287: mod_base = OTHER; note = N1-methyl pseudouridine
  modified_base 2288: mod_base = OTHER; note = N1-methyl pseudouridine
  modified_base 2293: mod_base = OTHER; note = N1-methyl pseudouridine
  modified_base 2296: mod_base = OTHER; note = N1-methyl pseudouridine
  modified_base 2298: mod_base = OTHER; note = N1-methyl pseudouridine
  modified_base 2299: mod_base = OTHER; note = N1-methyl pseudouridine
  modified_base 2309: mod_base = OTHER; note = N1-methyl pseudouridine
  modified_base 2317: mod_base = OTHER; note = N1-methyl pseudouridine
  modified_base 2323: mod_base = OTHER; note = N1-methyl pseudouridine
  modified_base 2332: mod_base = OTHER; note = N1-methyl pseudouridine
  modified_base 2343: mod_base = OTHER; note = N1-methyl pseudouridine
  modified_base 2346: mod_base = OTHER; note = N1-methyl pseudouridine
  modified_base 2347: mod_base = OTHER; note = N1-methyl pseudouridine
  modified_base 2356: mod_base = OTHER; note = N1-methyl pseudouridine
  modified_base 2357: mod_base = OTHER; note = N1-methyl pseudouridine
  modified_base 2361: mod_base = OTHER; note = N1-methyl pseudouridine
  modified_base 2364: mod_base = OTHER; note = N1-methyl pseudouridine
  modified_base 2365: mod_base = OTHER; note = N1-methyl pseudouridine
  modified_base 2370: mod_base = OTHER; note = N1-methyl pseudouridine
  modified_base 2372: mod_base = OTHER; note = N1-methyl pseudouridine
  modified_base 2374: mod_base = OTHER; note = N1-methyl pseudouridine
  modified_base 2380: mod_base = OTHER; note = N1-methyl pseudouridine
  modified_base 2382: mod_base = OTHER; note = N1-methyl pseudouridine
  modified_base 2384: mod_base = OTHER; note = N1-methyl pseudouridine
  modified_base 2389: mod_base = OTHER; note = N1-methyl pseudouridine
  modified_base 2390: mod_base = OTHER; note = N1-methyl pseudouridine
  modified_base 2400: mod_base = OTHER; note = N1-methyl pseudouridine
  modified_base 2401: mod_base = OTHER; note = N1-methyl pseudouridine
  modified_base 2409: mod_base = OTHER; note = N1-methyl pseudouridine
  modified_base 2413: mod_base = OTHER; note = N1-methyl pseudouridine
  modified_base 2421: mod_base = OTHER; note = N1-methyl pseudouridine
  modified_base 2429: mod_base = OTHER; note = N1-methyl pseudouridine
  modified_base 2431: mod_base = OTHER; note = N1-methyl pseudouridine
  modified_base 2434: mod_base = OTHER; note = N1-methyl pseudouridine
  modified_base 2440: mod_base = OTHER; note = N1-methyl pseudouridine
  modified_base 2443: mod_base = OTHER; note = N1-methyl pseudouridine
  modified_base 2444: mod_base = OTHER; note = N1-methyl pseudouridine
  modified_base 2457: mod_base = OTHER; note = N1-methyl pseudouridine
  modified_base 2458: mod_base = OTHER; note = N1-methyl pseudouridine
  modified_base 2459: mod_base = OTHER; note = N1-methyl pseudouridine
  modified_base 2461: mod_base = OTHER; note = N1-methyl pseudouridine
  modified_base 2468: mod_base = OTHER; note = N1-methyl pseudouridine
  modified_base 2483: mod_base = OTHER; note = N1-methyl pseudouridine
  modified_base 2485: mod_base = OTHER; note = N1-methyl pseudouridine
  modified_base 2488: mod_base = OTHER; note = N1-methyl pseudouridine
  modified_base 2497: mod_base = OTHER; note = N1-methyl pseudouridine
  modified_base 2498: mod_base = OTHER; note = N1-methyl pseudouridine
  modified_base 2500: mod_base = OTHER; note = N1-methyl pseudouridine
  modified_base 2503: mod_base = OTHER; note = N1-methyl pseudouridine
  modified_base 2509: mod_base = OTHER; note = N1-methyl pseudouridine
  modified_base 2515: mod_base = OTHER; note = N1-methyl pseudouridine
  modified_base 2517: mod_base = OTHER; note = N1-methyl pseudouridine
  modified_base 2518: mod_base = OTHER; note = N1-methyl pseudouridine
  modified_base 2519: mod_base = OTHER; note = N1-methyl pseudouridine
  modified_base 2525: mod_base = OTHER; note = N1-methyl pseudouridine
  modified_base 2528: mod_base = OTHER; note = N1-methyl pseudouridine
  modified_base 2533: mod_base = OTHER; note = N1-methyl pseudouridine
  modified_base 2536: mod_base = OTHER; note = N1-methyl pseudouridine
  modified_base 2548: mod_base = OTHER; note = N1-methyl pseudouridine
  modified_base 2556: mod_base = OTHER; note = N1-methyl pseudouridine
  modified_base 2564: mod_base = OTHER; note = N1-methyl pseudouridine
  modified_base 2566: mod_base = OTHER; note = N1-methyl pseudouridine
  modified_base 2568: mod_base = OTHER; note = N1-methyl pseudouridine
  modified_base 2569: mod_base = OTHER; note = N1-methyl pseudouridine
  modified_base 2581: mod_base = OTHER; note = N1-methyl pseudouridine
  modified_base 2582: mod_base = OTHER; note = N1-methyl pseudouridine
  modified_base 2584: mod_base = OTHER; note = N1-methyl pseudouridine
  modified_base 2593: mod_base = OTHER; note = N1-methyl pseudouridine
  modified_base 2607: mod_base = OTHER; note = N1-methyl pseudouridine
  modified_base 2609: mod_base = OTHER; note = N1-methyl pseudouridine
  modified_base 2616: mod_base = OTHER; note = N1-methyl pseudouridine
  modified_base 2626: mod_base = OTHER; note = N1-methyl pseudouridine
  modified_base 2628: mod_base = OTHER; note = N1-methyl pseudouridine
  modified_base 2638: mod_base = OTHER; note = N1-methyl pseudouridine
  modified_base 2641: mod_base = OTHER; note = N1-methyl pseudouridine
  modified_base 2650: mod_base = OTHER; note = N1-methyl pseudouridine
  modified_base 2677: mod_base = OTHER; note = N1-methyl pseudouridine
  modified_base 2678: mod_base = OTHER; note = N1-methyl pseudouridine
  modified_base 2680: mod_base = OTHER; note = N1-methyl pseudouridine
  modified_base 2685: mod_base = OTHER; note = N1-methyl pseudouridine
  modified_base 2686: mod_base = OTHER; note = N1-methyl pseudouridine
  modified_base 2689: mod_base = OTHER; note = N1-methyl pseudouridine
  modified_base 2703: mod_base = OTHER; note = N1-methyl pseudouridine
  modified_base 2704: mod_base = OTHER; note = N1-methyl pseudouridine
  modified_base 2717: mod_base = OTHER; note = N1-methyl pseudouridine
  modified_base 2718: mod_base = OTHER; note = N1-methyl pseudouridine
  modified_base 2719: mod_base = OTHER; note = N1-methyl pseudouridine
  modified_base 2720: mod_base = OTHER; note = N1-methyl pseudouridine
  modified_base 2722: mod_base = OTHER; note = N1-methyl pseudouridine
  modified_base 2728: mod_base = OTHER; note = N1-methyl pseudouridine
  modified_base 2731: mod_base = OTHER; note = N1-methyl pseudouridine
  modified_base 2735: mod_base = OTHER; note = N1-methyl pseudouridine
  modified_base 2741: mod_base = OTHER; note = N1-methyl pseudouridine
  modified_base 2746: mod_base = OTHER; note = N1-methyl pseudouridine
  modified_base 2751: mod_base = OTHER; note = N1-methyl pseudouridine
  modified_base 2752: mod_base = OTHER; note = N1-methyl pseudouridine
  modified_base 2764: mod_base = OTHER; note = N1-methyl pseudouridine
  modified_base 2779: mod_base = OTHER; note = N1-methyl pseudouridine
  modified_base 2800: mod_base = OTHER; note = N1-methyl pseudouridine
  modified_base 2812: mod_base = OTHER; note = N1-methyl pseudouridine
  modified_base 2821: mod_base = OTHER; note = N1-methyl pseudouridine
  modified_base 2829: mod_base = OTHER; note = N1-methyl pseudouridine
  modified_base 2831: mod_base = OTHER; note = N1-methyl pseudouridine
  modified_base 2837: mod_base = OTHER; note = N1-methyl pseudouridine
  modified_base 2839: mod_base = OTHER; note = N1-methyl pseudouridine
  modified_base 2851: mod_base = OTHER; note = N1-methyl pseudouridine
  modified_base 2854: mod_base = OTHER; note = N1-methyl pseudouridine
  modified_base 2863: mod_base = OTHER; note = N1-methyl pseudouridine
  modified_base 2869: mod_base = OTHER; note = N1-methyl pseudouridine
  modified_base 2872: mod_base = OTHER; note = N1-methyl pseudouridine
  modified_base 2873: mod_base = OTHER; note = N1-methyl pseudouridine
  modified_base 2876: mod_base = OTHER; note = N1-methyl pseudouridine
  modified_base 2880: mod_base = OTHER; note = N1-methyl pseudouridine
  modified_base 2881: mod_base = OTHER; note = N1-methyl pseudouridine
  modified_base 2884: mod_base = OTHER; note = N1-methyl pseudouridine
  modified_base 2890: mod_base = OTHER; note = N1-methyl pseudouridine
  modified_base 2893: mod_base = OTHER; note = N1-methyl pseudouridine
  modified_base 2909: mod_base = OTHER; note = N1-methyl pseudouridine
  modified_base 2915: mod_base = OTHER; note = N1-methyl pseudouridine
  modified_base 2917: mod_base = OTHER; note = N1-methyl pseudouridine
  modified_base 2920: mod_base = OTHER; note = N1-methyl pseudouridine
  modified_base 2923: mod_base = OTHER; note = N1-methyl pseudouridine
  modified_base 2924: mod_base = OTHER; note = N1-methyl pseudouridine
  modified_base 2929: mod_base = OTHER; note = N1-methyl pseudouridine
  modified_base 2951: mod_base = OTHER; note = N1-methyl pseudouridine
  modified_base 2970: mod_base = OTHER; note = N1-methyl pseudouridine
  modified_base 2983: mod_base = OTHER; note = N1-methyl pseudouridine
  modified_base 2992: mod_base = OTHER; note = N1-methyl pseudouridine
  modified_base 3004: mod_base = OTHER; note = N1-methyl pseudouridine
  modified_base 3013: mod_base = OTHER; note = N1-methyl pseudouridine
  modified_base 3025: mod_base = OTHER; note = N1-methyl pseudouridine
  modified_base 3028: mod_base = OTHER; note = N1-methyl pseudouridine
  modified_base 3043: mod_base = OTHER; note = N1-methyl pseudouridine
  modified_base 3050: mod_base = OTHER; note = N1-methyl pseudouridine
  modified_base 3058: mod_base = OTHER; note = N1-methyl pseudouridine
  modified_base 3073: mod_base = OTHER; note = N1-methyl pseudouridine
  modified_base 3075: mod_base = OTHER; note = N1-methyl pseudouridine
  modified_base 3079: mod_base = OTHER; note = N1-methyl pseudouridine
  modified_base 3081: mod_base = OTHER; note = N1-methyl pseudouridine
  modified_base 3084: mod_base = OTHER; note = N1-methyl pseudouridine
  modified_base 3088: mod_base = OTHER; note = N1-methyl pseudouridine
  modified_base 3104: mod_base = OTHER; note = N1-methyl pseudouridine
  modified_base 3106: mod_base = OTHER; note = N1-methyl pseudouridine
  modified_base 3108: mod_base = OTHER; note = N1-methyl pseudouridine
  modified_base 3112: mod_base = OTHER; note = N1-methyl pseudouridine
  modified_base 3116: mod_base = OTHER; note = N1-methyl pseudouridine
  modified_base 3124: mod_base = OTHER; note = N1-methyl pseudouridine
  modified_base 3130: mod_base = OTHER; note = N1-methyl pseudouridine
  modified_base 3134: mod_base = OTHER; note = N1-methyl pseudouridine
  modified_base 3139: mod_base = OTHER; note = N1-methyl pseudouridine
  modified_base 3141: mod_base = OTHER; note = N1-methyl pseudouridine
  modified_base 3147: mod_base = OTHER; note = N1-methyl pseudouridine
  modified_base 3154: mod_base = OTHER; note = N1-methyl pseudouridine
  modified_base 3163: mod_base = OTHER; note = N1-methyl pseudouridine
  modified_base 3166: mod_base = OTHER; note = N1-methyl pseudouridine
  modified_base 3170: mod_base = OTHER; note = N1-methyl pseudouridine
  modified_base 3177: mod_base = OTHER; note = N1-methyl pseudouridine
  modified_base 3178: mod_base = OTHER; note = N1-methyl pseudouridine
  modified_base 3179: mod_base = OTHER; note = N1-methyl pseudouridine
  modified_base 3181: mod_base = OTHER; note = N1-methyl pseudouridine
  modified_base 3188: mod_base = OTHER; note = N1-methyl pseudouridine
  modified_base 3191: mod_base = OTHER; note = N1-methyl pseudouridine
  modified_base 3192: mod_base = OTHER; note = N1-methyl pseudouridine
  modified_base 3194: mod_base = OTHER; note = N1-methyl pseudouridine
  modified_base 3196: mod_base = OTHER; note = N1-methyl pseudouridine
  modified_base 3208: mod_base = OTHER; note = N1-methyl pseudouridine
  modified_base 3210: mod_base = OTHER; note = N1-methyl pseudouridine
  modified_base 3211: mod_base = OTHER; note = N1-methyl pseudouridine
  modified_base 3219: mod_base = OTHER; note = N1-methyl pseudouridine
  modified_base 3245: mod_base = OTHER; note = N1-methyl pseudouridine
  modified_base 3250: mod_base = OTHER; note = N1-methyl pseudouridine
  modified_base 3255: mod_base = OTHER; note = N1-methyl pseudouridine
  modified_base 3265: mod_base = OTHER; note = N1-methyl pseudouridine
  modified_base 3268: mod_base = OTHER; note = N1-methyl pseudouridine
  modified_base 3277: mod_base = OTHER; note = N1-methyl pseudouridine
  modified_base 3285: mod_base = OTHER; note = N1-methyl pseudouridine
  modified_base 3288: mod_base = OTHER; note = N1-methyl pseudouridine
  modified_base 3298: mod_base = OTHER; note = N1-methyl pseudouridine
  modified_base 3301: mod_base = OTHER; note = N1-methyl pseudouridine
  modified_base 3313: mod_base = OTHER; note = N1-methyl pseudouridine
  modified_base 3316: mod_base = OTHER; note = N1-methyl pseudouridine
  modified_base 3317: mod_base = OTHER; note = N1-methyl pseudouridine
  modified_base 3330: mod_base = OTHER; note = N1-methyl pseudouridine
  modified_base 3331: mod_base = OTHER; note = N1-methyl pseudouridine
  modified_base 3332: mod_base = OTHER; note = N1-methyl pseudouridine
  modified_base 3340: mod_base = OTHER; note = N1-methyl pseudouridine
  modified_base 3350: mod_base = OTHER; note = N1-methyl pseudouridine
  modified_base 3364: mod_base = OTHER; note = N1-methyl pseudouridine
  modified_base 3373: mod_base = OTHER; note = N1-methyl pseudouridine
  modified_base 3383: mod_base = OTHER; note = N1-methyl pseudouridine
  modified_base 3386: mod_base = OTHER; note = N1-methyl pseudouridine
  modified_base 3387: mod_base = OTHER; note = N1-methyl pseudouridine
  modified_base 3388: mod_base = OTHER; note = N1-methyl pseudouridine
  modified_base 3391: mod_base = OTHER; note = N1-methyl pseudouridine
  modified_base 3403: mod_base = OTHER; note = N1-methyl pseudouridine
  modified_base 3406: mod_base = OTHER; note = N1-methyl pseudouridine
  modified_base 3421: mod_base = OTHER; note = N1-methyl pseudouridine
  modified_base 3433: mod_base = OTHER; note = N1-methyl pseudouridine
  modified_base 3437: mod_base = OTHER; note = N1-methyl pseudouridine
  modified_base 3442: mod_base = OTHER; note = N1-methyl pseudouridine
  modified_base 3445: mod_base = OTHER; note = N1-methyl pseudouridine
  modified_base 3449: mod_base = OTHER; note = N1-methyl pseudouridine
  modified_base 3457: mod_base = OTHER; note = N1-methyl pseudouridine
  modified_base 3461: mod_base = OTHER; note = N1-methyl pseudouridine
  modified_base 3468: mod_base = OTHER; note = N1-methyl pseudouridine
  modified_base 3473: mod_base = OTHER; note = N1-methyl pseudouridine
  modified_base 3487: mod_base = OTHER; note = N1-methyl pseudouridine
  modified_base 3490: mod_base = OTHER; note = N1-methyl pseudouridine
  modified_base 3499: mod_base = OTHER; note = N1-methyl pseudouridine
  modified_base 3505: mod_base = OTHER; note = N1-methyl pseudouridine
  modified_base 3508: mod_base = OTHER; note = N1-methyl pseudouridine
  modified_base 3513: mod_base = OTHER; note = N1-methyl pseudouridine
  modified_base 3514: mod_base = OTHER; note = N1-methyl pseudouridine
  modified_base 3519: mod_base = OTHER; note = N1-methyl pseudouridine
  modified_base 3521: mod_base = OTHER; note = N1-methyl pseudouridine
  modified_base 3526: mod_base = OTHER; note = N1-methyl pseudouridine
  modified_base 3529: mod_base = OTHER; note = N1-methyl pseudouridine
  modified_base 3537: mod_base = OTHER; note = N1-methyl pseudouridine
  modified_base 3538: mod_base = OTHER; note = N1-methyl pseudouridine
  modified_base 3549: mod_base = OTHER; note = N1-methyl pseudouridine
  modified_base 3550: mod_base = OTHER; note = N1-methyl pseudouridine
  modified_base 3555: mod_base = OTHER; note = N1-methyl pseudouridine
  modified_base 3556: mod_base = OTHER; note = N1-methyl pseudouridine
  modified_base 3558: mod_base = OTHER; note = N1-methyl pseudouridine
  modified_base 3565: mod_base = OTHER; note = N1-methyl pseudouridine
  modified_base 3574: mod_base = OTHER; note = N1-methyl pseudouridine
  modified_base 3582: mod_base = OTHER; note = N1-methyl pseudouridine
  modified_base 3603: mod_base = OTHER; note = N1-methyl pseudouridine
  modified_base 3607: mod_base = OTHER; note = N1-methyl pseudouridine
  modified_base 3616: mod_base = OTHER; note = N1-methyl pseudouridine
  modified_base 3619: mod_base = OTHER; note = N1-methyl pseudouridine
  modified_base 3631: mod_base = OTHER; note = N1-methyl pseudouridine
  modified_base 3634: mod_base = OTHER; note = N1-methyl pseudouridine
  modified_base 3642: mod_base = OTHER; note = N1-methyl pseudouridine
  modified_base 3644: mod_base = OTHER; note = N1-methyl pseudouridine
  modified_base 3652: mod_base = OTHER; note = N1-methyl pseudouridine
  modified_base 3657: mod_base = OTHER; note = N1-methyl pseudouridine
  modified_base 3663: mod_base = OTHER; note = N1-methyl pseudouridine
  modified_base 3664: mod_base = OTHER; note = N1-methyl pseudouridine
  modified_base 3667: mod_base = OTHER; note = N1-methyl pseudouridine
  modified_base 3669: mod_base = OTHER; note = N1-methyl pseudouridine
  modified_base 3678: mod_base = OTHER; note = N1-methyl pseudouridine
  modified_base 3685: mod_base = OTHER; note = N1-methyl pseudouridine
  modified_base 3687: mod_base = OTHER; note = N1-methyl pseudouridine
  modified_base 3694: mod_base = OTHER; note = N1-methyl pseudouridine
  modified_base 3703: mod_base = OTHER; note = N1-methyl pseudouridine
  modified_base 3706: mod_base = OTHER; note = N1-methyl pseudouridine
  modified_base 3714: mod_base = OTHER; note = N1-methyl pseudouridine
  modified_base 3716: mod_base = OTHER; note = N1-methyl pseudouridine
  modified_base 3727: mod_base = OTHER; note = N1-methyl pseudouridine
  modified_base 3747: mod_base = OTHER; note = N1-methyl pseudouridine
  modified_base 3749: mod_base = OTHER; note = N1-methyl pseudouridine
  modified_base 3750: mod_base = OTHER; note = N1-methyl pseudouridine
  modified_base 3751: mod_base = OTHER; note = N1-methyl pseudouridine
  modified_base 3753: mod_base = OTHER; note = N1-methyl pseudouridine
  modified_base 3754: mod_base = OTHER; note = N1-methyl pseudouridine
  modified_base 3756: mod_base = OTHER; note = N1-methyl pseudouridine
  modified_base 3766: mod_base = OTHER; note = N1-methyl pseudouridine
  modified_base 3767: mod_base = OTHER; note = N1-methyl pseudouridine
  modified_base 3769: mod_base = OTHER; note = N1-methyl pseudouridine
  modified_base 3774: mod_base = OTHER; note = N1-methyl pseudouridine
  modified_base 3775: mod_base = OTHER; note = N1-methyl pseudouridine
  modified_base 3777: mod_base = OTHER; note = N1-methyl pseudouridine
  modified_base 3778: mod_base = OTHER; note = N1-methyl pseudouridine
  modified_base 3790: mod_base = OTHER; note = N1-methyl pseudouridine
  modified_base 3796: mod_base = OTHER; note = N1-methyl pseudouridine
  modified_base 3800: mod_base = OTHER; note = N1-methyl pseudouridine
  modified_base 3803: mod_base = OTHER; note = N1-methyl pseudouridine
  modified_base 3811: mod_base = OTHER; note = N1-methyl pseudouridine
  modified_base 3826: mod_base = OTHER; note = N1-methyl pseudouridine
  modified_base 3829: mod_base = OTHER; note = N1-methyl pseudouridine
  modified_base 3856: mod_base = OTHER; note = N1-methyl pseudouridine
  modified_base 3859: mod_base = OTHER; note = N1-methyl pseudouridine
  modified_base 3861: mod_base = OTHER; note = N1-methyl pseudouridine
  modified_base 3879: mod_base = OTHER; note = N1-methyl pseudouridine
  modified_base 3880: mod_base = OTHER; note = N1-methyl pseudouridine
  modified_base 3889: mod_base = OTHER; note = N1-methyl pseudouridine
  modified_base 3898: mod_base = OTHER; note = N1-methyl pseudouridine
  modified_base 3900: mod_base = OTHER; note = N1-methyl pseudouridine
  modified_base 3901: mod_base = OTHER; note = N1-methyl pseudouridine
  modified_base 3903: mod_base = OTHER; note = N1-methyl pseudouridine
  modified_base 3907: mod_base = OTHER; note = N1-methyl pseudouridine
  modified_base 3911: mod_base = OTHER; note = N1-methyl pseudouridine
  modified_base 3916: mod_base = OTHER; note = N1-methyl pseudouridine
  modified_base 3922: mod_base = OTHER; note = N1-methyl pseudouridine
  modified_base 3925: mod_base = OTHER; note = N1-methyl pseudouridine
  modified_base 3940: mod_base = OTHER; note = N1-methyl pseudouridine
  modified_base 3954: mod_base = OTHER; note = N1-methyl pseudouridine
  modified_base 3955: mod_base = OTHER; note = N1-methyl pseudouridine
  modified_base 3956: mod_base = OTHER; note = N1-methyl pseudouridine
  modified_base 3970: mod_base = OTHER; note = N1-methyl pseudouridine
  modified_base 3973: mod_base = OTHER; note = N1-methyl pseudouridine
  modified_base 3977: mod_base = OTHER; note = N1-methyl pseudouridine
  modified_base 3997: mod_base = OTHER; note = N1-methyl pseudouridine
  modified_base 4000: mod_base = OTHER; note = N1-methyl pseudouridine
  modified_base 4017: mod_base = OTHER; note = N1-methyl pseudouridine
  modified_base 4022: mod_base = OTHER; note = N1-methyl pseudouridine
  modified_base 4025: mod_base = OTHER; note = N1-methyl pseudouridine
  modified_base 4032: mod_base = OTHER; note = N1-methyl pseudouridine
  modified_base 4041: mod_base = OTHER; note = N1-methyl pseudouridine
  modified_base 4042: mod_base = OTHER; note = N1-methyl pseudouridine
  modified_base 4046: mod_base = OTHER; note = N1-methyl pseudouridine
  modified_base 4047: mod_base = OTHER; note = N1-methyl pseudouridine
  modified_base 4052: mod_base = OTHER; note = N1-methyl pseudouridine
  modified_base 4057: mod_base = OTHER; note = N1-methyl pseudouridine
  modified_base 4062: mod_base = OTHER; note = N1-methyl pseudouridine
  modified_base 4069: mod_base = OTHER; note = N1-methyl pseudouridine
  modified_base 4072: mod_base = OTHER; note = N1-methyl pseudouridine
  modified_base 4075: mod_base = OTHER; note = N1-methyl pseudouridine
  modified_base 4078: mod_base = OTHER; note = N1-methyl pseudouridine
  modified_base 4087: mod_base = OTHER; note = N1-methyl pseudouridine
  modified_base 4111: mod_base = OTHER; note = N1-methyl pseudouridine
  modified_base 4116: mod_base = OTHER; note = N1-methyl pseudouridine
  modified_base 4120: mod_base = OTHER; note = N1-methyl pseudouridine
  modified_base 4129: mod_base = OTHER; note = N1-methyl pseudouridine
  modified_base 4132: mod_base = OTHER; note = N1-methyl pseudouridine
  modified_base 4138: mod_base = OTHER; note = N1-methyl pseudouridine
  modified_base 4144: mod_base = OTHER; note = N1-methyl pseudouridine
  modified_base 4147: mod_base = OTHER; note = N1-methyl pseudouridine
  modified_base 4155: mod_base = OTHER; note = N1-methyl pseudouridine
  modified_base 4157: mod_base = OTHER; note = N1-methyl pseudouridine
  modified_base 4161: mod_base = OTHER; note = N1-methyl pseudouridine
  modified_base 4162: mod_base = OTHER; note = N1-methyl pseudouridine
  modified_base 4172: mod_base = OTHER; note = N1-methyl pseudouridine
  modified_base 4175: mod_base = OTHER; note = N1-methyl pseudouridine
  modified_base 4177: mod_base = OTHER; note = N1-methyl pseudouridine
  modified_base 4182: mod_base = OTHER; note = N1-methyl pseudouridine
  modified_base 4183: mod_base = OTHER; note = N1-methyl pseudouridine
  modified_base 4186: mod_base = OTHER; note = N1-methyl pseudouridine
  modified_base 4200: mod_base = OTHER; note = N1-methyl pseudouridine
  modified_base 4202: mod_base = OTHER; note = N1-methyl pseudouridine
  modified_base 4210: mod_base = OTHER; note = N1-methyl pseudouridine
  modified_base 4222: mod_base = OTHER; note = N1-methyl pseudouridine
  modified_base 4225: mod_base = OTHER; note = N1-methyl pseudouridine
  modified_base 4228: mod_base = OTHER; note = N1-methyl pseudouridine
  modified_base 4234: mod_base = OTHER; note = N1-methyl pseudouridine
  modified_base 4242: mod_base = OTHER; note = N1-methyl pseudouridine
  modified_base 4249: mod_base = OTHER; note = N1-methyl pseudouridine
  modified_base 4251: mod_base = OTHER; note = N1-methyl pseudouridine
  modified_base 4252: mod_base = OTHER; note = N1-methyl pseudouridine
  modified_base 4258: mod_base = OTHER; note = N1-methyl pseudouridine
  modified_base 4279: mod_base = OTHER; note = N1-methyl pseudouridine
  modified_base 4282: mod_base = OTHER; note = N1-methyl pseudouridine
  modified_base 4287: mod_base = OTHER; note = N1-methyl pseudouridine
  modified_base 4300: mod_base = OTHER; note = N1-methyl pseudouridine
  modified_base 4313: mod_base = OTHER; note = N1-methyl pseudouridine
  modified_base 4318: mod_base = OTHER; note = N1-methyl pseudouridine
  modified_base 4324: mod_base = OTHER; note = N1-methyl pseudouridine
  modified_base 4328: mod_base = OTHER; note = N1-methyl pseudouridine
  modified_base 4329: mod_base = OTHER; note = N1-methyl pseudouridine
  modified_base 4331: mod_base = OTHER; note = N1-methyl pseudouridine
  modified_base 4335: mod_base = OTHER; note = N1-methyl pseudouridine
  modified_base 4339: mod_base = OTHER; note = N1-methyl pseudouridine
  modified_base 4344: mod_base = OTHER; note = N1-methyl pseudouridine
  modified_base 4345: mod_base = OTHER; note = N1-methyl pseudouridine
  modified_base 4348: mod_base = OTHER; note = N1-methyl pseudouridine
  modified_base 4350: mod_base = OTHER; note = N1-methyl pseudouridine
  modified_base 4354: mod_base = OTHER; note = N1-methyl pseudouridine
  modified_base 4359: mod_base = OTHER; note = N1-methyl pseudouridine
  modified_base 4365: mod_base = OTHER; note = N1-methyl pseudouridine
  modified_base 4375: mod_base = OTHER; note = N1-methyl pseudouridine
  modified_base 4385: mod_base = OTHER; note = N1-methyl pseudouridine
  modified_base 4411: mod_base = OTHER; note = N1-methyl pseudouridine
  modified_base 4413: mod_base = OTHER; note = N1-methyl pseudouridine
  modified_base 4414: mod_base = OTHER; note = N1-methyl pseudouridine
  modified_base 4417: mod_base = OTHER; note = N1-methyl pseudouridine
  modified_base 4434: mod_base = OTHER; note = N1-methyl pseudouridine
  modified_base 4438: mod_base = OTHER; note = N1-methyl pseudouridine
  modified_base 4442: mod_base = OTHER; note = N1-methyl pseudouridine
  modified_base 4447: mod_base = OTHER; note = N1-methyl pseudouridine
  modified_base 4448: mod_base = OTHER; note = N1-methyl pseudouridine
  modified_base 4450: mod_base = OTHER; note = N1-methyl pseudouridine
  modified_base 4459: mod_base = OTHER; note = N1-methyl pseudouridine
  modified_base 4467: mod_base = OTHER; note = N1-methyl pseudouridine
  modified_base 4468: mod_base = OTHER; note = N1-methyl pseudouridine
  modified_base 4470: mod_base = OTHER; note = N1-methyl pseudouridine
  modified_base 4480: mod_base = OTHER; note = N1-methyl pseudouridine
  modified_base 4483: mod_base = OTHER; note = N1-methyl pseudouridine
  modified_base 4486: mod_base = OTHER; note = N1-methyl pseudouridine
  modified_base 4493: mod_base = OTHER; note = N1-methyl pseudouridine
  modified_base 4496: mod_base = OTHER; note = N1-methyl pseudouridine
  modified_base 4501: mod_base = OTHER; note = N1-methyl pseudouridine
  modified_base 4505: mod_base = OTHER; note = N1-methyl pseudouridine
  modified_base 4510: mod_base = OTHER; note = N1-methyl pseudouridine
  modified_base 4511: mod_base = OTHER; note = N1-methyl pseudouridine
  modified_base 4513: mod_base = OTHER; note = N1-methyl pseudouridine
  modified_base 4521: mod_base = OTHER; note = N1-methyl pseudouridine
  modified_base 4544: mod_base = OTHER; note = N1-methyl pseudouridine
  modified_base 4546: mod_base = OTHER; note = N1-methyl pseudouridine
  modified_base 4565: mod_base = OTHER; note = N1-methyl pseudouridine
  modified_base 4567: mod_base = OTHER; note = N1-methyl pseudouridine
  modified_base 4570: mod_base = OTHER; note = N1-methyl pseudouridine
  modified_base 4576: mod_base = OTHER; note = N1-methyl pseudouridine
  modified_base 4578: mod_base = OTHER; note = N1-methyl pseudouridine
  modified_base 4579: mod_base = OTHER; note = N1-methyl pseudouridine
  modified_base 4585: mod_base = OTHER; note = N1-methyl pseudouridine
  modified_base 4594: mod_base = OTHER; note = N1-methyl pseudouridine
  modified_base 4604: mod_base = OTHER; note = N1-methyl pseudouridine
  modified_base 4607: mod_base = OTHER; note = N1-methyl pseudouridine
  modified_base 4611: mod_base = OTHER; note = N1-methyl pseudouridine
  modified_base 4612: mod_base = OTHER; note = N1-methyl pseudouridine
  modified_base 4617: mod_base = OTHER; note = N1-methyl pseudouridine
  modified_base 4620: mod_base = OTHER; note = N1-methyl pseudouridine
  modified_base 4621: mod_base = OTHER; note = N1-methyl pseudouridine
  modified_base 4633: mod_base = OTHER; note = N1-methyl pseudouridine
  modified_base 4647: mod_base = OTHER; note = N1-methyl pseudouridine
  modified_base 4666: mod_base = OTHER; note = N1-methyl pseudouridine
  modified_base 4667: mod_base = OTHER; note = N1-methyl pseudouridine
  modified_base 4669: mod_base = OTHER; note = N1-methyl pseudouridine
  modified_base 4681: mod_base = OTHER; note = N1-methyl pseudouridine
  modified_base 4684: mod_base = OTHER; note = N1-methyl pseudouridine
  modified_base 4696: mod_base = OTHER; note = N1-methyl pseudouridine
  modified_base 4703: mod_base = OTHER; note = N1-methyl pseudouridine
  modified_base 4705: mod_base = OTHER; note = N1-methyl pseudouridine
  modified_base 4707: mod_base = OTHER; note = N1-methyl pseudouridine
  modified_base 4709: mod_base = OTHER; note = N1-methyl pseudouridine
  modified_base 4720: mod_base = OTHER; note = N1-methyl pseudouridine
  modified_base 4726: mod_base = OTHER; note = N1-methyl pseudouridine
  modified_base 4728: mod_base = OTHER; note = N1-methyl pseudouridine
  modified_base 4730: mod_base = OTHER; note = N1-methyl pseudouridine
  modified_base 4735: mod_base = OTHER; note = N1-methyl pseudouridine
  modified_base 4742: mod_base = OTHER; note = N1-methyl pseudouridine
  modified_base 4751: mod_base = OTHER; note = N1-methyl pseudouridine
  modified_base 4754: mod_base = OTHER; note = N1-methyl pseudouridine
  modified_base 4782: mod_base = OTHER; note = N1-methyl pseudouridine
  modified_base 4783: mod_base = OTHER; note = N1-methyl pseudouridine
  modified_base 4810: mod_base = OTHER; note = N1-methyl pseudouridine
  modified_base 4812: mod_base = OTHER; note = N1-methyl pseudouridine
  modified_base 4823: mod_base = OTHER; note = N1-methyl pseudouridine
  modified_base 4824: mod_base = OTHER; note = N1-methyl pseudouridine
  modified_base 4827: mod_base = OTHER; note = N1-methyl pseudouridine
  modified_base 4828: mod_base = OTHER; note = N1-methyl pseudouridine
  modified_base 4833: mod_base = OTHER; note = N1-methyl pseudouridine
  modified_base 4837: mod_base = OTHER; note = N1-methyl pseudouridine
  modified_base 4838: mod_base = OTHER; note = N1-methyl pseudouridine
  modified_base 4840: mod_base = OTHER; note = N1-methyl pseudouridine
  modified_base 4848: mod_base = OTHER; note = N1-methyl pseudouridine
  modified_base 4849: mod_base = OTHER; note = N1-methyl pseudouridine
  modified_base 4853: mod_base = OTHER; note = N1-methyl pseudouridine
  modified_base 4854: mod_base = OTHER; note = N1-methyl pseudouridine
  modified_base 4856: mod_base = OTHER; note = N1-methyl pseudouridine
  modified_base 4862: mod_base = OTHER; note = N1-methyl pseudouridine
  modified_base 4867: mod_base = OTHER; note = N1-methyl pseudouridine
  modified_base 4868: mod_base = OTHER; note = N1-methyl pseudouridine
  modified_base 4870: mod_base = OTHER; note = N1-methyl pseudouridine
  modified_base 4871: mod_base = OTHER; note = N1-methyl pseudouridine
  modified_base 4873: mod_base = OTHER; note = N1-methyl pseudouridine
  modified_base 4875: mod_base = OTHER; note = N1-methyl pseudouridine
  modified_base 4879: mod_base = OTHER; note = N1-methyl pseudouridine
  modified_base 4880: mod_base = OTHER; note = N1-methyl pseudouridine
  modified_base 4886: mod_base = OTHER; note = N1-methyl pseudouridine
  modified_base 4888: mod_base = OTHER; note = N1-methyl pseudouridine
  modified_base 4892: mod_base = OTHER; note = N1-methyl pseudouridine
  modified_base 4894: mod_base = OTHER; note = N1-methyl pseudouridine
  modified_base 4895: mod_base = OTHER; note = N1-methyl pseudouridine
  modified_base 4898: mod_base = OTHER; note = N1-methyl pseudouridine
  modified_base 4900: mod_base = OTHER; note = N1-methyl pseudouridine
  modified_base 4901: mod_base = OTHER; note = N1-methyl pseudouridine
  modified_base 4902: mod_base = OTHER; note = N1-methyl pseudouridine
  modified_base 4906: mod_base = OTHER; note = N1-methyl pseudouridine
  modified_base 4913: mod_base = OTHER; note = N1-methyl pseudouridine
  modified_base 4917: mod_base = OTHER; note = N1-methyl pseudouridine
  modified_base 4924: mod_base = OTHER; note = N1-methyl pseudouridine
  modified_base 4926: mod_base = OTHER; note = N1-methyl pseudouridine
aggaaataagagagaaaagaagagtaagaagaaatataagagccaccatgtctgaggtggagttctcccacgagtactggatgcggcatgctctgactttggccaagagagcccgagatgagcgggaggtccctgtgggcgcagtgctggtgctgaacaacagggtgatcggcgagggctggaaccgggccatcggcctgcacgaccctacagctcacgccgagatcatggcccttagacagggcggcctggtgatgcagaactacagactgatcgacgccacactgtacgtcacctttgagccttgcgtgatgtgcgccggagccatgatccatagccggataggacgggtggtctttggcgtgcggaacgcgaagaccggcgccgccggcagccttatggatgtgctgcaccatcctggcatgaaccacagggtggagatcaccgaaggcatcctggctgatgaatgtgccgctctgctgtgcagattctttcggatgcctagaagagtgttcaacgcccagaagaaagcccagagtagcaccgatagcggcggcagcagcggcggcagcagcggaagcgagacacctggcaccagcgaatccgccacacctgagagctctggaggaagctcaggcggctctgacaagaaatactcaatcggactggccatcggcaccaatagcgtgggctgggccgtgatcacagatgaatataaggtgcctagcaagaagttcaaggtgctgggcaacaccgatagacacagcatcaagaagaacctgatcggagccctgctgttcgacagcggcgaaaccgccgaagccaccagactgaagagaaccgccagaagacggtacacccggcgtaagaacaggatctgttacctgcaggagatcttcagcaacgaaatggccaaggtggacgactctttcttccacagactggaggagagctttctggtggaagaagacaagaagcatgagcggcaccccatctttggcaacatcgtggacgaagtggcctaccacgagaaatacccaacaatctatcacctgagaaagaagctggtggacagcaccgataaggccgacctgcggctgatctacctggccctggcacacatgatcaagttcagaggccacttcctgatcgagggcgacctgaaccccgataatagcgatgtggataagctgttcatccagctggtgcagacctacaaccagctgttcgaggagaacccgatcaacgcctcgggagttgatgccaaggcaatcctgtctgctagactgagtaagagcagaagactggagaacctgatcgcccagctgcccggagagaagaagaatgggctgtttggcaacctgattgccctgtctctgggccttacacctaacttcaagagcaactttgacctggccgaagacgccaagctgcaactgtctaaggatacctacgacgacgatctggacaacctgctggcccaaatcggggatcaatacgccgacctgttcctggctgccaagaatctgtctgacgccatccttctgtccgatatcctgcgggtgaacacagagataaccaaagctcctcttagtgcgagcatgatcaagagatatgatgagcaccaccaagatctgacgctcctgaaggccctggtcagacagcagctccctgagaaatacaaggaaattttcttcgaccagagcaagaatggctacgccggctacatcgatggcggcgccagccaggaggaattttacaagtttatcaaaccaatcctcgagaagatggacggcaccgaggaactgctcgtgaagctgaacagagaggacctactgcggaagcagcggacgttcgacaacggcagcatccctcaccagatccacctgggtgagctgcacgcaatcctgagaagacaggaagatttctaccccttcctgaaagacaaccgggagaagatcgagaagatcctgacatttagaattccctactacgtgggccctctggctagaggcaactcccggttcgcctggatgacccggaagtccgaagaaaccatcaccccctggaactttgaggaggtagtggacaagggcgccagcgctcagagctttatagagagaatgaccaacttcgacaagaatctgccaaacgagaaagtcctgcctaagcactctctgctgtatgagtacttcaccgtttacaacgagctgacaaaggtgaaatacgtgacggaggggatgaggaagcccgccttcctgagcggcgaacagaagaaggctatcgttgacctgctgttcaagaccaataggaaggtgaccgtgaagcagctcaaggaggactacttcaagaagattgagtgcttcgactctgtggaaatctctggagttgaggaccggttcaacgcatccctgggaacataccacgatctgctgaagatcattaaggacaaggactttctggacaatgaggagaacgaagatatcctggaggacattgtgctgaccctgacactgtttgaagatcgtgaaatgatcgaagaacggctgaagacatacgcccatctgttcgacgacaaggttatgaagcagctgaagagaagaagatatacagggtggggcaggctgtccaggaaactgatcaacggcatccgggacaagcagagcggcaagacaattctggacttcctcaagagcgacggcttcgccaacagaaattttatgcagctgatccatgacgatagcctgacattcaaggaagacatccagaaggcccaggtgagcgggcaaggcgacagcctgcacgagcacatcgccaacctggccggctctcccgctatcaagaagggaatcctgcagacagtgaaggtggttgatgagttagtgaaagtgatgggccggcacaagcctgagaatatcgtgattgaaatggccagagagaaccagacaactcagaagggccagaagaactcccgagagagaatgaagagaatcgaagagggaatcaaagagctaggcagccaaatcctcaaagaacaccccgtggagaatacccagctgcagaacgagaagctgtacctgtactacctgcagaacggccgagatatgtacgtggatcaggagctggacatcaataggctgtcagactacgacgtggaccacatcgtgcctcagagctttctgaaggatgattctatcgacaacaaggtgttaaccagatccgacaagaacagaggcaagagcgataacgtcccatccgaagaggtcgtgaagaagatgaagaactactggagacagctgctgaacgcgaaactgattacccagagaaagtttgacaacctcaccaaagctgagagaggaggcctgagcgagctggacaaggctggtttcatcaagcggcagctagtggaaacacggcaaatcaccaagcacgtggctcaaatcctagatagcagaatgaataccaagtacgatgagaacgacaaactgatcagagaagtgaaggtgatcacattaaagtctaaactggtcagcgacttcagaaaggacttccagttctacaaagtcagagagatcaacaactaccaccacgcccacgacgcctacctgaacgccgtggtgggcaccgccctgatcaagaagtatcccaagctggagtccgaattcgtgtacggcgactacaaggtgtacgacgtgcggaagatgatcgccaagtctgaacaggagatcggcaaggccaccgccaagtatttcttctacagcaacattatgaacttcttcaagaccgagatcaccctggctaatggagagatcagaaagcgccccctgatcgaaaccaacggagaaaccggcgagatcgtgtgggacaagggcagagacttcgccaccgtgagaaaggtgttgtccatgcctcaggtgaacatcgtgaagaagacagaggtgcagacaggagggtttagcaaggagagcatcctgcctaaacggaacagcgacaagctgatcgccagaaagaaggactgggatcctaagaaatacggcggcttcgattcccctaccgtggcctacagcgtgctggtggtggccaaggtcgagaagggcaagagcaagaaactgaagtccgtgaaggaactgctgggaatcaccatcatggaaagatctagcttcgagaagaatcctatcgacttcctggaagccaagggctataaagaggtgaagaaagacctgatcatcaagctcccgaagtacagcctgttcgagctggagaacggccgcaagcggatgctggcctccgccggcgagctgcagaagggcaatgagctcgccctgccttctaaatacgtgaacttcctgtacctggcctcgcactacgagaagctcaagggcagtccagaggacaacgagcagaaacagctgttcgtggaacaacacaagcactacctggatgagattatcgagcagatcagcgagttctccaaacgggtgatcctggcggatgctaacctagataaggttctgagcgcctacaacaagcaccgcgacaagcctataagagaacaggccgagaatatcatccacctgttcaccctgaccaacctgggcgcacctgctgccttcaagtacttcgacaccaccatcgacagaaagagatacacaagcaccaaggaggttctggacgccaccctgatacaccagagcatcacaggtctgtatgaaacccggatcgacctgtctcagctgggcggtgacgaaggtgctgacaagagaaccgccgacggcagcgagttcgagagccccaagaagaagcgcaaggtgtgagcggccgcttaattaagctgccttctgcggggcttgccttctggccatgcccttcttctctcccttgcacctgtacctcttggtctttgaataaagcctgagtaggaagtctaga

SEQ ID NO: 2175 - RNA, 501 nt, synthetic construct
  source 1..501: mol_type = other RNA
  modified_base 2: mod_base = OTHER; note = N1-methyl pseudouridine
  modified_base 4: mod_base = OTHER; note = N1-methyl pseudouridine
  modified_base 6: mod_base = OTHER; note = N1-methyl pseudouridine
  modified_base 11: mod_base = OTHER; note = N1-methyl pseudouridine
  modified_base 16: mod_base = OTHER; note = N1-methyl pseudouridine
  modified_base 17: mod_base = OTHER; note = N1-methyl pseudouridine
  modified_base 19: mod_base = OTHER; note = N1-methyl pseudouridine
  modified_base 28: mod_base = OTHER; note = N1-methyl pseudouridine
  modified_base 31: mod_base = OTHER; note = N1-methyl pseudouridine
  modified_base 35: mod_base = OTHER; note = N1-methyl pseudouridine
  modified_base 42: mod_base = OTHER; note = N1-methyl pseudouridine
  modified_base 45: mod_base = OTHER; note = N1-methyl pseudouridine
  modified_base 47: mod_base = OTHER; note = N1-methyl pseudouridine
  modified_base 51: mod_base = OTHER; note = N1-methyl pseudouridine
  modified_base 52: mod_base = OTHER; note = N1-methyl pseudouridine
  modified_base 53: mod_base = OTHER; note = N1-methyl pseudouridine
  modified_base 72: mod_base = OTHER; note = N1-methyl pseudouridine
  modified_base 83: mod_base = OTHER; note = N1-methyl pseudouridine
  modified_base 87: mod_base = OTHER; note = N1-methyl pseudouridine
  modified_base 89: mod_base = OTHER; note = N1-methyl pseudouridine
  modified_base 98: mod_base = OTHER; note = N1-methyl pseudouridine
  modified_base 101: mod_base = OTHER; note = N1-methyl pseudouridine
  modified_base 104: mod_base = OTHER; note = N1-methyl pseudouridine
  modified_base 107: mod_base = OTHER; note = N1-methyl pseudouridine
  modified_base 119: mod_base = OTHER; note = N1-methyl pseudouridine
  modified_base 122: mod_base = OTHER; note = N1-methyl pseudouridine
  modified_base 133: mod_base = OTHER; note = N1-methyl pseudouridine
  modified_base 146: mod_base = OTHER; note = N1-methyl pseudouridine
  modified_base 152: mod_base = OTHER; note = N1-methyl pseudouridine
  modified_base 162: mod_base = OTHER; note = N1-methyl pseudouridine
  modified_base 168: mod_base = OTHER; note = N1-methyl pseudouridine
  modified_base 179: mod_base = OTHER; note = N1-methyl pseudouridine
  modified_base 182: mod_base = OTHER; note = N1-methyl pseudouridine
  modified_base 188: mod_base = OTHER; note = N1-methyl pseudouridine
  modified_base 189: mod_base = OTHER; note = N1-methyl pseudouridine
  modified_base 203: mod_base = OTHER; note = N1-methyl pseudouridine
  modified_base 206: mod_base = OTHER; note = N1-methyl pseudouridine
  modified_base 209: mod_base = OTHER; note = N1-methyl pseudouridine
  modified_base 217: mod_base = OTHER; note = N1-methyl pseudouridine
  modified_base 224: mod_base = OTHER; note = N1-methyl pseudouridine
  modified_base 227: mod_base = OTHER; note = N1-methyl pseudouridine
  modified_base 239: mod_base = OTHER; note = N1-methyl pseudouridine
  modified_base 241: mod_base = OTHER; note = N1-methyl pseudouridine
  modified_base 245: mod_base = OTHER; note = N1-methyl pseudouridine
  modified_base 250: mod_base = OTHER; note = N1-methyl pseudouridine
  modified_base 251: mod_base = OTHER; note = N1-methyl pseudouridine
  modified_base 252: mod_base = OTHER; note = N1-methyl pseudouridine
  modified_base 258: mod_base = OTHER; note = N1-methyl pseudouridine
  modified_base 259: mod_base = OTHER; note = N1-methyl pseudouridine
  modified_base 263: mod_base = OTHER; note = N1-methyl pseudouridine
  modified_base 266: mod_base = OTHER; note = N1-methyl pseudouridine
  modified_base 268: mod_base = OTHER; note = N1-methyl pseudouridine
  modified_base 281: mod_base = OTHER; note = N1-methyl pseudouridine
  modified_base 284: mod_base = OTHER; note = N1-methyl pseudouridine
  modified_base 288: mod_base = OTHER; note = N1-methyl pseudouridine
  modified_base 296: mod_base = OTHER; note = N1-methyl pseudouridine
  modified_base 305: mod_base = OTHER; note = N1-methyl pseudouridine
  modified_base 308: mod_base = OTHER; note = N1-methyl pseudouridine
  modified_base 310: mod_base = OTHER; note = N1-methyl pseudouridine
  modified_base 311: mod_base = OTHER; note = N1-methyl pseudouridine
  modified_base 312: mod_base = OTHER; note = N1-methyl pseudouridine
  modified_base 317: mod_base = OTHER; note = N1-methyl pseudouridine
  modified_base 350: mod_base = OTHER; note = N1-methyl pseudouridine
  modified_base 351: mod_base = OTHER; note = N1-methyl pseudouridine
  modified_base 353: mod_base = OTHER; note = N1-methyl pseudouridine
  modified_base 357: mod_base = OTHER; note = N1-methyl pseudouridine
  modified_base 359: mod_base = OTHER; note = N1-methyl pseudouridine
  modified_base 362: mod_base = OTHER; note = N1-methyl pseudouridine
  modified_base 369: mod_base = OTHER; note = N1-methyl pseudouridine
  modified_base 372: mod_base = OTHER; note = N1-methyl pseudouridine
  modified_base 377: mod_base = OTHER; note = N1-methyl pseudouridine
  modified_base 389: mod_base = OTHER; note = N1-methyl pseudouridine
  modified_base 395: mod_base = OTHER; note = N1-methyl pseudouridine
  modified_base 407: mod_base = OTHER; note = N1-methyl pseudouridine
  modified_base 410: mod_base = OTHER; note = N1-methyl pseudouridine
  modified_base 414: mod_base = OTHER; note = N1-methyl pseudouridine
  modified_base 417: mod_base = OTHER; note = N1-methyl pseudouridine
  modified_base 421: mod_base = OTHER; note = N1-methyl pseudouridine
  modified_base 423: mod_base = OTHER; note = N1-methyl pseudouridine
  modified_base 429: mod_base = OTHER; note = N1-methyl pseudouridine
  modified_base 431: mod_base = OTHER; note = N1-methyl pseudouridine
  modified_base 434: mod_base = OTHER; note = N1-methyl pseudouridine
  modified_base 436: mod_base = OTHER; note = N1-methyl pseudouridine
  modified_base 442: mod_base = OTHER; note = N1-methyl pseudouridine
  modified_base 443: mod_base = OTHER; note = N1-methyl pseudouridine
  modified_base 445: mod_base = OTHER; note = N1-methyl pseudouridine
  modified_base 446: mod_base = OTHER; note = N1-methyl pseudouridine
  modified_base 447: mod_base = OTHER; note = N1-methyl pseudouridine
  modified_base 452: mod_base = OTHER; note = N1-methyl pseudouridine
  modified_base 456: mod_base = OTHER; note = N1-methyl pseudouridine
  modified_base 464: mod_base = OTHER; note = N1-methyl pseudouridine
  modified_base 466: mod_base = OTHER; note = N1-methyl pseudouridine
  modified_base 467: mod_base = OTHER; note = N1-methyl pseudouridine
  modified_base 492: mod_base = OTHER; note = N1-methyl pseudouridine
  modified_base 501: mod_base = OTHER; note = N1-methyl pseudouridine
atgtctgaggtggagttctcccacgagtactggatgcggcatgctctgactttggccaagagagcccgagatgagcgggaggtccctgtgggcgcagtgctggtgctgaacaacagggtgatcggcgagggctggaaccgggccatcggcctgcacgaccctacagctcacgccgagatcatggcccttagacagggcggcctggtgatgcagaactacagactgatcgacgccacactgtacgtcacctttgagccttgcgtgatgtgcgccggagccatgatccatagccggataggacgggtggtctttggcgtgcggaacgcgaagaccggcgccgccggcagccttatggatgtgctgcaccatcctggcatgaaccacagggtggagatcaccgaaggcatcctggctgatgaatgtgccgctctgctgtgcagattctttcggatgcctagaagagtgttcaacgcccagaagaaagcccagagtagcaccgat

SEQ ID NO: 2176 - RNA, 96 nt, synthetic construct
  source 1..96: mol_type = other RNA
  modified_base 42: mod_base = OTHER; note = N1-methyl pseudouridine
  modified_base 55: mod_base = OTHER; note = N1-methyl pseudouridine
  modified_base 66: mod_base = OTHER; note = N1-methyl pseudouridine
  modified_base 73: mod_base = OTHER; note = N1-methyl pseudouridine
  modified_base 75: mod_base = OTHER; note = N1-methyl pseudouridine
  modified_base 85: mod_base = OTHER; note = N1-methyl pseudouridine
  modified_base 94: mod_base = OTHER; note = N1-methyl pseudouridine
  modified_base 96: mod_base = OTHER; note = N1-methyl pseudouridine
agcggcggcagcagcggcggcagcagcggaagcgagacacctggcaccagcgaatccgccacacctgagagctctggaggaagctcaggcggctct

SEQ ID NO: 2177 - RNA, 4101 nt, synthetic construct
  source 1..4101: mol_type = other RNA
  modified_base 10: mod_base = OTHER; note = N1-methyl pseudouridine
  modified_base 13: mod_base = OTHER; note = N1-methyl pseudouridine
  modified_base 17: mod_base = OTHER; note = N1-methyl pseudouridine
  modified_base 23: mod_base = OTHER; note = N1-methyl pseudouridine
  modified_base 29: mod_base = OTHER; note = N1-methyl pseudouridine
  modified_base 39: mod_base = OTHER; note = N1-methyl pseudouridine
  modified_base 44: mod_base = OTHER; note = N1-methyl pseudouridine
  modified_base 49: mod_base = OTHER; note = N1-methyl pseudouridine
  modified_base 56: mod_base = OTHER; note = N1-methyl pseudouridine
  modified_base 59: mod_base = OTHER; note = N1-methyl pseudouridine
  modified_base 66: mod_base = OTHER; note = N1-methyl pseudouridine
  modified_base 70: mod_base = OTHER; note = N1-methyl pseudouridine
  modified_base 72: mod_base = OTHER; note = N1-methyl pseudouridine
  modified_base 77: mod_base = OTHER; note = N1-methyl pseudouridine
  modified_base 81: mod_base = OTHER; note = N1-methyl pseudouridine
  modified_base 91: mod_base = OTHER; note = N1-methyl pseudouridine
  modified_base 92: mod_base = OTHER; note = N1-methyl pseudouridine
  modified_base 98: mod_base = OTHER; note = N1-methyl pseudouridine
  modified_base 101: mod_base = OTHER; note = N1-methyl pseudouridine
  modified_base 114: mod_base = OTHER; note = N1-methyl pseudouridine
  modified_base 125: mod_base = OTHER; note = N1-methyl pseudouridine
  modified_base 137: mod_base = OTHER; note = N1-methyl pseudouridine
  modified_base 140: mod_base = OTHER; note = N1-methyl pseudouridine
  modified_base 149: mod_base = OTHER; note = N1-methyl pseudouridine
  modified_base 152: mod_base = OTHER; note = N1-methyl pseudouridine
  modified_base 154: mod_base = OTHER; note = N1-methyl pseudouridine
  modified_base 155: mod_base = OTHER; note = N1-methyl pseudouridine
  modified_base 188: mod_base = OTHER; note = N1-methyl pseudouridine
  modified_base 211: mod_base = OTHER; note = N1-methyl pseudouridine
  modified_base 222: mod_base = OTHER; note = N1-methyl pseudouridine
  modified_base 233: mod_base = OTHER; note = N1-methyl pseudouridine
  modified_base 235: mod_base = OTHER; note = N1-methyl pseudouridine
  modified_base 237: mod_base = OTHER; note = N1-methyl pseudouridine
  modified_base 238: mod_base = OTHER; note = N1-methyl pseudouridine
  modified_base 242: mod_base = OTHER; note = N1-methyl pseudouridine
  modified_base 251: mod_base = OTHER; note = N1-methyl pseudouridine
  modified_base 253: mod_base = OTHER; note = N1-methyl pseudouridine
  modified_base 254: mod_base = OTHER; note = N1-methyl pseudouridine
  modified_base 266: mod_base = OTHER; note = N1-methyl pseudouridine
  modified_base 275: mod_base = OTHER; note = N1-methyl pseudouridine
  modified_base 283: mod_base = OTHER; note = N1-methyl pseudouridine
  modified_base 285: mod_base = OTHER; note = N1-methyl pseudouridine
  modified_base 286: mod_base = OTHER; note = N1-methyl pseudouridine
  modified_base 287: mod_base = OTHER; note = N1-methyl pseudouridine
  modified_base 289: mod_base = OTHER; note = N1-methyl pseudouridine
  modified_base 290: mod_base = OTHER; note = N1-methyl pseudouridine
  modified_base 299: mod_base = OTHER; note = N1-methyl pseudouridine
  modified_base 310: mod_base = OTHER; note = N1-methyl pseudouridine
  modified_base 311: mod_base = OTHER; note = N1-methyl pseudouridine
  modified_base 312: mod_base = OTHER; note = N1-methyl pseudouridine
  modified_base 314: mod_base = OTHER; note = N1-methyl pseudouridine
  modified_base 317: mod_base = OTHER; note = N1-methyl pseudouridine
  modified_base 336: mod_base = OTHER; note = N1-methyl pseudouridine
  modified_base 350: mod_base = OTHER; note = N1-methyl pseudouridine
  modified_base 352: mod_base = OTHER; note = N1-methyl pseudouridine
  modified_base 353: mod_base = OTHER; note = N1-methyl pseudouridine
  modified_base 354: mod_base = OTHER; note = N1-methyl pseudouridine
  modified_base 362: mod_base = OTHER; note = N1-methyl pseudouridine
  modified_base 365: mod_base = OTHER; note = N1-methyl pseudouridine
  modified_base 374: mod_base = OTHER; note = N1-methyl pseudouridine
  modified_base 379: mod_base = OTHER; note = N1-methyl pseudouridine
  modified_base 391: mod_base = OTHER; note = N1-methyl pseudouridine
  modified_base 401: mod_base = OTHER; note = N1-methyl pseudouridine
  modified_base 403: mod_base = OTHER; note = N1-methyl pseudouridine
  modified_base 405: mod_base = OTHER; note = N1-methyl pseudouridine
  modified_base 410: mod_base = OTHER; note = N1-methyl pseudouridine
  modified_base 422: mod_base = OTHER; note = N1-methyl pseudouridine
  modified_base 425: mod_base = OTHER; note = N1-methyl pseudouridine
  modified_base 438: mod_base = OTHER; note = N1-methyl pseudouridine
  modified_base 449: mod_base = OTHER; note = N1-methyl pseudouridine
  modified_base 455: mod_base = OTHER; note = N1-methyl pseudouridine
  modified_base 458: mod_base = OTHER; note = N1-methyl pseudouridine
  modified_base 460: mod_base = OTHER; note = N1-methyl pseudouridine
  modified_base 464: mod_base = OTHER; note = N1-methyl pseudouridine
  modified_base 470: mod_base = OTHER; note = N1-methyl pseudouridine
  modified_base 479: mod_base = OTHER; note = N1-methyl pseudouridine
  modified_base 482: mod_base = OTHER; note = N1-methyl pseudouridine
  modified_base 487: mod_base = OTHER; note = N1-methyl pseudouridine
  modified_base 488: mod_base = OTHER; note = N1-methyl pseudouridine
  modified_base 499: mod_base = OTHER; note = N1-methyl pseudouridine
  modified_base 500: mod_base = OTHER; note = N1-methyl pseudouridine
  modified_base 503: mod_base = OTHER; note = N1-methyl pseudouridine
  modified_base 506: mod_base = OTHER; note = N1-methyl pseudouridine
  modified_base 518: mod_base = OTHER; note = N1-methyl pseudouridine
  modified_base 528: mod_base = OTHER; note = N1-methyl pseudouridine
  modified_base 531: mod_base = OTHER; note = N1-methyl pseudouridine
  modified_base 537: mod_base = OTHER; note = N1-methyl pseudouridine
  modified_base 539: mod_base = OTHER; note = N1-methyl pseudouridine
  modified_base 543: mod_base = OTHER; note = N1-methyl pseudouridine
  modified_base 548: mod_base = OTHER; note = N1-methyl pseudouridine
  modified_base 550: mod_base = OTHER; note = N1-methyl pseudouridine
  modified_base 551: mod_base = OTHER; note = N1-methyl pseudouridine
  modified_base 554: mod_base = OTHER; note = N1-methyl pseudouridine
  modified_base 560: mod_base = OTHER; note = N1-methyl pseudouridine
  modified_base 563: mod_base = OTHER; note = N1-methyl pseudouridine
  modified_base 571: mod_base = OTHER; note = N1-methyl pseudouridine
  modified_base 581: mod_base = OTHER; note = N1-methyl pseudouridine
  modified_base 583: mod_base = OTHER; note = N1-methyl pseudouridine
  modified_base 584: mod_base = OTHER; note = N1-methyl pseudouridine
  modified_base 599: mod_base = OTHER; note = N1-methyl pseudouridine
  modified_base 607: mod_base = OTHER; note = N1-methyl pseudouridine
  modified_base 614: mod_base = OTHER; note = N1-methyl pseudouridine
  modified_base 615: mod_base = OTHER; note = N1-methyl pseudouridine
  modified_base 618: mod_base = OTHER; note = N1-methyl pseudouridine
  modified_base 629: mod_base = OTHER; note = N1-methyl pseudouridine
  modified_base 632: mod_base = OTHER; note = N1-methyl pseudouridine
  modified_base 634: mod_base = OTHER; note = N1-methyl pseudouridine
  modified_base 636: mod_base = OTHER; note = N1-methyl pseudouridine
  modified_base 639: mod_base = OTHER; note = N1-methyl pseudouridine
  modified_base 644: mod_base = OTHER; note = N1-methyl pseudouridine
  modified_base 648: mod_base = OTHER; note = N1-methyl pseudouridine
  modified_base 662: mod_base = OTHER; note = N1-methyl pseudouridine
  modified_base 671: mod_base = OTHER; note = N1-methyl pseudouridine
  modified_base 674: mod_base = OTHER; note = N1-methyl pseudouridine
  modified_base 683: mod_base = OTHER; note = N1-methyl pseudouridine
  modified_base 702: mod_base = OTHER; note = N1-methyl pseudouridine
  modified_base 707: mod_base = OTHER; note = N1-methyl pseudouridine
  modified_base 709: mod_base = OTHER; note = N1-methyl pseudouridine
  modified_base 710: mod_base = OTHER; note = N1-methyl pseudouridine
  modified_base 711: mod_base = OTHER; note = N1-methyl pseudouridine
  modified_base 719: mod_base = OTHER; note = N1-methyl pseudouridine
  modified_base 722: mod_base = OTHER; note = N1-methyl pseudouridine
  modified_base 723: mod_base = OTHER; note = N1-methyl pseudouridine
  modified_base 728: mod_base = OTHER; note = N1-methyl pseudouridine
  modified_base 730: mod_base = OTHER; note = N1-methyl pseudouridine
  modified_base 732: mod_base = OTHER; note = N1-methyl pseudouridine
  modified_base 734: mod_base = OTHER; note = N1-methyl pseudouridine
  modified_base 740: mod_base = OTHER; note = N1-methyl pseudouridine
  modified_base 741: mod_base = OTHER; note = N1-methyl pseudouridine
  modified_base 747: mod_base = OTHER; note = N1-methyl pseudouridine
  modified_base 751: mod_base = OTHER; note = N1-methyl pseudouridine
  modified_base 752: mod_base = OTHER; note = N1-methyl pseudouridine
  modified_base 763: mod_base = OTHER; note = N1-methyl pseudouridine
  modified_base 764: mod_base = OTHER; note = N1-methyl pseudouridine
  modified_base 765: mod_base = OTHER; note = N1-methyl pseudouridine
  modified_base 770: mod_base = OTHER; note = N1-methyl pseudouridine
  modified_base 788: mod_base = OTHER; note = N1-methyl pseudouridine
  modified_base 794: mod_base = OTHER; note = N1-methyl pseudouridine
  modified_base 796: mod_base = OTHER; note = N1-methyl pseudouridine
  modified_base 798: mod_base = OTHER; note = N1-methyl pseudouridine
  modified_base 804: mod_base = OTHER; note = N1-methyl pseudouridine
  modified_base 808: mod_base = OTHER; note = N1-methyl pseudouridine
  modified_base 819: mod_base = OTHER; note = N1-methyl pseudouridine
  modified_base 821: mod_base = OTHER; note = N1-methyl pseudouridine
  modified_base 830: mod_base = OTHER; note = N1-methyl pseudouridine
  modified_base 833: mod_base = OTHER; note = N1-methyl pseudouridine
  modified_base 842: mod_base = OTHER; note = N1-methyl pseudouridine
  modified_base 849: mod_base = OTHER; note = N1-methyl pseudouridine
  modified_base 853: mod_base = OTHER; note = N1-methyl pseudouridine
  modified_base 863: mod_base = OTHER; note = N1-methyl pseudouridine
  modified_base 865: mod_base = OTHER; note = N1-methyl pseudouridine
  modified_base 866: mod_base = OTHER; note = N1-methyl pseudouridine
  modified_base 869: mod_base = OTHER; note = N1-methyl pseudouridine
  modified_base 873: mod_base = OTHER; note = N1-methyl pseudouridine
  modified_base 882: mod_base = OTHER; note = N1-methyl pseudouridine
  modified_base 884: mod_base = OTHER; note = N1-methyl pseudouridine
  modified_base 886: mod_base = OTHER; note = N1-methyl pseudouridine
  modified_base 888: mod_base = OTHER; note = N1-methyl pseudouridine
  modified_base 896: mod_base = OTHER; note = N1-methyl pseudouridine
  modified_base 899: mod_base = OTHER; note = N1-methyl pseudouridine
  modified_base 900: mod_base = OTHER; note = N1-methyl pseudouridine
  modified_base 902: mod_base = OTHER; note = N1-methyl pseudouridine
  modified_base 904: mod_base = OTHER; note = N1-methyl pseudouridine
  modified_base 909: mod_base = OTHER; note = N1-methyl pseudouridine
  modified_base 911: mod_base = OTHER; note = N1-methyl pseudouridine
  modified_base 914: mod_base = OTHER; note = N1-methyl pseudouridine
  modified_base 920: mod_base = OTHER; note = N1-methyl pseudouridine
  modified_base 932: mod_base = OTHER; note = N1-methyl pseudouridine
  modified_base 942: mod_base = OTHER; note = N1-methyl pseudouridine
  modified_base 945: mod_base = OTHER; note = N1-methyl pseudouridine
  modified_base 947: mod_base = OTHER; note = N1-methyl pseudouridine
  modified_base 948: mod_base = OTHER; note = N1-methyl pseudouridine
  modified_base 951: mod_base = OTHER; note = N1-methyl pseudouridine
  modified_base 959: mod_base = OTHER; note = N1-methyl pseudouridine
  modified_base 962: mod_base = OTHER; note = N1-methyl pseudouridine
  modified_base 970: mod_base = OTHER; note = N1-methyl pseudouridine
  modified_base 972: mod_base = OTHER; note = N1-methyl pseudouridine
  modified_base 975: mod_base = OTHER; note = N1-methyl pseudouridine
  modified_base 990: mod_base = OTHER; note = N1-methyl pseudouridine
  modified_base 992: mod_base = OTHER; note = N1-methyl pseudouridine
  modified_base 998: mod_base = OTHER; note = N1-methyl pseudouridine
  modified_base 1001: mod_base = OTHER; note = N1-methyl pseudouridine
  modified_base 1010: mod_base = OTHER; note = N1-methyl pseudouridine
  modified_base 1013: mod_base = OTHER; note = N1-methyl pseudouridine
  modified_base 1025: mod_base = OTHER; note = N1-methyl pseudouridine
  modified_base 1029: mod_base = OTHER; note = N1-methyl pseudouridine
  modified_base 1036: mod_base = OTHER; note = N1-methyl pseudouridine
  modified_base 1046: mod_base = OTHER; note = N1-methyl pseudouridine
  modified_base 1047: mod_base = OTHER; note = N1-methyl pseudouridine
  modified_base 1048: mod_base = OTHER; note = N1-methyl pseudouridine
  modified_base 1049: mod_base = OTHER; note = N1-methyl pseudouridine
  modified_base 1051: mod_base = OTHER; note = N1-methyl pseudouridine
  modified_base 1052: mod_base = OTHER; note = N1-methyl pseudouridine
  modified_base 1068: mod_base = OTHER; note = N1-methyl pseudouridine
  modified_base 1072: mod_base = OTHER; note = N1-methyl pseudouridine
  modified_base 1081: mod_base = OTHER; note = N1-methyl pseudouridine
  modified_base 1085: mod_base = OTHER; note = N1-methyl pseudouridine
  modified_base 1089: mod_base = OTHER; note = N1-methyl pseudouridine
  modified_base 1111: mod_base = OTHER; note = N1-methyl pseudouridine
  modified_base 1112: mod_base = OTHER; note = N1-methyl pseudouridine
  modified_base 1113: mod_base = OTHER; note = N1-methyl pseudouridine
  modified_base 1114: mod_base = OTHER; note = N1-methyl pseudouridine
  modified_base 1120: mod_base = OTHER; note = N1-methyl pseudouridine
  modified_base 1121: mod_base = OTHER; note = N1-methyl pseudouridine
  modified_base 1122: mod_base = OTHER; note = N1-methyl pseudouridine
  modified_base 1124: mod_base = OTHER; note = N1-methyl pseudouridine
  modified_base 1133: mod_base = OTHER; note = N1-methyl pseudouridine
  modified_base 1136: mod_base = OTHER; note = N1-methyl pseudouridine
  modified_base 1145: mod_base = OTHER; note = N1-methyl pseudouridine
  modified_base 1163: mod_base = OTHER; note = N1-methyl pseudouridine
  modified_base 1166: mod_base = OTHER; note = N1-methyl pseudouridine
  modified_base 1169: mod_base = OTHER; note = N1-methyl pseudouridine
  modified_base 1175: mod_base = OTHER; note = N1-methyl pseudouridine
  modified_base 1190: mod_base = OTHER; note = N1-methyl pseudouridine
  modified_base 1193: mod_base = OTHER; note = N1-methyl pseudouridine
  modified_base 1210: mod_base = OTHER; note = N1-methyl pseudouridine
  modified_base 1211: mod_base = OTHER; note = N1-methyl pseudouridine
  modified_base 1226: mod_base = OTHER; note = N1-methyl pseudouridine
  modified_base 1230: mod_base = OTHER; note = N1-methyl pseudouridine
  modified_base 1238: mod_base = OTHER; note = N1-methyl pseudouridine
  modified_base 1244: mod_base = OTHER; note = N1-methyl pseudouridine
  modified_base 1248: mod_base = OTHER; note = N1-methyl pseudouridine
  modified_base 1253: mod_base = OTHER; note = N1-methyl pseudouridine
  modified_base 1262: mod_base = OTHER; note = N1-methyl pseudouridine
  modified_base 1265: mod_base = OTHER; note = N1-methyl pseudouridine
  modified_base 1281: mod_base = OTHER; note = N1-methyl pseudouridine
  modified_base 1282: mod_base = OTHER; note = N1-methyl pseudouridine
  modified_base 1283: mod_base = OTHER; note = N1-methyl pseudouridine
  modified_base 1285: mod_base = OTHER; note = N1-methyl pseudouridine
  modified_base 1291: mod_base = OTHER; note = N1-methyl pseudouridine
  modified_base 1292: mod_base = OTHER; note = N1-methyl pseudouridine
  modified_base 1295: mod_base = OTHER; note = N1-methyl pseudouridine
  modified_base 1316: mod_base = OTHER; note = N1-methyl pseudouridine
  modified_base 1325: mod_base = OTHER; note = N1-methyl pseudouridine
  modified_base 1328: mod_base = OTHER; note = N1-methyl pseudouridine
  modified_base 1333: mod_base = OTHER; note = N1-methyl pseudouridine
  modified_base 1334: mod_base = OTHER; note = N1-methyl pseudouridine
  modified_base 1335: mod_base = OTHER; note = N1-methyl pseudouridine
  modified_base 1340: mod_base = OTHER; note = N1-methyl pseudouridine
  modified_base 1341: mod_base = OTHER; note = N1-methyl pseudouridine
  modified_base 1345: mod_base = OTHER; note = N1-methyl pseudouridine
  modified_base 1348: mod_base = OTHER; note = N1-methyl pseudouridine
  modified_base 1352: mod_base = OTHER; note = N1-methyl pseudouridine
  modified_base 1359: mod_base = OTHER; note = N1-methyl pseudouridine
  modified_base 1361: mod_base = OTHER; note = N1-methyl pseudouridine
  modified_base 1365: mod_base = OTHER; note = N1-methyl pseudouridine
  modified_base 1375: mod_base = OTHER; note = N1-methyl pseudouridine
  modified_base 1381: mod_base = OTHER; note = N1-methyl pseudouridine
  modified_base 1382: mod_base = OTHER; note = N1-methyl pseudouridine
  modified_base 1387: mod_base = OTHER; note = N1-methyl pseudouridine
  modified_base 1391: mod_base = OTHER; note = N1-methyl pseudouridine
  modified_base 1402: mod_base = OTHER; note = N1-methyl pseudouridine
  modified_base 1415: mod_base = OTHER; note = N1-methyl pseudouridine
  modified_base 1423: mod_base = OTHER; note = N1-methyl pseudouridine
  modified_base 1429: mod_base = OTHER; note = N1-methyl pseudouridine
  modified_base 1430: mod_base = OTHER; note = N1-methyl pseudouridine
  modified_base 1431: mod_base = OTHER; note = N1-methyl pseudouridine
  modified_base 1439: mod_base = OTHER; note = N1-methyl pseudouridine
  modified_base 1442: mod_base = OTHER; note = N1-methyl pseudouridine
  modified_base 1461: mod_base = OTHER; note = N1-methyl pseudouridine
  modified_base 1468: mod_base = OTHER; note = N1-methyl pseudouridine
  modified_base 1469: mod_base = OTHER; note = N1-methyl pseudouridine
  modified_base 1470: mod_base = OTHER; note = N1-methyl pseudouridine
  modified_base 1472: mod_base = OTHER; note = N1-methyl pseudouridine
  modified_base 1481: mod_base = OTHER; note = N1-methyl pseudouridine
  modified_base 1489: mod_base = OTHER; note = N1-methyl pseudouridine
  modified_base 1490: mod_base = OTHER; note = N1-methyl pseudouridine
  modified_base 1500: mod_base = OTHER; note = N1-methyl pseudouridine
  modified_base 1502: mod_base = OTHER; note = N1-methyl pseudouridine
  modified_base 1517: mod_base = OTHER; note = N1-methyl pseudouridine
  modified_base 1520: mod_base = OTHER; note = N1-methyl pseudouridine
  modified_base 1524: mod_base = OTHER; note = N1-methyl pseudouridine
  modified_base 1531: mod_base = OTHER; note = N1-methyl pseudouridine
  modified_base 1533: mod_base = OTHER; note = N1-methyl pseudouridine
  modified_base 1535: mod_base = OTHER; note = N1-methyl pseudouridine
  modified_base 1538: mod_base = OTHER; note = N1-methyl pseudouridine
  modified_base 1540: mod_base = OTHER; note = N1-methyl pseudouridine
  modified_base 1542: mod_base = OTHER; note = N1-methyl pseudouridine
  modified_base 1546: mod_base = OTHER; note = N1-methyl pseudouridine
  modified_base 1549: mod_base = OTHER; note = N1-methyl pseudouridine
  modified_base 1550: mod_base = OTHER; note = N1-methyl pseudouridine
  modified_base 1556: mod_base = OTHER; note = N1-methyl pseudouridine
  modified_base 1557: mod_base = OTHER; note = N1-methyl pseudouridine
  modified_base 1558: mod_base = OTHER; note = N1-methyl pseudouridine
  modified_base 1568: mod_base = OTHER; note = N1-methyl pseudouridine
  modified_base 1577: mod_base = OTHER; note = N1-methyl pseudouridine
  modified_base 1582: mod_base = OTHER; note = N1-methyl pseudouridine
  modified_base 1586: mod_base = OTHER; note = N1-methyl pseudouridine
  modified_base 1598: mod_base = OTHER; note = N1-methyl pseudouridine
  modified_base 1612: mod_base = OTHER; note = N1-methyl pseudouridine
  modified_base 1613: mod_base = OTHER; note = N1-methyl pseudouridine
  modified_base 1616: mod_base = OTHER; note = N1-methyl pseudouridine
  modified_base 1638: mod_base = OTHER; note = N1-methyl pseudouridine
  modified_base 1640: mod_base = OTHER; note = N1-methyl pseudouridine
  modified_base 1643: mod_base = OTHER; note = N1-methyl pseudouridine
  modified_base 1644: mod_base = OTHER; note = N1-methyl pseudouridine
  modified_base 1649: mod_base = OTHER; note = N1-methyl pseudouridine
  modified_base 1652: mod_base = OTHER; note = N1-methyl pseudouridine
  modified_base 1654: mod_base = OTHER; note = N1-methyl pseudouridine
  modified_base 1655: mod_base = OTHER; note = N1-methyl pseudouridine
  modified_base 1665: mod_base = OTHER; note = N1-methyl pseudouridine
  modified_base 1673: mod_base = OTHER; note = N1-methyl pseudouridine
  modified_base 1679: mod_base = OTHER; note = N1-methyl pseudouridine
  modified_base 1688: mod_base = OTHER; note = N1-methyl pseudouridine
  modified_base 1699: mod_base = OTHER; note = N1-methyl pseudouridine
  modified_base 1702: mod_base = OTHER; note = N1-methyl pseudouridine
  modified_base 1703: mod_base = OTHER; note = N1-methyl pseudouridine
  modified_base 1712: mod_base = OTHER; note = N1-methyl pseudouridine
  modified_base 1713: mod_base = OTHER; note = N1-methyl pseudouridine
  modified_base 1717: mod_base = OTHER; note = N1-methyl pseudouridine
  modified_base 1720: mod_base = OTHER; note = N1-methyl pseudouridine
  modified_base 1721: mod_base = OTHER; note = N1-methyl pseudouridine
  modified_base 1726: mod_base = OTHER; note = N1-methyl pseudouridine
  modified_base 1728: mod_base = OTHER; note = N1-methyl pseudouridine
  modified_base 1730: mod_base = OTHER; note = N1-methyl pseudouridine
  modified_base 1736: mod_base = OTHER; note = N1-methyl pseudouridine
  modified_base 1738: mod_base = OTHER; note = N1-methyl pseudouridine
  modified_base 1740: mod_base = OTHER; note = N1-methyl pseudouridine
  modified_base 1745: mod_base = OTHER; note = N1-methyl pseudouridine
  modified_base 1746: mod_base = OTHER; note = N1-methyl pseudouridine
  modified_base 1756: mod_base = OTHER; note = N1-methyl pseudouridine
  modified_base 1757: mod_base = OTHER; note = N1-methyl pseudouridine
  modified_base 1765: mod_base = OTHER; note = N1-methyl pseudouridine
  modified_base 1769: mod_base = OTHER; note = N1-methyl pseudouridine
  modified_base 1777: mod_base = OTHER; note = N1-methyl pseudouridine
  modified_base 1785: mod_base = OTHER; note = N1-methyl pseudouridine
  modified_base 1787: mod_base = OTHER; note = N1-methyl pseudouridine
  modified_base 1790: mod_base = OTHER; note = N1-methyl pseudouridine
  modified_base 1796: mod_base = OTHER; note = N1-methyl pseudouridine
  modified_base 1799: mod_base = OTHER; note = N1-methyl pseudouridine
  modified_base 1800: mod_base = OTHER; note = N1-methyl pseudouridine
  modified_base 1813: mod_base = OTHER; note = N1-methyl pseudouridine
  modified_base 1814: mod_base = OTHER; note = N1-methyl pseudouridine
  modified_base 1815: mod_base = OTHER; note = N1-methyl pseudouridine
  modified_base 1817: mod_base = OTHER; note = N1-methyl pseudouridine
  modified_base 1824: mod_base = OTHER; note = N1-methyl pseudouridine
  modified_base 1839: mod_base = OTHER; note = N1-methyl pseudouridine
  modified_base 1841: mod_base = OTHER; note = N1-methyl pseudouridine
  modified_base 1844: mod_base = OTHER; note = N1-methyl pseudouridine
  modified_base 1853: mod_base = OTHER; note = N1-methyl pseudouridine
  modified_base 1854: mod_base = OTHER; note = N1-methyl pseudouridine
  modified_base 1856: mod_base = OTHER; note = N1-methyl pseudouridine
  modified_base 1859: mod_base = OTHER; note = N1-methyl pseudouridine
  modified_base 1865: mod_base = OTHER; note = N1-methyl pseudouridine
  modified_base 1871: mod_base = OTHER; note = N1-methyl pseudouridine
  modified_base 1873: mod_base = OTHER; note = N1-methyl pseudouridine
  modified_base 1874: mod_base = OTHER; note = N1-methyl pseudouridine
  modified_base 1875: mod_base = OTHER; note = N1-methyl pseudouridine
  modified_base 1881: mod_base = OTHER; note = N1-methyl pseudouridine
  modified_base 1884: mod_base = OTHER; note = N1-methyl pseudouridine
  modified_base 1889: mod_base = OTHER; note = N1-methyl pseudouridine
  modified_base 1892: mod_base = OTHER; note = N1-methyl pseudouridine
  modified_base 1904: mod_base = OTHER; note = N1-methyl pseudouridine
  modified_base 1912: mod_base = OTHER; note = N1-methyl pseudouridine
  modified_base 1920: mod_base = OTHER; note = N1-methyl pseudouridine
  modified_base 1922: mod_base = OTHER; note = N1-methyl pseudouridine
  modified_base 1924: mod_base = OTHER; note = N1-methyl pseudouridine
  modified_base 1925: mod_base = OTHER; note = N1-methyl pseudouridine
  modified_base 1937: mod_base = OTHER; note = N1-methyl pseudouridine
  modified_base 1938: mod_base = OTHER; note = N1-methyl pseudouridine
  modified_base 1940: mod_base = OTHER; note = N1-methyl pseudouridine
  modified_base 1949: mod_base = OTHER; note = N1-methyl pseudouridine
  modified_base 1963: mod_base = OTHER; note = N1-methyl pseudouridine
  modified_base 1965: mod_base = OTHER; note = N1-methyl pseudouridine
  modified_base 1972: mod_base = OTHER; note = N1-methyl pseudouridine
  modified_base 1982: mod_base = OTHER; note = N1-methyl pseudouridine
  modified_base 1984: mod_base = OTHER; note = N1-methyl pseudouridine
  modified_base 1994: mod_base = OTHER; note = N1-methyl pseudouridine
  modified_base 1997: mod_base = OTHER; note = N1-methyl pseudouridine
  modified_base 2006: mod_base = OTHER; note = N1-methyl pseudouridine
  modified_base 2033: mod_base = OTHER; note = N1-methyl pseudouridine
  modified_base 2034: mod_base = OTHER; note = N1-methyl pseudouridine
  modified_base 2036: mod_base = OTHER; note = N1-methyl pseudouridine
  modified_base 2041: mod_base = OTHER; note = N1-methyl pseudouridine
  modified_base 2042: mod_base = OTHER; note = N1-methyl pseudouridine
  modified_base 2045: mod_base = OTHER; note = N1-methyl pseudouridine
  modified_base 2059: mod_base = OTHER; note = N1-methyl pseudouridine
  modified_base 2060: mod_base = OTHER; note = N1-methyl pseudouridine
  modified_base 2073: mod_base = OTHER; note = N1-methyl pseudouridine
  modified_base 2074: mod_base = OTHER; note = N1-methyl pseudouridine
  modified_base 2075: mod_base = OTHER; note = N1-methyl pseudouridine
  modified_base 2076: mod_base = OTHER; note = N1-methyl pseudouridine
  modified_base 2078: mod_base = OTHER; note = N1-methyl pseudouridine
  modified_base 2084: mod_base = OTHER; note = N1-methyl pseudouridine
  modified_base 2087: mod_base = OTHER; note = N1-methyl pseudouridine
  modified_base 2091: mod_base = OTHER; note = N1-methyl pseudouridine
  modified_base 2097: mod_base = OTHER; note = N1-methyl pseudouridine
  modified_base 2102: mod_base = OTHER; note = N1-methyl pseudouridine
  modified_base 2107: mod_base = OTHER; note = N1-methyl pseudouridine
  modified_base 2108: mod_base = OTHER; note = N1-methyl pseudouridine
  modified_base 2120: mod_base = OTHER; note = N1-methyl pseudouridine
  modified_base 2135: mod_base = OTHER; note = N1-methyl pseudouridine
  modified_base 2156: mod_base = OTHER; note = N1-methyl pseudouridine
  modified_base 2168: mod_base = OTHER; note = N1-methyl pseudouridine
  modified_base 2177: mod_base = OTHER; note = N1-methyl pseudouridine
  modified_base 2185: mod_base = OTHER; note = N1-methyl pseudouridine
  modified_base 2187: mod_base = OTHER; note = N1-methyl pseudouridine
  modified_base 2193: mod_base = OTHER; note = N1-methyl pseudouridine
  modified_base 2195: mod_base = OTHER; note = N1-methyl pseudouridine
  modified_base 2207: mod_base = OTHER; note = N1-methyl pseudouridine
  modified_base 2210: mod_base = OTHER; note = N1-methyl pseudouridine
  modified_base 2219: mod_base = OTHER; note = N1-methyl pseudouridine
  modified_base 2225: mod_base = OTHER; note = N1-methyl pseudouridine
  modified_base 2228: mod_base = OTHER; note = N1-methyl pseudouridine
  modified_base 2229: mod_base = OTHER; note = N1-methyl pseudouridine
  modified_base 2232: mod_base = OTHER; note = N1-methyl pseudouridine
  modified_base 2236: mod_base = OTHER; note = N1-methyl pseudouridine
  modified_base 2237: mod_base = OTHER; note = N1-methyl pseudouridine
  modified_base 2240: mod_base = OTHER; note = N1-methyl pseudouridine
  modified_base 2246: mod_base = OTHER; note = N1-methyl pseudouridine
  modified_base 2249: mod_base = OTHER; note = N1-methyl pseudouridine
  modified_base 2265: mod_base = OTHER; note = N1-methyl pseudouridine
  modified_base 2271: mod_base = OTHER; note = N1-methyl pseudouridine
  modified_base 2273: mod_base = OTHER; note = N1-methyl pseudouridine
  modified_base 2276: mod_base = OTHER; note = N1-methyl pseudouridine
  modified_base 2279: mod_base = OTHER; note = N1-methyl pseudouridine
  modified_base 2280: mod_base = OTHER; note = N1-methyl pseudouridine
  modified_base 2285: mod_base = OTHER; note = N1-methyl pseudouridine
  modified_base 2307: mod_base = OTHER; note = N1-methyl pseudouridine
  modified_base 2326: mod_base = OTHER; note = N1-methyl pseudouridine
  modified_base 2339: mod_base = OTHER; note = N1-methyl pseudouridine
  modified_base 2348: mod_base = OTHER; note = N1-methyl pseudouridine
  modified_base 2360: mod_base = OTHER; note = N1-methyl pseudouridine
  modified_base 2369: mod_base = OTHER; note = N1-methyl pseudouridine
  modified_base 2381: mod_base = OTHER; note = N1-methyl pseudouridine
  modified_base 2384: mod_base = OTHER; note = N1-methyl pseudouridine
  modified_base 2399: mod_base = OTHER; note = N1-methyl pseudouridine
  modified_base 2406: mod_base = OTHER; note = N1-methyl pseudouridine
  modified_base 2414: mod_base = OTHER; note = N1-methyl pseudouridine
  modified_base 2429: mod_base = OTHER; note = N1-methyl pseudouridine
  modified_base 2431: mod_base = OTHER; note = N1-methyl pseudouridine
  modified_base 2435: mod_base = OTHER; note = N1-methyl pseudouridine
  modified_base 2437: mod_base = OTHER; note = N1-methyl pseudouridine
  modified_base 2440: mod_base = OTHER; note = N1-methyl pseudouridine
  modified_base 2444: mod_base = OTHER; note = N1-methyl pseudouridine
  modified_base 2460: mod_base = OTHER; note = N1-methyl pseudouridine
  modified_base 2462: mod_base = OTHER; note = N1-methyl pseudouridine
  modified_base 2464: mod_base = OTHER; note = N1-methyl pseudouridine
  modified_base 2468: mod_base = OTHER; note = N1-methyl pseudouridine
  modified_base 2472: mod_base = OTHER; note = N1-methyl pseudouridine
  modified_base 2480: mod_base = OTHER; note = N1-methyl pseudouridine
  modified_base 2486: mod_base = OTHER; note = N1-methyl pseudouridine
  modified_base 2490: mod_base = OTHER; note = N1-methyl pseudouridine
  modified_base 2495: mod_base = OTHER; note = N1-methyl pseudouridine
  modified_base 2497: mod_base = OTHER; note = N1-methyl pseudouridine
  modified_base 2503: mod_base = OTHER; note = N1-methyl pseudouridine
  modified_base 2510: mod_base = OTHER; note = N1-methyl pseudouridine
  modified_base 2519: mod_base = OTHER; note = N1-methyl pseudouridine
  modified_base 2522: mod_base = OTHER; note = N1-methyl pseudouridine
  modified_base 2526: mod_base = OTHER; note = N1-methyl pseudouridine
  modified_base 2533: mod_base = OTHER; note = N1-methyl pseudouridine
  modified_base 2534: mod_base = OTHER; note = N1-methyl pseudouridine
  modified_base 2535: mod_base = OTHER; note = N1-methyl pseudouridine
  modified_base 2537: mod_base = OTHER; note = N1-methyl pseudouridine
  modified_base 2544: mod_base = OTHER; note = N1-methyl pseudouridine
  modified_base 2547: mod_base = OTHER; note = N1-methyl pseudouridine
  modified_base 2548: mod_base = OTHER; note = N1-methyl pseudouridine
  modified_base 2550: mod_base = OTHER; note = N1-methyl pseudouridine
  modified_base 2552: mod_base = OTHER; note = N1-methyl pseudouridine
  modified_base 2564: mod_base = OTHER; note = N1-methyl pseudouridine
  modified_base 2566: mod_base = OTHER; note = N1-methyl pseudouridine
  modified_base 2567: mod_base = OTHER; note = N1-methyl pseudouridine
  modified_base 2575: mod_base = OTHER; note = N1-methyl pseudouridine
  modified_base 2601: mod_base = OTHER; note = N1-methyl pseudouridine
  modified_base 2606: mod_base = OTHER; note = N1-methyl pseudouridine
  modified_base 2611: mod_base = OTHER; note = N1-methyl pseudouridine
  modified_base 2621: mod_base = OTHER; note = N1-methyl pseudouridine
  modified_base 2624: mod_base = OTHER; note = N1-methyl pseudouridine
  modified_base 2633: mod_base = OTHER; note = N1-methyl pseudouridine
  modified_base 2641: mod_base = OTHER; note = N1-methyl pseudouridine
  modified_base 2644: mod_base = OTHER; note = N1-methyl pseudouridine
  modified_base 2654: mod_base = OTHER; note = N1-methyl pseudouridine
  modified_base 2657: mod_base = OTHER; note = N1-methyl pseudouridine
  modified_base 2669: mod_base = OTHER; note = N1-methyl pseudouridine
  modified_base 2672: mod_base = OTHER; note = N1-methyl pseudouridine
  modified_base 2673: mod_base = OTHER; note = N1-methyl pseudouridine
  modified_base 2686: mod_base = OTHER; note = N1-methyl pseudouridine
  modified_base 2687: mod_base = OTHER; note = N1-methyl pseudouridine
  modified_base 2688: mod_base = OTHER; note = N1-methyl pseudouridine
  modified_base 2696: mod_base = OTHER; note = N1-methyl pseudouridine
  modified_base 2706: mod_base = OTHER; note = N1-methyl pseudouridine
  modified_base 2720: mod_base = OTHER; note = N1-methyl pseudouridine
  modified_base 2729: mod_base = OTHER; note = N1-methyl pseudouridine
  modified_base 2739: mod_base = OTHER; note = N1-methyl pseudouridine
  modified_base 2742: mod_base = OTHER; note = N1-methyl pseudouridine
  modified_base 2743: mod_base = OTHER; note = N1-methyl pseudouridine
  modified_base 2744: mod_base = OTHER; note = N1-methyl pseudouridine
  modified_base 2747: mod_base = OTHER; note = N1-methyl pseudouridine
  modified_base 2759: mod_base = OTHER; note = N1-methyl pseudouridine
  modified_base 2762: mod_base = OTHER; note = N1-methyl pseudouridine
  modified_base 2777: mod_base = OTHER; note = N1-methyl pseudouridine
  modified_base 2789: mod_base = OTHER; note = N1-methyl pseudouridine
  modified_base 2793: mod_base = OTHER; note = N1-methyl pseudouridine
  modified_base 2798: mod_base = OTHER; note = N1-methyl pseudouridine
  modified_base 2801: mod_base = OTHER; note = N1-methyl pseudouridine
  modified_base 2805: mod_base = OTHER; note = N1-methyl pseudouridine
  modified_base 2813: mod_base = OTHER; note = N1-methyl pseudouridine
  modified_base 2817: mod_base = OTHER; note = N1-methyl pseudouridine
  modified_base 2824: mod_base = OTHER; note = N1-methyl pseudouridine
  modified_base 2829: mod_base = OTHER; note = N1-methyl pseudouridine
  modified_base 2843: mod_base = OTHER; note = N1-methyl pseudouridine
  modified_base 2846: mod_base = OTHER; note = N1-methyl pseudouridine
  modified_base 2855: mod_base = OTHER; note = N1-methyl pseudouridine
  modified_base 2861: mod_base = OTHER; note = N1-methyl pseudouridine
  modified_base 2864: mod_base = OTHER; note = N1-methyl pseudouridine
  modified_base 2869: mod_base = OTHER; note = N1-methyl pseudouridine
  modified_base 2870: mod_base = OTHER; note = N1-methyl pseudouridine
  modified_base 2875: mod_base = OTHER; note = N1-methyl pseudouridine
  modified_base 2877: mod_base = OTHER; note = N1-methyl pseudouridine
  modified_base 2882: mod_base = OTHER; note = N1-methyl pseudouridine
  modified_base 2885: mod_base = OTHER; note = N1-methyl pseudouridine
  modified_base 2893: mod_base = OTHER; note = N1-methyl pseudouridine
  modified_base 2894: mod_base = OTHER; note = N1-methyl pseudouridine
  modified_base 2905: mod_base = OTHER; note = N1-methyl pseudouridine
  modified_base 2906: mod_base = OTHER; note = N1-methyl pseudouridine
  modified_base 2911: mod_base = OTHER; note = N1-methyl pseudouridine
  modified_base 2912: mod_base = OTHER; note = N1-methyl pseudouridine
  modified_base 2914: mod_base = OTHER; note = N1-methyl pseudouridine
  modified_base 2921: mod_base = OTHER; note = N1-methyl pseudouridine
  modified_base 2930: mod_base = OTHER; note = N1-methyl pseudouridine
  modified_base 2938: mod_base = OTHER; note = N1-methyl pseudouridine
  modified_base 2959: mod_base = OTHER; note = N1-methyl pseudouridine
  modified_base 2963: mod_base = OTHER; note = N1-methyl pseudouridine
  modified_base 2972: mod_base = OTHER; note = N1-methyl pseudouridine
  modified_base 2975: mod_base = OTHER; note = N1-methyl pseudouridine
  modified_base 2987: mod_base = OTHER; note = N1-methyl pseudouridine
  modified_base 2990: mod_base = OTHER; note = N1-methyl pseudouridine
  modified_base 2998: mod_base = OTHER; note = N1-methyl pseudouridine
  modified_base 3000: mod_base = OTHER; note = N1-methyl pseudouridine
  modified_base 3008: mod_base = OTHER; note = N1-methyl pseudouridine
  modified_base 3013: mod_base = OTHER; note = N1-methyl pseudouridine
  modified_base 3019: mod_base = OTHER; note = N1-methyl pseudouridine
  modified_base 3020: mod_base = OTHER; note = N1-methyl pseudouridine
  modified_base 3023: mod_base = OTHER; note = N1-methyl pseudouridine
  modified_base 3025: mod_base = OTHER; note = N1-methyl pseudouridine
  modified_base 3034: mod_base = OTHER; note = N1-methyl pseudouridine
  modified_base 3041: mod_base = OTHER; note = N1-methyl pseudouridine
  modified_base 3043: mod_base = OTHER; note = N1-methyl pseudouridine
  modified_base 3050: mod_base = OTHER; note = N1-methyl pseudouridine
  modified_base 3059: mod_base = OTHER; note = N1-methyl pseudouridine
  modified_base 3062: mod_base = OTHER; note = N1-methyl pseudouridine
  modified_base 3070: mod_base = OTHER; note = N1-methyl pseudouridine
  modified_base 3072: mod_base = OTHER; note = N1-methyl pseudouridine
  modified_base 3083: mod_base = OTHER; note = N1-methyl pseudouridine
  modified_base 3103: mod_base = OTHER; note = N1-methyl pseudouridine
  modified_base 3105: mod_base = OTHER; note = N1-methyl pseudouridine
  modified_base 3106: mod_base = OTHER; note = N1-methyl pseudouridine
  modified_base 3107: mod_base = OTHER; note = N1-methyl pseudouridine
  modified_base 3109: mod_base = OTHER; note = N1-methyl pseudouridine
  modified_base 3110: mod_base = OTHER; note = N1-methyl pseudouridine
  modified_base 3112: mod_base = OTHER; note = N1-methyl pseudouridine
  modified_base 3122: mod_base = OTHER; note = N1-methyl pseudouridine
  modified_base 3123: mod_base = OTHER; note = N1-methyl pseudouridine
  modified_base 3125: mod_base = OTHER; note = N1-methyl pseudouridine
  modified_base 3130: mod_base = OTHER; note = N1-methyl pseudouridine
  modified_base 3131: mod_base = OTHER; note = N1-methyl pseudouridine
  modified_base 3133: mod_base = OTHER; note = N1-methyl pseudouridine
  modified_base 3134: mod_base = OTHER; note = N1-methyl pseudouridine
  modified_base 3146: mod_base = OTHER; note = N1-methyl pseudouridine
  modified_base 3152: mod_base = OTHER; note = N1-methyl pseudouridine
  modified_base 3156: mod_base = OTHER; note = N1-methyl pseudouridine
  modified_base 3159: mod_base = OTHER; note = N1-methyl pseudouridine
  modified_base 3167: mod_base = OTHER; note = N1-methyl pseudouridine
  modified_base 3182: mod_base = OTHER; note = N1-methyl pseudouridine
  modified_base 3185: mod_base = OTHER; note = N1-methyl pseudouridine
  modified_base 3212: mod_base = OTHER; note = N1-methyl pseudouridine
  modified_base 3215: mod_base = OTHER; note = N1-methyl pseudouridine
  modified_base 3217: mod_base = OTHER; note = N1-methyl pseudouridine
  modified_base 3235: mod_base = OTHER; note = N1-methyl pseudouridine
  modified_base 3236: mod_base = OTHER; note = N1-methyl pseudouridine
  modified_base 3245: mod_base = OTHER; note = N1-methyl pseudouridine
  modified_base 3254: mod_base = OTHER; note = N1-methyl pseudouridine
  modified_base 3256: mod_base = OTHER; note = N1-methyl pseudouridine
  modified_base 3257: mod_base = OTHER; note = N1-methyl pseudouridine
  modified_base 3259: mod_base = OTHER; note = N1-methyl pseudouridine
  modified_base 3263: mod_base = OTHER; note = N1-methyl pseudouridine
  modified_base 3267: mod_base = OTHER; note = N1-methyl pseudouridine
  modified_base 3272: mod_base = OTHER; note = N1-methyl pseudouridine
  modified_base 3278: mod_base = OTHER; note = N1-methyl pseudouridine
  modified_base 3281: mod_base = OTHER; note = N1-methyl pseudouridine
  modified_base 3296: mod_base = OTHER; note = N1-methyl pseudouridine
  modified_base 3310: mod_base = OTHER; note = N1-methyl pseudouridine
  modified_base 3311: mod_base = OTHER; note = N1-methyl pseudouridine
  modified_base 3312: mod_base = OTHER; note = N1-methyl pseudouridine
  modified_base 3326: mod_base = OTHER; note = N1-methyl pseudouridine
  modified_base 3329: mod_base = OTHER; note = N1-methyl pseudouridine
  modified_base 3333: mod_base = OTHER; note = N1-methyl pseudouridine
  modified_base 3353: mod_base = OTHER; note = N1-methyl pseudouridine
  modified_base 3356: mod_base = OTHER; note = N1-methyl pseudouridine
  modified_base 3373: mod_base = OTHER; note = N1-methyl pseudouridine
  modified_base 3378: mod_base = OTHER; note = N1-methyl pseudouridine
  modified_base 3381: mod_base = OTHER; note = N1-methyl pseudouridine
  modified_base 3388: mod_base = OTHER; note = N1-methyl pseudouridine
  modified_base 3397: mod_base = OTHER; note = N1-methyl pseudouridine
  modified_base 3398: mod_base = OTHER; note = N1-methyl pseudouridine
  modified_base 3402: mod_base = OTHER; note = N1-methyl pseudouridine
  modified_base 3403: mod_base = OTHER; note = N1-methyl pseudouridine
  modified_base 3408: mod_base = OTHER; note = N1-methyl pseudouridine
  modified_base 3413: mod_base = OTHER; note = N1-methyl pseudouridine
  modified_base 3418: mod_base = OTHER; note = N1-methyl pseudouridine
  modified_base 3425: mod_base = OTHER; note = N1-methyl pseudouridine
  modified_base 3428: mod_base = OTHER; note = N1-methyl pseudouridine
  modified_base 3431: mod_base = OTHER; note = N1-methyl pseudouridine
  modified_base 3434: mod_base = OTHER; note = N1-methyl pseudouridine
  modified_base 3443: mod_base = OTHER; note = N1-methyl pseudouridine
  modified_base 3467: mod_base = OTHER; note = N1-methyl pseudouridine
  modified_base 3472: mod_base = OTHER; note = N1-methyl pseudouridine
  modified_base 3476: mod_base = OTHER; note = N1-methyl pseudouridine
  modified_base 3485: mod_base = OTHER; note = N1-methyl pseudouridine
  modified_base 3488: mod_base = OTHER; note = N1-methyl pseudouridine
  modified_base 3494: mod_base = OTHER; note = N1-methyl pseudouridine
  modified_base 3500: mod_base = OTHER; note = N1-methyl pseudouridine
  modified_base 3503: mod_base = OTHER; note = N1-methyl pseudouridine
  modified_base 3511: mod_base = OTHER; note = N1-methyl pseudouridine
  modified_base 3513: mod_base = OTHER; note = N1-methyl pseudouridine
  modified_base 3517: mod_base = OTHER; note = N1-methyl pseudouridine
  modified_base 3518: mod_base = OTHER; note = N1-methyl pseudouridine
  modified_base 3528: mod_base = OTHER; note = N1-methyl pseudouridine
  modified_base 3531: mod_base = OTHER; note = N1-methyl pseudouridine
  modified_base 3533: mod_base = OTHER; note = N1-methyl pseudouridine
  modified_base 3538: mod_base = OTHER; note = N1-methyl pseudouridine
  modified_base 3539: mod_base = OTHER; note = N1-methyl pseudouridine
  modified_base 3542: mod_base = OTHER; note = N1-methyl pseudouridine
  modified_base 3556: mod_base = OTHER; note = N1-methyl pseudouridine
  modified_base 3558: mod_base = OTHER; note = N1-methyl pseudouridine
  modified_base 3566: mod_base = OTHER; note = N1-methyl pseudouridine
  modified_base 3578: mod_base = OTHER; note = N1-methyl pseudouridine
  modified_base 3581: mod_base = OTHER; note = N1-methyl pseudouridine
  modified_base 3584: mod_base = OTHER; note = N1-methyl pseudouridine
  modified_base 3590: mod_base = OTHER; note = N1-methyl pseudouridine
  modified_base 3598: mod_base = OTHER; note = N1-methyl pseudouridine
  modified_base 3605: mod_base = OTHER; note = N1-methyl pseudouridine
  modified_base 3607: mod_base = OTHER; note = N1-methyl pseudouridine
  modified_base 3608: mod_base = OTHER; note = N1-methyl pseudouridine
  modified_base 3614: mod_base = OTHER; note = N1-methyl pseudouridine
  modified_base 3635: mod_base = OTHER; note = N1-methyl pseudouridine
  modified_base 3638: mod_base = OTHER; note = N1-methyl pseudouridine
  modified_base 3643: mod_base = OTHER; note = N1-methyl pseudouridine
  modified_base 3656: mod_base = OTHER; note = N1-methyl pseudouridine
  modified_base 3669: mod_base = OTHER; note = N1-methyl pseudouridine
  modified_base 3674: mod_base = OTHER; note = N1-methyl pseudouridine
  modified_base 3680: mod_base = OTHER; note = N1-methyl pseudouridine
  modified_base 3684: mod_base = OTHER; note = N1-methyl pseudouridine
  modified_base 3685: mod_base = OTHER; note = N1-methyl pseudouridine
  modified_base 3687: mod_base = OTHER; note = N1-methyl pseudouridine
  modified_base 3691: mod_base = OTHER; note = N1-methyl pseudouridine
  modified_base 3695: mod_base = OTHER; note = N1-methyl pseudouridine
  modified_base 3700: mod_base = OTHER; note = N1-methyl pseudouridine
  modified_base 3701: mod_base = OTHER; note = N1-methyl pseudouridine
  modified_base 3704: mod_base = OTHER; note = N1-methyl pseudouridine
  modified_base 3706: mod_base = OTHER; note = N1-methyl pseudouridine
  modified_base 3710: mod_base = OTHER; note = N1-methyl pseudouridine
  modified_base 3715: mod_base = OTHER; note = N1-methyl pseudouridine
  modified_base 3721: mod_base = OTHER; note = N1-methyl pseudouridine
  modified_base 3731: mod_base = OTHER; note = N1-methyl pseudouridine
  modified_base 3741: mod_base = OTHER; note = N1-methyl pseudouridine
  modified_base 3767: mod_base = OTHER; note = N1-methyl pseudouridine
  modified_base 3769: mod_base = OTHER; note = N1-methyl pseudouridine
  modified_base 3770: mod_base = OTHER; note = N1-methyl pseudouridine
  modified_base 3773: mod_base = OTHER; note = N1-methyl pseudouridine
  modified_base 3790: mod_base = OTHER; note = N1-methyl pseudouridine
  modified_base 3794: mod_base = OTHER; note = N1-methyl pseudouridine
  modified_base 3798: mod_base = OTHER; note = N1-methyl pseudouridine
  modified_base 3803: mod_base = OTHER; note = N1-methyl pseudouridine
  modified_base 3804: mod_base = OTHER; note = N1-methyl pseudouridine
  modified_base 3806: mod_base = OTHER; note = N1-methyl pseudouridine
  modified_base 3815: mod_base = OTHER; note = N1-methyl pseudouridine
  modified_base 3823: mod_base = OTHER; note = N1-methyl pseudouridine
  modified_base 3824: mod_base = OTHER; note = N1-methyl pseudouridine
  modified_base 3826: mod_base = OTHER; note = N1-methyl pseudouridine
  modified_base 3836: mod_base = OTHER; note = N1-methyl pseudouridine
  modified_base 3839: mod_base = OTHER; note = N1-methyl pseudouridine
  modified_base 3842: mod_base = OTHER; note = N1-methyl pseudouridine
  modified_base 3849: mod_base = OTHER; note = N1-methyl pseudouridine
  modified_base 3852: mod_base = OTHER; note = N1-methyl pseudouridine
  modified_base 3857: mod_base = OTHER; note = N1-methyl pseudouridine
  modified_base 3861: mod_base = OTHER; note = N1-methyl pseudouridine
  modified_base 3866: mod_base = OTHER; note = N1-methyl pseudouridine
  modified_base 3867: mod_base = OTHER; note = N1-methyl pseudouridine
  modified_base 3869: mod_base = OTHER; note = N1-methyl pseudouridine
  modified_base 3877: mod_base = OTHER; note = N1-methyl pseudouridine
  modified_base 3900: mod_base = OTHER; note = N1-methyl pseudouridine
  modified_base 3902: mod_base = OTHER; note = N1-methyl pseudouridine
  modified_base 3921: mod_base = OTHER; note = N1-methyl pseudouridine
  modified_base 3923: mod_base = OTHER; note = N1-methyl pseudouridine
  modified_base 3926: mod_base = OTHER; note = N1-methyl pseudouridine
  modified_base 3932: mod_base = OTHER; note = N1-methyl pseudouridine
  modified_base 3934: mod_base = OTHER; note = N1-methyl pseudouridine
  modified_base 3935: mod_base = OTHER; note = N1-methyl pseudouridine
  modified_base 3941: mod_base = OTHER; note = N1-methyl pseudouridine
  modified_base 3950: mod_base = OTHER; note = N1-methyl pseudouridine
  modified_base 3960: mod_base = OTHER; note = N1-methyl pseudouridine
  modified_base 3963: mod_base = OTHER; note = N1-methyl pseudouridine
  modified_base 3967: mod_base = OTHER; note = N1-methyl pseudouridine
  modified_base 3968: mod_base = OTHER; note = N1-methyl pseudouridine
  modified_base 3973: mod_base = OTHER; note = N1-methyl pseudouridine
  modified_base 3976: mod_base = OTHER; note = N1-methyl pseudouridine
  modified_base 3977: mod_base = OTHER; note = N1-methyl pseudouridine
  modified_base 3989: mod_base = OTHER; note = N1-methyl pseudouridine
  modified_base 4003: mod_base = OTHER; note = N1-methyl pseudouridine
  modified_base 4022: mod_base = OTHER; note = N1-methyl pseudouridine
  modified_base 4023: mod_base = OTHER; note = N1-methyl pseudouridine
  modified_base 4025: mod_base = OTHER; note = N1-methyl pseudouridine
  modified_base 4037: mod_base = OTHER; note = N1-methyl pseudouridine
  modified_base 4040: mod_base = OTHER; note = N1-methyl pseudouridine
  modified_base 4052: mod_base = OTHER; note = N1-methyl pseudouridine
  modified_base 4059: mod_base = OTHER; note = N1-methyl pseudouridine
  modified_base 4061: mod_base = OTHER; note = N1-methyl pseudouridine
  modified_base 4063: mod_base = OTHER; note = N1-methyl pseudouridine
  modified_base 4065: mod_base = OTHER; note = N1-methyl pseudouridine
  modified_base 4076: mod_base = OTHER; note = N1-methyl pseudouridine
  modified_base 4082: mod_base = OTHER; note = N1-methyl pseudouridine
  modified_base 4084: mod_base = OTHER; note = N1-methyl pseudouridine
  modified_base 4086: mod_base = OTHER; note = N1-methyl pseudouridine
  modified_base 4091: mod_base = OTHER; note = N1-methyl pseudouridine
  modified_base 4098: mod_base = OTHER; note = N1-methyl pseudouridine
gacaagaaatactcaatcggactggccatcggcaccaatagcgtgggctgggccgtgatcacagatgaatataaggtgcctagcaagaagttcaaggtgctgggcaacaccgatagacacagcatcaagaagaacctgatcggagccctgctgttcgacagcggcgaaaccgccgaagccaccagactgaagagaaccgccagaagacggtacacccggcgtaagaacaggatctgttacctgcaggagatcttcagcaacgaaatggccaaggtggacgactctttcttccacagactggaggagagctttctggtggaagaagacaagaagcatgagcggcaccccatctttggcaacatcgtggacgaagtggcctaccacgagaaatacccaacaatctatcacctgagaaagaagctggtggacagcaccgataaggccgacctgcggctgatctacctggccctggcacacatgatcaagttcagaggccacttcctgatcgagggcgacctgaaccccgataatagcgatgtggataagctgttcatccagctggtgcagacctacaaccagctgttcgaggagaacccgatcaacgcctcgggagttgatgccaaggcaatcctgtctgctagactgagtaagagcagaagactggagaacctgatcgcccagctgcccggagagaagaagaatgggctgtttggcaacctgattgccctgtctctgggccttacacctaacttcaagagcaactttgacctggccgaagacgccaagctgcaactgtctaaggatacctacgacgacgatctggacaacctgctggcccaaatcggggatcaatacgccgacctgttcctggctgccaagaatctgtctgacgccatccttctgtccgatatcctgcgggtgaacacagagataaccaaagctcctcttagtgcgagcatgatcaagagatatgatgagcaccaccaagatctgacgctcctgaaggccctggtcagacagcagctccctgagaaatacaaggaaattttcttcgaccagagcaagaatggctacgccggctacatcgatggcggcgccagccaggaggaattttacaagtttatcaaaccaatcctcgagaagatggacggcaccgaggaactgctcgtgaagctgaacagagaggacctactgcggaagcagcggacgttcgacaacggcagcatccctcaccagatccacctgggtgagctgcacgcaatcctgagaagacaggaagatttctaccccttcctgaaagacaaccgggagaagatcgagaagatcctgacatttagaattccctactacgtgggccctctggctagaggcaactcccggttcgcctggatgacccggaagtccgaagaaaccatcaccccctggaactttgaggaggtagtggacaagggcgccagcgctcagagctttatagagagaatgaccaacttcgacaagaatctgccaaacgagaaagtcctgcctaagcactctctgctgtatgagtacttcaccgtttacaacgagctgacaaaggtgaaatacgtgacggaggggatgaggaagcccgccttcctgagcggcgaacagaagaaggctatcgttgacctgctgttcaagaccaataggaaggtgaccgtgaagcagctcaaggaggactacttcaagaagattgagtgcttcgactctgtggaaatctctggagttgaggaccggttcaacgcatccctgggaacataccacgatctgctgaagatcattaaggacaaggactttctggacaatgaggagaacgaagatatcctggaggacattgtgctgaccctgacactgtttgaagatcgtgaaatgatcgaagaacggctgaagacatacgcccatctgttcgacgacaaggttatgaagcagctgaagagaagaagatatacagggtggggcaggctgtccaggaaactgatcaacggcatccgggacaagcagagcggcaagacaattctggacttcctcaagagcgacggcttcgccaacagaaattttatgcagctgatccatgacgatagcctgacattcaaggaagacatccagaaggcccaggtgagcgggcaaggcgacagcctgcacgagcacatcgccaacctggccggctctcccgctatcaagaagggaatcctgcagacagtgaaggtggttgatgagttagtgaaagtgatgggccggcacaagcctgagaatatcgtgattgaaatggccagagagaaccagacaactcagaagggccagaagaactcccgagagagaatgaagagaatcgaagagggaatcaaagagctaggcagccaaatcctcaaagaacaccccgtggagaatacccagctgcagaacgagaagctgtacctgtactacctgcagaacggccgagatatgtacgtggatcaggagctggacatcaataggctgtcagactacgacgtggaccacatcgtgcctcagagctttctgaaggatgattctatcgacaacaaggtgttaaccagatccgacaagaacagaggcaagagcgataacgtcccatccgaagaggtcgtgaagaagatgaagaactactggagacagctgctgaacgcgaaactgattacccagagaaagtttgacaacctcaccaaagctgagagaggaggcctgagcgagctggacaaggctggtttcatcaagcggcagctagtggaaacacggcaaatcaccaagcacgtggctcaaatcctagatagcagaatgaataccaagtacgatgagaacgacaaactgatcagagaagtgaaggtgatcacattaaagtctaaactggtcagcgacttcagaaaggacttccagttctacaaagtcagagagatcaacaactaccaccacgcccacgacgcctacctgaacgccgtggtgggcaccgccctgatcaagaagtatcccaagctggagtccgaattcgtgtacggcgactacaaggtgtacgacgtgcggaagatgatcgccaagtctgaacaggagatcggcaaggccaccgccaagtatttcttctacagcaacattatgaacttcttcaagaccgagatcaccctggctaatggagagatcagaaagcgccccctgatcgaaaccaacggagaaaccggcgagatcgtgtgggacaagggcagagacttcgccaccgtgagaaaggtgttgtccatgcctcaggtgaacatcgtgaagaagacagaggtgcagacaggagggtttagcaaggagagcatcctgcctaaacggaacagcgacaagctgatcgccagaaagaaggactgggatcctaagaaatacggcggcttcgattcccctaccgtggcctacagcgtgctggtggtggccaaggtcgagaagggcaagagcaagaaactgaagtccgtgaaggaactgctgggaatcaccatcatggaaagatctagcttcgagaagaatcctatcgacttcctggaagccaagggctataaagaggtgaagaaagacctgatcatcaagctcccgaagtacagcctgttcgagctggagaacggccgcaagcggatgctggcctccgccggcgagctgcagaagggcaatgagctcgccctgccttctaaatacgtgaacttcctgtacctggcctcgcactacgagaagctcaagggcagtccagaggacaacgagcagaaacagctgttcgtggaacaacacaagcactacctggatgagattatcgagcagatcagcgagttctccaaacgggtgatcctggcggatgctaacctagataaggttctgagcgcctacaacaagcaccgcgacaagcctataagagaacaggccgagaatatcatccacctgttcaccctgaccaacctgggcgcacctgctgccttcaagtacttcgacaccaccatcgacagaaagagatacacaagcaccaaggaggttctggacgccaccctgatacaccagagcatcacaggtctgtatgaaacccggatcgacctgtctcagctgggcggtgac

SEQ ID NO: 2178 - RNA, 12 nt, synthetic construct
  source 1..12: mol_type = other RNA
  modified_base 6: mod_base = OTHER; note = N1-methyl pseudouridine
  modified_base 9: mod_base = OTHER; note = N1-methyl pseudouridine
gaaggtgctgac

SEQ ID NO: 2179 - RNA, 57 nt, synthetic construct
  source 1..57: mol_type = other RNA
  modified_base 25: mod_base = OTHER; note = N1-methyl pseudouridine
  modified_base 26: mod_base = OTHER; note = N1-methyl pseudouridine
  modified_base 53: mod_base = OTHER; note = N1-methyl pseudouridine
  modified_base 55: mod_base = OTHER; note = N1-methyl pseudouridine
aagagaaccgccgacggcagcgagttcgagagccccaagaagaagcgcaaggtgtga

SEQ ID NO: 2180 - DNA, 4767 bp, synthetic construct
  source 1..4767: mol_type = other DNA
atgtccgaagtcgagttttcccatgagtactggatgagacacgcattgactctcgcaaagagggctcgagatgaacgcgaggtgcccgtgggggcagtactcgtgctcaacaatcgcgtaatcggcgaaggttggaatagggcaatcggactccacgaccccactgcacatgcggaaatcatggcccttcgacagggagggcttgtgatgcagaattatcgacttatcgatgcgacgctgtacgtcacgtttgaaccttgcgtaatgtgcgcgggagctatgattcactcccgcattggacgagttgtattcggtgttcgcaacgccaagacgggtgccgcaggttcactgatggacgtgctgcatcatccaggcatgaaccaccgggtagaaatcacagaaggcatattggcggacgaatgtgcggcgctgttgtgtcgtttttttcgcatgcccaggcgggtctttaacgcccagaaaaaagcacaatcctctactgactctggtggttcttctggtggttctagcggcagcgagactcccgggacctcagagtccgccacacccgaaagttctggtggttcttctggtggttctgacaagaagtacagcatcggcctggccatcggcaccaactctgtgggctgggccgtgatcaccgacgagtacaaggtgcccagcaagaaattcaaggtgctgggcaacaccgaccggcacagcatcaagaagaacctgatcggagccctgctgttcgacagcggcgaaacagccgaggccacccggctgaagagaaccgccagaagaagatacaccagacggaagaaccggatctgctatctgcaagagatcttcagcaacgagatggccaaggtggacgacagcttcttccacagactggaagagtccttcctggtggaagaggataagaagcacgagcggcaccccatcttcggcaacatcgtggacgaggtggcctaccacgagaagtaccccaccatctaccacctgagaaagaaactggtggacagcaccgacaaggccgacctgcggctgatctatctggccctggcccacatgatcaagttccggggccacttcctgatcgagggcgacctgaaccccgacaacagcgacgtggacaagctgttcatccagctggtgcagacctacaaccagctgttcgaggaaaaccccatcaacgccagcggcgtggacgccaaggccatcctgtctgccagactgagcaagagcagacggctggaaaatctgatcgcccagctgcccggcgagaagaagaatggcctgttcggaaacctgattgccctgagcctgggcctgacccccaacttcaagagcaacttcgacctggccgaggatgccaaactgcagctgagcaaggacacctacgacgacgacctggacaacctgctggcccagatcggcgaccagtacgccgacctgtttctggccgccaagaacctgtccgacgccatcctgctgagcgacatcctgagagtgaacaccgagatcaccaaggcccccctgagcgcctctatgatcaagagatacgacgagcaccaccaggacctgaccctgctgaaagctctcgtgcggcagcagctgcctgagaagtacaaagagattttcttcgaccagagcaagaacggctacgccggctacattgacggcggagccagccaggaagagttctacaagttcatcaagcccatcctggaaaagatggacggcaccgaggaactgctcgtgaagctgaacagagaggacctgctgcggaagcagcggaccttcgacaacggcagcatcccccaccagatccacctgggagagctgcacgccattctgcggcggcaggaagatttttacccattcctgaaggacaaccgggaaaagatcgagaagatcctgaccttccgcatcccctactacgtgggccctctggccaggggaaacagcagattcgcctggatgaccagaaagagcgaggaaaccatcaccccctggaacttcgaggaagtggtggacaagggcgcttccgcccagagcttcatcgagcggatgaccaacttcgataagaacctgcccaacgagaaggtgctgcccaagcacagcctgctgtacgagtacttcaccgtgtataacgagctgaccaaagtgaaatacgtgaccgagggaatgagaaagcccgccttcctgagcggcgagcagaaaaaggccatcgtggacctgctgttcaagaccaaccggaaagtgaccgtgaagcagctgaaagaggactacttcaagaaaatcgagtgcttcgactccgtggaaatctccggcgtggaagatcggttcaacgcctccctgggcacataccacgatctgctgaaaattatcaaggacaaggacttcctggacaatgaggaaaacgaggacattctggaagatatcgtgctgaccctgacactgtttgaggacagagagatgatcgaggaacggctgaaaacctatgcccacctgttcgacgacaaagtgatgaagcagctgaagcggcggagatacaccggctggggcaggctgagccggaagctgatcaacggcatccgggacaagcagtccggcaagacaatcctggatttcctgaagtccgacggcttcgccaacagaaacttcatgcagctgatccacgacgacagcctgacctttaaagaggacatccagaaagcccaggtgtccggccagggcgatagcctgcacgagcacattgccaatctggccggcagccccgccattaagaagggcatcctgcagacagtgaaggtggtggacgagctcgtgaaagtgatgggccggcacaagcccgagaacatcgtgatcgaaatggccagagagaaccagaccacccagaagggacagaagaacagccgcgagagaatgaagcggatcgaagagggcatcaaagagctgggcagccagatcctgaaagaacaccccgtggaaaacacccagctgcagaacgagaagctgtacctgtactacctgcagaatgggcgggatatgtacgtggaccaggaactggacatcaaccggctgtccgactacgatgtggaccatatcgtgcctcagagctttctgaaggacgactccatcgacaacaaggtgctgaccagaagcgacaagaaccggggcaagagcgacaacgtgccctccgaagaggtcgtgaagaagatgaagaactactggcggcagctgctgaacgccaagctgattacccagagaaagttcgacaatctgaccaaggccgagagaggcggcctgagcgaactggataaggccggcttcatcaagagacagctggtggaaacccggcagatcacaaagcacgtggcacagatcctggactcccggatgaacactaagtacgacgagaatgacaagctgatccgggaagtgaaagtgatcaccctgaagtccaagctggtgtccgatttccggaaggatttccagttttacaaagtgcgcgagatcaacaactaccaccacgcccacgacgcctacctgaacgccgtcgtgggaaccgccctgatcaaaaagtaccctaagctggaaagcgagttcgtgtacggcgactacaaggtgtacgacgtgcggaagatgatcgccaagagcgagcaggaaatcggcaaggctaccgccaagtacttcttctacagcaacatcatgaactttttcaagaccgagattaccctggccaacggcgagatccggaagcggcctctgatcgagacaaacggcgaaaccggggagatcgtgtgggataagggccgggattttgccaccgtgcggaaagtgctgagcatgccccaagtgaatatcgtgaaaaagaccgaggtgcagacaggcggcttcagcaaagagtctatcctgcccaagaggaacagcgataagctgatcgccagaaagaaggactgggaccctaagaagtacggcggcttcgacagccccaccgtggcctattctgtgctggtggtggccaaagtggaaaagggcaagtccaagaaactgaagagtgtgaaagagctgctggggatcaccatcatggaaagaagcagcttcgagaagaatcccatcgactttctggaagccaagggctacaaagaagtgaaaaaggacctgatcatcaagctgcctaagtactccctgttcgagctggaaaacggccggaagagaatgctggcctctgccggcgaactgcagaagggaaacgaactggccctgccctccaaatatgtgaacttcctgtacctggccagccactatgagaagctgaagggctcccccgaggataatgagcagaaacagctgtttgtggaacagcacaagcactacctggacgagatcatcgagcagatcagcgagttctccaagagagtgatcctggccgacgctaatctggacaaagtgctgtccgcctacaacaagcaccgggataagcccatcagagagcaggccgagaatatcatccacctgtttaccctgaccaatctgggagcccctgccgccttcaagtactttgacaccaccatcgaccggaagaggtacaccagcaccaaagaggtgctggacgccaccctgatccaccagagcatcaccggcctgtacgagacacggatcgacctgtctcagctgggaggtgacgagggagctgataagcgcaccgccgatggttccgagttcgaaagccccaagaagaagaggaaagtctaa

SEQ ID NO: 2181 - DNA, 501 bp, synthetic construct
  source 1..501: mol_type = other DNA
atgtccgaagtcgagttttcccatgagtactggatgagacacgcattgactctcgcaaagagggctcgagatgaacgcgaggtgcccgtgggggcagtactcgtgctcaacaatcgcgtaatcggcgaaggttggaatagggcaatcggactccacgaccccactgcacatgcggaaatcatggcccttcgacagggagggcttgtgatgcagaattatcgacttatcgatgcgacgctgtacgtcacgtttgaaccttgcgtaatgtgcgcgggagctatgattcactcccgcattggacgagttgtattcggtgttcgcaacgccaagacgggtgccgcaggttcactgatggacgtgctgcatcatccaggcatgaaccaccgggtagaaatcacagaaggcatattggcggacgaatgtgcggcgctgttgtgtcgtttttttcgcatgcccaggcgggtctttaacgcccagaaaaaagcacaatcctctactgac

SEQ ID NO: 2182 - DNA, 96 bp, synthetic construct
  source 1..96: mol_type = other DNA
tctggtggttcttctggtggttctagcggcagcgagactcccgggacctcagagtccgccacacccgaaagttctggtggttcttctggtggttct

SEQ ID NO: 2183 - DNA, 4101 bp, synthetic construct
  source 1..4101: mol_type = other DNA
gacaagaagtacagcatcggcctggccatcggcaccaactctgtgggctgggccgtgatcaccgacgagtacaaggtgcccagcaagaaattcaaggtgctgggcaacaccgaccggcacagcatcaagaagaacctgatcggagccctgctgttcgacagcggcgaaacagccgaggccacccggctgaagagaaccgccagaagaagatacaccagacggaagaaccggatctgctatctgcaagagatcttcagcaacgagatggccaaggtggacgacagcttcttccacagactggaagagtccttcctggtggaagaggataagaagcacgagcggcaccccatcttcggcaacatcgtggacgaggtggcctaccacgagaagtaccccaccatctaccacctgagaaagaaactggtggacagcaccgacaaggccgacctgcggctgatctatctggccctggcccacatgatcaagttccggggccacttcctgatcgagggcgacctgaaccccgacaacagcgacgtggacaagctgttcatccagctggtgcagacctacaaccagctgttcgaggaaaaccccatcaacgccagcggcgtggacgccaaggccatcctgtctgccagactgagcaagagcagacggctggaaaatctgatcgcccagctgcccggcgagaagaagaatggcctgttcggaaacctgattgccctgagcctgggcctgacccccaacttcaagagcaacttcgacctggccgaggatgccaaactgcagctgagcaaggacacctacgacgacgacctggacaacctgctggcccagatcggcgaccagtacgccgacctgtttctggccgccaagaacctgtccgacgccatcctgctgagcgacatcctgagagtgaacaccgagatcaccaaggcccccctgagcgcctctatgatcaagagatacgacgagcaccaccaggacctgaccctgctgaaagctctcgtgcggcagcagctgcctgagaagtacaaagagattttcttcgaccagagcaagaacggctacgccggctacattgacggcggagccagccaggaagagttctacaagttcatcaagcccatcctggaaaagatggacggcaccgaggaactgctcgtgaagctgaacagagaggacctgctgcggaagcagcggaccttcgacaacggcagcatcccccaccagatccacctgggagagctgcacgccattctgcggcggcaggaagatttttacccattcctgaaggacaaccgggaaaagatcgagaagatcctgaccttccgcatcccctactacgtgggccctctggccaggggaaacagcagattcgcctggatgaccagaaagagcgaggaaaccatcaccccctggaacttcgaggaagtggtggacaagggcgcttccgcccagagcttcatcgagcggatgaccaacttcgataagaacctgcccaacgagaaggtgctgcccaagcacagcctgctgtacgagtacttcaccgtgtataacgagctgaccaaagtgaaatacgtgaccgagggaatgagaaagcccgccttcctgagcggcgagcagaaaaaggccatcgtggacctgctgttcaagaccaaccggaaagtgaccgtgaagcagctgaaagaggactacttcaagaaaatcgagtgcttcgactccgtggaaatctccggcgtggaagatcggttcaacgcctccctgggcacataccacgatctgctgaaaattatcaaggacaaggacttcctggacaatgaggaaaacgaggacattctggaagatatcgtgctgaccctgacactgtttgaggacagagagatgatcgaggaacggctgaaaacctatgcccacctgttcgacgacaaagtgatgaagcagctgaagcggcggagatacaccggctggggcaggctgagccggaagctgatcaacggcatccgggacaagcagtccggcaagacaatcctggatttcctgaagtccgacggcttcgccaacagaaacttcatgcagctgatccacgacgacagcctgacctttaaagaggacatccagaaagcccaggtgtccggccagggcgatagcctgcacgagcacattgccaatctggccggcagccccgccattaagaagggcatcctgcagacagtgaaggtggtggacgagctcgtgaaagtgatgggccggcacaagcccgagaacatcgtgatcgaaatggccagagagaaccagaccacccagaagggacagaagaacagccgcgagagaatgaagcggatcgaagagggcatcaaagagctgggcagccagatcctgaaagaacaccccgtggaaaacacccagctgcagaacgagaagctgtacctgtactacctgcagaatgggcgggatatgtacgtggaccaggaactggacatcaaccggctgtccgactacgatgtggaccatatcgtgcctcagagctttctgaaggacgactccatcgacaacaaggtgctgaccagaagcgacaagaaccggggcaagagcgacaacgtgccctccgaagaggtcgtgaagaagatgaagaactactggcggcagctgctgaacgccaagctgattacccagagaaagttcgacaatctgaccaaggccgagagaggcggcctgagcgaactggataaggccggcttcatcaagagacagctggtggaaacccggcagatcacaaagcacgtggcacagatcctggactcccggatgaacactaagtacgacgagaatgacaagctgatccgggaagtgaaagtgatcaccctgaagtccaagctggtgtccgatttccggaaggatttccagttttacaaagtgcgcgagatcaacaactaccaccacgcccacgacgcctacctgaacgccgtcgtgggaaccgccctgatcaaaaagtaccctaagctggaaagcgagttcgtgtacggcgactacaaggtgtacgacgtgcggaagatgatcgccaagagcgagcaggaaatcggcaaggctaccgccaagtacttcttctacagcaacatcatgaactttttcaagaccgagattaccctggccaacggcgagatccggaagcggcctctgatcgagacaaacggcgaaaccggggagatcgtgtgggataagggccgggattttgccaccgtgcggaaagtgctgagcatgccccaagtgaatatcgtgaaaaagaccgaggtgcagacaggcggcttcagcaaagagtctatcctgcccaagaggaacagcgataagctgatcgccagaaagaaggactgggaccctaagaagtacggcggcttcgacagccccaccgtggcctattctgtgctggtggtggccaaagtggaaaagggcaagtccaagaaactgaagagtgtgaaagagctgctggggatcaccatcatggaaagaagcagcttcgagaagaatcccatcgactttctggaagccaagggctacaaagaagtgaaaaaggacctgatcatcaagctgcctaagtactccctgttcgagctggaaaacggccggaagagaatgctggcctctgccggcgaactgcagaagggaaacgaactggccctgccctccaaatatgtgaacttcctgtacctggccagccactatgagaagctgaagggctcccccgaggataatgagcagaaacagctgtttgtggaacagcacaagcactacctggacgagatcatcgagcagatcagcgagttctccaagagagtgatcctggccgacgctaatctggacaaagtgctgtccgcctacaacaagcaccgggataagcccatcagagagcaggccgagaatatcatccacctgtttaccctgaccaatctgggagcccctgccgccttcaagtactttgacaccaccatcgaccggaagaggtacaccagcaccaaagaggtgctggacgccaccctgatccaccagagcatcaccggcctgtacgagacacggatcgacctgtctcagctgggaggtgac

SEQ ID NO: 2184 - DNA, 12 bp, synthetic construct
  source 1..12: mol_type = other DNA
gagggagctgat

SEQ ID NO: 2185 - DNA, 57 bp, synthetic construct
  source 1..57: mol_type = other DNA
aagcgcaccgccgatggttccgagttcgaaagccccaagaagaagaggaaagtctaa

SEQ ID NO: 2186 - RNA, 4380 nt, synthetic construct
  source 1..4380: mol_type = other RNA
  modified_base 7: mod_base = OTHER; note = N1-methyl pseudouridine
  modified_base 25: mod_base = OTHER; note = N1-methyl pseudouridine
  modified_base 35: mod_base = OTHER; note = N1-methyl pseudouridine
  modified_base 37: mod_base = OTHER; note = N1-methyl pseudouridine
  modified_base 49: mod_base = OTHER; note = N1-methyl pseudouridine
  modified_base 73: mod_base = OTHER; note = N1-methyl pseudouridine
  modified_base 79: mod_base = OTHER; note = N1-methyl pseudouridine
  modified_base 88: mod_base = OTHER; note = N1-methyl pseudouridine
  modified_base 108: mod_base = OTHER; note = N1-methyl pseudouridine
  modified_base 115: mod_base = OTHER; note = N1-methyl pseudouridine
  modified_base 121: mod_base = OTHER; note = N1-methyl pseudouridine
  modified_base 127: mod_base = OTHER; note = N1-methyl pseudouridine
  modified_base 142: mod_base = OTHER; note = N1-methyl pseudouridine
  modified_base 147: mod_base = OTHER; note = N1-methyl pseudouridine
  modified_base 154: mod_base = OTHER; note = N1-methyl pseudouridine
  modified_base 157: mod_base = OTHER; note = N1-methyl pseudouridine
  modified_base 168: mod_base = OTHER; note = N1-methyl pseudouridine
  modified_base 175: mod_base = OTHER; note = N1-methyl pseudouridine
  modified_base 189: mod_base = OTHER; note = N1-methyl pseudouridine
  modified_base 190: mod_base = OTHER; note = N1-methyl pseudouridine
  modified_base 196: mod_base = OTHER; note = N1-methyl pseudouridine
  modified_base 199: mod_base = OTHER; note = N1-methyl pseudouridine
  modified_base 223: mod_base = OTHER; note = N1-methyl pseudouridine
  modified_base 235: mod_base = OTHER; note = N1-methyl pseudouridine
  modified_base 238: mod_base = OTHER; note = N1-methyl pseudouridine
  modified_base 247: mod_base = OTHER; note = N1-methyl pseudouridine
  modified_base 250: mod_base = OTHER; note = N1-methyl pseudouridine
  modified_base 252: mod_base = OTHER; note = N1-methyl pseudouridine
  modified_base 253: mod_base = OTHER; note = N1-methyl pseudouridine
  modified_base 286: mod_base = OTHER; note = N1-methyl pseudouridine
  modified_base 309: mod_base = OTHER; note = N1-methyl pseudouridine
  modified_base 331: mod_base = OTHER; note = N1-methyl pseudouridine
  modified_base 333: mod_base = OTHER; note = N1-methyl pseudouridine
  modified_base 336: mod_base = OTHER; note = N1-methyl pseudouridine
  modified_base 340: mod_base = OTHER; note = N1-methyl pseudouridine
  modified_base 349: mod_base = OTHER; note = N1-methyl pseudouridine
  modified_base 351: mod_base = OTHER; note = N1-methyl pseudouridine
  modified_base 352: mod_base = OTHER; note = N1-methyl pseudouridine
  modified_base 364: mod_base = OTHER; note = N1-methyl pseudouridine
  modified_base 373: mod_base = OTHER; note = N1-methyl pseudouridine
  modified_base 384: mod_base = OTHER; note = N1-methyl pseudouridine
  modified_base 385: mod_base = OTHER; note = N1-methyl pseudouridine
  modified_base 387: mod_base = OTHER; note = N1-methyl pseudouridine
  modified_base 388: mod_base = OTHER; note = N1-methyl pseudouridine
  modified_base 397: mod_base = OTHER; note = N1-methyl pseudouridine
  modified_base 408: mod_base = OTHER; note = N1-methyl pseudouridine
  modified_base 409: mod_base = OTHER; note = N1-methyl pseudouridine
  modified_base 412: mod_base = OTHER; note = N1-methyl pseudouridine
  modified_base 415: mod_base = OTHER; note = N1-methyl pseudouridine
  modified_base 448: mod_base = OTHER; note = N1-methyl pseudouridine
  modified_base 450: mod_base = OTHER; note = N1-methyl pseudouridine
  modified_base 451: mod_base = OTHER; note = N1-methyl pseudouridine
  modified_base 460: mod_base = OTHER; note = N1-methyl pseudouridine
  modified_base 463: mod_base = OTHER; note = N1-methyl pseudouridine
  modified_base 472: mod_base = OTHER; note = N1-methyl pseudouridine
  modified_base 477: mod_base = OTHER; note = N1-methyl pseudouridine
  modified_base 489: mod_base = OTHER; note = N1-methyl pseudouridine
  modified_base 499: mod_base = OTHER; note = N1-methyl pseudouridine
  modified_base 501: mod_base = OTHER; note = N1-methyl pseudouridine
  modified_base 508: mod_base = OTHER; note = N1-methyl pseudouridine
  modified_base 520: mod_base = OTHER; note = N1-methyl pseudouridine
  modified_base 523: mod_base = OTHER; note = N1-methyl pseudouridine
  modified_base 547: mod_base = OTHER; note = N1-methyl pseudouridine
  modified_base 553: mod_base = OTHER; note = N1-methyl pseudouridine
  modified_base 556: mod_base = OTHER; note = N1-methyl pseudouridine
  modified_base 558: mod_base = OTHER; note = N1-methyl pseudouridine
  modified_base 562: mod_base = OTHER; note = N1-methyl pseudouridine
  modified_base 568: mod_base = OTHER; note = N1-methyl pseudouridine
  modified_base 577: mod_base = OTHER; note = N1-methyl pseudouridine
  modified_base 580: mod_base = OTHER; note = N1-methyl pseudouridine
  modified_base 585: mod_base = OTHER; note = N1-methyl pseudouridine
  modified_base 586: mod_base = OTHER; note = N1-methyl pseudouridine
  modified_base 597: mod_base = OTHER; note = N1-methyl pseudouridine
  modified_base 598: mod_base = OTHER; note = N1-methyl pseudouridine
  modified_base 601: mod_base = OTHER; note = N1-methyl pseudouridine
  modified_base 604: mod_base = OTHER; note = N1-methyl pseudouridine
  modified_base 616: mod_base = OTHER; note = N1-methyl pseudouridine
  modified_base 637: mod_base = OTHER; note = N1-methyl pseudouridine
  modified_base 646: mod_base = OTHER; note = N1-methyl pseudouridine
  modified_base 648: mod_base = OTHER; note = N1-methyl pseudouridine
  modified_base 649: mod_base = OTHER; note = N1-methyl pseudouridine
  modified_base 652: mod_base = OTHER; note = N1-methyl pseudouridine
  modified_base 658: mod_base = OTHER; note = N1-methyl pseudouridine
  modified_base 661: mod_base = OTHER; note = N1-methyl pseudouridine
  modified_base 669: mod_base = OTHER; note = N1-methyl pseudouridine
  modified_base 679: mod_base = OTHER; note = N1-methyl pseudouridine
  modified_base 681: mod_base = OTHER; note = N1-methyl pseudouridine
  modified_base 682: mod_base = OTHER; note = N1-methyl pseudouridine
  modified_base 697: mod_base = OTHER; note = N1-methyl pseudouridine
  modified_base 712: mod_base = OTHER; note = N1-methyl pseudouridine
  modified_base 727: mod_base = OTHER; note = N1-methyl pseudouridine
  modified_base 730: mod_base = OTHER; note = N1-methyl pseudouridine
  modified_base 742: mod_base = OTHER; note = N1-methyl pseudouridine
  modified_base 760: mod_base = OTHER; note = N1-methyl pseudouridine
  modified_base 769: mod_base = OTHER; note = N1-methyl pseudouridine
  modified_base 772: mod_base = OTHER; note = N1-methyl pseudouridine
  modified_base 781: mod_base = OTHER; note = N1-methyl pseudouridine
  modified_base 805: mod_base = OTHER; note = N1-methyl pseudouridine
  modified_base 807: mod_base = OTHER; note = N1-methyl pseudouridine
  modified_base 808: mod_base = OTHER; note = N1-methyl pseudouridine
  modified_base 817: mod_base = OTHER; note = N1-methyl pseudouridine
  modified_base 820: mod_base = OTHER; note = N1-methyl pseudouridine
  modified_base 826: mod_base = OTHER; note = N1-methyl pseudouridine
  modified_base 832: mod_base = OTHER; note = N1-methyl pseudouridine
  modified_base 838: mod_base = OTHER; note = N1-methyl pseudouridine
  modified_base 849: mod_base = OTHER; note = N1-methyl pseudouridine
  modified_base 850: mod_base = OTHER; note = N1-methyl pseudouridine
  modified_base 861: mod_base = OTHER; note = N1-methyl pseudouridine
  modified_base 862: mod_base = OTHER; note = N1-methyl pseudouridine
  modified_base 868: mod_base = OTHER; note = N1-methyl pseudouridine
  modified_base 886: mod_base = OTHER; note = N1-methyl pseudouridine
  modified_base 892: mod_base = OTHER; note = N1-methyl pseudouridine
  modified_base 906: mod_base = OTHER; note = N1-methyl pseudouridine
  modified_base 919: mod_base = OTHER; note = N1-methyl pseudouridine
  modified_base 928: mod_base = OTHER; note = N1-methyl pseudouridine
  modified_base 931: mod_base = OTHER; note = N1-methyl pseudouridine
  modified_base 940: mod_base = OTHER; note = N1-methyl pseudouridine
  modified_base 951: mod_base = OTHER; note = N1-methyl pseudouridine
  modified_base 961: mod_base = OTHER; note = N1-methyl pseudouridine
  modified_base 963: mod_base = OTHER; note = N1-methyl pseudouridine
  modified_base 964: mod_base = OTHER; note = N1-methyl pseudouridine
  modified_base 967: mod_base = OTHER; note = N1-methyl pseudouridine
  modified_base 982: mod_base = OTHER; note = N1-methyl pseudouridine
  modified_base 994: mod_base = OTHER; note = N1-methyl pseudouridine
  modified_base 997: mod_base = OTHER; note = N1-methyl pseudouridine
  modified_base 1000: mod_base = OTHER; note = N1-methyl pseudouridine
  modified_base 1009: mod_base = OTHER; note = N1-methyl pseudouridine
  modified_base 1012: mod_base = OTHER; note = N1-methyl pseudouridine
  modified_base 1018: mod_base = OTHER; note = N1-methyl pseudouridine
  modified_base 1030: mod_base = OTHER; note = N1-methyl pseudouridine
  modified_base 1045: mod_base = OTHER; note = N1-methyl pseudouridine
  modified_base 1057: mod_base = OTHER; note = N1-methyl pseudouridine
  modified_base 1060: mod_base = OTHER; note = N1-methyl pseudouridine
  modified_base 1068: mod_base = OTHER; note = N1-methyl pseudouridine
  modified_base 1090: mod_base = OTHER; note = N1-methyl pseudouridine
  modified_base 1096: mod_base = OTHER; note = N1-methyl pseudouridine
  modified_base 1099: mod_base = OTHER; note = N1-methyl pseudouridine
  modified_base 1108: mod_base = OTHER; note = N1-methyl pseudouridine
  modified_base 1111: mod_base = OTHER; note = N1-methyl pseudouridine
  modified_base 1123: mod_base = OTHER; note = N1-methyl pseudouridine
  modified_base 1134: mod_base = OTHER; note = N1-methyl pseudouridine
  modified_base 1144: mod_base = OTHER; note = N1-methyl pseudouridine
  modified_base 1146: mod_base = OTHER; note = N1-methyl pseudouridine
  modified_base 1147: mod_base = OTHER; note = N1-methyl pseudouridine
  modified_base 1149: mod_base = OTHER; note = N1-methyl pseudouridine
  modified_base 1150: mod_base = OTHER; note = N1-methyl pseudouridine
  modified_base 1170: mod_base = OTHER; note = N1-methyl pseudouridine
  modified_base 1179: mod_base = OTHER; note = N1-methyl pseudouridine
  modified_base 1183: mod_base = OTHER; note = N1-methyl pseudouridine
  modified_base 1209: mod_base = OTHER; note = N1-methyl pseudouridine
  modified_base 1210: mod_base = OTHER; note = N1-methyl pseudouridine
  modified_base 1212: mod_base = OTHER; note = N1-methyl pseudouridine
  modified_base 1218: mod_base = OTHER; note = N1-methyl pseudouridine
  modified_base 1219: mod_base = OTHER; note = N1-methyl pseudouridine
  modified_base 1222: mod_base = OTHER; note = N1-methyl pseudouridine
  modified_base 1231: mod_base = OTHER; note = N1-methyl pseudouridine
  modified_base 1234: mod_base = OTHER; note = N1-methyl pseudouridine
  modified_base 1243: mod_base = OTHER; note = N1-methyl pseudouridine
  modified_base 1261: mod_base = OTHER; note = N1-methyl pseudouridine
  modified_base 1264: mod_base = OTHER; note = N1-methyl pseudouridine
  modified_base 1267: mod_base = OTHER; note = N1-methyl pseudouridine
  modified_base 1273: mod_base = OTHER; note = N1-methyl pseudouridine
  modified_base 1288: mod_base = OTHER; note = N1-methyl pseudouridine
  modified_base 1291: mod_base = OTHER; note = N1-methyl pseudouridine
  modified_base 1308: mod_base = OTHER; note = N1-methyl pseudouridine
  modified_base 1309: mod_base = OTHER; note = N1-methyl pseudouridine
  modified_base 1324: mod_base = OTHER; note = N1-methyl pseudouridine
  modified_base 1336: mod_base = OTHER; note = N1-methyl pseudouridine
  modified_base 1342: mod_base = OTHER; note = N1-methyl pseudouridine
  modified_base 1351: mod_base = OTHER; note = N1-methyl pseudouridine
  modified_base 1360: mod_base = OTHER; note = N1-methyl pseudouridine
  modified_base 1363: mod_base = OTHER; note = N1-methyl pseudouridine
  modified_base 1380: mod_base = OTHER; note = N1-methyl pseudouridine
  modified_base 1381: mod_base = OTHER; note = N1-methyl pseudouridine
  modified_base 1383: mod_base = OTHER; note = N1-methyl pseudouridine
  modified_base 1389: mod_base = OTHER; note = N1-methyl pseudouridine
  modified_base 1390: mod_base = OTHER; note = N1-methyl pseudouridine
  modified_base 1393: mod_base = OTHER; note = N1-methyl pseudouridine
  modified_base 1414: mod_base = OTHER; note = N1-methyl pseudouridine
  modified_base 1423: mod_base = OTHER; note = N1-methyl pseudouridine
  modified_base 1426: mod_base = OTHER; note = N1-methyl pseudouridine
  modified_base 1431: mod_base = OTHER; note = N1-methyl pseudouridine
  modified_base 1432: mod_base = OTHER; note = N1-methyl pseudouridine
  modified_base 1438: mod_base = OTHER; note = N1-methyl pseudouridine
  modified_base 1443: mod_base = OTHER; note = N1-methyl pseudouridine
  modified_base 1446: mod_base = OTHER; note = N1-methyl pseudouridine
  modified_base 1450: mod_base = OTHER; note = N1-methyl pseudouridine
  modified_base 1459: mod_base = OTHER; note = N1-methyl pseudouridine
  modified_base 1479: mod_base = OTHER; note = N1-methyl pseudouridine
  modified_base 1480: mod_base = OTHER; note = N1-methyl pseudouridine
  modified_base 1485: mod_base = OTHER; note = N1-methyl pseudouridine
  modified_base 1489: mod_base = OTHER; note = N1-methyl pseudouridine
  modified_base 1513: mod_base = OTHER; note = N1-methyl pseudouridine
  modified_base 1521: mod_base = OTHER; note = N1-methyl pseudouridine
  modified_base 1527: mod_base = OTHER; note = N1-methyl pseudouridine
  modified_base 1528: mod_base = OTHER; note = N1-methyl pseudouridine
  modified_base 1537: mod_base = OTHER; note = N1-methyl pseudouridine
  modified_base 1540: mod_base = OTHER; note = N1-methyl pseudouridine
  modified_base 1566: mod_base = OTHER; note = N1-methyl pseudouridine
  modified_base 1567: mod_base = OTHER; note = N1-methyl pseudouridine
  modified_base 1570: mod_base = OTHER; note = N1-methyl pseudouridine
  modified_base 1579: mod_base = OTHER; note = N1-methyl pseudouridine
  modified_base 1587: mod_base = OTHER; note = N1-methyl pseudouridine
  modified_base 1588: mod_base = OTHER; note = N1-methyl pseudouridine
  modified_base 1600: mod_base = OTHER; note = N1-methyl pseudouridine
  modified_base 1615: mod_base = OTHER; note = N1-methyl pseudouridine
  modified_base 1618: mod_base = OTHER; note = N1-methyl pseudouridine
  modified_base 1633: mod_base = OTHER; note = N1-methyl pseudouridine
  modified_base 1636: mod_base = OTHER; note = N1-methyl pseudouridine
  modified_base 1638: mod_base = OTHER; note = N1-methyl pseudouridine
  modified_base 1644: mod_base = OTHER; note = N1-methyl pseudouridine
  modified_base 1647: mod_base = OTHER; note = N1-methyl pseudouridine
  modified_base 1648: mod_base = OTHER; note = N1-methyl pseudouridine
  modified_base 1654: mod_base = OTHER; note = N1-methyl pseudouridine
  modified_base 1656: mod_base = OTHER; note = N1-methyl pseudouridine
  modified_base 1666: mod_base = OTHER; note = N1-methyl pseudouridine
  modified_base 1675: mod_base = OTHER; note = N1-methyl pseudouridine
  modified_base 1680: mod_base = OTHER; note = N1-methyl pseudouridine
  modified_base 1684: mod_base = OTHER; note = N1-methyl pseudouridine
  modified_base 1696: mod_base = OTHER; note = N1-methyl pseudouridine
  modified_base 1710: mod_base = OTHER; note = N1-methyl pseudouridine
  modified_base 1711: mod_base = OTHER; note = N1-methyl pseudouridine
  modified_base 1714: mod_base = OTHER; note = N1-methyl pseudouridine
  modified_base 1738: mod_base = OTHER; note = N1-methyl pseudouridine
  modified_base 1741: mod_base = OTHER; note = N1-methyl pseudouridine
  modified_base 1747: mod_base = OTHER; note = N1-methyl pseudouridine
  modified_base 1750: mod_base = OTHER; note = N1-methyl pseudouridine
  modified_base 1752: mod_base = OTHER; note = N1-methyl pseudouridine
  modified_base 1753: mod_base = OTHER; note = N1-methyl pseudouridine
  modified_base 1771: mod_base = OTHER; note = N1-methyl pseudouridine
  modified_base 1777: mod_base = OTHER; note = N1-methyl pseudouridine
  modified_base 1786: mod_base = OTHER; note = N1-methyl pseudouridine
  modified_base 1797: mod_base = OTHER; note = N1-methyl pseudouridine
  modified_base 1800: mod_base = OTHER; note = N1-methyl pseudouridine
  modified_base 1801: mod_base = OTHER; note = N1-methyl pseudouridine
  modified_base 1810: mod_base = OTHER; note = N1-methyl pseudouridine
  modified_base 1815: mod_base = OTHER; note = N1-methyl pseudouridine
  modified_base 1818: mod_base = OTHER; note = N1-methyl pseudouridine
  modified_base 1819: mod_base = OTHER; note = N1-methyl pseudouridine
  modified_base 1828: mod_base = OTHER; note = N1-methyl pseudouridine
  modified_base 1834: mod_base = OTHER; note = N1-methyl pseudouridine
  modified_base 1843: mod_base = OTHER; note = N1-methyl pseudouridine
  modified_base 1854: mod_base = OTHER; note = N1-methyl pseudouridine
  modified_base 1855: mod_base = OTHER; note = N1-methyl pseudouridine
  modified_base 1867: mod_base = OTHER; note = N1-methyl pseudouridine
  modified_base 1875: mod_base = OTHER; note = N1-methyl pseudouridine
  modified_base 1885: mod_base = OTHER; note = N1-methyl pseudouridine
  modified_base 1888: mod_base = OTHER; note = N1-methyl pseudouridine
  modified_base 1894: mod_base = OTHER; note = N1-methyl pseudouridine
  modified_base 1897: mod_base = OTHER; note = N1-methyl pseudouridine
  modified_base 1911: mod_base = OTHER; note = N1-methyl pseudouridine
  modified_base 1912: mod_base = OTHER; note = N1-methyl pseudouridine
  modified_base 1915: mod_base = OTHER; note = N1-methyl pseudouridine
  modified_base 1939: mod_base = OTHER; note = N1-methyl pseudouridine
  modified_base 1942: mod_base = OTHER; note = N1-methyl pseudouridine
  modified_base 1951: mod_base = OTHER; note = N1-methyl pseudouridine
  modified_base 1954: mod_base = OTHER; note = N1-methyl pseudouridine
  modified_base 1957: mod_base = OTHER; note = N1-methyl pseudouridine
  modified_base 1963: mod_base = OTHER; note = N1-methyl pseudouridine
  modified_base 1969: mod_base = OTHER; note = N1-methyl pseudouridine
  modified_base 1971: mod_base = OTHER; note = N1-methyl pseudouridine
  modified_base 1972: mod_base = OTHER; note = N1-methyl pseudouridine
  modified_base 1987: mod_base = OTHER; note = N1-methyl pseudouridine
  modified_base 1990: mod_base = OTHER; note = N1-methyl pseudouridine
  modified_base 2002: mod_base = OTHER; note = N1-methyl pseudouridine
  modified_base 2010: mod_base = OTHER; note = N1-methyl pseudouridine
  modified_base 2020: mod_base = OTHER; note = N1-methyl pseudouridine
  modified_base 2022: mod_base = OTHER; note = N1-methyl pseudouridine
  modified_base 2023: mod_base = OTHER; note = N1-methyl pseudouridine
  modified_base 2035: mod_base = OTHER; note = N1-methyl pseudouridine
  modified_base 2038: mod_base = OTHER; note = N1-methyl pseudouridine
  modified_base 2047: mod_base = OTHER; note = N1-methyl pseudouridine
  modified_base 2061: mod_base = OTHER; note = N1-methyl pseudouridine
  modified_base 2070: mod_base = OTHER; note = N1-methyl pseudouridine
  modified_base 2080: mod_base = OTHER; note = N1-methyl pseudouridine
  modified_base 2092: mod_base = OTHER; note = N1-methyl pseudouridine
  modified_base 2095: mod_base = OTHER; note = N1-methyl pseudouridine
  modified_base 2104: mod_base = OTHER; note = N1-methyl pseudouridine
  modified_base 2131: mod_base = OTHER; note = N1-methyl pseudouridine
  modified_base 2134: mod_base = OTHER; note = N1-methyl pseudouridine
  modified_base 2139: mod_base = OTHER; note = N1-methyl pseudouridine
  modified_base 2140: mod_base = OTHER; note = N1-methyl pseudouridine
  modified_base 2143: mod_base = OTHER; note = N1-methyl pseudouridine
  modified_base 2157: mod_base = OTHER; note = N1-methyl pseudouridine
  modified_base 2158: mod_base = OTHER; note = N1-methyl pseudouridine
  modified_base 2172: mod_base = OTHER; note = N1-methyl pseudouridine
  modified_base 2173: mod_base = OTHER; note = N1-methyl pseudouridine
  modified_base 2176: mod_base = OTHER; note = N1-methyl pseudouridine
  modified_base 2182: mod_base = OTHER; note = N1-methyl pseudouridine
  modified_base 2185: mod_base = OTHER; note = N1-methyl pseudouridine
  modified_base 2200: mod_base = OTHER; note = N1-methyl pseudouridine
  modified_base 2205: mod_base = OTHER; note = N1-methyl pseudouridine
  modified_base 2206: mod_base = OTHER; note = N1-methyl pseudouridine
  modified_base 2218: mod_base = OTHER; note = N1-methyl pseudouridine
  modified_base 2233: mod_base = OTHER; note = N1-methyl pseudouridine
  modified_base 2254: mod_base = OTHER; note = N1-methyl pseudouridine
  modified_base 2266: mod_base = OTHER; note = N1-methyl pseudouridine
  modified_base 2275: mod_base = OTHER; note = N1-methyl pseudouridine
  modified_base 2293: mod_base = OTHER; note = N1-methyl pseudouridine
  modified_base 2305: mod_base = OTHER; note = N1-methyl pseudouridine
  modified_base 2308: mod_base = OTHER; note = N1-methyl pseudouridine
  modified_base 2317: mod_base = OTHER; note = N1-methyl pseudouridine
  modified_base 2323: mod_base = OTHER; note = N1-methyl pseudouridine
  modified_base 2326: mod_base = OTHER; note = N1-methyl pseudouridine
  modified_base 2335: mod_base = OTHER; note = N1-methyl pseudouridine
  modified_base 2338: mod_base = OTHER; note = N1-methyl pseudouridine
  modified_base 2344: mod_base = OTHER; note = N1-methyl pseudouridine
  modified_base 2347: mod_base = OTHER; note = N1-methyl pseudouridine
  modified_base 2371: mod_base = OTHER; note = N1-methyl pseudouridine
  modified_base 2374: mod_base = OTHER; note = N1-methyl pseudouridine
  modified_base 2377: mod_base = OTHER; note = N1-methyl pseudouridine
  modified_base 2383: mod_base = OTHER; note = N1-methyl pseudouridine
  modified_base 2437: mod_base = OTHER; note = N1-methyl pseudouridine
  modified_base 2446: mod_base = OTHER; note = N1-methyl pseudouridine
  modified_base 2458: mod_base = OTHER; note = N1-methyl pseudouridine
  modified_base 2467: mod_base = OTHER; note = N1-methyl pseudouridine
  modified_base 2479: mod_base = OTHER; note = N1-methyl pseudouridine
  modified_base 2482: mod_base = OTHER; note = N1-methyl pseudouridine
  modified_base 2497: mod_base = OTHER; note = N1-methyl pseudouridine
  modified_base 2512: mod_base = OTHER; note = N1-methyl pseudouridine
  modified_base 2527: mod_base = OTHER; note = N1-methyl pseudouridine
  modified_base 2529: mod_base = OTHER; note = N1-methyl pseudouridine
  modified_base 2533: mod_base = OTHER; note = N1-methyl pseudouridine
  modified_base 2535: mod_base = OTHER; note = N1-methyl pseudouridine
  modified_base 2538: mod_base = OTHER; note = N1-methyl pseudouridine
  modified_base 2542: mod_base = OTHER; note = N1-methyl pseudouridine
  modified_base 2560: mod_base = OTHER; note = N1-methyl pseudouridine
  modified_base 2562: mod_base = OTHER; note = N1-methyl pseudouridine
  modified_base 2566: mod_base = OTHER; note = N1-methyl pseudouridine
  modified_base 2578: mod_base = OTHER; note = N1-methyl pseudouridine
  modified_base 2584: mod_base = OTHER; note = N1-methyl pseudouridine
  modified_base 2593: mod_base = OTHER; note = N1-methyl pseudouridine
  modified_base 2601: mod_base = OTHER; note = N1-methyl pseudouridine
  modified_base 2608: mod_base = OTHER; note = N1-methyl pseudouridine
  modified_base 2617: mod_base = OTHER; note = N1-methyl pseudouridine
  modified_base 2620: mod_base = OTHER; note = N1-methyl pseudouridine
  modified_base 2631: mod_base = OTHER; note = N1-methyl pseudouridine
  modified_base 2632: mod_base = OTHER; note = N1-methyl pseudouridine
  modified_base 2635: mod_base = OTHER; note = N1-methyl pseudouridine
  modified_base 2650: mod_base = OTHER; note = N1-methyl pseudouridine
  modified_base 2662: mod_base = OTHER; note = N1-methyl pseudouridine
  modified_base 2665: mod_base = OTHER; note = N1-methyl pseudouridine
  modified_base 2704: mod_base = OTHER; note = N1-methyl pseudouridine
  modified_base 2719: mod_base = OTHER; note = N1-methyl pseudouridine
  modified_base 2722: mod_base = OTHER; note = N1-methyl pseudouridine
  modified_base 2731: mod_base = OTHER; note = N1-methyl pseudouridine
  modified_base 2739: mod_base = OTHER; note = N1-methyl pseudouridine
  modified_base 2742: mod_base = OTHER; note = N1-methyl pseudouridine
  modified_base 2752: mod_base = OTHER; note = N1-methyl pseudouridine
  modified_base 2755: mod_base = OTHER; note = N1-methyl pseudouridine
  modified_base 2767: mod_base = OTHER; note = N1-methyl pseudouridine
  modified_base 2770: mod_base = OTHER; note = N1-methyl pseudouridine
  modified_base 2784: mod_base = OTHER; note = N1-methyl pseudouridine
  modified_base 2785: mod_base = OTHER; note = N1-methyl pseudouridine
  modified_base 2794: mod_base = OTHER; note = N1-methyl pseudouridine
  modified_base 2818: mod_base = OTHER; note = N1-methyl pseudouridine
  modified_base 2827: mod_base = OTHER; note = N1-methyl pseudouridine
  modified_base 2841: mod_base = OTHER; note = N1-methyl pseudouridine
  modified_base 2842: mod_base = OTHER; note = N1-methyl pseudouridine
  modified_base 2845: mod_base = OTHER; note = N1-methyl pseudouridine
  modified_base 2857: mod_base = OTHER; note = N1-methyl pseudouridine
  modified_base 2860: mod_base = OTHER; note = N1-methyl pseudouridine
  modified_base 2875: mod_base = OTHER; note = N1-methyl pseudouridine
  modified_base 2887: mod_base = OTHER; note = N1-methyl pseudouridine
  modified_base 2896: mod_base = OTHER; note = N1-methyl pseudouridine
  modified_base 2899: mod_base = OTHER; note = N1-methyl pseudouridine
  modified_base 2911: mod_base = OTHER; note = N1-methyl pseudouridine
  modified_base 2922: mod_base = OTHER; note = N1-methyl pseudouridine
  modified_base 2941: mod_base = OTHER; note = N1-methyl pseudouridine
  modified_base 2944: mod_base = OTHER; note = N1-methyl pseudouridine
  modified_base 2953: mod_base = OTHER; note = N1-methyl pseudouridine
  modified_base 2959: mod_base = OTHER; note = N1-methyl pseudouridine
  modified_base 2962: mod_base = OTHER; note = N1-methyl pseudouridine
  modified_base 2968: mod_base = OTHER; note = N1-methyl pseudouridine
  modified_base 2980: mod_base = OTHER; note = N1-methyl pseudouridine
  modified_base 2983: mod_base = OTHER; note = N1-methyl pseudouridine
  modified_base 2991: mod_base = OTHER; note = N1-methyl pseudouridine
  modified_base 2992: mod_base = OTHER; note = N1-methyl pseudouridine
  modified_base 3003: mod_base = OTHER; note = N1-methyl pseudouridine
  modified_base 3004: mod_base = OTHER; note = N1-methyl pseudouridine
  modified_base 3009: mod_base = OTHER; note = N1-methyl pseudouridine
  modified_base 3010: mod_base = OTHER; note = N1-methyl pseudouridine
  modified_base 3012: mod_base = OTHER; note = N1-methyl pseudouridine
  modified_base 3019: mod_base = OTHER; note = N1-methyl pseudouridine
  modified_base 3028: mod_base = OTHER; note = N1-methyl pseudouridine
  modified_base 3036: mod_base = OTHER; note = N1-methyl pseudouridine
  modified_base 3057: mod_base = OTHER; note = N1-methyl pseudouridine
  modified_base 3061: mod_base = OTHER; note = N1-methyl pseudouridine
  modified_base 3070: mod_base = OTHER; note = N1-methyl pseudouridine
  modified_base 3073: mod_base = OTHER; note = N1-methyl pseudouridine
  modified_base 3085: mod_base = OTHER; note = N1-methyl pseudouridine
  modified_base 3088: mod_base = OTHER; note = N1-methyl pseudouridine
  modified_base 3096: mod_base = OTHER; note = N1-methyl pseudouridine
  modified_base 3106: mod_base = OTHER; note = N1-methyl pseudouridine
  modified_base 3117: mod_base = OTHER; note = N1-methyl pseudouridine
  modified_base 3118: mod_base = OTHER; note = N1-methyl pseudouridine
  modified_base 3121: mod_base = OTHER; note = N1-methyl pseudouridine
  modified_base 3123: mod_base = OTHER; note = N1-methyl pseudouridine
  modified_base 3132: mod_base = OTHER; note = N1-methyl pseudouridine
  modified_base 3139: mod_base = OTHER; note = N1-methyl pseudouridine
  modified_base 3141: mod_base = OTHER; note = N1-methyl pseudouridine
  modified_base 3148: mod_base = OTHER; note = N1-methyl pseudouridine
  modified_base 3157: mod_base = OTHER; note = N1-methyl pseudouridine
  modified_base 3160: mod_base = OTHER; note = N1-methyl pseudouridine
  modified_base 3181: mod_base = OTHER; note = N1-methyl pseudouridine
  modified_base 3201: mod_base = OTHER; note = N1-methyl pseudouridine
  modified_base 3204: mod_base = OTHER; note = N1-methyl pseudouridine
  modified_base 3205: mod_base = OTHER; note = N1-methyl pseudouridine
  modified_base 3207: mod_base = OTHER; note = N1-methyl pseudouridine
  modified_base 3208: mod_base = OTHER; note = N1-methyl pseudouridine
  modified_base 3210: mod_base = OTHER; note = N1-methyl pseudouridine
  modified_base 3220: mod_base = OTHER; note = N1-methyl pseudouridine
  modified_base 3223: mod_base = OTHER; note = N1-methyl pseudouridine
  modified_base 3228: mod_base = OTHER; note = N1-methyl pseudouridine
  modified_base 3229: mod_base = OTHER; note = N1-methyl pseudouridine
  modified_base 3231: mod_base = OTHER; note = N1-methyl pseudouridine
  modified_base 3232: mod_base = OTHER; note = N1-methyl pseudouridine
  modified_base 3244: mod_base = OTHER; note = N1-methyl pseudouridine
  modified_base 3250: mod_base = OTHER; note = N1-methyl pseudouridine
  modified_base 3265: mod_base = OTHER; note = N1-methyl pseudouridine
  modified_base 3280: mod_base = OTHER; note = N1-methyl pseudouridine
  modified_base 3283: mod_base = OTHER; note = N1-methyl pseudouridine
  modified_base 3310: mod_base = OTHER; note = N1-methyl pseudouridine
  modified_base 3313: mod_base = OTHER; note = N1-methyl pseudouridine
  modified_base 3315: mod_base = OTHER; note = N1-methyl pseudouridine
  modified_base 3333: mod_base = OTHER; note = N1-methyl pseudouridine
  modified_base 3334: mod_base = OTHER; note = N1-methyl pseudouridine
  modified_base 3343: mod_base = OTHER; note = N1-methyl pseudouridine
  modified_base 3352: mod_base = OTHER; note = N1-methyl pseudouridine
  modified_base 3355: mod_base = OTHER; note = N1-methyl pseudouridine
  modified_base 3361: mod_base = OTHER; note = N1-methyl pseudouridine
  modified_base 3370: mod_base = OTHER; note = N1-methyl pseudouridine
  modified_base 3376: mod_base = OTHER; note = N1-methyl pseudouridine
  modified_base 3379: mod_base = OTHER; note = N1-methyl pseudouridine
  modified_base 3394: mod_base = OTHER; note = N1-methyl pseudouridine
  modified_base 3408: mod_base = OTHER; note = N1-methyl pseudouridine
  modified_base 3409: mod_base = OTHER; note = N1-methyl pseudouridine
  modified_base 3424: mod_base = OTHER; note = N1-methyl pseudouridine
  modified_base 3427: mod_base = OTHER; note = N1-methyl pseudouridine
  modified_base 3451: mod_base = OTHER; note = N1-methyl pseudouridine
  modified_base 3454: mod_base = OTHER; note = N1-methyl pseudouridine
  modified_base 3471: mod_base = OTHER; note = N1-methyl pseudouridine
  modified_base 3486: mod_base = OTHER; note = N1-methyl pseudouridine
  modified_base 3495: mod_base = OTHER; note = N1-methyl pseudouridine
  modified_base 3496: mod_base = OTHER; note = N1-methyl pseudouridine
  modified_base 3511: mod_base = OTHER; note = N1-methyl pseudouridine
  modified_base 3516: mod_base = OTHER; note = N1-methyl pseudouridine
  modified_base 3523: mod_base = OTHER; note = N1-methyl pseudouridine
  modified_base 3526: mod_base = OTHER; note = N1-methyl pseudouridine
  modified_base 3529: mod_base = OTHER; note = N1-methyl pseudouridine
  modified_base 3532: mod_base = OTHER; note = N1-methyl pseudouridine
  modified_base 3541: mod_base = OTHER; note = N1-methyl pseudouridine
  modified_base 3565: mod_base = OTHER; note = N1-methyl pseudouridine
  modified_base 3574: mod_base = OTHER; note = N1-methyl pseudouridine
  modified_base 3583: mod_base = OTHER; note = N1-methyl pseudouridine
  modified_base 3586: mod_base = OTHER; note = N1-methyl pseudouridine
  modified_base 3592: mod_base = OTHER; note = N1-methyl pseudouridine
  modified_base 3598: mod_base = OTHER; note = N1-methyl pseudouridine
  modified_base 3601: mod_base = OTHER; note = N1-methyl pseudouridine
  modified_base 3615: mod_base = OTHER; note = N1-methyl pseudouridine
  modified_base 3616: mod_base = OTHER; note = N1-methyl pseudouridine
  modified_base 3631: mod_base = OTHER; note = N1-methyl pseudouridine
  modified_base 3636: mod_base = OTHER; note = N1-methyl pseudouridine
  modified_base 3637: mod_base = OTHER; note = N1-methyl pseudouridine
  modified_base 3640: mod_base = OTHER; note = N1-methyl pseudouridine
  modified_base 3654: mod_base = OTHER; note = N1-methyl pseudouridine
  modified_base 3664: mod_base = OTHER; note = N1-methyl pseudouridine
  modified_base 3676: mod_base = OTHER; note = N1-methyl pseudouridine
  modified_base 3679: mod_base = OTHER; note = N1-methyl pseudouridine
  modified_base 3682: mod_base = OTHER; note = N1-methyl pseudouridine
  modified_base 3688: mod_base = OTHER; note = N1-methyl pseudouridine
  modified_base 3696: mod_base = OTHER; note = N1-methyl pseudouridine
  modified_base 3703: mod_base = OTHER; note = N1-methyl pseudouridine
  modified_base 3705: mod_base = OTHER; note = N1-methyl pseudouridine
  modified_base 3706: mod_base = OTHER; note = N1-methyl pseudouridine
  modified_base 3712: mod_base = OTHER; note = N1-methyl pseudouridine
  modified_base 3733: mod_base = OTHER; note = N1-methyl pseudouridine
  modified_base 3736: mod_base = OTHER; note = N1-methyl pseudouridine
  modified_base 3754: mod_base = OTHER; note = N1-methyl pseudouridine
  modified_base 3772: mod_base = OTHER; note = N1-methyl pseudouridine
  modified_base 3778: mod_base = OTHER; note = N1-methyl pseudouridine
  modified_base 3789: mod_base = OTHER; note = N1-methyl pseudouridine
  modified_base 3793: mod_base = OTHER; note = N1-methyl pseudouridine
  modified_base 3798: mod_base = OTHER; note = N1-methyl pseudouridine
  modified_base 3799: mod_base = OTHER; note = N1-methyl pseudouridine
  modified_base 3802: mod_base = OTHER; note = N1-methyl pseudouridine
  modified_base 3804: mod_base = OTHER; note = N1-methyl pseudouridine
  modified_base 3808: mod_base = OTHER; note = N1-methyl pseudouridine
  modified_base 3819: mod_base = OTHER; note = N1-methyl pseudouridine
  modified_base 3829: mod_base = OTHER; note = N1-methyl pseudouridine
  modified_base 3865: mod_base = OTHER; note = N1-methyl pseudouridine
  modified_base 3867: mod_base = OTHER; note = N1-methyl pseudouridine
  modified_base 3868: mod_base = OTHER; note = N1-methyl pseudouridine
  modified_base 3871: mod_base = OTHER; note = N1-methyl pseudouridine
  modified_base 3888: mod_base = OTHER; note = N1-methyl pseudouridine
  modified_base 3892: mod_base = OTHER; note = N1-methyl pseudouridine
  modified_base 3901: mod_base = OTHER; note = N1-methyl pseudouridine
  modified_base 3904: mod_base = OTHER; note = N1-methyl pseudouridine
  modified_base 3913: mod_base = OTHER; note = N1-methyl pseudouridine
  modified_base 3921: mod_base = OTHER; note = N1-methyl pseudouridine
  modified_base 3922: mod_base = OTHER; note = N1-methyl pseudouridine
  modified_base 3934: mod_base = OTHER; note = N1-methyl pseudouridine
  modified_base 3937: mod_base = OTHER; note = N1-methyl pseudouridine
  modified_base 3940: mod_base = OTHER; note = N1-methyl pseudouridine
  modified_base 3955: mod_base = OTHER; note = N1-methyl pseudouridine
  modified_base 3964: mod_base = OTHER; note = N1-methyl pseudouridine
  modified_base 3967: mod_base = OTHER; note = N1-methyl pseudouridine
  modified_base 3975: mod_base = OTHER; note = N1-methyl pseudouridine
  modified_base 4000: mod_base = OTHER; note = N1-methyl pseudouridine
  modified_base 4021: mod_base = OTHER; note = N1-methyl pseudouridine
  modified_base 4024: mod_base = OTHER; note = N1-methyl pseudouridine
  modified_base 4030: mod_base = OTHER; note = N1-methyl pseudouridine
  modified_base 4032: mod_base = OTHER; note = N1-methyl pseudouridine
  modified_base 4033: mod_base = OTHER; note = N1-methyl pseudouridine
  modified_base 4039: mod_base = OTHER; note = N1-methyl pseudouridine
  modified_base 4048: mod_base = OTHER; note = N1-methyl pseudouridine
  modified_base 4065: mod_base = OTHER; note = N1-methyl pseudouridine
  modified_base 4066: mod_base = OTHER; note = N1-methyl pseudouridine
  modified_base 4071: mod_base = OTHER; note = N1-methyl pseudouridine
  modified_base 4074: mod_base = OTHER; note = N1-methyl pseudouridine
  modified_base 4075: mod_base = OTHER; note = N1-methyl pseudouridine
  modified_base 4087: mod_base = OTHER; note = N1-methyl pseudouridine
  modified_base 4101: mod_base = OTHER; note = N1-methyl pseudouridine
  modified_base 4120: mod_base = OTHER; note = N1-methyl pseudouridine
  modified_base 4123: mod_base = OTHER; note = N1-methyl pseudouridine
  modified_base 4135: mod_base = OTHER; note = N1-methyl pseudouridine
  modified_base 4138: mod_base = OTHER; note = N1-methyl pseudouridine
  modified_base 4150: mod_base = OTHER; note = N1-methyl pseudouridine
  modified_base 4159: mod_base = OTHER; note = N1-methyl pseudouridine
  modified_base 4161: mod_base = OTHER; note = N1-methyl pseudouridine
  modified_base 4174: mod_base = OTHER; note = N1-methyl pseudouridine
  modified_base 4180: mod_base = OTHER; note = N1-methyl pseudouridine
  modified_base 4189: mod_base = OTHER; note = N1-methyl pseudouridine
  modified_base 4257: mod_base = OTHER; note = N1-methyl pseudouridine
  modified_base 4260: mod_base = OTHER; note = N1-methyl pseudouridine
  modified_base 4263: mod_base = OTHER; note = N1-methyl pseudouridine
  modified_base 4274: mod_base = OTHER; note = N1-methyl pseudouridine
  modified_base 4275: mod_base = OTHER; note = N1-methyl pseudouridine
  modified_base 4278: mod_base = OTHER; note = N1-methyl pseudouridine
  modified_base 4279: mod_base = OTHER; note = N1-methyl pseudouridine
  modified_base 4284: mod_base = OTHER; note = N1-methyl pseudouridine
  modified_base 4288: mod_base = OTHER; note = N1-methyl pseudouridine
  modified_base 4289: mod_base = OTHER; note = N1-methyl pseudouridine
  modified_base 4291: mod_base = OTHER; note = N1-methyl pseudouridine
  modified_base 4299: mod_base = OTHER; note = N1-methyl pseudouridine
  modified_base 4300: mod_base = OTHER; note = N1-methyl pseudouridine
  modified_base 4304: mod_base = OTHER; note = N1-methyl pseudouridine
  modified_base 4305: mod_base = OTHER; note = N1-methyl pseudouridine
  modified_base 4307: mod_base = OTHER; note = N1-methyl pseudouridine
  modified_base 4313: mod_base = OTHER; note = N1-methyl pseudouridine
  modified_base 4318: mod_base = OTHER; note = N1-methyl pseudouridine
  modified_base 4319: mod_base = OTHER; note = N1-methyl pseudouridine
  modified_base 4321: mod_base = OTHER; note = N1-methyl pseudouridine
  modified_base 4322: mod_base = OTHER; note = N1-methyl pseudouridine
  modified_base 4324: mod_base = OTHER; note = N1-methyl pseudouridine
  modified_base 4326: mod_base = OTHER; note = N1-methyl pseudouridine
  modified_base 4330: mod_base = OTHER; note = N1-methyl pseudouridine
  modified_base 4331: mod_base = OTHER; note = N1-methyl pseudouridine
  modified_base 4337: mod_base = OTHER; note = N1-methyl pseudouridine
  modified_base 4339: mod_base = OTHER; note = N1-methyl pseudouridine
  modified_base 4343: mod_base = OTHER; note = N1-methyl pseudouridine
  modified_base 4345: mod_base = OTHER; note = N1-methyl pseudouridine
  modified_base 4346: mod_base = OTHER; note = N1-methyl pseudouridine
  modified_base 4349: mod_base = OTHER; note = N1-methyl pseudouridine
  modified_base 4351: mod_base = OTHER; note = N1-methyl pseudouridine
  modified_base 4352: mod_base = OTHER; note = N1-methyl pseudouridine
  modified_base 4353: mod_base = OTHER; note = N1-methyl pseudouridine
  modified_base 4357: mod_base = OTHER; note = N1-methyl pseudouridine
  modified_base 4364: mod_base = OTHER; note = N1-methyl pseudouridine
  modified_base 4368: mod_base = OTHER; note = N1-methyl pseudouridine
  modified_base 4375: mod_base = OTHER; note = N1-methyl pseudouridine
  modified_base 4377: mod_base = OTHER; note = N1-methyl pseudouridine
aggaaataagagagaaaagaagagtaagaagaaatataagagccaccatggcccccaagaagaagcggaaggtgggcatccacggcgtgcccgccgccgacaagaagtacagcatcggcctggacatcggcaccaacagcgtgggctgggccgtgatcaccgacgagtacaaggtgcccagcaagaagttcaaggtgctgggcaacaccgaccggcacagcatcaagaagaacctgatcggcgccctgctgttcgacagcggcgagacggccgaggccacccggctgaagcggaccgcccggcggcggtacacccggcggaagaaccggatctgctacctgcaggagatcttcagcaacgagatggccaaggtggacgacagcttcttccaccggctggaggagagcttcctggtggaggaggacaagaagcacgagcggcaccccatcttcggcaacatcgtggacgaggtggcctaccacgagaagtaccccaccatctaccacctgcggaagaagctggtggacagcaccgacaaggccgacctgcggctgatctacctggccctggcccacatgatcaagttccggggccacttcctgatcgagggcgacctgaaccccgacaacagcgacgtggacaagctgttcatccagctggtgcagacctacaaccagctgttcgaggagaaccccatcaacgccagcggcgtggacgccaaggccatcctgagcgcccggctgagcaagagccggcggctggagaacctgatcgcccagctgcccggcgagaagaagaacggcctgttcggcaacctgatcgccctgagcctgggcctgacccccaacttcaagagcaacttcgacctggccgaggacgccaagctgcagctgagcaaggacacctacgacgacgacctggacaacctgctggcccagatcggcgaccagtacgccgacctgttcctggccgccaagaacctgagcgacgccatcctgctgagcgacatcctgcgggtgaacaccgagatcaccaaggcccccctgagcgccagcatgatcaagcggtacgacgagcaccaccaggacctgaccctgctgaaggccctggtgcggcagcagctgcccgagaagtacaaggagatcttcttcgaccagagcaagaacggctacgccggctacatcgacggcggcgccagccaggaggagttctacaagttcatcaagcccatcctggagaagatggacggcaccgaggagctgctggtgaagctgaaccgggaggacctgctgcggaagcagcggaccttcgacaacggcagcatcccccaccagatccacctgggcgagctgcacgccatcctgcggcggcaggaggacttctaccccttcctgaaggacaaccgggagaagatcgagaagatcctgaccttccggatcccctactacgtgggccccctggcccggggcaacagccggttcgcctggatgacccgcaagagcgaggagacgatcaccccctggaacttcgaggaggtggtggacaagggcgccagcgcccagagcttcatcgagcggatgaccaacttcgacaagaacctgcccaacgagaaggtgctgcccaagcacagcctgctgtacgagtacttcaccgtgtacaacgagctgaccaaggtgaagtacgtgaccgagggcatgcggaagcccgccttcctgagcggcgagcagaagaaggccatcgtggacctgctgttcaagaccaaccggaaggtgaccgtgaagcagctgaaggaggactacttcaagaagatcgagtgcttcgacagcgtggagatcagcggcgtggaggaccggttcaacgccagcctgggcacctaccacgacctgctgaagatcatcaaggacaaggacttcctggacaacgaggagaacgaggacatcctggaggacatcgtgctgaccctgaccctgttcgaggaccgggagatgatcgaggagcggctgaagacctacgcccacctgttcgacgacaaggtgatgaagcagctgaagcggcggcggtacaccggctggggccggctgagccggaagctgatcaacggcatccgggacaagcagagcggcaagaccatcctggacttcctcaagagcgacggcttcgccaaccggaacttcatgcagctgatccacgacgacagcctgaccttcaaggaggacatccagaaggcccaggtgagcggccagggcgacagcctgcacgagcacatcgccaacctggccggcagccccgccatcaagaagggcatcctgcagaccgtgaaggtggtggacgagctggtgaaggtgatgggccggcacaagcccgagaacatcgtgatcgagatggcccgggagaaccagaccacccagaagggccagaagaacagccgggagcggatgaagcggatcgaggagggcatcaaggagctgggcagccagatcctgaaggagcaccccgtggagaacacccagctgcagaacgagaagctgtacctgtactacctgcagaacggccgggacatgtacgtggaccaggagctggacatcaaccggctgagcgactacgacgtggaccacatcgtgccccagagcttcctgaaggacgacagcatcgacaacaaggtgctgacccggagcgacaagaaccggggcaagagcgacaacgtgcccagcgaggaggtggtgaagaagatgaagaactactggcggcagctgctgaacgccaagctgatcacccagcggaagttcgacaacctgaccaaggccgagcggggcggcctgagcgagctggacaaggccggcttcatcaagcggcagctggtggagacgcggcagatcaccaagcacgtggcccagatcctggacagccggatgaacaccaagtacgacgagaacgacaagctgatccgggaggtgaaggtgatcaccctcaagagcaagctggtgagcgacttccggaaggacttccagttctacaaggtgcgggagatcaacaactaccaccacgcccacgacgcctacctgaacgccgtggtgggcaccgccctgatcaagaagtaccccaagctggagagcgagttcgtgtacggcgactacaaggtgtacgacgtgcggaagatgatcgccaagagcgagcaggagatcggcaaggccaccgccaagtacttcttctacagcaacatcatgaacttcttcaagaccgagatcaccctggccaacggcgagatccggaagcggcccctgatcgagacgaacggcgagacgggcgagatcgtgtgggacaagggccgggacttcgccaccgtgcggaaggtgctgagcatgccccaggtgaacatcgtgaagaagaccgaggtgcagaccggcggcttcagcaaggagagcatcctgcccaagcggaacagcgacaagctgatcgcccggaagaaggactgggaccccaagaagtacggcggcttcgacagccccaccgtggcctacagcgtgctggtggtggccaaggtggagaagggcaagagcaagaagctcaagagcgtgaaggagctgctgggcatcaccatcatggagcggagcagcttcgagaagaaccccatcgacttcctggaggccaagggctacaaggaggtgaagaaggacctgatcatcaagctgcccaagtacagcctgttcgagctggagaacggccggaagcggatgctggccagcgccggcgagctgcagaagggcaacgagctggccctgcccagcaagtacgtgaacttcctgtacctggccagccactacgagaagctgaagggcagccccgaggacaacgagcagaagcagctgttcgtggagcagcacaagcactacctggacgagatcatcgagcagatcagcgagttcagcaagcgggtgatcctggccgacgccaacctggacaaggtgctgagcgcctacaacaagcaccgggacaagcccatccgggagcaggccgagaacatcatccacctgttcaccctgaccaacctgggcgcccccgccgccttcaagtacttcgacaccaccatcgaccggaagcggtacaccagcaccaaggaggtgctggacgccaccctgatccaccagagcatcaccggcctgtacgagacgcggatcgacctgagccagctgggcggcgacagcggcggcaagcggcccgccgccaccaagaaggccggccaggccaagaagaagaagtaatgataggcggccgcttaattaagctgccttctgcggggcttgccttctggccatgcccttcttctctcccttgcacctgtacctcttggtctttgaataaagcctgagtaggaagtctaga

SEQ ID NO: 2187 - RNA, 4218 nt, synthetic construct
  source 1..4218: mol_type = other RNA
  modified_base 2: mod_base = OTHER; note = N1-methyl pseudouridine
  modified_base 26: mod_base = OTHER; note = N1-methyl pseudouridine
  modified_base 32: mod_base = OTHER; note = N1-methyl pseudouridine
  modified_base 41: mod_base = OTHER; note = N1-methyl pseudouridine
  modified_base 61: mod_base = OTHER; note = N1-methyl pseudouridine
  modified_base 68: mod_base = OTHER; note = N1-methyl pseudouridine
  modified_base 74: mod_base = OTHER; note = N1-methyl pseudouridine
  modified_base 80: mod_base = OTHER; note = N1-methyl pseudouridine
  modified_base 95: mod_base = OTHER; note = N1-methyl pseudouridine
  modified_base 100: mod_base = OTHER; note = N1-methyl pseudouridine
  modified_base 107: mod_base = OTHER; note = N1-methyl pseudouridine
  modified_base 110: mod_base = OTHER; note = N1-methyl pseudouridine
  modified_base 121: mod_base = OTHER; note = N1-methyl pseudouridine
  modified_base 128: mod_base = OTHER; note = N1-methyl pseudouridine
  modified_base 142: mod_base = OTHER; note = N1-methyl pseudouridine
  modified_base 143: mod_base = OTHER; note = N1-methyl pseudouridine
  modified_base 149: mod_base = OTHER; note = N1-methyl pseudouridine
  modified_base 152: mod_base = OTHER; note = N1-methyl pseudouridine
  modified_base 176: mod_base = OTHER; note = N1-methyl pseudouridine
  modified_base 188: mod_base = OTHER; note = N1-methyl pseudouridine
  modified_base 191: mod_base = OTHER; note = N1-methyl pseudouridine
  modified_base 200: mod_base = OTHER; note = N1-methyl pseudouridine
  modified_base 203: mod_base = OTHER; note = N1-methyl pseudouridine
  modified_base 205: mod_base = OTHER; note = N1-methyl pseudouridine
  modified_base 206: mod_base = OTHER; note = N1-methyl pseudouridine
  modified_base 239: mod_base = OTHER; note = N1-methyl pseudouridine
  modified_base 262: mod_base = OTHER; note = N1-methyl pseudouridine
  modified_base 284: mod_base = OTHER; note = N1-methyl pseudouridine
  modified_base 286: mod_base = OTHER; note = N1-methyl pseudouridine
  modified_base 289: mod_base = OTHER; note = N1-methyl pseudouridine
  modified_base 293: mod_base = OTHER; note = N1-methyl pseudouridine
  modified_base 302: mod_base = OTHER; note = N1-methyl pseudouridine
  modified_base 304: mod_base = OTHER; note = N1-methyl pseudouridine
  modified_base 305: mod_base = OTHER; note = N1-methyl pseudouridine
  modified_base 317: mod_base = OTHER; note = N1-methyl pseudouridine
  modified_base 326: mod_base = OTHER; note = N1-methyl pseudouridine
  modified_base 337: mod_base = OTHER; note = N1-methyl pseudouridine
  modified_base 338: mod_base = OTHER; note = N1-methyl pseudouridine
  modified_base 340: mod_base = OTHER; note = N1-methyl pseudouridine
  modified_base 341: mod_base = OTHER; note = N1-methyl pseudouridine
  modified_base 350: mod_base = OTHER; note = N1-methyl pseudouridine
  modified_base 361: mod_base = OTHER; note = N1-methyl pseudouridine
  modified_base 362: mod_base = OTHER; note = N1-methyl pseudouridine
  modified_base 365: mod_base = OTHER; note = N1-methyl pseudouridine
  modified_base 368: mod_base = OTHER; note = N1-methyl pseudouridine
  modified_base 401: mod_base = OTHER; note = N1-methyl pseudouridine
  modified_base 403: mod_base = OTHER; note = N1-methyl pseudouridine
  modified_base 404: mod_base = OTHER; note = N1-methyl pseudouridine
  modified_base 413: mod_base = OTHER; note = N1-methyl pseudouridine
  modified_base 416: mod_base = OTHER; note = N1-methyl pseudouridine
  modified_base 425: mod_base = OTHER; note = N1-methyl pseudouridine
  modified_base 430: mod_base = OTHER; note = N1-methyl pseudouridine
  modified_base 442: mod_base = OTHER; note = N1-methyl pseudouridine
  modified_base 452: mod_base = OTHER; note = N1-methyl pseudouridine
  modified_base 454: mod_base = OTHER; note = N1-methyl pseudouridine
  modified_base 461: mod_base = OTHER; note = N1-methyl pseudouridine
  modified_base 473: mod_base = OTHER; note = N1-methyl pseudouridine
  modified_base 476: mod_base = OTHER; note = N1-methyl pseudouridine
  modified_base 500: mod_base = OTHER; note = N1-methyl pseudouridine
  modified_base 506: mod_base = OTHER; note = N1-methyl pseudouridine
  modified_base 509: mod_base = OTHER; note = N1-methyl pseudouridine
  modified_base 511: mod_base = OTHER; note = N1-methyl pseudouridine
  modified_base 515: mod_base = OTHER; note = N1-methyl pseudouridine
  modified_base 521: mod_base = OTHER; note = N1-methyl pseudouridine
  modified_base 530: mod_base = OTHER; note = N1-methyl pseudouridine
  modified_base 533: mod_base = OTHER; note = N1-methyl pseudouridine
  modified_base 538: mod_base = OTHER; note = N1-methyl pseudouridine
  modified_base 539: mod_base = OTHER; note = N1-methyl pseudouridine
  modified_base 550: mod_base = OTHER; note = N1-methyl pseudouridine
  modified_base 551: mod_base = OTHER; note = N1-methyl pseudouridine
  modified_base 554: mod_base = OTHER; note = N1-methyl pseudouridine
  modified_base 557: mod_base = OTHER; note = N1-methyl pseudouridine
  modified_base 569: mod_base = OTHER; note = N1-methyl pseudouridine
  modified_base 590: mod_base = OTHER; note = N1-methyl pseudouridine
  modified_base 599: mod_base = OTHER; note = N1-methyl pseudouridine
  modified_base 601: mod_base = OTHER; note = N1-methyl pseudouridine
  modified_base 602: mod_base = OTHER; note = N1-methyl pseudouridine
  modified_base 605: mod_base = OTHER; note = N1-methyl pseudouridine
  modified_base 611: mod_base = OTHER; note = N1-methyl pseudouridine
  modified_base 614: mod_base = OTHER; note = N1-methyl pseudouridine
  modified_base 622: mod_base = OTHER; note = N1-methyl pseudouridine
  modified_base 632: mod_base = OTHER; note = N1-methyl pseudouridine
  modified_base 634: mod_base = OTHER; note = N1-methyl pseudouridine
  modified_base 635: mod_base = OTHER; note = N1-methyl pseudouridine
  modified_base 650: mod_base = OTHER; note = N1-methyl pseudouridine
  modified_base 665: mod_base = OTHER; note = N1-methyl pseudouridine
  modified_base 680: mod_base = OTHER; note = N1-methyl pseudouridine
  modified_base 683: mod_base = OTHER; note = N1-methyl pseudouridine
  modified_base 695: mod_base = OTHER; note = N1-methyl pseudouridine
  modified_base 713: mod_base = OTHER; note = N1-methyl pseudouridine
  modified_base 722: mod_base = OTHER; note = N1-methyl pseudouridine
  modified_base 725: mod_base = OTHER; note = N1-methyl pseudouridine
  modified_base 734: mod_base = OTHER; note = N1-methyl pseudouridine
  modified_base 758: mod_base = OTHER; note = N1-methyl pseudouridine
  modified_base 760: mod_base = OTHER; note = N1-methyl pseudouridine
  modified_base 761: mod_base = OTHER; note = N1-methyl pseudouridine
  modified_base 770: mod_base = OTHER; note = N1-methyl pseudouridine
  modified_base 773: mod_base = OTHER; note = N1-methyl pseudouridine
  modified_base 779: mod_base = OTHER; note = N1-methyl pseudouridine
  modified_base 785: mod_base = OTHER; note = N1-methyl pseudouridine
  modified_base 791: mod_base = OTHER; note = N1-methyl pseudouridine
  modified_base 802: mod_base = OTHER; note = N1-methyl pseudouridine
  modified_base 803: mod_base = OTHER; note = N1-methyl pseudouridine
  modified_base 814: mod_base = OTHER; note = N1-methyl pseudouridine
  modified_base 815: mod_base = OTHER; note = N1-methyl pseudouridine
  modified_base 821: mod_base = OTHER; note = N1-methyl pseudouridine
  modified_base 839: mod_base = OTHER; note = N1-methyl pseudouridine
  modified_base 845: mod_base = OTHER; note = N1-methyl pseudouridine
  modified_base 859: mod_base = OTHER; note = N1-methyl pseudouridine
  modified_base 872: mod_base = OTHER; note = N1-methyl pseudouridine
  modified_base 881: mod_base = OTHER; note = N1-methyl pseudouridine
  modified_base 884: mod_base = OTHER; note = N1-methyl pseudouridine
  modified_base 893: mod_base = OTHER; note = N1-methyl pseudouridine
  modified_base 904: mod_base = OTHER; note = N1-methyl pseudouridine
  modified_base 914: mod_base = OTHER; note = N1-methyl pseudouridine
  modified_base 916: mod_base = OTHER; note = N1-methyl pseudouridine
  modified_base 917: mod_base = OTHER; note = N1-methyl pseudouridine
  modified_base 920: mod_base = OTHER; note = N1-methyl pseudouridine
  modified_base 935: mod_base = OTHER; note = N1-methyl pseudouridine
  modified_base 947: mod_base = OTHER; note = N1-methyl pseudouridine
  modified_base 950: mod_base = OTHER; note = N1-methyl pseudouridine
  modified_base 953: mod_base = OTHER; note = N1-methyl pseudouridine
  modified_base 962: mod_base = OTHER; note = N1-methyl pseudouridine
  modified_base 965: mod_base = OTHER; note = N1-methyl pseudouridine
  modified_base 971: mod_base = OTHER; note = N1-methyl pseudouridine
  modified_base 983: mod_base = OTHER; note = N1-methyl pseudouridine
  modified_base 998: mod_base = OTHER; note = N1-methyl pseudouridine
  modified_base 1010: mod_base = OTHER; note = N1-methyl pseudouridine
  modified_base 1013: mod_base = OTHER; note = N1-methyl pseudouridine
  modified_base 1021: mod_base = OTHER; note = N1-methyl pseudouridine
  modified_base 1043: mod_base = OTHER; note = N1-methyl pseudouridine
  modified_base 1049: mod_base = OTHER; note = N1-methyl pseudouridine
  modified_base 1052: mod_base = OTHER; note = N1-methyl pseudouridine
  modified_base 1061: mod_base = OTHER; note = N1-methyl pseudouridine
  modified_base 1064: mod_base = OTHER; note = N1-methyl pseudouridine
  modified_base 1076: mod_base = OTHER; note = N1-methyl pseudouridine
  modified_base 1087: mod_base = OTHER; note = N1-methyl pseudouridine
  modified_base 1097: mod_base = OTHER; note = N1-methyl pseudouridine
  modified_base 1099: mod_base = OTHER; note = N1-methyl pseudouridine
  modified_base 1100: mod_base = OTHER; note = N1-methyl pseudouridine
  modified_base 1102: mod_base = OTHER; note = N1-methyl pseudouridine
  modified_base 1103: mod_base = OTHER; note = N1-methyl pseudouridine
  modified_base 1123: mod_base = OTHER; note = N1-methyl pseudouridine
  modified_base 1132: mod_base = OTHER; note = N1-methyl pseudouridine
  modified_base 1136: mod_base = OTHER; note = N1-methyl pseudouridine
  modified_base 1162: mod_base = OTHER; note = N1-methyl pseudouridine
  modified_base 1163: mod_base = OTHER; note = N1-methyl pseudouridine
  modified_base 1165: mod_base = OTHER; note = N1-methyl pseudouridine
  modified_base 1171: mod_base = OTHER; note = N1-methyl pseudouridine
  modified_base 1172: mod_base = OTHER; note = N1-methyl pseudouridine
  modified_base 1175: mod_base = OTHER; note = N1-methyl pseudouridine
  modified_base 1184: mod_base = OTHER; note = N1-methyl pseudouridine
  modified_base 1187: mod_base = OTHER; note = N1-methyl pseudouridine
  modified_base 1196: mod_base = OTHER; note = N1-methyl pseudouridine
  modified_base 1214: mod_base = OTHER; note = N1-methyl pseudouridine
  modified_base 1217: mod_base = OTHER; note = N1-methyl pseudouridine
  modified_base 1220: mod_base = OTHER; note = N1-methyl pseudouridine
  modified_base 1226: mod_base = OTHER; note = N1-methyl pseudouridine
  modified_base 1241: mod_base = OTHER; note = N1-methyl pseudouridine
  modified_base 1244: mod_base = OTHER; note = N1-methyl pseudouridine
  modified_base 1261: mod_base = OTHER; note = N1-methyl pseudouridine
  modified_base 1262: mod_base = OTHER; note = N1-methyl pseudouridine
  modified_base 1277: mod_base = OTHER; note = N1-methyl pseudouridine
  modified_base 1289: mod_base = OTHER; note = N1-methyl pseudouridine
  modified_base 1295: mod_base = OTHER; note = N1-methyl pseudouridine
  modified_base 1304: mod_base = OTHER; note = N1-methyl pseudouridine
  modified_base 1313: mod_base = OTHER; note = N1-methyl pseudouridine
  modified_base 1316: mod_base = OTHER; note = N1-methyl pseudouridine
  modified_base 1333: mod_base = OTHER; note = N1-methyl pseudouridine
  modified_base 1334: mod_base = OTHER; note = N1-methyl pseudouridine
  modified_base 1336: mod_base = OTHER; note = N1-methyl pseudouridine
  modified_base 1342: mod_base = OTHER; note = N1-methyl pseudouridine
  modified_base 1343: mod_base = OTHER; note = N1-methyl pseudouridine
  modified_base 1346: mod_base = OTHER; note = N1-methyl pseudouridine
  modified_base 1367: mod_base = OTHER; note = N1-methyl pseudouridine
  modified_base 1376: mod_base = OTHER; note = N1-methyl pseudouridine
  modified_base 1379: mod_base = OTHER; note = N1-methyl pseudouridine
  modified_base 1384: mod_base = OTHER; note = N1-methyl pseudouridine
  modified_base 1385: mod_base = OTHER; note = N1-methyl pseudouridine
  modified_base 1391: mod_base = OTHER; note = N1-methyl pseudouridine
  modified_base 1396: mod_base = OTHER; note = N1-methyl pseudouridine
  modified_base 1399: mod_base = OTHER; note = N1-methyl pseudouridine
  modified_base 1403: mod_base = OTHER; note = N1-methyl pseudouridine
  modified_base 1412: mod_base = OTHER; note = N1-methyl pseudouridine
  modified_base 1432: mod_base = OTHER; note = N1-methyl pseudouridine
  modified_base 1433: mod_base = OTHER; note = N1-methyl pseudouridine
  modified_base 1438: mod_base = OTHER; note = N1-methyl pseudouridine
  modified_base 1442: mod_base = OTHER; note = N1-methyl pseudouridine
  modified_base 1466: mod_base = OTHER; note = N1-methyl pseudouridine
  modified_base 1474: mod_base = OTHER; note = N1-methyl pseudouridine
  modified_base 1480: mod_base = OTHER; note = N1-methyl pseudouridine
  modified_base 1481: mod_base = OTHER; note = N1-methyl pseudouridine
  modified_base 1490: mod_base = OTHER; note = N1-methyl pseudouridine
  modified_base 1493: mod_base = OTHER; note = N1-methyl pseudouridine
  modified_base 1519: mod_base = OTHER; note = N1-methyl pseudouridine
  modified_base 1520: mod_base = OTHER; note = N1-methyl pseudouridine
  modified_base 1523: mod_base = OTHER; note = N1-methyl pseudouridine
  modified_base 1532: mod_base = OTHER; note = N1-methyl pseudouridine
  modified_base 1540: mod_base = OTHER; note = N1-methyl pseudouridine
  modified_base 1541: mod_base = OTHER; note = N1-methyl pseudouridine
  modified_base 1553: mod_base = OTHER; note = N1-methyl pseudouridine
  modified_base 1568: mod_base = OTHER; note = N1-methyl pseudouridine
  modified_base 1571: mod_base = OTHER; note = N1-methyl pseudouridine
  modified_base 1586: mod_base = OTHER; note = N1-methyl pseudouridine
  modified_base 1589: mod_base = OTHER; note = N1-methyl pseudouridine
  modified_base 1591: mod_base = OTHER; note = N1-methyl pseudouridine
  modified_base 1597: mod_base = OTHER; note = N1-methyl pseudouridine
  modified_base 1600: mod_base = OTHER; note = N1-methyl pseudouridine
  modified_base 1601: mod_base = OTHER; note = N1-methyl pseudouridine
  modified_base 1607: mod_base = OTHER; note = N1-methyl pseudouridine
  modified_base 1609: mod_base = OTHER; note = N1-methyl pseudouridine
  modified_base 1619: mod_base = OTHER; note = N1-methyl pseudouridine
  modified_base 1628: mod_base = OTHER; note = N1-methyl pseudouridine
  modified_base 1633: mod_base = OTHER; note = N1-methyl pseudouridine
  modified_base 1637: mod_base = OTHER; note = N1-methyl pseudouridine
  modified_base 1649: mod_base = OTHER; note = N1-methyl pseudouridine
  modified_base 1663: mod_base = OTHER; note = N1-methyl pseudouridine
  modified_base 1664: mod_base = OTHER; note = N1-methyl pseudouridine
  modified_base 1667: mod_base = OTHER; note = N1-methyl pseudouridine
  modified_base 1691: mod_base = OTHER; note = N1-methyl pseudouridine
  modified_base 1694: mod_base = OTHER; note = N1-methyl pseudouridine
  modified_base 1700: mod_base = OTHER; note = N1-methyl pseudouridine
  modified_base 1703: mod_base = OTHER; note = N1-methyl pseudouridine
  modified_base 1705: mod_base = OTHER; note = N1-methyl pseudouridine
  modified_base 1706: mod_base = OTHER; note = N1-methyl pseudouridine
  modified_base 1724: mod_base = OTHER; note = N1-methyl pseudouridine
  modified_base 1730: mod_base = OTHER; note = N1-methyl pseudouridine
  modified_base 1739: mod_base = OTHER; note = N1-methyl pseudouridine
  modified_base 1750: mod_base = OTHER; note = N1-methyl pseudouridine
  modified_base 1753: mod_base = OTHER; note = N1-methyl pseudouridine
  modified_base 1754: mod_base = OTHER; note = N1-methyl pseudouridine
  modified_base 1763: mod_base = OTHER; note = N1-methyl pseudouridine
  modified_base 1768: mod_base = OTHER; note = N1-methyl pseudouridine
  modified_base 1771: mod_base = OTHER; note = N1-methyl pseudouridine
  modified_base 1772: mod_base = OTHER; note = N1-methyl pseudouridine
  modified_base 1781: mod_base = OTHER; note = N1-methyl pseudouridine
  modified_base 1787: mod_base = OTHER; note = N1-methyl pseudouridine
  modified_base 1796: mod_base = OTHER; note = N1-methyl pseudouridine
  modified_base 1807: mod_base = OTHER; note = N1-methyl pseudouridine
  modified_base 1808: mod_base = OTHER; note = N1-methyl pseudouridine
  modified_base 1820: mod_base = OTHER; note = N1-methyl pseudouridine
  modified_base 1828: mod_base = OTHER; note = N1-methyl pseudouridine
  modified_base 1838: mod_base = OTHER; note = N1-methyl pseudouridine
  modified_base 1841: mod_base = OTHER; note = N1-methyl pseudouridine
  modified_base 1847: mod_base = OTHER; note = N1-methyl pseudouridine
  modified_base 1850: mod_base = OTHER; note = N1-methyl pseudouridine
  modified_base 1864: mod_base = OTHER; note = N1-methyl pseudouridine
  modified_base 1865: mod_base = OTHER; note = N1-methyl pseudouridine
  modified_base 1868: mod_base = OTHER; note = N1-methyl pseudouridine
  modified_base 1892: mod_base = OTHER; note = N1-methyl pseudouridine
  modified_base 1895: mod_base = OTHER; note = N1-methyl pseudouridine
  modified_base 1904: mod_base = OTHER; note = N1-methyl pseudouridine
  modified_base 1907: mod_base = OTHER; note = N1-methyl pseudouridine
  modified_base 1910: mod_base = OTHER; note = N1-methyl pseudouridine
  modified_base 1916: mod_base = OTHER; note = N1-methyl pseudouridine
  modified_base 1922: mod_base = OTHER; note = N1-methyl pseudouridine
  modified_base 1924: mod_base = OTHER; note = N1-methyl pseudouridine
  modified_base 1925: mod_base = OTHER; note = N1-methyl pseudouridine
  modified_base 1940: mod_base = OTHER; note = N1-methyl pseudouridine
  modified_base 1943: mod_base = OTHER; note = N1-methyl pseudouridine
  modified_base 1955: mod_base = OTHER; note = N1-methyl pseudouridine
  modified_base 1963: mod_base = OTHER; note = N1-methyl pseudouridine
  modified_base 1973: mod_base = OTHER; note = N1-methyl pseudouridine
  modified_base 1975: mod_base = OTHER; note = N1-methyl pseudouridine
  modified_base 1976: mod_base = OTHER; note = N1-methyl pseudouridine
  modified_base 1988: mod_base = OTHER; note = N1-methyl pseudouridine
  modified_base 1991: mod_base = OTHER; note = N1-methyl pseudouridine
  modified_base 2000: mod_base = OTHER; note = N1-methyl pseudouridine
  modified_base 2014: mod_base = OTHER; note = N1-methyl pseudouridine
  modified_base 2023: mod_base = OTHER; note = N1-methyl pseudouridine
  modified_base 2033: mod_base = OTHER; note = N1-methyl pseudouridine
  modified_base 2045: mod_base = OTHER; note = N1-methyl pseudouridine
  modified_base 2048: mod_base = OTHER; note = N1-methyl pseudouridine
  modified_base 2057: mod_base = OTHER; note = N1-methyl pseudouridine
  modified_base 2084: mod_base = OTHER; note = N1-methyl pseudouridine
  modified_base 2087: mod_base = OTHER; note = N1-methyl pseudouridine
  modified_base 2092: mod_base = OTHER; note = N1-methyl pseudouridine
  modified_base 2093: mod_base = OTHER; note = N1-methyl pseudouridine
  modified_base 2096: mod_base = OTHER; note = N1-methyl pseudouridine
  modified_base 2110: mod_base = OTHER; note = N1-methyl pseudouridine
  modified_base 2111: mod_base = OTHER; note = N1-methyl pseudouridine
  modified_base 2125: mod_base = OTHER; note = N1-methyl pseudouridine
  modified_base 2126: mod_base = OTHER; note = N1-methyl pseudouridine
  modified_base 2129: mod_base = OTHER; note = N1-methyl pseudouridine
  modified_base 2135: mod_base = OTHER; note = N1-methyl pseudouridine
  modified_base 2138: mod_base = OTHER; note = N1-methyl pseudouridine
  modified_base 2153: mod_base = OTHER; note = N1-methyl pseudouridine
  modified_base 2158: mod_base = OTHER; note = N1-methyl pseudouridine
  modified_base 2159: mod_base = OTHER; note = N1-methyl pseudouridine
  modified_base 2171: mod_base = OTHER; note = N1-methyl pseudouridine
  modified_base 2186: mod_base = OTHER; note = N1-methyl pseudouridine
  modified_base 2207: mod_base = OTHER; note = N1-methyl pseudouridine
  modified_base 2219: mod_base = OTHER; note = N1-methyl pseudouridine
  modified_base 2228: mod_base = OTHER; note = N1-methyl pseudouridine
  modified_base 2246: mod_base = OTHER; note = N1-methyl pseudouridine
  modified_base 2258: mod_base = OTHER; note = N1-methyl pseudouridine
  modified_base 2261: mod_base = OTHER; note = N1-methyl pseudouridine
  modified_base 2270: mod_base = OTHER; note = N1-methyl pseudouridine
  modified_base 2276: mod_base = OTHER; note = N1-methyl pseudouridine
  modified_base 2279: mod_base = OTHER; note = N1-methyl pseudouridine
  modified_base 2288: mod_base = OTHER; note = N1-methyl pseudouridine
  modified_base 2291: mod_base = OTHER; note = N1-methyl pseudouridine
  modified_base 2297: mod_base = OTHER; note = N1-methyl pseudouridine
  modified_base 2300: mod_base = OTHER; note = N1-methyl pseudouridine
  modified_base 2324: mod_base = OTHER; note = N1-methyl pseudouridine
  modified_base 2327: mod_base = OTHER; note = N1-methyl pseudouridine
  modified_base 2330: mod_base = OTHER; note = N1-methyl pseudouridine
  modified_base 2336: mod_base = OTHER; note = N1-methyl pseudouridine
  modified_base 2390: mod_base = OTHER; note = N1-methyl pseudouridine
  modified_base 2399: mod_base = OTHER; note = N1-methyl pseudouridine
  modified_base 2411: mod_base = OTHER; note = N1-methyl pseudouridine
  modified_base 2420: mod_base = OTHER; note = N1-methyl pseudouridine
  modified_base 2432: mod_base = OTHER; note = N1-methyl pseudouridine
  modified_base 2435: mod_base = OTHER; note = N1-methyl pseudouridine
  modified_base 2450: mod_base = OTHER; note = N1-methyl pseudouridine
  modified_base 2465: mod_base = OTHER; note = N1-methyl pseudouridine
  modified_base 2480: mod_base = OTHER; note = N1-methyl pseudouridine
  modified_base 2482: mod_base = OTHER; note = N1-methyl pseudouridine
  modified_base 2486: mod_base = OTHER; note = N1-methyl pseudouridine
  modified_base 2488: mod_base = OTHER; note = N1-methyl pseudouridine
  modified_base 2491: mod_base = OTHER; note = N1-methyl pseudouridine
  modified_base 2495: mod_base = OTHER; note = N1-methyl pseudouridine
  modified_base 2513: mod_base = OTHER; note = N1-methyl pseudouridine
  modified_base 2515: mod_base = OTHER; note = N1-methyl pseudouridine
  modified_base 2519: mod_base = OTHER; note = N1-methyl pseudouridine
  modified_base 2531: mod_base = OTHER; note = N1-methyl pseudouridine
  modified_base 2537: mod_base = OTHER; note = N1-methyl pseudouridine
  modified_base 2546: mod_base = OTHER; note = N1-methyl pseudouridine
  modified_base 2554: mod_base = OTHER; note = N1-methyl pseudouridine
  modified_base 2561: mod_base = OTHER; note = N1-methyl pseudouridine
  modified_base 2570: mod_base = OTHER; note = N1-methyl pseudouridine
  modified_base 2573: mod_base = OTHER; note = N1-methyl pseudouridine
  modified_base 2584: mod_base = OTHER; note = N1-methyl pseudouridine
  modified_base 2585: mod_base = OTHER; note = N1-methyl pseudouridine
  modified_base 2588: mod_base = OTHER; note = N1-methyl pseudouridine
  modified_base 2603: mod_base = OTHER; note = N1-methyl pseudouridine
  modified_base 2615: mod_base = OTHER; note = N1-methyl pseudouridine
  modified_base 2618: mod_base = OTHER; note = N1-methyl pseudouridine
  modified_base 2657: mod_base = OTHER; note = N1-methyl pseudouridine
  modified_base 2672: mod_base = OTHER; note = N1-methyl pseudouridine
  modified_base 2675: mod_base = OTHER; note = N1-methyl pseudouridine
  modified_base 2684: mod_base = OTHER; note = N1-methyl pseudouridine
  modified_base 2692: mod_base = OTHER; note = N1-methyl pseudouridine
  modified_base 2695: mod_base = OTHER; note = N1-methyl pseudouridine
  modified_base 2705: mod_base = OTHER; note = N1-methyl pseudouridine
  modified_base 2708: mod_base = OTHER; note = N1-methyl pseudouridine
  modified_base 2720: mod_base = OTHER; note = N1-methyl pseudouridine
  modified_base 2723: mod_base = OTHER; note = N1-methyl pseudouridine
  modified_base 2737: mod_base = OTHER; note = N1-methyl pseudouridine
  modified_base 2738: mod_base = OTHER; note = N1-methyl pseudouridine
  modified_base 2747: mod_base = OTHER; note = N1-methyl pseudouridine
  modified_base 2771: mod_base = OTHER; note = N1-methyl pseudouridine
  modified_base 2780: mod_base = OTHER; note = N1-methyl pseudouridine
  modified_base 2794: mod_base = OTHER; note = N1-methyl pseudouridine
  modified_base 2795: mod_base = OTHER; note = N1-methyl pseudouridine
  modified_base 2798: mod_base = OTHER; note = N1-methyl pseudouridine
  modified_base 2810: mod_base = OTHER; note = N1-methyl pseudouridine
  modified_base 2813: mod_base = OTHER; note = N1-methyl pseudouridine
  modified_base 2828: mod_base = OTHER; note = N1-methyl pseudouridine
  modified_base 2840: mod_base = OTHER; note = N1-methyl pseudouridine
  modified_base 2849: mod_base = OTHER; note = N1-methyl pseudouridine
  modified_base 2852: mod_base = OTHER; note = N1-methyl pseudouridine
  modified_base 2864: mod_base = OTHER; note = N1-methyl pseudouridine
  modified_base 2875: mod_base = OTHER; note = N1-methyl pseudouridine
  modified_base 2894: mod_base = OTHER; note = N1-methyl pseudouridine
  modified_base 2897: mod_base = OTHER; note = N1-methyl pseudouridine
  modified_base 2906: mod_base = OTHER; note = N1-methyl pseudouridine
  modified_base 2912: mod_base = OTHER; note = N1-methyl pseudouridine
  modified_base 2915: mod_base = OTHER; note = N1-methyl pseudouridine
  modified_base 2921: mod_base = OTHER; note = N1-methyl pseudouridine
  modified_base 2933: mod_base = OTHER; note = N1-methyl pseudouridine
  modified_base 2936: mod_base = OTHER; note = N1-methyl pseudouridine
  modified_base 2944: mod_base = OTHER; note = N1-methyl pseudouridine
  modified_base 2945: mod_base = OTHER; note = N1-methyl pseudouridine
  modified_base 2956: mod_base = OTHER; note = N1-methyl pseudouridine
  modified_base 2957: mod_base = OTHER; note = N1-methyl pseudouridine
  modified_base 2962: mod_base = OTHER; note = N1-methyl pseudouridine
  modified_base 2963: mod_base = OTHER; note = N1-methyl pseudouridine
  modified_base 2965: mod_base = OTHER; note = N1-methyl pseudouridine
  modified_base 2972: mod_base = OTHER; note = N1-methyl pseudouridine
  modified_base 2981: mod_base = OTHER; note = N1-methyl pseudouridine
  modified_base 2989: mod_base = OTHER; note = N1-methyl pseudouridine
  modified_base 3010: mod_base = OTHER; note = N1-methyl pseudouridine
  modified_base 3014: mod_base = OTHER; note = N1-methyl pseudouridine
  modified_base 3023: mod_base = OTHER; note = N1-methyl pseudouridine
  modified_base 3026: mod_base = OTHER; note = N1-methyl pseudouridine
  modified_base 3038: mod_base = OTHER; note = N1-methyl pseudouridine
  modified_base 3041: mod_base = OTHER; note = N1-methyl pseudouridine
  modified_base 3049: mod_base = OTHER; note = N1-methyl pseudouridine
  modified_base 3059: mod_base = OTHER; note = N1-methyl pseudouridine
  modified_base 3070: mod_base = OTHER; note = N1-methyl pseudouridine
  modified_base 3071: mod_base = OTHER; note = N1-methyl pseudouridine
  modified_base 3074: mod_base = OTHER; note = N1-methyl pseudouridine
  modified_base 3076: mod_base = OTHER; note = N1-methyl pseudouridine
  modified_base 3085: mod_base = OTHER; note = N1-methyl pseudouridine
  modified_base 3092: mod_base = OTHER; note = N1-methyl pseudouridine
  modified_base 3094: mod_base = OTHER; note = N1-methyl pseudouridine
  modified_base 3101: mod_base = OTHER; note = N1-methyl pseudouridine
  modified_base 3110: mod_base = OTHER; note = N1-methyl pseudouridine
  modified_base 3113: mod_base = OTHER; note = N1-methyl pseudouridine
  modified_base 3134: mod_base = OTHER; note = N1-methyl pseudouridine
  modified_base 3154: mod_base = OTHER; note = N1-methyl pseudouridine
  modified_base 3157: mod_base = OTHER; note = N1-methyl pseudouridine
  modified_base 3158: mod_base = OTHER; note = N1-methyl pseudouridine
  modified_base 3160: mod_base = OTHER; note = N1-methyl pseudouridine
  modified_base 3161: mod_base = OTHER; note = N1-methyl pseudouridine
  modified_base 3163: mod_base = OTHER; note = N1-methyl pseudouridine
  modified_base 3173: mod_base = OTHER; note = N1-methyl pseudouridine
  modified_base 3176: mod_base = OTHER; note = N1-methyl pseudouridine
  modified_base 3181: mod_base = OTHER; note = N1-methyl pseudouridine
  modified_base 3182: mod_base = OTHER; note = N1-methyl pseudouridine
  modified_base 3184: mod_base = OTHER; note = N1-methyl pseudouridine
  modified_base 3185: mod_base = OTHER; note = N1-methyl pseudouridine
  modified_base 3197: mod_base = OTHER; note = N1-methyl pseudouridine
  modified_base 3203: mod_base = OTHER; note = N1-methyl pseudouridine
  modified_base 3218: mod_base = OTHER; note = N1-methyl pseudouridine
  modified_base 3233: mod_base = OTHER; note = N1-methyl pseudouridine
  modified_base 3236: mod_base = OTHER; note = N1-methyl pseudouridine
  modified_base 3263: mod_base = OTHER; note = N1-methyl pseudouridine
  modified_base 3266: mod_base = OTHER; note = N1-methyl pseudouridine
  modified_base 3268: mod_base = OTHER; note = N1-methyl pseudouridine
  modified_base 3286: mod_base = OTHER; note = N1-methyl pseudouridine
  modified_base 3287: mod_base = OTHER; note = N1-methyl pseudouridine
  modified_base 3296: mod_base = OTHER; note = N1-methyl pseudouridine
  modified_base 3305: mod_base = OTHER; note = N1-methyl pseudouridine
  modified_base 3308: mod_base = OTHER; note = N1-methyl pseudouridine
  modified_base 3314: mod_base = OTHER; note = N1-methyl pseudouridine
  modified_base 3323: mod_base = OTHER; note = N1-methyl pseudouridine
  modified_base 3329: mod_base = OTHER; note = N1-methyl pseudouridine
  modified_base 3332: mod_base = OTHER; note = N1-methyl pseudouridine
  modified_base 3347: mod_base = OTHER; note = N1-methyl pseudouridine
  modified_base 3361: mod_base = OTHER; note = N1-methyl pseudouridine
  modified_base 3362: mod_base = OTHER; note = N1-methyl pseudouridine
  modified_base 3377: mod_base = OTHER; note = N1-methyl pseudouridine
  modified_base 3380: mod_base = OTHER; note = N1-methyl pseudouridine
  modified_base 3404: mod_base = OTHER; note = N1-methyl pseudouridine
  modified_base 3407: mod_base = OTHER; note = N1-methyl pseudouridine
  modified_base 3424: mod_base = OTHER; note = N1-methyl pseudouridine
  modified_base 3439: mod_base = OTHER; note = N1-methyl pseudouridine
  modified_base 3448: mod_base = OTHER; note = N1-methyl pseudouridine
  modified_base 3449: mod_base = OTHER; note = N1-methyl pseudouridine
  modified_base 3464: mod_base = OTHER; note = N1-methyl pseudouridine
  modified_base 3469: mod_base = OTHER; note = N1-methyl pseudouridine
  modified_base 3476: mod_base = OTHER; note = N1-methyl pseudouridine
  modified_base 3479: mod_base = OTHER; note = N1-methyl pseudouridine
  modified_base 3482: mod_base = OTHER; note = N1-methyl pseudouridine
  modified_base 3485: mod_base = OTHER; note = N1-methyl pseudouridine
  modified_base 3494: mod_base = OTHER; note = N1-methyl pseudouridine
  modified_base 3518: mod_base = OTHER; note = N1-methyl pseudouridine
  modified_base 3527: mod_base = OTHER; note = N1-methyl pseudouridine
  modified_base 3536: mod_base = OTHER; note = N1-methyl pseudouridine
  modified_base 3539: mod_base = OTHER; note = N1-methyl pseudouridine
  modified_base 3545: mod_base = OTHER; note = N1-methyl pseudouridine
  modified_base 3551: mod_base = OTHER; note = N1-methyl pseudouridine
  modified_base 3554: mod_base = OTHER; note = N1-methyl pseudouridine
  modified_base 3568: mod_base = OTHER; note = N1-methyl pseudouridine
  modified_base 3569: mod_base = OTHER; note = N1-methyl pseudouridine
  modified_base 3584: mod_base = OTHER; note = N1-methyl pseudouridine
  modified_base 3589: mod_base = OTHER; note = N1-methyl pseudouridine
  modified_base 3590: mod_base = OTHER; note = N1-methyl pseudouridine
  modified_base 3593: mod_base = OTHER; note = N1-methyl pseudouridine
  modified_base 3607: mod_base = OTHER; note = N1-methyl pseudouridine
  modified_base 3617: mod_base = OTHER; note = N1-methyl pseudouridine
  modified_base 3629: mod_base = OTHER; note = N1-methyl pseudouridine
  modified_base 3632: mod_base = OTHER; note = N1-methyl pseudouridine
  modified_base 3635: mod_base = OTHER; note = N1-methyl pseudouridine
  modified_base 3641: mod_base = OTHER; note = N1-methyl pseudouridine
  modified_base 3649: mod_base = OTHER; note = N1-methyl pseudouridine
  modified_base 3656: mod_base = OTHER; note = N1-methyl pseudouridine
  modified_base 3658: mod_base = OTHER; note = N1-methyl pseudouridine
  modified_base 3659: mod_base = OTHER; note = N1-methyl pseudouridine
  modified_base 3665: mod_base = OTHER; note = N1-methyl pseudouridine
  modified_base 3686: mod_base = OTHER; note = N1-methyl pseudouridine
  modified_base 3689: mod_base = OTHER; note = N1-methyl pseudouridine
  modified_base 3707: mod_base = OTHER; note = N1-methyl pseudouridine
  modified_base 3725: mod_base = OTHER; note = N1-methyl pseudouridine
  modified_base 3731: mod_base = OTHER; note = N1-methyl pseudouridine
  modified_base 3742: mod_base = OTHER; note = N1-methyl pseudouridine
  modified_base 3746: mod_base = OTHER; note = N1-methyl pseudouridine
  modified_base 3751: mod_base = OTHER; note = N1-methyl pseudouridine
  modified_base 3752: mod_base = OTHER; note = N1-methyl pseudouridine
  modified_base 3755: mod_base = OTHER; note = N1-methyl pseudouridine
  modified_base 3757: mod_base = OTHER; note = N1-methyl pseudouridine
  modified_base 3761: mod_base = OTHER; note = N1-methyl pseudouridine
  modified_base 3772: mod_base = OTHER; note = N1-methyl pseudouridine
  modified_base 3782: mod_base = OTHER; note = N1-methyl pseudouridine
  modified_base 3818: mod_base = OTHER; note = N1-methyl pseudouridine
  modified_base 3820: mod_base = OTHER; note = N1-methyl pseudouridine
  modified_base 3821: mod_base = OTHER; note = N1-methyl pseudouridine
  modified_base 3824: mod_base = OTHER; note = N1-methyl pseudouridine
  modified_base 3841: mod_base = OTHER; note = N1-methyl pseudouridine
  modified_base 3845: mod_base = OTHER; note = N1-methyl pseudouridine
  modified_base 3854: mod_base = OTHER; note = N1-methyl pseudouridine
  modified_base 3857: mod_base = OTHER; note = N1-methyl pseudouridine
  modified_base 3866: mod_base = OTHER; note = N1-methyl pseudouridine
  modified_base 3874: mod_base = OTHER; note = N1-methyl pseudouridine
  modified_base 3875: mod_base = OTHER; note = N1-methyl pseudouridine
  modified_base 3887: mod_base = OTHER; note = N1-methyl pseudouridine
  modified_base 3890: mod_base = OTHER; note = N1-methyl pseudouridine
  modified_base 3893: mod_base = OTHER; note = N1-methyl pseudouridine
  modified_base 3908: mod_base = OTHER; note = N1-methyl pseudouridine
  modified_base 3917: mod_base = OTHER; note = N1-methyl pseudouridine
  modified_base 3920: mod_base = OTHER; note = N1-methyl pseudouridine
  modified_base 3928: mod_base = OTHER; note = N1-methyl pseudouridine
  modified_base 3953: mod_base = OTHER; note = N1-methyl pseudouridine
  modified_base 3974: mod_base = OTHER; note = N1-methyl pseudouridine
  modified_base 3977: mod_base = OTHER; note = N1-methyl pseudouridine
  modified_base 3983: mod_base = OTHER; note = N1-methyl pseudouridine
  modified_base 3985: mod_base = OTHER; note = N1-methyl pseudouridine
  modified_base 3986: mod_base = OTHER; note = N1-methyl pseudouridine
  modified_base 3992: mod_base = OTHER; note = N1-methyl pseudouridine
  modified_base 4001: mod_base = OTHER; note = N1-methyl pseudouridine
  modified_base 4018: mod_base = OTHER; note = N1-methyl pseudouridine
  modified_base 4019: mod_base = OTHER; note = N1-methyl pseudouridine
  modified_base 4024: mod_base = OTHER; note = N1-methyl pseudouridine
  modified_base 4027: mod_base = OTHER; note = N1-methyl pseudouridine
  modified_base 4028: mod_base = OTHER; note = N1-methyl pseudouridine
  modified_base 4040: mod_base = OTHER; note = N1-methyl pseudouridine
  modified_base 4054: mod_base = OTHER; note = N1-methyl pseudouridine
  modified_base 4073: mod_base = OTHER; note = N1-methyl pseudouridine
  modified_base 4076: mod_base = OTHER; note = N1-methyl pseudouridine
  modified_base 4088: mod_base = OTHER; note = N1-methyl pseudouridine
  modified_base 4091: mod_base = OTHER; note = N1-methyl pseudouridine
  modified_base 4103: mod_base = OTHER; note = N1-methyl pseudouridine
  modified_base 4112: mod_base = OTHER; note = N1-methyl pseudouridine
  modified_base 4114: mod_base = OTHER; note = N1-methyl pseudouridine
  modified_base 4127: mod_base = OTHER; note = N1-methyl pseudouridine
  modified_base 4133: mod_base = OTHER; note = N1-methyl pseudouridine
  modified_base 4142: mod_base = OTHER; note = N1-methyl pseudouridine
  modified_base 4210: mod_base = OTHER; note = N1-methyl pseudouridine
  modified_base 4213: mod_base = OTHER; note = N1-methyl pseudouridine
  modified_base 4216: mod_base = OTHER; note = N1-methyl pseudouridine
atggcccccaagaagaagcggaaggtgggcatccacggcgtgcccgccgccgacaagaagtacagcatcggcctggacatcggcaccaacagcgtgggctgggccgtgatcaccgacgagtacaaggtgcccagcaagaagttcaaggtgctgggcaacaccgaccggcacagcatcaagaagaacctgatcggcgccctgctgttcgacagcggcgagacggccgaggccacccggctgaagcggaccgcccggcggcggtacacccggcggaagaaccggatctgctacctgcaggagatcttcagcaacgagatggccaaggtggacgacagcttcttccaccggctggaggagagcttcctggtggaggaggacaagaagcacgagcggcaccccatcttcggcaacatcgtggacgaggtggcctaccacgagaagtaccccaccatctaccacctgcggaagaagctggtggacagcaccgacaaggccgacctgcggctgatctacctggccctggcccacatgatcaagttccggggccacttcctgatcgagggcgacctgaaccccgacaacagcgacgtggacaagctgttcatccagctggtgcagacctacaaccagctgttcgaggagaaccccatcaacgccagcggcgtggacgccaaggccatcctgagcgcccggctgagcaagagccggcggctggagaacctgatcgcccagctgcccggcgagaagaagaacggcctgttcggcaacctgatcgccctgagcctgggcctgacccccaacttcaagagcaacttcgacctggccgaggacgccaagctgcagctgagcaaggacacctacgacgacgacctggacaacctgctggcccagatcggcgaccagtacgccgacctgttcctggccgccaagaacctgagcgacgccatcctgctgagcgacatcctgcgggtgaacaccgagatcaccaaggcccccctgagcgccagcatgatcaagcggtacgacgagcaccaccaggacctgaccctgctgaaggccctggtgcggcagcagctgcccgagaagtacaaggagatcttcttcgaccagagcaagaacggctacgccggctacatcgacggcggcgccagccaggaggagttctacaagttcatcaagcccatcctggagaagatggacggcaccgaggagctgctggtgaagctgaaccgggaggacctgctgcggaagcagcggaccttcgacaacggcagcatcccccaccagatccacctgggcgagctgcacgccatcctgcggcggcaggaggacttctaccccttcctgaaggacaaccgggagaagatcgagaagatcctgaccttccggatcccctactacgtgggccccctggcccggggcaacagccggttcgcctggatgacccgcaagagcgaggagacgatcaccccctggaacttcgaggaggtggtggacaagggcgccagcgcccagagcttcatcgagcggatgaccaacttcgacaagaacctgcccaacgagaaggtgctgcccaagcacagcctgctgtacgagtacttcaccgtgtacaacgagctgaccaaggtgaagtacgtgaccgagggcatgcggaagcccgccttcctgagcggcgagcagaagaaggccatcgtggacctgctgttcaagaccaaccggaaggtgaccgtgaagcagctgaaggaggactacttcaagaagatcgagtgcttcgacagcgtggagatcagcggcgtggaggaccggttcaacgccagcctgggcacctaccacgacctgctgaagatcatcaaggacaaggacttcctggacaacgaggagaacgaggacatcctggaggacatcgtgctgaccctgaccctgttcgaggaccgggagatgatcgaggagcggctgaagacctacgcccacctgttcgacgacaaggtgatgaagcagctgaagcggcggcggtacaccggctggggccggctgagccggaagctgatcaacggcatccgggacaagcagagcggcaagaccatcctggacttcctcaagagcgacggcttcgccaaccggaacttcatgcagctgatccacgacgacagcctgaccttcaaggaggacatccagaaggcccaggtgagcggccagggcgacagcctgcacgagcacatcgccaacctggccggcagccccgccatcaagaagggcatcctgcagaccgtgaaggtggtggacgagctggtgaaggtgatgggccggcacaagcccgagaacatcgtgatcgagatggcccgggagaaccagaccacccagaagggccagaagaacagccgggagcggatgaagcggatcgaggagggcatcaaggagctgggcagccagatcctgaaggagcaccccgtggagaacacccagctgcagaacgagaagctgtacctgtactacctgcagaacggccgggacatgtacgtggaccaggagctggacatcaaccggctgagcgactacgacgtggaccacatcgtgccccagagcttcctgaaggacgacagcatcgacaacaaggtgctgacccggagcgacaagaaccggggcaagagcgacaacgtgcccagcgaggaggtggtgaagaagatgaagaactactggcggcagctgctgaacgccaagctgatcacccagcggaagttcgacaacctgaccaaggccgagcggggcggcctgagcgagctggacaaggccggcttcatcaagcggcagctggtggagacgcggcagatcaccaagcacgtggcccagatcctggacagccggatgaacaccaagtacgacgagaacgacaagctgatccgggaggtgaaggtgatcaccctcaagagcaagctggtgagcgacttccggaaggacttccagttctacaaggtgcgggagatcaacaactaccaccacgcccacgacgcctacctgaacgccgtggtgggcaccgccctgatcaagaagtaccccaagctggagagcgagttcgtgtacggcgactacaaggtgtacgacgtgcggaagatgatcgccaagagcgagcaggagatcggcaaggccaccgccaagtacttcttctacagcaacatcatgaacttcttcaagaccgagatcaccctggccaacggcgagatccggaagcggcccctgatcgagacgaacggcgagacgggcgagatcgtgtgggacaagggccgggacttcgccaccgtgcggaaggtgctgagcatgccccaggtgaacatcgtgaagaagaccgaggtgcagaccggcggcttcagcaaggagagcatcctgcccaagcggaacagcgacaagctgatcgcccggaagaaggactgggaccccaagaagtacggcggcttcgacagccccaccgtggcctacagcgtgctggtggtggccaaggtggagaagggcaagagcaagaagctcaagagcgtgaaggagctgctgggcatcaccatcatggagcggagcagcttcgagaagaaccccatcgacttcctggaggccaagggctacaaggaggtgaagaaggacctgatcatcaagctgcccaagtacagcctgttcgagctggagaacggccggaagcggatgctggccagcgccggcgagctgcagaagggcaacgagctggccctgcccagcaagtacgtgaacttcctgtacctggccagccactacgagaagctgaagggcagccccgaggacaacgagcagaagcagctgttcgtggagcagcacaagcactacctggacgagatcatcgagcagatcagcgagttcagcaagcgggtgatcctggccgacgccaacctggacaaggtgctgagcgcctacaacaagcaccgggacaagcccatccgggagcaggccgagaacatcatccacctgttcaccctgaccaacctgggcgcccccgccgccttcaagtacttcgacaccaccatcgaccggaagcggtacaccagcaccaaggaggtgctggacgccaccctgatccaccagagcatcaccggcctgtacgagacgcggatcgacctgagccagctgggcggcgacagcggcggcaagcggcccgccgccaccaagaaggccggccaggccaagaagaagaagtaatgatag

SEQ ID NO: 2188 - protein, 1403 aa, synthetic construct
MAPKKKRKVGIHGVPAADKKYSIGLDIGTNSVGWAVITDEYKVPSKKFKVLGNTDRHSIKKNLIGALLFDSGETAEATRLKRTARRRYTRRKNRICYLQEIFSNEMAKVDDSFFHRLEESFLVEEDKKHERHPIFGNIVDEVAYHEKYPTIYHLRKKLVDSTDKADLRLIYLALAHMIKFRGHFLIEGDLNPDNSDVDKLFIQLVQTYNQLFEENPINASGVDAKAILSARLSKSRRLENLIAQLPGEKKNGLFGNLIALSLGLTPNFKSNFDLAEDAKLQLSKDTYDDDLDNLLAQIGDQYADLFLAAKNLSDAILLSDILRVNTEITKAPLSASMIKRYDEHHQDLTLLKALVRQQLPEKYKEIFFDQSKNGYAGYIDGGASQEEFYKFIKPILEKMDGTEELLVKLNREDLLRKQRTFDNGSIPHQIHLGELHAILRRQEDFYPFLKDNREKIEKILTFRIPYYVGPLARGNSRFAWMTRKSEETITPWNFEEVVDKGASAQSFIERMTNFDKNLPNEKVLPKHSLLYEYFTVYNELTKVKYVTEGMRKPAFLSGEQKKAIVDLLFKTNRKVTVKQLKEDYFKKIECFDSVEISGVEDRFNASLGTYHDLLKIIKDKDFLDNEENEDILEDIVLTLTLFEDREMIEERLKTYAHLFDDKVMKQLKRRRYTGWGRLSRKLINGIRDKQSGKTILDFLKSDGFANRNFMQLIHDDSLTFKEDIQKAQVSGQGDSLHEHIANLAGSPAIKKGILQTVKVVDELVKVMGRHKPENIVIEMARENQTTQKGQKNSRERMKRIEEGIKELGSQILKEHPVENTQLQNEKLYLYYLQNGRDMYVDQELDINRLSDYDVDHIVPQSFLKDDSIDNKVLTRSDKNRGKSDNVPSEEVVKKMKNYWRQLLNAKLITQRKFDNLTKAERGGLSELDKAGFIKRQLVETRQITKHVAQILDSRMNTKYDENDKLIREVKVITLKSKLVSDFRKDFQFYKVREINNYHHAHDAYLNAVVGTALIKKYPKLESEFVYGDYKVYDVRKMIAKSEQEIGKATAKYFFYSNIMNFFKTEITLANGEIRKRPLIETNGETGEIVWDKGRDFATVRKVLSMPQVNIVKKTEVQTGGFSKESILPKRNSDKLIARKKDWDPKKYGGFDSPTVAYSVLVVAKVEKGKSKKLKSVKELLGITIMERSSFEKNPIDFLEAKGYKEVKKDLIIKLPKYSLFELENGRKRMLASAGELQKGNELALPSKYVNFLYLASHYEKLKGSPEDNEQKQLFVEQHKHYLDEIIEQISEFSKRVILADANLDKVLSAYNKHRDKPIREQAENIIHLFTLTNLGAPAAFKYFDTTIDRKRYTSTKEVLDATLIHQSITGLYETRIDLSQLGGDSGGKRPAATKKAGQAKKKK

SEQ ID NO: 2189 - RNA, 4380 nt, synthetic construct
  source 1..4380: mol_type = other RNA
  modified_base 7: mod_base = OTHER; note = N1-methyl pseudouridine
  modified_base 25: mod_base = OTHER; note = N1-methyl pseudouridine
  modified_base 35: mod_base = OTHER; note = N1-methyl pseudouridine
  modified_base 37: mod_base = OTHER; note = N1-methyl pseudouridine
  modified_base 49: mod_base = OTHER; note = N1-methyl pseudouridine
  modified_base 73: mod_base = OTHER; note = N1-methyl pseudouridine
  modified_base 79: mod_base = OTHER; note = N1-methyl pseudouridine
  modified_base 88: mod_base = OTHER; note = N1-methyl pseudouridine
  modified_base 108: mod_base = OTHER; note = N1-methyl pseudouridine
  modified_base 115: mod_base = OTHER; note = N1-methyl pseudouridine
  modified_base 121: mod_base = OTHER; note = N1-methyl pseudouridine
  modified_base 127: mod_base = OTHER; note = N1-methyl pseudouridine
  modified_base 142: mod_base = OTHER; note = N1-methyl pseudouridine
  modified_base 147: mod_base = OTHER; note = N1-methyl pseudouridine
  modified_base 154: mod_base = OTHER; note = N1-methyl pseudouridine
  modified_base 157: mod_base = OTHER; note = N1-methyl pseudouridine
  modified_base 168: mod_base = OTHER; note = N1-methyl pseudouridine
  modified_base 175: mod_base = OTHER; note = N1-methyl pseudouridine
  modified_base 189: mod_base = OTHER; note = N1-methyl pseudouridine
  modified_base 190: mod_base = OTHER; note = N1-methyl pseudouridine
  modified_base 196: mod_base = OTHER; note = N1-methyl pseudouridine
  modified_base 199: mod_base = OTHER; note = N1-methyl pseudouridine
  modified_base 223: mod_base = OTHER; note = N1-methyl pseudouridine
  modified_base 235: mod_base = OTHER; note = N1-methyl pseudouridine
  modified_base 238: mod_base = OTHER; note = N1-methyl pseudouridine
  modified_base 247: mod_base = OTHER; note = N1-methyl pseudouridine
  modified_base 250: mod_base = OTHER; note = N1-methyl pseudouridine
  modified_base 252: mod_base = OTHER; note = N1-methyl pseudouridine
  modified_base 253: mod_base = OTHER; note = N1-methyl pseudouridine
  modified_base 286: mod_base = OTHER; note = N1-methyl pseudouridine
  modified_base 309: mod_base = OTHER; note = N1-methyl pseudouridine
  modified_base 331: mod_base = OTHER; note = N1-methyl pseudouridine
  modified_base 333: mod_base = OTHER; note = N1-methyl pseudouridine
  modified_base 336: mod_base = OTHER; note = N1-methyl pseudouridine
  modified_base 340: mod_base = OTHER; note = N1-methyl pseudouridine
  modified_base 349: mod_base = OTHER; note = N1-methyl pseudouridine
  modified_base 351: mod_base = OTHER; note = N1-methyl pseudouridine
  modified_base 352: mod_base = OTHER; note = N1-methyl pseudouridine
  modified_base 364: mod_base = OTHER; note = N1-methyl pseudouridine
  modified_base 373: mod_base = OTHER; note = N1-methyl pseudouridine
  modified_base 384: mod_base = OTHER; note = N1-methyl pseudouridine
  modified_base 385: mod_base = OTHER; note = N1-methyl pseudouridine
  modified_base 387: mod_base = OTHER; note = N1-methyl pseudouridine
  modified_base 388: mod_base = OTHER; note = N1-methyl pseudouridine
  modified_base 397: mod_base = OTHER; note = N1-methyl pseudouridine
  modified_base 408: mod_base = OTHER; note = N1-methyl pseudouridine
  modified_base 409: mod_base = OTHER; note = N1-methyl pseudouridine
  modified_base 412: mod_base = OTHER; note = N1-methyl pseudouridine
  modified_base 415: mod_base = OTHER; note = N1-methyl pseudouridine
  modified_base 448: mod_base = OTHER; note = N1-methyl pseudouridine
  modified_base 450: mod_base = OTHER; note = N1-methyl pseudouridine
  modified_base 451: mod_base = OTHER; note = N1-methyl pseudouridine
  modified_base 460: mod_base = OTHER; note = N1-methyl pseudouridine
  modified_base 463: mod_base = OTHER; note = N1-methyl pseudouridine
  modified_base 472: mod_base = OTHER; note = N1-methyl pseudouridine
  modified_base 477: mod_base = OTHER; note = N1-methyl pseudouridine
  modified_base 489: mod_base = OTHER; note = N1-methyl pseudouridine
  modified_base 499: mod_base = OTHER; note = N1-methyl pseudouridine
  modified_base 501: mod_base = OTHER; note = N1-methyl pseudouridine
  modified_base 508: mod_base = OTHER; note = N1-methyl pseudouridine
  modified_base 520: mod_base = OTHER; note = N1-methyl pseudouridine
  modified_base 523: mod_base = OTHER; note = N1-methyl pseudouridine
  modified_base 547: mod_base = OTHER; note = N1-methyl pseudouridine
  modified_base 553: mod_base = OTHER; note = N1-methyl pseudouridine
  modified_base 556: mod_base = OTHER; note = N1-methyl pseudouridine
  modified_base 558: mod_base = OTHER; note = N1-methyl pseudouridine
  modified_base 562: mod_base = OTHER; note = N1-methyl pseudouridine
  modified_base 568: mod_base = OTHER; note = N1-methyl pseudouridine
  modified_base 577: mod_base = OTHER; note = N1-methyl pseudouridine
  modified_base 580: mod_base = OTHER; note = N1-methyl pseudouridine
  modified_base 585: mod_base = OTHER; note = N1-methyl pseudouridine
  modified_base 586: mod_base = OTHER; note = N1-methyl pseudouridine
  modified_base 597: mod_base = OTHER; note = N1-methyl pseudouridine
  modified_base 598: mod_base = OTHER; note = N1-methyl pseudouridine
  modified_base 601: mod_base = OTHER; note = N1-methyl pseudouridine
  modified_base 604: mod_base = OTHER; note = N1-methyl pseudouridine
  modified_base 616: mod_base = OTHER; note = N1-methyl pseudouridine
  modified_base 637: mod_base = OTHER; note = N1-methyl pseudouridine
  modified_base 646: mod_base = OTHER; note = N1-methyl pseudouridine
  modified_base 648: mod_base = OTHER; note = N1-methyl pseudouridine
  modified_base 649: mod_base = OTHER; note = N1-methyl pseudouridine
  modified_base 652: mod_base = OTHER; note = N1-methyl pseudouridine
  modified_base 658: mod_base = OTHER; note = N1-methyl pseudouridine
  modified_base 661: mod_base = OTHER; note = N1-methyl pseudouridine
  modified_base 669: mod_base = OTHER; note = N1-methyl pseudouridine
  modified_base 679: mod_base = OTHER; note = N1-methyl pseudouridine
  modified_base 681: mod_base = OTHER; note = N1-methyl pseudouridine
  modified_base 682: mod_base = OTHER; note = N1-methyl pseudouridine
  modified_base 697: mod_base = OTHER; note = N1-methyl pseudouridine
  modified_base 712: mod_base = OTHER; note = N1-methyl pseudouridine
  modified_base 727: mod_base = OTHER; note = N1-methyl pseudouridine
  modified_base 730: mod_base = OTHER; note = N1-methyl pseudouridine
  modified_base 742: mod_base = OTHER; note = N1-methyl pseudouridine
  modified_base 760: mod_base = OTHER; note = N1-methyl pseudouridine
  modified_base 769: mod_base = OTHER; note = N1-methyl pseudouridine
  modified_base 772: mod_base = OTHER; note = N1-methyl pseudouridine
  modified_base 781: mod_base = OTHER; note = N1-methyl pseudouridine
  modified_base 805: mod_base = OTHER; note = N1-methyl pseudouridine
  modified_base 807: mod_base = OTHER; note = N1-methyl pseudouridine
  modified_base 808: mod_base = OTHER; note = N1-methyl pseudouridine
  modified_base 817: mod_base = OTHER; note = N1-methyl pseudouridine
  modified_base 820: mod_base = OTHER; note = N1-methyl pseudouridine
  modified_base 826: mod_base = OTHER; note = N1-methyl pseudouridine
  modified_base 832: mod_base = OTHER; note = N1-methyl pseudouridine
  modified_base 838: mod_base = OTHER; note = N1-methyl pseudouridine
  modified_base 849: mod_base = OTHER; note = N1-methyl pseudouridine
  modified_base 850: mod_base = OTHER; note = N1-methyl pseudouridine
  modified_base 861: mod_base = OTHER; note = N1-methyl pseudouridine
  modified_base 862: mod_base = OTHER; note = N1-methyl pseudouridine
  modified_base 868: mod_base = OTHER; note = N1-methyl pseudouridine
  modified_base 886: mod_base = OTHER; note = N1-methyl pseudouridine
  modified_base 892: mod_base = OTHER; note = N1-methyl pseudouridine
  modified_base 906: mod_base = OTHER; note = N1-methyl pseudouridine
  modified_base 919: mod_base = OTHER; note = N1-methyl pseudouridine
  modified_base 928: mod_base = OTHER; note = N1-methyl pseudouridine
  modified_base 931: mod_base = OTHER; note = N1-methyl pseudouridine
  modified_base 940: mod_base = OTHER; note = N1-methyl pseudouridine
  modified_base 951: mod_base = OTHER; note = N1-methyl pseudouridine
  modified_base 961: mod_base = OTHER; note = N1-methyl pseudouridine
  modified_base 963: mod_base = OTHER; note = N1-methyl pseudouridine
  modified_base 964: mod_base = OTHER; note = N1-methyl pseudouridine
  modified_base 967: mod_base = OTHER; note = N1-methyl pseudouridine
  modified_base 982: mod_base = OTHER; note = N1-methyl pseudouridine
  modified_base 994: mod_base = OTHER; note = N1-methyl pseudouridine
  modified_base 997: mod_base = OTHER; note = N1-methyl pseudouridine
  modified_base 1000: mod_base = OTHER; note = N1-methyl pseudouridine
  modified_base 1009: mod_base = OTHER; note = N1-methyl pseudouridine
  modified_base 1012: mod_base = OTHER; note = N1-methyl pseudouridine
  modified_base 1018: mod_base = OTHER; note = N1-methyl pseudouridine
  modified_base 1030: mod_base = OTHER; note = N1-methyl pseudouridine
  modified_base 1045: mod_base = OTHER; note = N1-methyl pseudouridine
  modified_base 1057: mod_base = OTHER; note = N1-methyl pseudouridine
  modified_base 1060: mod_base = OTHER; note = N1-methyl pseudouridine
  modified_base 1068: mod_base = OTHER; note = N1-methyl pseudouridine
  modified_base 1090: mod_base = OTHER; note = N1-methyl pseudouridine
  modified_base 1096: mod_base = OTHER; note = N1-methyl pseudouridine
  modified_base 1099: mod_base = OTHER; note = N1-methyl pseudouridine
  modified_base 1108: mod_base = OTHER; note = N1-methyl pseudouridine
  modified_base 1111: mod_base = OTHER; note = N1-methyl pseudouridine
  modified_base 1123: mod_base = OTHER; note = N1-methyl pseudouridine
  modified_base 1134: mod_base = OTHER; note = N1-methyl pseudouridine
  modified_base 1144: mod_base = OTHER; note = N1-methyl pseudouridine
  modified_base 1146: mod_base = OTHER; note = N1-methyl pseudouridine
  modified_base 1147: mod_base = OTHER; note = N1-methyl pseudouridine
  modified_base 1149: mod_base = OTHER; note = N1-methyl pseudouridine
  modified_base 1150: mod_base = OTHER; note = N1-methyl pseudouridine
  modified_base 1170: mod_base = OTHER; note = N1-methyl pseudouridine
  modified_base 1179: mod_base = OTHER; note = N1-methyl pseudouridine
  modified_base 1183: mod_base = OTHER; note = N1-methyl pseudouridine
  modified_base 1209: mod_base = OTHER; note = N1-methyl pseudouridine
  modified_base 1210: mod_base = OTHER; note = N1-methyl pseudouridine
  modified_base 1212: mod_base = OTHER; note = N1-methyl pseudouridine
  modified_base 1218: mod_base = OTHER; note = N1-methyl pseudouridine
  modified_base 1219: mod_base = OTHER; note = N1-methyl pseudouridine
  modified_base 1222: mod_base = OTHER; note = N1-methyl pseudouridine
  modified_base 1231: mod_base = OTHER; note = N1-methyl pseudouridine
  modified_base 1234: mod_base = OTHER; note = N1-methyl pseudouridine
  modified_base 1243: mod_base = OTHER; note = N1-methyl pseudouridine
  modified_base 1261: mod_base = OTHER; note = N1-methyl pseudouridine
  modified_base 1264: mod_base = OTHER; note = N1-methyl pseudouridine
  modified_base 1267: mod_base = OTHER; note = N1-methyl pseudouridine
  modified_base 1273: mod_base = OTHER; note = N1-methyl pseudouridine
  modified_base 1288: mod_base = OTHER; note = N1-methyl pseudouridine
  modified_base 1291: mod_base = OTHER; note = N1-methyl pseudouridine
  modified_base 1308: mod_base = OTHER; note = N1-methyl pseudouridine
  modified_base 1309: mod_base = OTHER; note = N1-methyl pseudouridine
  modified_base 1324: mod_base = OTHER; note = N1-methyl pseudouridine
  modified_base 1336: mod_base = OTHER; note = N1-methyl pseudouridine
  modified_base 1342: mod_base = OTHER; note = N1-methyl pseudouridine
  modified_base 1351: mod_base = OTHER; note = N1-methyl pseudouridine
  modified_base 1360: mod_base = OTHER; note = N1-methyl pseudouridine
  modified_base 1363: mod_base = OTHER; note = N1-methyl pseudouridine
  modified_base 1380: mod_base = OTHER; note = N1-methyl pseudouridine
  modified_base 1381: mod_base = OTHER; note = N1-methyl pseudouridine
  modified_base 1383: mod_base = OTHER; note = N1-methyl pseudouridine
  modified_base 1389: mod_base = OTHER; note = N1-methyl pseudouridine
  modified_base 1390: mod_base = OTHER; note = N1-methyl pseudouridine
  modified_base 1393: mod_base = OTHER; note = N1-methyl pseudouridine
  modified_base 1414: mod_base = OTHER; note = N1-methyl pseudouridine
  modified_base 1423: mod_base = OTHER; note = N1-methyl pseudouridine
  modified_base 1426: mod_base = OTHER; note = N1-methyl pseudouridine
  modified_base 1431: mod_base = OTHER; note = N1-methyl pseudouridine
  modified_base 1432: mod_base = OTHER; note = N1-methyl pseudouridine
  modified_base 1438: mod_base = OTHER; note = N1-methyl pseudouridine
  modified_base 1443: mod_base = OTHER; note = N1-methyl pseudouridine
  modified_base 1446: mod_base = OTHER; note = N1-methyl pseudouridine
  modified_base 1450: mod_base = OTHER; note = N1-methyl pseudouridine
  modified_base 1459: mod_base = OTHER; note = N1-methyl pseudouridine
  modified_base 1479: mod_base = OTHER; note = N1-methyl pseudouridine
  modified_base 1480: mod_base = OTHER; note = N1-methyl pseudouridine
  modified_base 1485: mod_base = OTHER; note = N1-methyl pseudouridine
  modified_base 1489: mod_base = OTHER; note = N1-methyl pseudouridine
  modified_base 1513: mod_base = OTHER; note = N1-methyl pseudouridine
  modified_base 1521: mod_base = OTHER; note = N1-methyl pseudouridine
  modified_base 1527: mod_base = OTHER; note = N1-methyl pseudouridine
  modified_base 1528: mod_base = OTHER; note = N1-methyl pseudouridine
  modified_base 1537: mod_base = OTHER; note = N1-methyl pseudouridine
  modified_base 1540: mod_base = OTHER; note = N1-methyl pseudouridine
  modified_base 1566: mod_base = OTHER; note = N1-methyl pseudouridine
  modified_base 1567: mod_base = OTHER; note = N1-methyl pseudouridine
  modified_base 1570: mod_base = OTHER; note = N1-methyl pseudouridine
  modified_base 1579: mod_base = OTHER; note = N1-methyl pseudouridine
  modified_base 1587: mod_base = OTHER; note = N1-methyl pseudouridine
  modified_base 1588: mod_base = OTHER; note = N1-methyl pseudouridine
  modified_base 1600: mod_base = OTHER; note = N1-methyl pseudouridine
  modified_base 1615: mod_base = OTHER; note = N1-methyl pseudouridine
  modified_base 1618: mod_base = OTHER; note = N1-methyl pseudouridine
  modified_base 1633: mod_base = OTHER; note = N1-methyl pseudouridine
  modified_base 1636: mod_base = OTHER; note = N1-methyl pseudouridine
  modified_base 1638: mod_base = OTHER; note = N1-methyl pseudouridine
  modified_base 1644: mod_base = OTHER; note = N1-methyl pseudouridine
  modified_base 1647: mod_base = OTHER; note = N1-methyl pseudouridine
  modified_base 1648: mod_base = OTHER; note = N1-methyl pseudouridine
  modified_base 1654: mod_base = OTHER; note = N1-methyl pseudouridine
  modified_base 1656: mod_base = OTHER; note = N1-methyl pseudouridine
  modified_base 1666: mod_base = OTHER; note = N1-methyl pseudouridine
  modified_base 1675: mod_base = OTHER; note = N1-methyl pseudouridine
  modified_base 1680: mod_base = OTHER; note = N1-methyl pseudouridine
  modified_base 1684: mod_base = OTHER; note = N1-methyl pseudouridine
  modified_base 1696: mod_base = OTHER; note = N1-methyl pseudouridine
  modified_base 1710: mod_base = OTHER; note = N1-methyl pseudouridine
  modified_base 1711: mod_base = OTHER; note = N1-methyl pseudouridine
  modified_base 1714: mod_base = OTHER; note = N1-methyl pseudouridine
  modified_base 1738: mod_base = OTHER; note = N1-methyl pseudouridine
  modified_base 1741: mod_base = OTHER; note = N1-methyl pseudouridine
  modified_base 1747: mod_base = OTHER; note = N1-methyl pseudouridine
  modified_base 1750: mod_base = OTHER; note = N1-methyl pseudouridine
  modified_base 1752: mod_base = OTHER; note = N1-methyl pseudouridine
  modified_base 1753: mod_base = OTHER; note = N1-methyl pseudouridine
  modified_base 1771: mod_base = OTHER; note = N1-methyl pseudouridine
  modified_base 1777: mod_base = OTHER; note = N1-methyl pseudouridine
  modified_base 1786: mod_base = OTHER; note = N1-methyl pseudouridine
  modified_base 1797: mod_base = OTHER; note = N1-methyl pseudouridine
  modified_base 1800: mod_base = OTHER; note = N1-methyl pseudouridine
  modified_base 1801: mod_base = OTHER; note = N1-methyl pseudouridine
  modified_base 1810: mod_base = OTHER; note = N1-methyl pseudouridine
  modified_base 1815: mod_base = OTHER; note = N1-methyl pseudouridine
  modified_base 1818: mod_base = OTHER; note = N1-methyl pseudouridine
  modified_base 1819: mod_base = OTHER; note = N1-methyl pseudouridine
  modified_base 1828: mod_base = OTHER; note = N1-methyl pseudouridine
  modified_base 1834: mod_base = OTHER; note = N1-methyl pseudouridine
  modified_base 1843: mod_base = OTHER; note = N1-methyl pseudouridine
  modified_base 1854: mod_base = OTHER; note = N1-methyl pseudouridine
  modified_base 1855: mod_base = OTHER; note = N1-methyl pseudouridine
  modified_base 1867: mod_base = OTHER; note = N1-methyl pseudouridine
  modified_base 1875: mod_base = OTHER; note = N1-methyl pseudouridine
  modified_base 1885: mod_base = OTHER; note = N1-methyl pseudouridine
  modified_base 1888: mod_base = OTHER; note = N1-methyl pseudouridine
  modified_base 1894: mod_base = OTHER; note = N1-methyl pseudouridine
  modified_base 1897: mod_base = OTHER; note = N1-methyl pseudouridine
  modified_base 1911: mod_base = OTHER; note = N1-methyl pseudouridine
  modified_base 1912: mod_base = OTHER; note = N1-methyl pseudouridine
  modified_base 1915: mod_base = OTHER; note = N1-methyl pseudouridine
  modified_base 1939: mod_base = OTHER; note = N1-methyl pseudouridine
  modified_base 1942: mod_base = OTHER; note = N1-methyl pseudouridine
  modified_base 1951: mod_base = OTHER; note = N1-methyl pseudouridine
  modified_base 1954: mod_base = OTHER; note = N1-methyl pseudouridine
  modified_base 1957: mod_base = OTHER; note = N1-methyl pseudouridine
  modified_base 1963: mod_base = OTHER; note = N1-methyl pseudouridine
  modified_base 1969: mod_base = OTHER; note = N1-methyl pseudouridine
  modified_base 1971: mod_base = OTHER; note = N1-methyl pseudouridine
  modified_base 1972: mod_base = OTHER; note = N1-methyl pseudouridine
  modified_base 1987: mod_base = OTHER; note = N1-methyl pseudouridine
  modified_base 1990: mod_base = OTHER; note = N1-methyl pseudouridine
  modified_base 2002: mod_base = OTHER; note = N1-methyl pseudouridine
  modified_base 2010: mod_base = OTHER; note = N1-methyl pseudouridine
  modified_base 2020: mod_base = OTHER; note = N1-methyl pseudouridine
  modified_base 2022: mod_base = OTHER; note = N1-methyl pseudouridine
  modified_base 2023: mod_base = OTHER; note = N1-methyl pseudouridine
  modified_base 2035: mod_base = OTHER; note = N1-methyl pseudouridine
  modified_base 2038: mod_base = OTHER; note = N1-methyl pseudouridine
  modified_base 2047: mod_base = OTHER; note = N1-methyl pseudouridine
  modified_base 2061: mod_base = OTHER; note = N1-methyl pseudouridine
  modified_base 2070: mod_base = OTHER; note = N1-methyl pseudouridine
  modified_base 2080: mod_base = OTHER; note = N1-methyl pseudouridine
  modified_base 2092: mod_base = OTHER; note = N1-methyl pseudouridine
  modified_base 2095: mod_base = OTHER; note = N1-methyl pseudouridine
  modified_base 2104: mod_base = OTHER; note = N1-methyl pseudouridine
  modified_base 2131: mod_base = OTHER; note = N1-methyl pseudouridine
  modified_base 2134: mod_base = OTHER; note = N1-methyl pseudouridine
  modified_base 2139: mod_base = OTHER; note = N1-methyl pseudouridine
  modified_base 2140: mod_base = OTHER; note = N1-methyl pseudouridine
  modified_base 2143: mod_base = OTHER; note = N1-methyl pseudouridine
  modified_base 2157: mod_base = OTHER; note = N1-methyl pseudouridine
  modified_base 2158: mod_base = OTHER; note = N1-methyl pseudouridine
  modified_base 2172: mod_base = OTHER; note = N1-methyl pseudouridine
  modified_base 2173: mod_base = OTHER; note = N1-methyl pseudouridine
  modified_base 2176: mod_base = OTHER; note = N1-methyl pseudouridine
  modified_base 2182: mod_base = OTHER; note = N1-methyl pseudouridine
  modified_base 2185: mod_base = OTHER; note = N1-methyl pseudouridine
  modified_base 2200: mod_base = OTHER; note = N1-methyl pseudouridine
  modified_base 2205: mod_base = OTHER; note = N1-methyl pseudouridine
  modified_base 2206: mod_base = OTHER; note = N1-methyl pseudouridine
  modified_base 2218: mod_base = OTHER; note = N1-methyl pseudouridine
  modified_base 2233: mod_base = OTHER; note = N1-methyl pseudouridine
  modified_base 2254: mod_base = OTHER; note = N1-methyl pseudouridine
  modified_base 2266: mod_base = OTHER; note = N1-methyl pseudouridine
  modified_base 2275: mod_base = OTHER; note = N1-methyl pseudouridine
  modified_base 2293: mod_base = OTHER; note = N1-methyl pseudouridine
  modified_base 2305: mod_base = OTHER; note = N1-methyl pseudouridine
  modified_base 2308: mod_base = OTHER; note = N1-methyl pseudouridine
  modified_base 2317: mod_base = OTHER; note = N1-methyl pseudouridine
  modified_base 2323: mod_base = OTHER; note = N1-methyl pseudouridine
  modified_base 2326: mod_base = OTHER; note = N1-methyl pseudouridine
  modified_base 2335: mod_base = OTHER; note = N1-methyl pseudouridine
  modified_base 2338: mod_base = OTHER; note = N1-methyl pseudouridine
  modified_base 2344: mod_base = OTHER; note = N1-methyl pseudouridine
  modified_base 2347: mod_base = OTHER; note = N1-methyl pseudouridine
  modified_base 2371: mod_base = OTHER; note = N1-methyl pseudouridine
  modified_base 2374: mod_base = OTHER; note = N1-methyl pseudouridine
  modified_base 2377: mod_base = OTHER; note = N1-methyl pseudouridine
  modified_base 2383: mod_base = OTHER; note = N1-methyl pseudouridine
  modified_base 2437: mod_base = OTHER; note = N1-methyl pseudouridine
  modified_base 2446: mod_base = OTHER; note = N1-methyl pseudouridine
  modified_base 2458: mod_base = OTHER; note = N1-methyl pseudouridine
  modified_base 2467: mod_base = OTHER; note = N1-methyl pseudouridine
  modified_base 2479: mod_base = OTHER; note = N1-methyl pseudouridine
  modified_base 2482: mod_base = OTHER; note = N1-methyl pseudouridine
  modified_base 2497: mod_base = OTHER; note = N1-methyl pseudouridine
  modified_base 2512: mod_base = OTHER; note = N1-methyl pseudouridine
  modified_base 2527: mod_base = OTHER; note = N1-methyl pseudouridine
  modified_base 2529: mod_base = OTHER; note = N1-methyl pseudouridine
  modified_base 2533: mod_base = OTHER; note = N1-methyl pseudouridine
  modified_base 2535: mod_base = OTHER; note = N1-methyl pseudouridine
  modified_base 2538: mod_base = OTHER; note = N1-methyl pseudouridine
  modified_base 2542: mod_base = OTHER; note = N1-methyl pseudouridine
  modified_base 2560: mod_base = OTHER; note = N1-methyl pseudouridine
  modified_base 2562: mod_base = OTHER; note = N1-methyl pseudouridine
  modified_base 2566: mod_base = OTHER; note = N1-methyl pseudouridine
  modified_base 2578: mod_base = OTHER; note = N1-methyl pseudouridine
  modified_base 2584: mod_base = OTHER; note = N1-methyl pseudouridine
  modified_base 2593: mod_base = OTHER; note = N1-methyl pseudouridine
  modified_base 2601: mod_base = OTHER; note = N1-methyl pseudouridine
  modified_base 2608: mod_base = OTHER; note = N1-methyl pseudouridine
  modified_base 2617: mod_base = OTHER; note = N1-methyl pseudouridine
  modified_base 2620: mod_base = OTHER; note = N1-methyl pseudouridine
  modified_base 2631: mod_base = OTHER; note = N1-methyl pseudouridine
  modified_base 2632: mod_base = OTHER; note = N1-methyl pseudouridine
  modified_base 2635: mod_base = OTHER; note = N1-methyl pseudouridine
  modified_base 2650: mod_base = OTHER; note = N1-methyl pseudouridine
  modified_base 2662: mod_base = OTHER; note = N1-methyl pseudouridine
  modified_base 2665: mod_base = OTHER; note = N1-methyl pseudouridine
  modified_base 2704: mod_base = OTHER; note = N1-methyl pseudouridine
  modified_base 2719: mod_base = OTHER; note = N1-methyl pseudouridine
  modified_base 2722: mod_base = OTHER; note = N1-methyl pseudouridine
  modified_base 2731: mod_base = OTHER; note = N1-methyl pseudouridine
  modified_base 2739: mod_base = OTHER; note = N1-methyl pseudouridine
  modified_base 2742: mod_base = OTHER; note = N1-methyl pseudouridine
  modified_base 2752: mod_base = OTHER; note = N1-methyl pseudouridine
  modified_base 2755: mod_base = OTHER; note = N1-methyl pseudouridine
  modified_base 2767: mod_base = OTHER; note = N1-methyl pseudouridine
  modified_base 2770: mod_base = OTHER; note = N1-methyl pseudouridine
  modified_base 2784: mod_base = OTHER; note = N1-methyl pseudouridine
  modified_base 2785: mod_base = OTHER; note = N1-methyl pseudouridine
  modified_base 2794: mod_base = OTHER; note = N1-methyl pseudouridine
  modified_base 2818: mod_base = OTHER; note = N1-methyl pseudouridine
  modified_base 2827: mod_base = OTHER; note = N1-methyl pseudouridine
  modified_base 2841: mod_base = OTHER; note = N1-methyl pseudouridine
  modified_base 2842: mod_base = OTHER; note = N1-methyl pseudouridine
  modified_base 2845: mod_base = OTHER; note = N1-methyl pseudouridine
  modified_base 2857: mod_base = OTHER; note = N1-methyl pseudouridine
  modified_base 2860: mod_base = OTHER; note = N1-methyl pseudouridine
  modified_base 2875: mod_base = OTHER; note = N1-methyl pseudouridine
  modified_base 2887: mod_base = OTHER; note = N1-methyl pseudouridine
  modified_base 2896: mod_base = OTHER; note = N1-methyl pseudouridine
  modified_base 2899: mod_base = OTHER; note = N1-methyl pseudouridine
  modified_base 2911: mod_base = OTHER; note = N1-methyl pseudouridine
  modified_base 2922: mod_base = OTHER; note = N1-methyl pseudouridine
  modified_base 2941: mod_base = OTHER; note = N1-methyl pseudouridine
  modified_base 2944: mod_base = OTHER; note = N1-methyl pseudouridine
  modified_base 2953: mod_base = OTHER; note = N1-methyl pseudouridine
  modified_base 2959: mod_base = OTHER; note = N1-methyl pseudouridine
  modified_base 2962: mod_base = OTHER; note = N1-methyl pseudouridine
  modified_base 2968: mod_base = OTHER; note = N1-methyl pseudouridine
  modified_base 2980: mod_base = OTHER; note = N1-methyl pseudouridine
  modified_base 2983: mod_base = OTHER; note = N1-methyl pseudouridine
  modified_base 2991: mod_base = OTHER; note = N1-methyl pseudouridine
  modified_base 2992: mod_base = OTHER; note = N1-methyl pseudouridine
  modified_base 3003: mod_base = OTHER; note = N1-methyl pseudouridine
  modified_base 3004: mod_base = OTHER; note = N1-methyl pseudouridine
  modified_base 3009: mod_base = OTHER; note = N1-methyl pseudouridine
  modified_base 3010: mod_base = OTHER; note = N1-methyl pseudouridine
  modified_base 3012: mod_base = OTHER; note = N1-methyl pseudouridine
  modified_base 3019: mod_base = OTHER; note = N1-methyl pseudouridine
  modified_base 3028: mod_base = OTHER; note = N1-methyl pseudouridine
  modified_base 3036: mod_base = OTHER; note = N1-methyl pseudouridine
  modified_base 3057: mod_base = OTHER; note = N1-methyl pseudouridine
  modified_base 3061: mod_base = OTHER; note = N1-methyl pseudouridine
  modified_base 3070: mod_base = OTHER; note = N1-methyl pseudouridine
  modified_base 3073: mod_base = OTHER; note = N1-methyl pseudouridine
  modified_base 3085: mod_base = OTHER; note = N1-methyl pseudouridine
  modified_base 3088: mod_base = OTHER; note = N1-methyl pseudouridine
  modified_base 3096: mod_base = OTHER; note = N1-methyl pseudouridine
  modified_base 3106: mod_base = OTHER; note = N1-methyl pseudouridine
  modified_base 3117: mod_base = OTHER; note = N1-methyl pseudouridine
  modified_base 3118: mod_base = OTHER; note = N1-methyl pseudouridine
  modified_base 3121: mod_base = OTHER; note = N1-methyl pseudouridine
  modified_base 3123: mod_base = OTHER; note = N1-methyl pseudouridine
  modified_base 3132: mod_base = OTHER; note = N1-methyl pseudouridine
  modified_base 3139: mod_base = OTHER; note = N1-methyl pseudouridine
  modified_base 3141: mod_base = OTHER; note = N1-methyl pseudouridine
  modified_base 3148: mod_base = OTHER; note = N1-methyl pseudouridine
  modified_base 3157: mod_base = OTHER; note = N1-methyl pseudouridine
  modified_base 3160: mod_base = OTHER; note = N1-methyl pseudouridine
  modified_base 3181: mod_base = OTHER; note = N1-methyl pseudouridine
  modified_base 3201: mod_base = OTHER; note = N1-methyl pseudouridine
  modified_base 3204: mod_base = OTHER; note = N1-methyl pseudouridine
  modified_base 3205: mod_base = OTHER; note = N1-methyl pseudouridine
  modified_base 3207: mod_base = OTHER; note = N1-methyl pseudouridine
  modified_base 3208: mod_base = OTHER; note = N1-methyl pseudouridine
  modified_base 3210: mod_base = OTHER; note = N1-methyl pseudouridine
  modified_base 3220: mod_base = OTHER; note = N1-methyl pseudouridine
  modified_base 3223: mod_base = OTHER; note = N1-methyl pseudouridine
  modified_base 3228: mod_base = OTHER; note = N1-methyl pseudouridine
  modified_base 3229: mod_base = OTHER; note = N1-methyl pseudouridine
  modified_base 3231: mod_base = OTHER; note = N1-methyl pseudouridine
  modified_base 3232: mod_base = OTHER; note = N1-methyl pseudouridine
  modified_base 3244: mod_base = OTHER; note = N1-methyl pseudouridine
  modified_base 3250: mod_base = OTHER; note = N1-methyl pseudouridine
  modified_base 3265: mod_base = OTHER; note = N1-methyl pseudouridine
  modified_base 3280: mod_base = OTHER; note = N1-methyl pseudouridine
  modified_base 3283: mod_base = OTHER; note = N1-methyl pseudouridine
  modified_base 3310: mod_base = OTHER; note = N1-methyl pseudouridine
  modified_base 3313: mod_base = OTHER; note = N1-methyl pseudouridine
  modified_base 3315: mod_base = OTHER; note = N1-methyl pseudouridine
  modified_base 3333: mod_base = OTHER; note = N1-methyl pseudouridine
  modified_base 3334: mod_base = OTHER; note = N1-methyl pseudouridine
  modified_base 3343: mod_base = OTHER; note = N1-methyl pseudouridine
  modified_base 3352: mod_base = OTHER; note = N1-methyl pseudouridine
  modified_base 3355: mod_base = OTHER; note = N1-methyl pseudouridine
  modified_base 3361: mod_base = OTHER; note = N1-methyl pseudouridine
  modified_base 3370: mod_base = OTHER; note = N1-methyl pseudouridine
  modified_base 3376: mod_base = OTHER; note = N1-methyl pseudouridine
  modified_base 3379: mod_base = OTHER; note = N1-methyl pseudouridine
  modified_base 3394: mod_base = OTHER; note = N1-methyl pseudouridine
  modified_base 3408: mod_base = OTHER; note = N1-methyl pseudouridine
  modified_base 3409: mod_base = OTHER; note = N1-methyl pseudouridine
  modified_base 3424: mod_base = OTHER; note = N1-methyl pseudouridine
  modified_base 3427: mod_base = OTHER; note = N1-methyl pseudouridine
  modified_base 3451: mod_base = OTHER; note = N1-methyl pseudouridine
  modified_base 3454: mod_base = OTHER; note = N1-methyl pseudouridine
  modified_base 3471: mod_base = OTHER; note = N1-methyl pseudouridine
  modified_base 3486: mod_base = OTHER; note = N1-methyl pseudouridine
  modified_base 3495: mod_base = OTHER; note = N1-methyl pseudouridine
  modified_base 3496: mod_base = OTHER; note = N1-methyl pseudouridine
  modified_base 3511: mod_base = OTHER; note = N1-methyl pseudouridine
  modified_base 3516: mod_base = OTHER; note = N1-methyl pseudouridine
  modified_base 3523: mod_base = OTHER; note = N1-methyl pseudouridine
  modified_base 3526: mod_base = OTHER; note = N1-methyl pseudouridine
  modified_base 3529: mod_base = OTHER; note = N1-methyl pseudouridine
  modified_base 3532: mod_base = OTHER; note = N1-methyl pseudouridine
  modified_base 3541: mod_base = OTHER; note = N1-methyl pseudouridine
  modified_base 3565: mod_base = OTHER; note = N1-methyl pseudouridine
  modified_base 3574: mod_base = OTHER; note = N1-methyl pseudouridine
  modified_base 3583: mod_base = OTHER; note = N1-methyl pseudouridine
  modified_base 3586: mod_base = OTHER; note = N1-methyl pseudouridine
  modified_base 3592: mod_base = OTHER; note = N1-methyl pseudouridine
  modified_base 3598: mod_base = OTHER; note = N1-methyl pseudouridine
  modified_base 3601: mod_base = OTHER; note = N1-methyl pseudouridine
  modified_base 3615: mod_base = OTHER; note = N1-methyl pseudouridine
  modified_base 3616: mod_base = OTHER; note = N1-methyl pseudouridine
  modified_base 3631: mod_base = OTHER; note = N1-methyl pseudouridine
  modified_base 3636: mod_base = OTHER; note = N1-methyl pseudouridine
  modified_base 3637: mod_base = OTHER; note = N1-methyl pseudouridine
  modified_base 3640: mod_base = OTHER; note = N1-methyl pseudouridine
  modified_base 3654: mod_base = OTHER; note = N1-methyl pseudouridine
  modified_base 3664: mod_base = OTHER; note = N1-methyl pseudouridine
  modified_base 3676: mod_base = OTHER; note = N1-methyl pseudouridine
  modified_base 3679: mod_base = OTHER; note = N1-methyl pseudouridine
  modified_base 3682: mod_base = OTHER; note = N1-methyl pseudouridine
  modified_base 3688: mod_base = OTHER; note = N1-methyl pseudouridine
  modified_base 3696: mod_base = OTHER; note = N1-methyl pseudouridine
  modified_base 3703: mod_base = OTHER; note = N1-methyl pseudouridine
  modified_base 3705: mod_base = OTHER; note = N1-methyl pseudouridine
  modified_base 3706: mod_base = OTHER; note = N1-methyl pseudouridine
  modified_base 3712: mod_base = OTHER; note = N1-methyl pseudouridine
  modified_base 3733: mod_base = OTHER; note = N1-methyl pseudouridine
  modified_base 3736: mod_base = OTHER; note = N1-methyl pseudouridine
  modified_base 3754: mod_base = OTHER; note = N1-methyl pseudouridine
  modified_base 3772: mod_base = OTHER; note = N1-methyl pseudouridine
  modified_base 3778: mod_base = OTHER; note = N1-methyl pseudouridine
  modified_base 3789: mod_base = OTHER; note = N1-methyl pseudouridine
  modified_base 3793: mod_base = OTHER; note = N1-methyl pseudouridine
  modified_base 3798: mod_base = OTHER; note = N1-methyl pseudouridine
  modified_base 3799: mod_base = OTHER; note = N1-methyl pseudouridine
  modified_base 3802: mod_base = OTHER; note = N1-methyl pseudouridine
  modified_base 3804: mod_base = OTHER; note = N1-methyl pseudouridine
  modified_base 3808: mod_base = OTHER; note = N1-methyl pseudouridine
  modified_base 3819: mod_base = OTHER; note = N1-methyl pseudouridine
  modified_base 3829: mod_base = OTHER; note = N1-methyl pseudouridine
  modified_base 3865: mod_base = OTHER; note = N1-methyl pseudouridine
  modified_base 3867: mod_base = OTHER; note = N1-methyl pseudouridine
  modified_base 3868: mod_base = OTHER; note = N1-methyl pseudouridine
  modified_base 3871: mod_base = OTHER; note = N1-methyl pseudouridine
  modified_base 3888: mod_base = OTHER; note = N1-methyl pseudouridine
  modified_base 3892: mod_base = OTHER; note = N1-methyl pseudouridine
  modified_base 3901: mod_base = OTHER; note = N1-methyl pseudouridine
  modified_base 3904: mod_base = OTHER; note = N1-methyl pseudouridine
  modified_base 3913: mod_base = OTHER; note = N1-methyl pseudouridine
  modified_base 3921: mod_base = OTHER; note = N1-methyl pseudouridine
  modified_base 3922: mod_base = OTHER; note = N1-methyl pseudouridine
  modified_base 3934: mod_base = OTHER; note = N1-methyl pseudouridine
  modified_base 3937: mod_base = OTHER; note = N1-methyl pseudouridine
  modified_base 3940: mod_base = OTHER; note = N1-methyl pseudouridine
  modified_base 3955: mod_base = OTHER; note = N1-methyl pseudouridine
  modified_base 3964: mod_base = OTHER; note = N1-methyl pseudouridine
  modified_base 3967: mod_base = OTHER; note = N1-methyl pseudouridine
  modified_base 3975: mod_base = OTHER; note = N1-methyl pseudouridine
  modified_base 4000: mod_base = OTHER; note = N1-methyl pseudouridine
  modified_base 4021: mod_base = OTHER; note = N1-methyl pseudouridine
  modified_base 4024: mod_base = OTHER; note = N1-methyl pseudouridine
  modified_base 4030: mod_base = OTHER; note = N1-methyl pseudouridine
  modified_base 4032: mod_base = OTHER; note = N1-methyl pseudouridine
  modified_base 4033: mod_base = OTHER; note = N1-methyl pseudouridine
  modified_base 4039: mod_base = OTHER; note = N1-methyl pseudouridine
  modified_base 4048: mod_base = OTHER; note = N1-methyl pseudouridine
  modified_base 4065: mod_base = OTHER; note = N1-methyl pseudouridine
  modified_base 4066: mod_base = OTHER; note = N1-methyl pseudouridine
  modified_base 4071: mod_base = OTHER; note = N1-methyl pseudouridine
  modified_base 4074: mod_base = OTHER; note = N1-methyl pseudouridine
  modified_base 4075: mod_base = OTHER; note = N1-methyl pseudouridine
  modified_base 4087: mod_base = OTHER; note = N1-methyl pseudouridine
  modified_base 4101: mod_base = OTHER; note = N1-methyl pseudouridine
  modified_base 4120: mod_base = OTHER; note = N1-methyl pseudouridine
  modified_base 4123: mod_base = OTHER; note = N1-methyl pseudouridine
  modified_base 4135: mod_base = OTHER; note = N1-methyl pseudouridine
  modified_base 4138: mod_base = OTHER; note = N1-methyl pseudouridine
  modified_base 4150: mod_base = OTHER; note = N1-methyl pseudouridine
  modified_base 4159: mod_base = OTHER; note = N1-methyl pseudouridine
  modified_base 4161: mod_base = OTHER; note = N1-methyl pseudouridine
  modified_base 4174: mod_base = OTHER; note = N1-methyl pseudouridine
  modified_base 4180: mod_base = OTHER; note = N1-methyl pseudouridine
  modified_base 4189: mod_base = OTHER; note = N1-methyl pseudouridine
  modified_base 4257: mod_base = OTHER; note = N1-methyl pseudouridine
  modified_base 4260: mod_base = OTHER; note = N1-methyl pseudouridine
  modified_base 4263: mod_base = OTHER; note = N1-methyl pseudouridine
  modified_base 4274: mod_base = OTHER; note = N1-methyl pseudouridine
  modified_base 4275: mod_base = OTHER; note = N1-methyl pseudouridine
  modified_base 4278: mod_base = OTHER; note = N1-methyl pseudouridine
  modified_base 4279: mod_base = OTHER; note = N1-methyl pseudouridine
  modified_base 4284: mod_base = OTHER; note = N1-methyl pseudouridine
  modified_base 4288: mod_base = OTHER; note = N1-methyl pseudouridine
  modified_base 4289: mod_base = OTHER; note = N1-methyl pseudouridine
  modified_base 4291: mod_base = OTHER; note = N1-methyl pseudouridine
  modified_base 4299: mod_base = OTHER; note = N1-methyl pseudouridine
  modified_base 4300: mod_base = OTHER; note = N1-methyl pseudouridine
  modified_base 4304: mod_base = OTHER; note = N1-methyl pseudouridine
  modified_base 4305: mod_base = OTHER; note = N1-methyl pseudouridine
  modified_base 4307: mod_base = OTHER; note = N1-methyl pseudouridine
  modified_base 4313: mod_base = OTHER; note = N1-methyl pseudouridine
  modified_base 4318: mod_base = OTHER; note = N1-methyl pseudouridine
  modified_base 4319: mod_base = OTHER; note = N1-methyl pseudouridine
  modified_base 4321: mod_base = OTHER; note = N1-methyl pseudouridine
  modified_base 4322: mod_base = OTHER; note = N1-methyl pseudouridine
  modified_base 4324: mod_base = OTHER; note = N1-methyl pseudouridine
  modified_base 4326: mod_base = OTHER; note = N1-methyl pseudouridine
  modified_base 4330: mod_base = OTHER; note = N1-methyl pseudouridine
  modified_base 4331: mod_base = OTHER; note = N1-methyl pseudouridine
  modified_base 4337: mod_base = OTHER; note = N1-methyl pseudouridine
  modified_base 4339: mod_base = OTHER; note = N1-methyl pseudouridine
  modified_base 4343: mod_base = OTHER; note = N1-methyl pseudouridine
  modified_base 4345: mod_base = OTHER; note = N1-methyl pseudouridine
  modified_base 4346: mod_base = OTHER; note = N1-methyl pseudouridine
  modified_base 4349: mod_base = OTHER; note = N1-methyl pseudouridine
  modified_base 4351: mod_base = OTHER; note = N1-methyl pseudouridine
  modified_base 4352: mod_base = OTHER; note = N1-methyl pseudouridine
  modified_base 4353: mod_base = OTHER; note = N1-methyl pseudouridine
  modified_base 4357: mod_base = OTHER; note = N1-methyl pseudouridine
  modified_base 4364: mod_base = OTHER; note = N1-methyl pseudouridine
  modified_base 4368: mod_base = OTHER; note = N1-methyl pseudouridine
  modified_base 4375: mod_base = OTHER; note = N1-methyl pseudouridine
  modified_base 4377: mod_base = OTHER; note = N1-methyl pseudouridine
aggaaataagagagaaaagaagagtaagaagaaatataagagccaccatggcccccaagaagaagcgcaaggtgggcatccacggcgtgcccgccgccgacaagaagtacagcatcggcctggacatcggcaccaacagcgtgggctgggccgtgatcaccgacgagtacaaggtgcccagcaagaagttcaaggtgctgggcaacaccgaccgccacagcatcaagaagaacctgatcggcgccctgctgttcgacagcggcgagacagccgaggccacccgcctgaagcgcaccgcccgccgccgctacacccgccgcaagaaccgcatctgctacctgcaggagatcttcagcaacgagatggccaaggtggacgacagcttcttccaccgcctggaggagagcttcctggtggaggaggacaagaagcacgagcgccaccccatcttcggcaacatcgtggacgaggtggcctaccacgagaagtaccccaccatctaccacctgcgcaagaagctggtggacagcaccgacaaggccgacctgcgcctgatctacctggccctggcccacatgatcaagttccgcggccacttcctgatcgagggcgacctgaaccccgacaacagcgacgtggacaagctgttcatccagctggtgcagacctacaaccagctgttcgaggagaaccccatcaacgccagcggcgtggacgccaaggccatcctgagcgcccgcctgagcaagagccgccgcctggagaacctgatcgcccagctgcccggcgagaagaagaacggcctgttcggcaacctgatcgccctgagcctgggcctgacccccaacttcaagagcaacttcgacctggccgaggacgccaagctgcagctgagcaaggacacctacgacgacgacctggacaacctgctggcccagatcggcgaccagtacgccgacctgttcctggccgccaagaacctgagcgacgccatcctgctgagcgacatcctgcgcgtgaacaccgagatcaccaaggcccccctgagcgccagcatgatcaagcgctacgacgagcaccaccaggacctgaccctgctgaaggccctggtgcgccagcagctgcccgagaagtacaaggagatcttcttcgaccagagcaagaacggctacgccggctacatcgacggcggcgccagccaggaggagttctacaagttcatcaagcccatcctggagaagatggacggcaccgaggagctgctggtgaagctgaaccgcgaggacctgctgcgcaagcagcgcaccttcgacaacggcagcatcccccaccagatccacctgggcgagctgcacgccatcctgcgccgccaggaggacttctaccccttcctgaaggacaaccgcgagaagatcgagaagatcctgaccttccgcatcccctactacgtgggccccctggcccgcggcaacagccgcttcgcctggatgacccgcaagagcgaggagacaatcaccccctggaacttcgaggaggtggtggacaagggcgccagcgcccagagcttcatcgagcgcatgaccaacttcgacaagaacctgcccaacgagaaggtgctgcccaagcacagcctgctgtacgagtacttcaccgtgtacaacgagctgaccaaggtgaagtacgtgaccgagggcatgcgcaagcccgccttcctgagcggcgagcagaagaaggccatcgtggacctgctgttcaagaccaaccgcaaggtgaccgtgaagcagctgaaggaggactacttcaagaagatcgagtgcttcgacagcgtggagatcagcggcgtggaggaccgcttcaacgccagcctgggcacctaccacgacctgctgaagatcatcaaggacaaggacttcctggacaacgaggagaacgaggacatcctggaggacatcgtgctgaccctgaccctgttcgaggaccgcgagatgatcgaggagcgcctgaagacctacgcccacctgttcgacgacaaggtgatgaagcagctgaagcgccgccgctacaccggctggggccgcctgagccgcaagctgatcaacggcatccgcgacaagcagagcggcaagaccatcctggacttcctcaagagcgacggcttcgccaaccgcaacttcatgcagctgatccacgacgacagcctgaccttcaaggaggacatccagaaggcccaggtgagcggccagggcgacagcctgcacgagcacatcgccaacctggccggcagccccgccatcaagaagggcatcctgcagaccgtgaaggtggtggacgagctggtgaaggtgatgggccgccacaagcccgagaacatcgtgatcgagatggcccgcgagaaccagaccacccagaagggccagaagaacagccgcgagcgcatgaagcgcatcgaggagggcatcaaggagctgggcagccagatcctgaaggagcaccccgtggagaacacccagctgcagaacgagaagctgtacctgtactacctgcagaacggccgcgacatgtacgtggaccaggagctggacatcaaccgcctgagcgactacgacgtggaccacatcgtgccccagagcttcctgaaggacgacagcatcgacaacaaggtgctgacccgcagcgacaagaaccgcggcaagagcgacaacgtgcccagcgaggaggtggtgaagaagatgaagaactactggcgccagctgctgaacgccaagctgatcacccagcgcaagttcgacaacctgaccaaggccgagcgcggcggcctgagcgagctggacaaggccggcttcatcaagcgccagctggtggagacacgccagatcaccaagcacgtggcccagatcctggacagccgcatgaacaccaagtacgacgagaacgacaagctgatccgcgaggtgaaggtgatcaccctcaagagcaagctggtgagcgacttccgcaaggacttccagttctacaaggtgcgcgagatcaacaactaccaccacgcccacgacgcctacctgaacgccgtggtgggcaccgccctgatcaagaagtaccccaagctggagagcgagttcgtgtacggcgactacaaggtgtacgacgtgcgcaagatgatcgccaagagcgagcaggagatcggcaaggccaccgccaagtacttcttctacagcaacatcatgaacttcttcaagaccgagatcaccctggccaacggcgagatccgcaagcgccccctgatcgagacaaacggcgagacaggcgagatcgtgtgggacaagggccgcgacttcgccaccgtgcgcaaggtgctgagcatgccccaggtgaacatcgtgaagaagaccgaggtgcagaccggcggcttcagcaaggagagcatcctgcccaagcgcaacagcgacaagctgatcgcccgcaagaaggactgggaccccaagaagtacggcggcttcgacagccccaccgtggcctacagcgtgctggtggtggccaaggtggagaagggcaagagcaagaagctcaagagcgtgaaggagctgctgggcatcaccatcatggagcgcagcagcttcgagaagaaccccatcgacttcctggaggccaagggctacaaggaggtgaagaaggacctgatcatcaagctgcccaagtacagcctgttcgagctggagaacggccgcaagcgcatgctggccagcgccggcgagctgcagaagggcaacgagctggccctgcccagcaagtacgtgaacttcctgtacctggccagccactacgagaagctgaagggcagccccgaggacaacgagcagaagcagctgttcgtggagcagcacaagcactacctggacgagatcatcgagcagatcagcgagttcagcaagcgcgtgatcctggccgacgccaacctggacaaggtgctgagcgcctacaacaagcaccgcgacaagcccatccgcgagcaggccgagaacatcatccacctgttcaccctgaccaacctgggcgcccccgccgccttcaagtacttcgacaccaccatcgaccgcaagcgctacaccagcaccaaggaggtgctggacgccaccctgatccaccagagcatcaccggcctgtacgagacacgcatcgacctgagccagctgggcggcgacagcggcggcaagcgccccgccgccaccaagaaggccggccaggccaagaagaagaagtaataataagcggccgcttaattaagctgccttctgcggggcttgccttctggccatgcccttcttctctcccttgcacctgtacctcttggtctttgaataaagcctgagtaggaagtctaga

SEQ ID NO: 2190 - RNA, 4218 nt, synthetic construct
  source 1..4218: mol_type = other RNA
  modified_base 2: mod_base = OTHER; note = N1-methyl pseudouridine
  modified_base 26: mod_base = OTHER; note = N1-methyl pseudouridine
  modified_base 32: mod_base = OTHER; note = N1-methyl pseudouridine
  modified_base 41: mod_base = OTHER; note = N1-methyl pseudouridine
  modified_base 61: mod_base = OTHER; note = N1-methyl pseudouridine
  modified_base 68: mod_base = OTHER; note = N1-methyl pseudouridine
  modified_base 74: mod_base = OTHER; note = N1-methyl pseudouridine
  modified_base 80: mod_base = OTHER; note = N1-methyl pseudouridine
  modified_base 95: mod_base = OTHER; note = N1-methyl pseudouridine
  modified_base 100: mod_base = OTHER; note = N1-methyl pseudouridine
  modified_base 107: mod_base = OTHER; note = N1-methyl pseudouridine
  modified_base 110: mod_base = OTHER; note = N1-methyl pseudouridine
  modified_base 121: mod_base = OTHER; note = N1-methyl pseudouridine
  modified_base 128: mod_base = OTHER; note = N1-methyl pseudouridine
  modified_base 142: mod_base = OTHER; note = N1-methyl pseudouridine
  modified_base 143: mod_base = OTHER; note = N1-methyl pseudouridine
  modified_base 149: mod_base = OTHER; note = N1-methyl pseudouridine
  modified_base 152: mod_base = OTHER; note = N1-methyl pseudouridine
  modified_base 176: mod_base = OTHER; note = N1-methyl pseudouridine
  modified_base 188: mod_base = OTHER; note = N1-methyl pseudouridine
  modified_base 191: mod_base = OTHER; note = N1-methyl pseudouridine
  modified_base 200: mod_base = OTHER; note = N1-methyl pseudouridine
  modified_base 203: mod_base = OTHER; note = N1-methyl pseudouridine
  modified_base 205: mod_base = OTHER; note = N1-methyl pseudouridine
  modified_base 206: mod_base = OTHER; note = N1-methyl pseudouridine
  modified_base 239: mod_base = OTHER; note = N1-methyl pseudouridine
  modified_base 262: mod_base = OTHER; note = N1-methyl pseudouridine
  modified_base 284: mod_base = OTHER; note = N1-methyl pseudouridine
  modified_base 286: mod_base = OTHER; note = N1-methyl pseudouridine
  modified_base 289: mod_base = OTHER; note = N1-methyl pseudouridine
  modified_base 293: mod_base = OTHER; note = N1-methyl pseudouridine
  modified_base 302: mod_base = OTHER; note = N1-methyl pseudouridine
  modified_base 304: mod_base = OTHER; note = N1-methyl pseudouridine
  modified_base 305: mod_base = OTHER; note = N1-methyl pseudouridine
  modified_base 317: mod_base = OTHER; note = N1-methyl pseudouridine
  modified_base 326: mod_base = OTHER; note = N1-methyl pseudouridine
  modified_base 337: mod_base = OTHER; note = N1-methyl pseudouridine
  modified_base 338: mod_base = OTHER; note = N1-methyl pseudouridine
  modified_base 340: mod_base = OTHER; note = N1-methyl pseudouridine
  modified_base 341: mod_base = OTHER; note = N1-methyl pseudouridine
  modified_base 350: mod_base = OTHER; note = N1-methyl pseudouridine
  modified_base 361: mod_base = OTHER; note = N1-methyl pseudouridine
  modified_base 362: mod_base = OTHER; note = N1-methyl pseudouridine
  modified_base 365: mod_base = OTHER; note = N1-methyl pseudouridine
  modified_base 368: mod_base = OTHER; note = N1-methyl pseudouridine
  modified_base 401: mod_base = OTHER; note = N1-methyl pseudouridine
  modified_base 403: mod_base = OTHER; note = N1-methyl pseudouridine
  modified_base 404: mod_base = OTHER; note = N1-methyl pseudouridine
  modified_base 413: mod_base = OTHER; note = N1-methyl pseudouridine
  modified_base 416: mod_base = OTHER; note = N1-methyl pseudouridine
  modified_base 425: mod_base = OTHER; note = N1-methyl pseudouridine
  modified_base 430: mod_base = OTHER; note = N1-methyl pseudouridine
  modified_base 442: mod_base = OTHER; note = N1-methyl pseudouridine
  modified_base 452: mod_base = OTHER; note = N1-methyl pseudouridine
  modified_base 454: mod_base = OTHER; note = N1-methyl pseudouridine
  modified_base 461: mod_base = OTHER; note = N1-methyl pseudouridine
  modified_base 473: mod_base = OTHER; note = N1-methyl pseudouridine
  modified_base 476: mod_base = OTHER; note = N1-methyl pseudouridine
  modified_base 500: mod_base = OTHER; note = N1-methyl pseudouridine
  modified_base 506: mod_base = OTHER; note = N1-methyl pseudouridine
  modified_base 509: mod_base = OTHER; note = N1-methyl pseudouridine
  modified_base 511: mod_base = OTHER; note = N1-methyl pseudouridine
  modified_base 515: mod_base = OTHER; note = N1-methyl pseudouridine
  modified_base 521: mod_base = OTHER; note = N1-methyl pseudouridine
  modified_base 530: mod_base = OTHER; note = N1-methyl pseudouridine
  modified_base 533: mod_base = OTHER; note = N1-methyl pseudouridine
  modified_base 538: mod_base = OTHER; note = N1-methyl pseudouridine
  modified_base 539: mod_base = OTHER; note = N1-methyl pseudouridine
  modified_base 550: mod_base = OTHER; note = N1-methyl pseudouridine
  modified_base 551: mod_base = OTHER; note = N1-methyl pseudouridine
  modified_base 554: mod_base = OTHER; note = N1-methyl pseudouridine
  modified_base 557: mod_base = OTHER; note = N1-methyl pseudouridine
  modified_base 569: mod_base = OTHER; note = N1-methyl pseudouridine
  modified_base 590: mod_base = OTHER; note = N1-methyl pseudouridine
  modified_base 599: mod_base = OTHER; note = N1-methyl pseudouridine
  modified_base 601: mod_base = OTHER; note = N1-methyl pseudouridine
  modified_base 602: mod_base = OTHER; note = N1-methyl pseudouridine
  modified_base 605: mod_base = OTHER; note = N1-methyl pseudouridine
  modified_base 611: mod_base = OTHER; note = N1-methyl pseudouridine
  modified_base 614: mod_base = OTHER; note = N1-methyl pseudouridine
  modified_base 622: mod_base = OTHER; note = N1-methyl pseudouridine
  modified_base 632: mod_base = OTHER; note = N1-methyl pseudouridine
  modified_base 634: mod_base = OTHER; note = N1-methyl pseudouridine
  modified_base 635: mod_base = OTHER; note = N1-methyl pseudouridine
  modified_base 650: mod_base = OTHER; note = N1-methyl pseudouridine
  modified_base 665: mod_base = OTHER; note = N1-methyl pseudouridine
  modified_base 680: mod_base = OTHER; note = N1-methyl pseudouridine
  modified_base 683: mod_base = OTHER; note = N1-methyl pseudouridine
  modified_base 695: mod_base = OTHER; note = N1-methyl pseudouridine
  modified_base 713: mod_base = OTHER; note = N1-methyl pseudouridine
  modified_base 722: mod_base = OTHER; note = N1-methyl pseudouridine
  modified_base 725: mod_base = OTHER; note = N1-methyl pseudouridine
  modified_base 734: mod_base = OTHER; note = N1-methyl pseudouridine
  modified_base 758: mod_base = OTHER; note = N1-methyl pseudouridine
  modified_base 760: mod_base = OTHER; note = N1-methyl pseudouridine
  modified_base 761: mod_base = OTHER; note = N1-methyl pseudouridine
  modified_base 770: mod_base = OTHER; note = N1-methyl pseudouridine
  modified_base 773: mod_base = OTHER; note = N1-methyl pseudouridine
  modified_base 779: mod_base = OTHER; note = N1-methyl pseudouridine
  modified_base 785: mod_base = OTHER; note = N1-methyl pseudouridine
  modified_base 791: mod_base = OTHER; note = N1-methyl pseudouridine
  modified_base 802: mod_base = OTHER; note = N1-methyl pseudouridine
  modified_base 803: mod_base = OTHER; note = N1-methyl pseudouridine
  modified_base 814: mod_base = OTHER; note = N1-methyl pseudouridine
  modified_base 815: mod_base = OTHER; note = N1-methyl pseudouridine
  modified_base 821: mod_base = OTHER; note = N1-methyl pseudouridine
  modified_base 839: mod_base = OTHER; note = N1-methyl pseudouridine
  modified_base 845: mod_base = OTHER; note = N1-methyl pseudouridine
  modified_base 859: mod_base = OTHER; note = N1-methyl pseudouridine
  modified_base 872: mod_base = OTHER; note = N1-methyl pseudouridine
  modified_base 881: mod_base = OTHER; note = N1-methyl pseudouridine
  modified_base 884: mod_base = OTHER; note = N1-methyl pseudouridine
  modified_base 893: mod_base = OTHER; note = N1-methyl pseudouridine
  modified_base 904: mod_base = OTHER; note = N1-methyl pseudouridine
  modified_base 914: mod_base = OTHER; note = N1-methyl pseudouridine
  modified_base 916: mod_base = OTHER; note = N1-methyl pseudouridine
  modified_base 917: mod_base = OTHER; note = N1-methyl pseudouridine
  modified_base 920: mod_base = OTHER; note = N1-methyl pseudouridine
  modified_base 935: mod_base = OTHER; note = N1-methyl pseudouridine
  modified_base 947: mod_base = OTHER; note = N1-methyl pseudouridine
  modified_base 950: mod_base = OTHER; note = N1-methyl pseudouridine
  modified_base 953: mod_base = OTHER; note = N1-methyl pseudouridine
  modified_base 962: mod_base = OTHER; note = N1-methyl pseudouridine
  modified_base 965: mod_base = OTHER; note = N1-methyl pseudouridine
  modified_base 971: mod_base = OTHER; note = N1-methyl pseudouridine
  modified_base 983: mod_base = OTHER; note = N1-methyl pseudouridine
  modified_base 998: mod_base = OTHER; note = N1-methyl pseudouridine
  modified_base 1010: mod_base = OTHER; note = N1-methyl pseudouridine
  modified_base 1013: mod_base = OTHER; note = N1-methyl pseudouridine
  modified_base 1021: mod_base = OTHER; note = N1-methyl pseudouridine
  modified_base 1043: mod_base = OTHER; note = N1-methyl pseudouridine
  modified_base 1049: mod_base = OTHER; note = N1-methyl pseudouridine
  modified_base 1052: mod_base = OTHER; note = N1-methyl pseudouridine
  modified_base 1061: mod_base = OTHER; note = N1-methyl pseudouridine
  modified_base 1064: mod_base = OTHER; note = N1-methyl pseudouridine
  modified_base 1076: mod_base = OTHER; note = N1-methyl pseudouridine
  modified_base 1087: mod_base = OTHER; note = N1-methyl pseudouridine
  modified_base 1097: mod_base = OTHER; note = N1-methyl pseudouridine
  modified_base 1099: mod_base = OTHER; note = N1-methyl pseudouridine
  modified_base 1100: mod_base = OTHER; note = N1-methyl pseudouridine
  modified_base 1102: mod_base = OTHER; note = N1-methyl pseudouridine
  modified_base 1103: mod_base = OTHER; note = N1-methyl pseudouridine
  modified_base 1123: mod_base = OTHER; note = N1-methyl pseudouridine
  modified_base 1132: mod_base = OTHER; note = N1-methyl pseudouridine
  modified_base 1136: mod_base = OTHER; note = N1-methyl pseudouridine
  modified_base 1162: mod_base = OTHER; note = N1-methyl pseudouridine
  modified_base 1163: mod_base = OTHER; note = N1-methyl pseudouridine
  modified_base 1165: mod_base = OTHER; note = N1-methyl pseudouridine
  modified_base 1171: mod_base = OTHER; note = N1-methyl pseudouridine
  modified_base 1172: mod_base = OTHER; note = N1-methyl pseudouridine
  modified_base 1175: mod_base = OTHER; note = N1-methyl pseudouridine
  modified_base 1184: mod_base = OTHER; note = N1-methyl pseudouridine
  modified_base 1187: mod_base = OTHER; note = N1-methyl pseudouridine
  modified_base 1196: mod_base = OTHER; note = N1-methyl pseudouridine
  modified_base 1214: mod_base = OTHER; note = N1-methyl pseudouridine
  modified_base 1217: mod_base = OTHER; note = N1-methyl pseudouridine
  modified_base 1220: mod_base = OTHER; note = N1-methyl pseudouridine
  modified_base 1226: mod_base = OTHER; note = N1-methyl pseudouridine
  modified_base 1241: mod_base = OTHER; note = N1-methyl pseudouridine
  modified_base 1244: mod_base = OTHER; note = N1-methyl pseudouridine
  modified_base 1261: mod_base = OTHER; note = N1-methyl pseudouridine
  modified_base 1262: mod_base = OTHER; note = N1-methyl pseudouridine
  modified_base 1277: mod_base = OTHER; note = N1-methyl pseudouridine
  modified_base 1289: mod_base = OTHER; note = N1-methyl pseudouridine
  modified_base 1295: mod_base = OTHER; note = N1-methyl pseudouridine
  modified_base 1304: mod_base = OTHER; note = N1-methyl pseudouridine
  modified_base 1313: mod_base = OTHER; note = N1-methyl pseudouridine
  modified_base 1316: mod_base = OTHER; note = N1-methyl pseudouridine
  modified_base 1333: mod_base = OTHER; note = N1-methyl pseudouridine
  modified_base 1334: mod_base = OTHER; note = N1-methyl pseudouridine
  modified_base 1336: mod_base = OTHER; note = N1-methyl pseudouridine
  modified_base 1342: mod_base = OTHER; note = N1-methyl pseudouridine
  modified_base 1343: mod_base = OTHER; note = N1-methyl pseudouridine
  modified_base 1346: mod_base = OTHER; note = N1-methyl pseudouridine
  modified_base 1367: mod_base = OTHER; note = N1-methyl pseudouridine
  modified_base 1376: mod_base = OTHER; note = N1-methyl pseudouridine
  modified_base 1379: mod_base = OTHER; note = N1-methyl pseudouridine
  modified_base 1384: mod_base = OTHER; note = N1-methyl pseudouridine
  modified_base 1385: mod_base = OTHER; note = N1-methyl pseudouridine
  modified_base 1391: mod_base = OTHER; note = N1-methyl pseudouridine
  modified_base 1396: mod_base = OTHER; note = N1-methyl pseudouridine
  modified_base 1399: mod_base = OTHER; note = N1-methyl pseudouridine
  modified_base 1403: mod_base = OTHER; note = N1-methyl pseudouridine
  modified_base 1412: mod_base = OTHER; note = N1-methyl pseudouridine
  modified_base 1432: mod_base = OTHER; note = N1-methyl pseudouridine
  modified_base 1433: mod_base = OTHER; note = N1-methyl pseudouridine
  modified_base 1438: mod_base = OTHER; note = N1-methyl pseudouridine
  modified_base 1442: mod_base = OTHER; note = N1-methyl pseudouridine
  modified_base 1466: mod_base = OTHER; note = N1-methyl pseudouridine
  modified_base 1474: mod_base = OTHER; note = N1-methyl pseudouridine
  modified_base 1480: mod_base = OTHER; note = N1-methyl pseudouridine
  modified_base 1481: mod_base = OTHER; note = N1-methyl pseudouridine
  modified_base 1490: mod_base = OTHER; note = N1-methyl pseudouridine
  modified_base 1493: mod_base = OTHER; note = N1-methyl pseudouridine
  modified_base 1519: mod_base = OTHER; note = N1-methyl pseudouridine
  modified_base 1520: mod_base = OTHER; note = N1-methyl pseudouridine
  modified_base 1523: mod_base = OTHER; note = N1-methyl pseudouridine
  modified_base 1532: mod_base = OTHER; note = N1-methyl pseudouridine
  modified_base 1540: mod_base = OTHER; note = N1-methyl pseudouridine
  modified_base 1541: mod_base = OTHER; note = N1-methyl pseudouridine
  modified_base 1553: mod_base = OTHER; note = N1-methyl pseudouridine
  modified_base 1568: mod_base = OTHER; note = N1-methyl pseudouridine
  modified_base 1571: mod_base = OTHER; note = N1-methyl pseudouridine
  modified_base 1586: mod_base = OTHER; note = N1-methyl pseudouridine
  modified_base 1589: mod_base = OTHER; note = N1-methyl pseudouridine
  modified_base 1591: mod_base = OTHER; note = N1-methyl pseudouridine
  modified_base 1597: mod_base = OTHER; note = N1-methyl pseudouridine
  modified_base 1600: mod_base = OTHER; note = N1-methyl pseudouridine
  modified_base 1601: mod_base = OTHER; note = N1-methyl pseudouridine
  modified_base 1607: mod_base = OTHER; note = N1-methyl pseudouridine
  modified_base 1609: mod_base = OTHER; note = N1-methyl pseudouridine
  modified_base 1619: mod_base = OTHER; note = N1-methyl pseudouridine
  modified_base 1628: mod_base = OTHER; note = N1-methyl pseudouridine
  modified_base 1633: mod_base = OTHER; note = N1-methyl pseudouridine
  modified_base 1637: mod_base = OTHER; note = N1-methyl pseudouridine
  modified_base 1649: mod_base = OTHER; note = N1-methyl pseudouridine
  modified_base 1663: mod_base = OTHER; note = N1-methyl pseudouridine
  modified_base 1664: mod_base = OTHER; note = N1-methyl pseudouridine
  modified_base 1667: mod_base = OTHER; note = N1-methyl pseudouridine
  modified_base 1691: mod_base = OTHER; note = N1-methyl pseudouridine
  modified_base 1694: mod_base = OTHER; note = N1-methyl pseudouridine
  modified_base 1700: mod_base = OTHER; note = N1-methyl pseudouridine
  modified_base 1703: mod_base = OTHER; note = N1-methyl pseudouridine
  modified_base 1705: mod_base = OTHER; note = N1-methyl pseudouridine
  modified_base 1706: mod_base = OTHER; note = N1-methyl pseudouridine
  modified_base 1724: mod_base = OTHER; note = N1-methyl pseudouridine
  modified_base 1730: mod_base = OTHER; note = N1-methyl pseudouridine
  modified_base 1739: mod_base = OTHER; note = N1-methyl pseudouridine
  modified_base 1750: mod_base = OTHER; note = N1-methyl pseudouridine
  modified_base 1753: mod_base = OTHER; note = N1-methyl pseudouridine
  modified_base 1754: mod_base = OTHER; note = N1-methyl pseudouridine
  modified_base 1763: mod_base = OTHER; note = N1-methyl pseudouridine
  modified_base 1768: mod_base = OTHER; note = N1-methyl pseudouridine
  modified_base 1771: mod_base = OTHER; note = N1-methyl pseudouridine
  modified_base 1772: mod_base = OTHER; note = N1-methyl pseudouridine
  modified_base 1781: mod_base = OTHER; note = N1-methyl pseudouridine
  modified_base 1787: mod_base = OTHER; note = N1-methyl pseudouridine
  modified_base 1796: mod_base = OTHER; note = N1-methyl pseudouridine
  modified_base 1807: mod_base = OTHER; note = N1-methyl pseudouridine
  modified_base 1808: mod_base = OTHER; note = N1-methyl pseudouridine
  modified_base 1820: mod_base = OTHER; note = N1-methyl pseudouridine
  modified_base 1828: mod_base = OTHER; note = N1-methyl pseudouridine
  modified_base 1838: mod_base = OTHER; note = N1-methyl pseudouridine
  modified_base 1841: mod_base = OTHER; note = N1-methyl pseudouridine
  modified_base 1847: mod_base = OTHER; note = N1-methyl pseudouridine
  modified_base 1850: mod_base = OTHER; note = N1-methyl pseudouridine
  modified_base 1864: mod_base = OTHER; note = N1-methyl pseudouridine
  modified_base 1865: mod_base = OTHER; note = N1-methyl pseudouridine
  modified_base 1868: mod_base = OTHER; note = N1-methyl pseudouridine
  modified_base 1892: mod_base = OTHER; note = N1-methyl pseudouridine
  modified_base 1895: mod_base = OTHER; note = N1-methyl pseudouridine
  modified_base 1904: mod_base = OTHER; note = N1-methyl pseudouridine
  modified_base 1907: mod_base = OTHER; note = N1-methyl pseudouridine
  modified_base 1910: mod_base = OTHER; note = N1-methyl pseudouridine
  modified_base 1916: mod_base = OTHER; note = N1-methyl pseudouridine
  modified_base 1922: mod_base = OTHER; note = N1-methyl pseudouridine
  modified_base 1924: mod_base = OTHER; note = N1-methyl pseudouridine
  modified_base 1925: mod_base = OTHER; note = N1-methyl pseudouridine
  modified_base 1940: mod_base = OTHER; note = N1-methyl pseudouridine
  modified_base 1943: mod_base = OTHER; note = N1-methyl pseudouridine
  modified_base 1955: mod_base = OTHER; note = N1-methyl pseudouridine
  modified_base 1963: mod_base = OTHER; note = N1-methyl pseudouridine
  modified_base 1973: mod_base = OTHER; note = N1-methyl pseudouridine
  modified_base 1975: mod_base = OTHER; note = N1-methyl pseudouridine
  modified_base 1976: mod_base = OTHER; note = N1-methyl pseudouridine
  modified_base 1988: mod_base = OTHER; note = N1-methyl pseudouridine
  modified_base 1991: mod_base = OTHER; note = N1-methyl pseudouridine
  modified_base 2000: mod_base = OTHER; note = N1-methyl pseudouridine
  modified_base 2014: mod_base = OTHER; note = N1-methyl pseudouridine
  modified_base 2023: mod_base = OTHER; note = N1-methyl pseudouridine
  modified_base 2033: mod_base = OTHER; note = N1-methyl pseudouridine
  modified_base 2045: mod_base = OTHER; note = N1-methyl pseudouridine
  modified_base 2048: mod_base = OTHER; note = N1-methyl pseudouridine
  modified_base 2057: mod_base = OTHER; note = N1-methyl pseudouridine
  modified_base 2084: mod_base = OTHER; note = N1-methyl pseudouridine
  modified_base 2087: mod_base = OTHER; note = N1-methyl pseudouridine
  modified_base 2092: mod_base = OTHER; note = N1-methyl pseudouridine
  modified_base 2093: mod_base = OTHER; note = N1-methyl pseudouridine
  modified_base 2096: mod_base = OTHER; note = N1-methyl pseudouridine
  modified_base 2110: mod_base = OTHER; note = N1-methyl pseudouridine
  modified_base 2111: mod_base = OTHER; note = N1-methyl pseudouridine
  modified_base 2125: mod_base = OTHER; note = N1-methyl pseudouridine
  modified_base 2126: mod_base = OTHER; note = N1-methyl pseudouridine
  modified_base 2129: mod_base = OTHER; note = N1-methyl pseudouridine
  modified_base 2135: mod_base = OTHER; note = N1-methyl pseudouridine
  modified_base 2138: mod_base = OTHER; note = N1-methyl pseudouridine
  modified_base 2153: mod_base = OTHER; note = N1-methyl pseudouridine
  modified_base 2158: mod_base = OTHER; note = N1-methyl pseudouridine
  modified_base 2159: mod_base = OTHER; note = N1-methyl pseudouridine
  modified_base 2171: mod_base = OTHER; note = N1-methyl pseudouridine
  modified_base 2186: mod_base = OTHER; note = N1-methyl pseudouridine
  modified_base 2207: mod_base = OTHER; note = N1-methyl pseudouridine
  modified_base 2219: mod_base = OTHER; note = N1-methyl pseudouridine
  modified_base 2228: mod_base = OTHER; note = N1-methyl pseudouridine
  modified_base 2246: mod_base = OTHER; note = N1-methyl pseudouridine
  modified_base 2258: mod_base = OTHER; note = N1-methyl pseudouridine
  modified_base 2261: mod_base = OTHER; note = N1-methyl pseudouridine
  modified_base 2270: mod_base = OTHER; note = N1-methyl pseudouridine
  modified_base 2276: mod_base = OTHER; note = N1-methyl pseudouridine
  modified_base 2279: mod_base = OTHER; note = N1-methyl pseudouridine
  modified_base 2288: mod_base = OTHER; note = N1-methyl pseudouridine
  modified_base 2291: mod_base = OTHER; note = N1-methyl pseudouridine
  modified_base 2297: mod_base = OTHER; note = N1-methyl pseudouridine
  modified_base 2300: mod_base = OTHER; note = N1-methyl pseudouridine
  modified_base 2324: mod_base = OTHER; note = N1-methyl pseudouridine
  modified_base 2327: mod_base = OTHER; note = N1-methyl pseudouridine
  modified_base 2330: mod_base = OTHER; note = N1-methyl pseudouridine
  modified_base 2336: mod_base = OTHER; note = N1-methyl pseudouridine
  modified_base 2390: mod_base = OTHER; note = N1-methyl pseudouridine
  modified_base 2399: mod_base = OTHER; note = N1-methyl pseudouridine
  modified_base 2411: mod_base = OTHER; note = N1-methyl pseudouridine
  modified_base 2420: mod_base = OTHER; note = N1-methyl pseudouridine
  modified_base 2432: mod_base = OTHER; note = N1-methyl pseudouridine
  modified_base 2435: mod_base = OTHER; note = N1-methyl pseudouridine
  modified_base 2450: mod_base = OTHER; note = N1-methyl pseudouridine
  modified_base 2465: mod_base = OTHER; note = N1-methyl pseudouridine
  modified_base 2480: mod_base = OTHER; note = N1-methyl pseudouridine
  modified_base 2482: mod_base = OTHER; note = N1-methyl pseudouridine
  modified_base 2486: mod_base = OTHER; note = N1-methyl pseudouridine
  modified_base 2488: mod_base = OTHER; note = N1-methyl pseudouridine
  modified_base 2491: mod_base = OTHER; note = N1-methyl pseudouridine
  modified_base 2495: mod_base = OTHER; note = N1-methyl pseudouridine
  modified_base 2513: mod_base = OTHER; note = N1-methyl pseudouridine
  modified_base 2515: mod_base = OTHER; note = N1-methyl pseudouridine
  modified_base 2519: mod_base = OTHER; note = N1-methyl pseudouridine
  modified_base 2531: mod_base = OTHER; note = N1-methyl pseudouridine
  modified_base 2537: mod_base = OTHER; note = N1-methyl pseudouridine
  modified_base 2546: mod_base = OTHER; note = N1-methyl pseudouridine
  modified_base 2554: mod_base = OTHER; note = N1-methyl pseudouridine
  modified_base 2561: mod_base = OTHER; note = N1-methyl pseudouridine
  modified_base 2570: mod_base = OTHER; note = N1-methyl pseudouridine
  modified_base 2573: mod_base = OTHER; note = N1-methyl pseudouridine
  modified_base 2584: mod_base = OTHER; note = N1-methyl pseudouridine
  modified_base 2585: mod_base = OTHER; note = N1-methyl pseudouridine
  modified_base 2588: mod_base = OTHER; note = N1-methyl pseudouridine
  modified_base 2603: mod_base = OTHER; note = N1-methyl pseudouridine
  modified_base 2615: mod_base = OTHER; note = N1-methyl pseudouridine
  modified_base 2618: mod_base = OTHER; note = N1-methyl pseudouridine
  modified_base 2657: mod_base = OTHER; note = N1-methyl pseudouridine
  modified_base 2672: mod_base = OTHER; note = N1-methyl pseudouridine
  modified_base 2675: mod_base = OTHER; note = N1-methyl pseudouridine
  modified_base 2684: mod_base = OTHER; note = N1-methyl pseudouridine
  modified_base 2692: mod_base = OTHER; note = N1-methyl pseudouridine
  modified_base 2695: mod_base = OTHER; note = N1-methyl pseudouridine
  modified_base 2705: mod_base = OTHER; note = N1-methyl pseudouridine
  modified_base 2708: mod_base = OTHER; note = N1-methyl pseudouridine
  modified_base 2720: mod_base = OTHER; note = N1-methyl pseudouridine
  modified_base 2723: mod_base = OTHER; note = N1-methyl pseudouridine
  modified_base 2737: mod_base = OTHER; note = N1-methyl pseudouridine
  modified_base 2738: mod_base = OTHER; note = N1-methyl pseudouridine
  modified_base 2747: mod_base = OTHER; note = N1-methyl pseudouridine
  modified_base 2771: mod_base = OTHER; note = N1-methyl pseudouridine
  modified_base 2780: mod_base = OTHER; note = N1-methyl pseudouridine
  modified_base 2794: mod_base = OTHER; note = N1-methyl pseudouridine
  modified_base 2795: mod_base = OTHER; note = N1-methyl pseudouridine
  modified_base 2798: mod_base = OTHER; note = N1-methyl pseudouridine
  modified_base 2810: mod_base = OTHER; note = N1-methyl pseudouridine
  modified_base 2813: mod_base = OTHER; note = N1-methyl pseudouridine
  modified_base 2828: mod_base = OTHER; note = N1-methyl pseudouridine
  modified_base 2840: mod_base = OTHER; note = N1-methyl pseudouridine
  modified_base 2849: mod_base = OTHER; note = N1-methyl pseudouridine
  modified_base 2852: mod_base = OTHER; note = N1-methyl pseudouridine
  modified_base 2864: mod_base = OTHER; note = N1-methyl pseudouridine
  modified_base 2875: mod_base = OTHER; note = N1-methyl pseudouridine
  modified_base 2894: mod_base = OTHER; note = N1-methyl pseudouridine
  modified_base 2897: mod_base = OTHER; note = N1-methyl pseudouridine
  modified_base 2906: mod_base = OTHER; note = N1-methyl pseudouridine
  modified_base 2912: mod_base = OTHER; note = N1-methyl pseudouridine
  modified_base 2915: mod_base = OTHER; note = N1-methyl pseudouridine
  modified_base 2921: mod_base = OTHER; note = N1-methyl pseudouridine
  modified_base 2933: mod_base = OTHER; note = N1-methyl pseudouridine
  modified_base 2936: mod_base = OTHER; note = N1-methyl pseudouridine
  modified_base 2944: mod_base = OTHER; note = N1-methyl pseudouridine
  modified_base 2945: mod_base = OTHER; note = N1-methyl pseudouridine
  modified_base 2956: mod_base = OTHER; note = N1-methyl pseudouridine
  modified_base 2957: mod_base = OTHER; note = N1-methyl pseudouridine
  modified_base 2962: mod_base = OTHER; note = N1-methyl pseudouridine
  modified_base 2963: mod_base = OTHER; note = N1-methyl pseudouridine
  modified_base 2965: mod_base = OTHER; note = N1-methyl pseudouridine
  modified_base 2972: mod_base = OTHER; note = N1-methyl pseudouridine
  modified_base 2981: mod_base = OTHER; note = N1-methyl pseudouridine
  modified_base 2989: mod_base = OTHER; note = N1-methyl pseudouridine
  modified_base 3010: mod_base = OTHER; note = N1-methyl pseudouridine
  modified_base 3014: mod_base = OTHER; note = N1-methyl pseudouridine
  modified_base 3023: mod_base = OTHER; note = N1-methyl pseudouridine
  modified_base 3026: mod_base = OTHER; note = N1-methyl pseudouridine
  modified_base 3038: mod_base = OTHER; note = N1-methyl pseudouridine
  modified_base 3041: mod_base = OTHER; note = N1-methyl pseudouridine
  modified_base 3049: mod_base = OTHER; note = N1-methyl pseudouridine
  modified_base 3059: mod_base = OTHER; note = N1-methyl pseudouridine
  modified_base 3070: mod_base = OTHER; note = N1-methyl pseudouridine
  modified_base 3071: mod_base = OTHER; note = N1-methyl pseudouridine
  modified_base 3074: mod_base = OTHER; note = N1-methyl pseudouridine
  modified_base 3076: mod_base = OTHER; note = N1-methyl pseudouridine
  modified_base 3085: mod_base = OTHER; note = N1-methyl pseudouridine
  modified_base 3092: mod_base = OTHER; note = N1-methyl pseudouridine
  modified_base 3094: mod_base = OTHER; note = N1-methyl pseudouridine
  modified_base 3101: mod_base = OTHER; note = N1-methyl pseudouridine
  modified_base 3110: mod_base = OTHER; note = N1-methyl pseudouridine
  modified_base 3113: mod_base = OTHER; note = N1-methyl pseudouridine
  modified_base 3134: mod_base = OTHER; note = N1-methyl pseudouridine
  modified_base 3154: mod_base = OTHER; note = N1-methyl pseudouridine
  modified_base 3157: mod_base = OTHER; note = N1-methyl pseudouridine
  modified_base 3158: mod_base = OTHER; note = N1-methyl pseudouridine
  modified_base 3160: mod_base = OTHER; note = N1-methyl pseudouridine
  modified_base 3161: mod_base = OTHER; note = N1-methyl pseudouridine
  modified_base 3163: mod_base = OTHER; note = N1-methyl pseudouridine
  modified_base 3173: mod_base = OTHER; note = N1-methyl pseudouridine
  modified_base 3176: mod_base = OTHER; note = N1-methyl pseudouridine
  modified_base 3181: mod_base = OTHER; note = N1-methyl pseudouridine
  modified_base 3182: mod_base = OTHER; note = N1-methyl pseudouridine
  modified_base 3184: mod_base = OTHER; note = N1-methyl pseudouridine
  modified_base 3185: mod_base = OTHER; note = N1-methyl pseudouridine
  modified_base 3197: mod_base = OTHER; note = N1-methyl pseudouridine
  modified_base 3203: mod_base = OTHER; note = N1-methyl pseudouridine
  modified_base 3218: mod_base = OTHER; note = N1-methyl pseudouridine
  modified_base 3233: mod_base = OTHER; note = N1-methyl pseudouridine
  modified_base 3236: mod_base = OTHER; note = N1-methyl pseudouridine
  modified_base 3263: mod_base = OTHER; note = N1-methyl pseudouridine
  modified_base 3266: mod_base = OTHER; note = N1-methyl pseudouridine
  modified_base 3268: mod_base = OTHER; note = N1-methyl pseudouridine
  modified_base 3286: mod_base = OTHER; note = N1-methyl pseudouridine
  modified_base 3287: mod_base = OTHER; note = N1-methyl pseudouridine
  modified_base 3296: mod_base = OTHER; note = N1-methyl pseudouridine
  modified_base 3305: mod_base = OTHER; note = N1-methyl pseudouridine
  modified_base 3308: mod_base = OTHER; note = N1-methyl pseudouridine
  modified_base 3314: mod_base = OTHER; note = N1-methyl pseudouridine
  modified_base 3323: mod_base = OTHER; note = N1-methyl pseudouridine
  modified_base 3329: mod_base = OTHER; note = N1-methyl pseudouridine
  modified_base 3332: mod_base = OTHER; note = N1-methyl pseudouridine
  modified_base 3347: mod_base = OTHER; note = N1-methyl pseudouridine
  modified_base 3361: mod_base = OTHER; note = N1-methyl pseudouridine
  modified_base 3362: mod_base = OTHER; note = N1-methyl pseudouridine
  modified_base 3377: mod_base = OTHER; note = N1-methyl pseudouridine
  modified_base 3380: mod_base = OTHER; note = N1-methyl pseudouridine
  modified_base 3404: mod_base = OTHER; note = N1-methyl pseudouridine
  modified_base 3407: mod_base = OTHER; note = N1-methyl pseudouridine
  modified_base 3424: mod_base = OTHER; note = N1-methyl pseudouridine
  modified_base 3439: mod_base = OTHER; note = N1-methyl pseudouridine
  modified_base 3448: mod_base = OTHER; note = N1-methyl pseudouridine
  modified_base 3449: mod_base = OTHER; note = N1-methyl pseudouridine
  modified_base 3464: mod_base = OTHER; note = N1-methyl pseudouridine
  modified_base 3469: mod_base = OTHER; note = N1-methyl pseudouridine
  modified_base 3476: mod_base = OTHER; note = N1-methyl pseudouridine
  modified_base 3479: mod_base = OTHER; note = N1-methyl pseudouridine
  modified_base 3482: mod_base = OTHER; note = N1-methyl pseudouridine
  modified_base 3485: mod_base = OTHER; note = N1-methyl pseudouridine
  modified_base 3494: mod_base = OTHER; note = N1-methyl pseudouridine
  modified_base 3518: mod_base = OTHER; note = N1-methyl pseudouridine
  modified_base 3527: mod_base = OTHER; note = N1-methyl pseudouridine
  modified_base 3536: mod_base = OTHER; note = N1-methyl pseudouridine
  modified_base 3539: mod_base = OTHER; note = N1-methyl pseudouridine
  modified_base 3545: mod_base = OTHER; note = N1-methyl pseudouridine
  modified_base 3551: mod_base = OTHER; note = N1-methyl pseudouridine
  modified_base 3554: mod_base = OTHER; note = N1-methyl pseudouridine
  modified_base 3568: mod_base = OTHER; note = N1-methyl pseudouridine
  modified_base 3569: mod_base = OTHER; note = N1-methyl pseudouridine
  modified_base 3584: mod_base = OTHER; note = N1-methyl pseudouridine
  modified_base 3589: mod_base = OTHER; note = N1-methyl pseudouridine
  modified_base 3590: mod_base = OTHER; note = N1-methyl pseudouridine
  modified_base 3593: mod_base = OTHER; note = N1-methyl pseudouridine
  modified_base 3607: mod_base = OTHER; note = N1-methyl pseudouridine
  modified_base 3617: mod_base = OTHER; note = N1-methyl pseudouridine
  modified_base 3629: mod_base = OTHER; note = N1-methyl pseudouridine
  modified_base 3632: mod_base = OTHER; note = N1-methyl pseudouridine
  modified_base 3635: mod_base = OTHER; note = N1-methyl pseudouridine
  modified_base 3641: mod_base = OTHER; note = N1-methyl pseudouridine
  modified_base 3649: mod_base = OTHER; note = N1-methyl pseudouridine
  modified_base 3656: mod_base = OTHER; note = N1-methyl pseudouridine
  modified_base 3658: mod_base = OTHER; note = N1-methyl pseudouridine
  modified_base 3659: mod_base = OTHER; note = N1-methyl pseudouridine
  modified_base 3665: mod_base = OTHER; note = N1-methyl pseudouridine
  modified_base 3686: mod_base = OTHER; note = N1-methyl pseudouridine
  modified_base 3689: mod_base = OTHER; note = N1-methyl pseudouridine
  modified_base 3707: mod_base = OTHER; note = N1-methyl pseudouridine
  modified_base 3725: mod_base = OTHER; note = N1-methyl pseudouridine
  modified_base 3731: mod_base = OTHER; note = N1-methyl pseudouridine
  modified_base 3742: mod_base = OTHER; note = N1-methyl pseudouridine
  modified_base 3746: mod_base = OTHER; note = N1-methyl pseudouridine
  modified_base 3751: mod_base = OTHER; note = N1-methyl pseudouridine
  modified_base 3752: mod_base = OTHER; note = N1-methyl pseudouridine
  modified_base 3755: mod_base = OTHER; note = N1-methyl pseudouridine
  modified_base 3757: mod_base = OTHER; note = N1-methyl pseudouridine
  modified_base 3761: mod_base = OTHER; note = N1-methyl pseudouridine
  modified_base 3772: mod_base = OTHER; note = N1-methyl pseudouridine
  modified_base 3782: mod_base = OTHER; note = N1-methyl pseudouridine
  modified_base 3818: mod_base = OTHER; note = N1-methyl pseudouridine
  modified_base 3820: mod_base = OTHER; note = N1-methyl pseudouridine
  modified_base 3821: mod_base = OTHER; note = N1-methyl pseudouridine
  modified_base 3824: mod_base = OTHER; note = N1-methyl pseudouridine
  modified_base 3841: mod_base = OTHER; note = N1-methyl pseudouridine
  modified_base 3845: mod_base = OTHER; note = N1-methyl pseudouridine
  modified_base 3854: mod_base = OTHER; note = N1-methyl pseudouridine
  modified_base 3857: mod_base = OTHER; note = N1-methyl pseudouridine
  modified_base 3866: mod_base = OTHER; note = N1-methyl pseudouridine
  modified_base 3874: mod_base = OTHER; note = N1-methyl pseudouridine
  modified_base 3875: mod_base = OTHER; note = N1-methyl pseudouridine
  modified_base 3887: mod_base = OTHER; note = N1-methyl pseudouridine
  modified_base 3890: mod_base = OTHER; note = N1-methyl pseudouridine
  modified_base 3893: mod_base = OTHER; note = N1-methyl pseudouridine
  modified_base 3908: mod_base = OTHER; note = N1-methyl pseudouridine
  modified_base 3917: mod_base = OTHER; note = N1-methyl pseudouridine
  modified_base 3920: mod_base = OTHER; note = N1-methyl pseudouridine
  modified_base 3928: mod_base = OTHER; note = N1-methyl pseudouridine
  modified_base 3953: mod_base = OTHER; note = N1-methyl pseudouridine
  modified_base 3974: mod_base = OTHER; note = N1-methyl pseudouridine
  modified_base 3977: mod_base = OTHER; note = N1-methyl pseudouridine
  modified_base 3983: mod_base = OTHER; note = N1-methyl pseudouridine
  modified_base 3985: mod_base = OTHER; note = N1-methyl pseudouridine
  modified_base 3986: mod_base = OTHER; note = N1-methyl pseudouridine
  modified_base 3992: mod_base = OTHER; note = N1-methyl pseudouridine
  modified_base 4001: mod_base = OTHER; note = N1-methyl pseudouridine
  modified_base 4018: mod_base = OTHER; note = N1-methyl pseudouridine
  modified_base 4019: mod_base = OTHER; note = N1-methyl pseudouridine
  modified_base 4024: mod_base = OTHER; note = N1-methyl pseudouridine
  modified_base 4027: mod_base = OTHER; note = N1-methyl pseudouridine
  modified_base 4028: mod_base = OTHER; note = N1-methyl pseudouridine
  modified_base 4040: mod_base = OTHER; note = N1-methyl pseudouridine
  modified_base 4054: mod_base = OTHER; note = N1-methyl pseudouridine
  modified_base 4073: mod_base = OTHER; note = N1-methyl pseudouridine
  modified_base 4076: mod_base = OTHER; note = N1-methyl pseudouridine
  modified_base 4088: mod_base = OTHER; note = N1-methyl pseudouridine
  modified_base 4091: mod_base = OTHER; note = N1-methyl pseudouridine
  modified_base 4103: mod_base = OTHER; note = N1-methyl pseudouridine
  modified_base 4112: mod_base = OTHER; note = N1-methyl pseudouridine
  modified_base 4114: mod_base = OTHER; note = N1-methyl pseudouridine
  modified_base 4127: mod_base = OTHER; note = N1-methyl pseudouridine
  modified_base 4133: mod_base = OTHER; note = N1-methyl pseudouridine
  modified_base 4142: mod_base = OTHER; note = N1-methyl pseudouridine
  modified_base 4210: mod_base = OTHER; note = N1-methyl pseudouridine
  modified_base 4213: mod_base = OTHER; note = N1-methyl pseudouridine
  modified_base 4216: mod_base = OTHER; note = N1-methyl pseudouridine
atggcccccaagaagaagcgcaaggtgggcatccacggcgtgcccgccgccgacaagaagtacagcatcggcctggacatcggcaccaacagcgtgggctgggccgtgatcaccgacgagtacaaggtgcccagcaagaagttcaaggtgctgggcaacaccgaccgccacagcatcaagaagaacctgatcggcgccctgctgttcgacagcggcgagacagccgaggccacccgcctgaagcgcaccgcccgccgccgctacacccgccgcaagaaccgcatctgctacctgcaggagatcttcagcaacgagatggccaaggtggacgacagcttcttccaccgcctggaggagagcttcctggtggaggaggacaagaagcacgagcgccaccccatcttcggcaacatcgtggacgaggtggcctaccacgagaagtaccccaccatctaccacctgcgcaagaagctggtggacagcaccgacaaggccgacctgcgcctgatctacctggccctggcccacatgatcaagttccgcggccacttcctgatcgagggcgacctgaaccccgacaacagcgacgtggacaagctgttcatccagctggtgcagacctacaaccagctgttcgaggagaaccccatcaacgccagcggcgtggacgccaaggccatcctgagcgcccgcctgagcaagagccgccgcctggagaacctgatcgcccagctgcccggcgagaagaagaacggcctgttcggcaacctgatcgccctgagcctgggcctgacccccaacttcaagagcaacttcgacctggccgaggacgccaagctgcagctgagcaaggacacctacgacgacgacctggacaacctgctggcccagatcggcgaccagtacgccgacctgttcctggccgccaagaacctgagcgacgccatcctgctgagcgacatcctgcgcgtgaacaccgagatcaccaaggcccccctgagcgccagcatgatcaagcgctacgacgagcaccaccaggacctgaccctgctgaaggccctggtgcgccagcagctgcccgagaagtacaaggagatcttcttcgaccagagcaagaacggctacgccggctacatcgacggcggcgccagccaggaggagttctacaagttcatcaagcccatcctggagaagatggacggcaccgaggagctgctggtgaagctgaaccgcgaggacctgctgcgcaagcagcgcaccttcgacaacggcagcatcccccaccagatccacctgggcgagctgcacgccatcctgcgccgccaggaggacttctaccccttcctgaaggacaaccgcgagaagatcgagaagatcctgaccttccgcatcccctactacgtgggccccctggcccgcggcaacagccgcttcgcctggatgacccgcaagagcgaggagacaatcaccccctggaacttcgaggaggtggtggacaagggcgccagcgcccagagcttcatcgagcgcatgaccaacttcgacaagaacctgcccaacgagaaggtgctgcccaagcacagcctgctgtacgagtacttcaccgtgtacaacgagctgaccaaggtgaagtacgtgaccgagggcatgcgcaagcccgccttcctgagcggcgagcagaagaaggccatcgtggacctgctgttcaagaccaaccgcaaggtgaccgtgaagcagctgaaggaggactacttcaagaagatcgagtgcttcgacagcgtggagatcagcggcgtggaggaccgcttcaacgccagcctgggcacctaccacgacctgctgaagatcatcaaggacaaggacttcctggacaacgaggagaacgaggacatcctggaggacatcgtgctgaccctgaccctgttcgaggaccgcgagatgatcgaggagcgcctgaagacctacgcccacctgttcgacgacaaggtgatgaagcagctgaagcgccgccgctacaccggctggggccgcctgagccgcaagctgatcaacggcatccgcgacaagcagagcggcaagaccatcctggacttcctcaagagcgacggcttcgccaaccgcaacttcatgcagctgatccacgacgacagcctgaccttcaaggaggacatccagaaggcccaggtgagcggccagggcgacagcctgcacgagcacatcgccaacctggccggcagccccgccatcaagaagggcatcctgcagaccgtgaaggtggtggacgagctggtgaaggtgatgggccgccacaagcccgagaacatcgtgatcgagatggcccgcgagaaccagaccacccagaagggccagaagaacagccgcgagcgcatgaagcgcatcgaggagggcatcaaggagctgggcagccagatcctgaaggagcaccccgtggagaacacccagctgcagaacgagaagctgtacctgtactacctgcagaacggccgcgacatgtacgtggaccaggagctggacatcaaccgcctgagcgactacgacgtggaccacatcgtgccccagagcttcctgaaggacgacagcatcgacaacaaggtgctgacccgcagcgacaagaaccgcggcaagagcgacaacgtgcccagcgaggaggtggtgaagaagatgaagaactactggcgccagctgctgaacgccaagctgatcacccagcgcaagttcgacaacctgaccaaggccgagcgcggcggcctgagcgagctggacaaggccggcttcatcaagcgccagctggtggagacacgccagatcaccaagcacgtggcccagatcctggacagccgcatgaacaccaagtacgacgagaacgacaagctgatccgcgaggtgaaggtgatcaccctcaagagcaagctggtgagcgacttccgcaaggacttccagttctacaaggtgcgcgagatcaacaactaccaccacgcccacgacgcctacctgaacgccgtggtgggcaccgccctgatcaagaagtaccccaagctggagagcgagttcgtgtacggcgactacaaggtgtacgacgtgcgcaagatgatcgccaagagcgagcaggagatcggcaaggccaccgccaagtacttcttctacagcaacatcatgaacttcttcaagaccgagatcaccctggccaacggcgagatccgcaagcgccccctgatcgagacaaacggcgagacaggcgagatcgtgtgggacaagggccgcgacttcgccaccgtgcgcaaggtgctgagcatgccccaggtgaacatcgtgaagaagaccgaggtgcagaccggcggcttcagcaaggagagcatcctgcccaagcgcaacagcgacaagctgatcgcccgcaagaaggactgggaccccaagaagtacggcggcttcgacagccccaccgtggcctacagcgtgctggtggtggccaaggtggagaagggcaagagcaagaagctcaagagcgtgaaggagctgctgggcatcaccatcatggagcgcagcagcttcgagaagaaccccatcgacttcctggaggccaagggctacaaggaggtgaagaaggacctgatcatcaagctgcccaagtacagcctgttcgagctggagaacggccgcaagcgcatgctggccagcgccggcgagctgcagaagggcaacgagctggccctgcccagcaagtacgtgaacttcctgtacctggccagccactacgagaagctgaagggcagccccgaggacaacgagcagaagcagctgttcgtggagcagcacaagcactacctggacgagatcatcgagcagatcagcgagttcagcaagcgcgtgatcctggccgacgccaacctggacaaggtgctgagcgcctacaacaagcaccgcgacaagcccatccgcgagcaggccgagaacatcatccacctgttcaccctgaccaacctgggcgcccccgccgccttcaagtacttcgacaccaccatcgaccgcaagcgctacaccagcaccaaggaggtgctggacgccaccctgatccaccagagcatcaccggcctgtacgagacacgcatcgacctgagccagctgggcggcgacagcggcggcaagcgccccgccgccaccaagaaggccggccaggccaagaagaagaagtaataataa

SEQ ID NO: 2191 - RNA, 100 nt, synthetic construct; identical to SEQ ID NO: 1636
  source 1..100: mol_type = other RNA
  modified_base 1..4: mod_base = OTHER; note = phosphorothioate linkage
  modified_base 97..100: mod_base = OTHER; note = phosphorothioate linkage

SEQ ID NO: 2192 - RNA, 4929 nt, synthetic construct
  source 1..4929: mol_type = other RNA
  modified_base 7: mod_base = OTHER; note = N1-methyl pseudouridine
  modified_base 25: mod_base = OTHER; note = N1-methyl pseudouridine
  modified_base 35: mod_base = OTHER; note = N1-methyl pseudouridine
  modified_base 37: mod_base = OTHER; note = N1-methyl pseudouridine
  modified_base 49: mod_base = OTHER; note = N1-methyl pseudouridine
  modified_base 58: mod_base = OTHER; note = N1-methyl pseudouridine
  modified_base 63: mod_base = OTHER; note = N1-methyl pseudouridine
  modified_base 64: mod_base = OTHER; note = N1-methyl pseudouridine
  modified_base 75: mod_base = OTHER; note = N1-methyl pseudouridine
  modified_base 78: mod_base = OTHER; note = N1-methyl pseudouridine
  modified_base 82: mod_base = OTHER; note = N1-methyl pseudouridine
  modified_base 94: mod_base = OTHER; note = N1-methyl pseudouridine
  modified_base 100: mod_base = OTHER; note = N1-methyl pseudouridine
  modified_base 130: mod_base = OTHER; note = N1-methyl pseudouridine
  modified_base 136: mod_base = OTHER; note = N1-methyl pseudouridine
  modified_base 145: mod_base = OTHER; note = N1-methyl pseudouridine
  modified_base 148: mod_base = OTHER; note = N1-methyl pseudouridine
  modified_base 151: mod_base = OTHER; note = N1-methyl pseudouridine
  modified_base 154: mod_base = OTHER; note = N1-methyl pseudouridine
  modified_base 166: mod_base = OTHER; note = N1-methyl pseudouridine
  modified_base 169: mod_base = OTHER; note = N1-methyl pseudouridine
  modified_base 180: mod_base = OTHER; note = N1-methyl pseudouridine
  modified_base 193: mod_base = OTHER; note = N1-methyl pseudouridine
  modified_base 199: mod_base = OTHER; note = N1-methyl pseudouridine
  modified_base 226: mod_base = OTHER; note = N1-methyl pseudouridine
  modified_base 229: mod_base = OTHER; note = N1-methyl pseudouridine
  modified_base 235: mod_base = OTHER; note = N1-methyl pseudouridine
  modified_base 250: mod_base = OTHER; note = N1-methyl pseudouridine
  modified_base 253: mod_base = OTHER; note = N1-methyl pseudouridine
  modified_base 256: mod_base = OTHER; note = N1-methyl pseudouridine
  modified_base 264: mod_base = OTHER; note = N1-methyl pseudouridine
  modified_base 271: mod_base = OTHER; note = N1-methyl pseudouridine
  modified_base 274: mod_base = OTHER; note = N1-methyl pseudouridine
  modified_base 286: mod_base = OTHER; note = N1-methyl pseudouridine
  modified_base 288: mod_base = OTHER; note = N1-methyl pseudouridine
  modified_base 292: mod_base = OTHER; note = N1-methyl pseudouridine
  modified_base 297: mod_base = OTHER; note = N1-methyl pseudouridine
  modified_base 298: mod_base = OTHER; note = N1-methyl pseudouridine
  modified_base 306: mod_base = OTHER; note = N1-methyl pseudouridine
  modified_base 310: mod_base = OTHER; note = N1-methyl pseudouridine
  modified_base 313: mod_base = OTHER; note = N1-methyl pseudouridine
  modified_base 315: mod_base = OTHER; note = N1-methyl pseudouridine
  modified_base 328: mod_base = OTHER; note = N1-methyl pseudouridine
  modified_base 331: mod_base = OTHER; note = N1-methyl pseudouridine
  modified_base 343: mod_base = OTHER; note = N1-methyl pseudouridine
  modified_base 352: mod_base = OTHER; note = N1-methyl pseudouridine
  modified_base 355: mod_base = OTHER; note = N1-methyl pseudouridine
  modified_base 357: mod_base = OTHER; note = N1-methyl pseudouridine
  modified_base 358: mod_base = OTHER; note = N1-methyl pseudouridine
  modified_base 364: mod_base = OTHER; note = N1-methyl pseudouridine
  modified_base 397: mod_base = OTHER; note = N1-methyl pseudouridine
  modified_base 400: mod_base = OTHER; note = N1-methyl pseudouridine
  modified_base 406: mod_base = OTHER; note = N1-methyl pseudouridine
  modified_base 409: mod_base = OTHER; note = N1-methyl pseudouridine
  modified_base 424: mod_base = OTHER; note = N1-methyl pseudouridine
  modified_base 436: mod_base = OTHER; note = N1-methyl pseudouridine
  modified_base 442: mod_base = OTHER; note = N1-methyl pseudouridine
  modified_base 454: mod_base = OTHER; note = N1-methyl pseudouridine
  modified_base 457: mod_base = OTHER; note = N1-methyl pseudouridine
  modified_base 468: mod_base = OTHER; note = N1-methyl pseudouridine
  modified_base 478: mod_base = OTHER; note = N1-methyl pseudouridine
  modified_base 481: mod_base = OTHER; note = N1-methyl pseudouridine
  modified_base 483: mod_base = OTHER; note = N1-methyl pseudouridine
  modified_base 489: mod_base = OTHER; note = N1-methyl pseudouridine
  modified_base 490: mod_base = OTHER; note = N1-methyl pseudouridine
  modified_base 492: mod_base = OTHER; note = N1-methyl pseudouridine
  modified_base 493: mod_base = OTHER; note = N1-methyl pseudouridine
  modified_base 499: mod_base = OTHER; note = N1-methyl pseudouridine
  modified_base 511: mod_base = OTHER; note = N1-methyl pseudouridine
  modified_base 513: mod_base = OTHER; note = N1-methyl pseudouridine
  modified_base 514: mod_base = OTHER; note = N1-methyl pseudouridine
  modified_base 654: mod_base = OTHER; note = N1-methyl pseudouridine
  modified_base 661: mod_base = OTHER; note = N1-methyl pseudouridine
  modified_base 667: mod_base = OTHER; note = N1-methyl pseudouridine
  modified_base 673: mod_base = OTHER; note = N1-methyl pseudouridine
  modified_base 688: mod_base = OTHER; note = N1-methyl pseudouridine
  modified_base 693: mod_base = OTHER; note = N1-methyl pseudouridine
  modified_base 700: mod_base = OTHER; note = N1-methyl pseudouridine
  modified_base 703: mod_base = OTHER; note = N1-methyl pseudouridine
  modified_base 714: mod_base = OTHER; note = N1-methyl pseudouridine
  modified_base 721: mod_base = OTHER; note = N1-methyl pseudouridine
  modified_base 735: mod_base = OTHER; note = N1-methyl pseudouridine
  modified_base 736: mod_base = OTHER; note = N1-methyl pseudouridine
  modified_base 742: mod_base = OTHER; note = N1-methyl pseudouridine
  modified_base 745: mod_base = OTHER; note = N1-methyl pseudouridine
  modified_base 769: mod_base = OTHER; note = N1-methyl pseudouridine
  modified_base 781: mod_base = OTHER; note = N1-methyl pseudouridine
  modified_base 784: mod_base = OTHER; note = N1-methyl pseudouridine
  modified_base 793: mod_base = OTHER; note = N1-methyl pseudouridine
  modified_base 796: mod_base = OTHER; note = N1-methyl pseudouridine
  modified_base 798: mod_base = OTHER; note = N1-methyl pseudouridine
  modified_base 799: mod_base = OTHER; note = N1-methyl pseudouridine
  modified_base 832: mod_base = OTHER; note = N1-methyl pseudouridine
  modified_base 855: mod_base = OTHER; note = N1-methyl pseudouridine
  modified_base 877: mod_base = OTHER; note = N1-methyl pseudouridine
  modified_base 879: mod_base = OTHER; note = N1-methyl pseudouridine
  modified_base 882: mod_base = OTHER; note = N1-methyl pseudouridine
  modified_base 886: mod_base = OTHER; note = N1-methyl pseudouridine
  modified_base 895: mod_base = OTHER; note = N1-methyl pseudouridine
  modified_base 897: mod_base = OTHER; note = N1-methyl pseudouridine
  modified_base 898: mod_base = OTHER; note = N1-methyl pseudouridine
  modified_base 910: mod_base = OTHER; note = N1-methyl pseudouridine
  modified_base 919: mod_base = OTHER; note = N1-methyl pseudouridine
  modified_base 930: mod_base = OTHER; note = N1-methyl pseudouridine
  modified_base 931: mod_base = OTHER; note = N1-methyl pseudouridine
  modified_base 933: mod_base = OTHER; note = N1-methyl pseudouridine
  modified_base 934: mod_base = OTHER; note = N1-methyl pseudouridine
  modified_base 943: mod_base = OTHER; note = N1-methyl pseudouridine
  modified_base 954: mod_base = OTHER; note = N1-methyl pseudouridine
  modified_base 955: mod_base = OTHER; note = N1-methyl pseudouridine
  modified_base 958: mod_base = OTHER; note = N1-methyl pseudouridine
  modified_base 961: mod_base = OTHER; note = N1-methyl pseudouridine
  modified_base 994: mod_base = OTHER; note = N1-methyl pseudouridine
  modified_base 996: mod_base = OTHER; note = N1-methyl pseudouridine
  modified_base 997: mod_base = OTHER; note = N1-methyl pseudouridine
  modified_base 1006: mod_base = OTHER; note = N1-methyl pseudouridine
  modified_base 1009: mod_base = OTHER; note = N1-methyl pseudouridine
  modified_base 1018: mod_base = OTHER; note = N1-methyl pseudouridine
  modified_base 1023: mod_base = OTHER; note = N1-methyl pseudouridine
  modified_base 1035: mod_base = OTHER; note = N1-methyl pseudouridine
  modified_base 1045: mod_base = OTHER; note = N1-methyl pseudouridine
  modified_base 1047: mod_base = OTHER; note = N1-methyl pseudouridine
  modified_base 1054: mod_base = OTHER; note = N1-methyl pseudouridine
  modified_base 1066: mod_base = OTHER; note = N1-methyl pseudouridine
  modified_base 1069: mod_base = OTHER; note = N1-methyl pseudouridine
  modified_base 1093: mod_base = OTHER; note = N1-methyl pseudouridine
  modified_base 1099: mod_base = OTHER; note = N1-methyl pseudouridine
  modified_base 1102: mod_base = OTHER; note = N1-methyl pseudouridine
  modified_base 1104: mod_base = OTHER; note = N1-methyl pseudouridine
  modified_base 1108: mod_base = OTHER; note = N1-methyl pseudouridine
  modified_base 1114: mod_base = OTHER; note = N1-methyl pseudouridine
  modified_base 1123: mod_base = OTHER; note = N1-methyl pseudouridine
  modified_base 1126: mod_base = OTHER; note = N1-methyl pseudouridine
  modified_base 1131: mod_base = OTHER; note = N1-methyl pseudouridine
  modified_base 1132: mod_base = OTHER; note = N1-methyl pseudouridine
  modified_base 1143: mod_base = OTHER; note = N1-methyl pseudouridine
  modified_base 1144: mod_base = OTHER; note = N1-methyl pseudouridine
  modified_base 1147: mod_base = OTHER; note = N1-methyl pseudouridine
  modified_base 1150: mod_base = OTHER; note = N1-methyl pseudouridine
  modified_base 1162: mod_base = OTHER; note = N1-methyl pseudouridine
  modified_base 1183: mod_base = OTHER; note = N1-methyl pseudouridine
  modified_base 1192: mod_base = OTHER; note = N1-methyl pseudouridine
  modified_base 1194: mod_base = OTHER; note = N1-methyl pseudouridine
  modified_base 1195: mod_base = OTHER; note = N1-methyl pseudouridine
  modified_base 1198: mod_base = OTHER; note = N1-methyl pseudouridine
  modified_base 1204: mod_base = OTHER; note = N1-methyl pseudouridine
  modified_base 1207: mod_base = OTHER; note = N1-methyl pseudouridine
  modified_base 1215: mod_base = OTHER; note = N1-methyl pseudouridine
  modified_base 1225: mod_base = OTHER; note = N1-methyl pseudouridine
  modified_base 1227: mod_base = OTHER; note = N1-methyl pseudouridine
  modified_base 1228: mod_base = OTHER; note = N1-methyl pseudouridine
  modified_base 1243: mod_base = OTHER; note = N1-methyl pseudouridine
  modified_base 1258: mod_base = OTHER; note = N1-methyl pseudouridine
  modified_base 1273: mod_base = OTHER; note = N1-methyl pseudouridine
  modified_base 1276: mod_base = OTHER; note = N1-methyl pseudouridine
  modified_base 1288: mod_base = OTHER; note = N1-methyl pseudouridine
  modified_base 1306: mod_base = OTHER; note = N1-methyl pseudouridine
  modified_base 1315: mod_base = OTHER; note = N1-methyl pseudouridine
  modified_base 1318: mod_base = OTHER; note = N1-methyl pseudouridine
  modified_base 1327: mod_base = OTHER; note = N1-methyl pseudouridine
  modified_base 1351: mod_base = OTHER; note = N1-methyl pseudouridine
  modified_base 1353: mod_base = OTHER; note = N1-methyl pseudouridine
  modified_base 1354: mod_base = OTHER; note = N1-methyl pseudouridine
  modified_base 1363: mod_base = OTHER; note = N1-methyl pseudouridine
  modified_base 1366: mod_base = OTHER; note = N1-methyl pseudouridine
  modified_base 1372: mod_base = OTHER; note = N1-methyl pseudouridine
  modified_base 1378: mod_base = OTHER; note = N1-methyl pseudouridine
  modified_base 1384: mod_base = OTHER; note = N1-methyl pseudouridine
  modified_base 1395: mod_base = OTHER; note = N1-methyl pseudouridine
  modified_base 1396: mod_base = OTHER; note = N1-methyl pseudouridine
  modified_base 1407: mod_base = OTHER; note = N1-methyl pseudouridine
  modified_base 1408: mod_base = OTHER; note = N1-methyl pseudouridine
  modified_base 1414: mod_base = OTHER; note = N1-methyl pseudouridine
  modified_base 1432: mod_base = OTHER; note = N1-methyl pseudouridine
  modified_base 1438: mod_base = OTHER; note = N1-methyl pseudouridine
  modified_base 1452: mod_base = OTHER; note = N1-methyl pseudouridine
  modified_base 1465: mod_base = OTHER; note = N1-methyl pseudouridine
  modified_base 1474: mod_base = OTHER; note = N1-methyl pseudouridine
  modified_base 1477: mod_base = OTHER; note = N1-methyl pseudouridine
  modified_base 1486: mod_base = OTHER; note = N1-methyl pseudouridine
  modified_base 1497: mod_base = OTHER; note = N1-methyl pseudouridine
  modified_base 1507: mod_base = OTHER; note = N1-methyl pseudouridine
  modified_base 1509: mod_base = OTHER; note = N1-methyl pseudouridine
  modified_base 1510: mod_base = OTHER; note = N1-methyl pseudouridine
  modified_base 1513: mod_base = OTHER; note = N1-methyl pseudouridine
  modified_base 1528: mod_base = OTHER; note = N1-methyl pseudouridine
  modified_base 1540: mod_base = OTHER; note = N1-methyl pseudouridine
  modified_base 1543: mod_base = OTHER; note = N1-methyl pseudouridine
  modified_base 1546: mod_base = OTHER; note = N1-methyl pseudouridine
  modified_base 1555: mod_base = OTHER; note = N1-methyl pseudouridine
  modified_base 1558: mod_base = OTHER; note = N1-methyl pseudouridine
  modified_base 1564: mod_base = OTHER; note = N1-methyl pseudouridine
  modified_base 1576: mod_base = OTHER; note = N1-methyl pseudouridine
  modified_base 1591: mod_base = OTHER; note = N1-methyl pseudouridine
  modified_base 1603: mod_base = OTHER; note = N1-methyl pseudouridine
  modified_base 1606: mod_base = OTHER; note = N1-methyl pseudouridine
  modified_base 1614: mod_base = OTHER; note = N1-methyl pseudouridine
  modified_base 1636: mod_base = OTHER; note = N1-methyl pseudouridine
  modified_base 1642: mod_base = OTHER; note = N1-methyl pseudouridine
  modified_base 1645: mod_base = OTHER; note = N1-methyl pseudouridine
  modified_base 1654: mod_base = OTHER; note = N1-methyl pseudouridine
  modified_base 1657: mod_base = OTHER; note = N1-methyl pseudouridine
  modified_base 1669: mod_base = OTHER; note = N1-methyl pseudouridine
  modified_base 1680: mod_base = OTHER; note = N1-methyl pseudouridine
  modified_base 1690: mod_base = OTHER; note = N1-methyl pseudouridine
  modified_base 1692: mod_base = OTHER; note = N1-methyl pseudouridine
  modified_base 1693: mod_base = OTHER; note = N1-methyl pseudouridine
  modified_base 1695: mod_base = OTHER; note = N1-methyl pseudouridine
  modified_base 1696: mod_base = OTHER; note = N1-methyl pseudouridine
  modified_base 1716: mod_base = OTHER; note = N1-methyl pseudouridine
  modified_base 1725: mod_base = OTHER; note = N1-methyl pseudouridine
  modified_base 1729: mod_base = OTHER; note = N1-methyl pseudouridine
  modified_base 1755: mod_base = OTHER; note = N1-methyl pseudouridine
  modified_base 1756: mod_base = OTHER; note = N1-methyl pseudouridine
  modified_base 1758: mod_base = OTHER; note = N1-methyl pseudouridine
  modified_base 1764: mod_base = OTHER; note = N1-methyl pseudouridine
  modified_base 1765: mod_base = OTHER; note = N1-methyl pseudouridine
  modified_base 1768: mod_base = OTHER; note = N1-methyl pseudouridine
  modified_base 1777: mod_base = OTHER; note = N1-methyl pseudouridine
  modified_base 1780: mod_base = OTHER; note = N1-methyl pseudouridine
  modified_base 1789: mod_base = OTHER; note = N1-methyl pseudouridine
  modified_base 1807: mod_base = OTHER; note = N1-methyl pseudouridine
  modified_base 1810: mod_base = OTHER; note = N1-methyl pseudouridine
  modified_base 1813: mod_base = OTHER; note = N1-methyl pseudouridine
  modified_base 1819: mod_base = OTHER; note = N1-methyl pseudouridine
  modified_base 1834: mod_base = OTHER; note = N1-methyl pseudouridine
  modified_base 1837: mod_base = OTHER; note = N1-methyl pseudouridine
  modified_base 1854: mod_base = OTHER; note = N1-methyl pseudouridine
  modified_base 1855: mod_base = OTHER; note = N1-methyl pseudouridine
  modified_base 1870: mod_base = OTHER; note = N1-methyl pseudouridine
  modified_base 1882: mod_base = OTHER; note = N1-methyl pseudouridine
  modified_base 1888: mod_base = OTHER; note = N1-methyl pseudouridine
  modified_base 1897: mod_base = OTHER; note = N1-methyl pseudouridine
  modified_base 1906: mod_base = OTHER; note = N1-methyl pseudouridine
  modified_base 1909: mod_base = OTHER; note = N1-methyl pseudouridine
  modified_base 1926: mod_base = OTHER; note = N1-methyl pseudouridine
  modified_base 1927: mod_base = OTHER; note = N1-methyl pseudouridine
  modified_base 1929: mod_base = OTHER; note = N1-methyl pseudouridine
  modified_base 1935: mod_base = OTHER; note = N1-methyl pseudouridine
  modified_base 1936: mod_base = OTHER; note = N1-methyl pseudouridine
  modified_base 1939: mod_base = OTHER; note = N1-methyl pseudouridine
  modified_base 1960: mod_base = OTHER; note = N1-methyl pseudouridine
  modified_base 1969: mod_base = OTHER; note = N1-methyl pseudouridine
  modified_base 1972: mod_base = OTHER; note = N1-methyl pseudouridine
  modified_base 1977: mod_base = OTHER; note = N1-methyl pseudouridine
  modified_base 1978: mod_base = OTHER; note = N1-methyl pseudouridine
  modified_base 1984: mod_base = OTHER; note = N1-methyl pseudouridine
  modified_base 1989: mod_base = OTHER; note = N1-methyl pseudouridine
  modified_base 1992: mod_base = OTHER; note = N1-methyl pseudouridine
  modified_base 1996: mod_base = OTHER; note = N1-methyl pseudouridine
  modified_base 2005: mod_base = OTHER; note = N1-methyl pseudouridine
  modified_base 2025: mod_base = OTHER; note = N1-methyl pseudouridine
  modified_base 2026: mod_base = OTHER; note = N1-methyl pseudouridine
  modified_base 2031: mod_base = OTHER; note = N1-methyl pseudouridine
  modified_base 2035: mod_base = OTHER; note = N1-methyl pseudouridine
  modified_base 2059: mod_base = OTHER; note = N1-methyl pseudouridine
  modified_base 2067: mod_base = OTHER; note = N1-methyl pseudouridine
  modified_base 2073: mod_base = OTHER; note = N1-methyl pseudouridine
  modified_base 2074: mod_base = OTHER; note = N1-methyl pseudouridine
  modified_base 2083: mod_base = OTHER; note = N1-methyl pseudouridine
  modified_base 2086: mod_base = OTHER; note = N1-methyl pseudouridine
  modified_base 2112: mod_base = OTHER; note = N1-methyl pseudouridine
  modified_base 2113: mod_base = OTHER; note = N1-methyl pseudouridine
  modified_base 2116: mod_base = OTHER; note = N1-methyl pseudouridine
  modified_base 2125: mod_base = OTHER; note = N1-methyl pseudouridine
  modified_base 2133: mod_base = OTHER; note = N1-methyl pseudouridine
  modified_base 2134: mod_base = OTHER; note = N1-methyl pseudouridine
  modified_base 2146: mod_base = OTHER; note = N1-methyl pseudouridine
  modified_base 2161: mod_base = OTHER; note = N1-methyl pseudouridine
  modified_base 2164: mod_base = OTHER; note = N1-methyl pseudouridine
  modified_base 2179: mod_base = OTHER; note = N1-methyl pseudouridine
  modified_base 2182: mod_base = OTHER; note = N1-methyl pseudouridine
  modified_base 2184: mod_base = OTHER; note = N1-methyl pseudouridine
  modified_base 2190: mod_base = OTHER; note = N1-methyl pseudouridine
  modified_base 2193: mod_base = OTHER; note = N1-methyl pseudouridine
  modified_base 2194: mod_base = OTHER; note = N1-methyl pseudouridine
  modified_base 2200: mod_base = OTHER; note = N1-methyl pseudouridine
  modified_base 2202: mod_base = OTHER; note = N1-methyl pseudouridine
  modified_base 2212: mod_base = OTHER; note = N1-methyl pseudouridine
  modified_base 2221: mod_base = OTHER; note = N1-methyl pseudouridine
  modified_base 2226: mod_base = OTHER; note = N1-methyl pseudouridine
  modified_base 2230: mod_base = OTHER; note = N1-methyl pseudouridine
  modified_base 2242: mod_base = OTHER; note = N1-methyl pseudouridine
  modified_base 2256: mod_base = OTHER; note = N1-methyl pseudouridine
  modified_base 2257: mod_base = OTHER; note = N1-methyl pseudouridine
  modified_base 2260: mod_base = OTHER; note = N1-methyl pseudouridine
  modified_base 2284: mod_base = OTHER; note = N1-methyl pseudouridine
  modified_base 2287: mod_base = OTHER; note = N1-methyl pseudouridine
  modified_base 2293: mod_base = OTHER; note = N1-methyl pseudouridine
  modified_base 2296: mod_base = OTHER; note = N1-methyl pseudouridine
  modified_base 2298: mod_base = OTHER; note = N1-methyl pseudouridine
  modified_base 2299: mod_base = OTHER; note = N1-methyl pseudouridine
  modified_base 2317: mod_base = OTHER; note = N1-methyl pseudouridine
  modified_base 2323: mod_base = OTHER; note = N1-methyl pseudouridine
  modified_base 2332: mod_base = OTHER; note = N1-methyl pseudouridine
  modified_base 2343: mod_base = OTHER; note = N1-methyl pseudouridine
  modified_base 2346: mod_base = OTHER; note = N1-methyl pseudouridine
  modified_base 2347: mod_base = OTHER; note = N1-methyl pseudouridine
  modified_base 2356: mod_base = OTHER; note = N1-methyl pseudouridine
  modified_base 2361: mod_base = OTHER; note = N1-methyl pseudouridine
  modified_base 2364: mod_base = OTHER; note = N1-methyl pseudouridine
  modified_base 2365: mod_base = OTHER; note = N1-methyl pseudouridine
  modified_base 2374: mod_base = OTHER; note = N1-methyl pseudouridine
  modified_base 2380: mod_base = OTHER; note = N1-methyl pseudouridine
  modified_base 2389: mod_base = OTHER; note = N1-methyl pseudouridine
  modified_base 2400: mod_base = OTHER; note = N1-methyl pseudouridine
  modified_base 2401: mod_base = OTHER; note = N1-methyl pseudouridine
  modified_base 2413: mod_base = OTHER; note = N1-methyl pseudouridine
  modified_base 2421: mod_base = OTHER; note = N1-methyl pseudouridine
  modified_base 2431: mod_base = OTHER; note = N1-methyl pseudouridine
  modified_base 2434: mod_base = OTHER; note = N1-methyl pseudouridine
  modified_base 2440: mod_base = OTHER; note = N1-methyl pseudouridine
  modified_base 2443: mod_base = OTHER; note = N1-methyl pseudouridine
  modified_base 2457: mod_base = OTHER; note = N1-methyl pseudouridine
  modified_base 2458: mod_base = OTHER; note = N1-methyl pseudouridine
  modified_base 2461: mod_base = OTHER; note = N1-methyl pseudouridine
  modified_base 2485: mod_base = OTHER; note = N1-methyl pseudouridine
  modified_base 2488: mod_base = OTHER; note = N1-methyl pseudouridine
  modified_base 2497: mod_base = OTHER; note = N1-methyl pseudouridine
  modified_base 2500: mod_base = OTHER; note = N1-methyl pseudouridine
  modified_base 2503: mod_base = OTHER; note = N1-methyl pseudouridine
  modified_base 2509: mod_base = OTHER; note = N1-methyl pseudouridine
  modified_base 2515: mod_base = OTHER; note = N1-methyl pseudouridine
  modified_base 2517: mod_base = OTHER; note = N1-methyl pseudouridine
  modified_base 2518: mod_base = OTHER; note = N1-methyl pseudouridine
  modified_base 2533: mod_base = OTHER; note = N1-methyl pseudouridine
  modified_base 2536: mod_base = OTHER; note = N1-methyl pseudouridine
  modified_base 2548: mod_base = OTHER; note = N1-methyl pseudouridine
  modified_base 2556: mod_base = OTHER; note = N1-methyl pseudouridine
  modified_base 2566: mod_base = OTHER; note = N1-methyl pseudouridine
  modified_base 2568: mod_base = OTHER; note = N1-methyl pseudouridine
  modified_base 2569: mod_base = OTHER; note = N1-methyl pseudouridine
  modified_base 2581: mod_base = OTHER; note = N1-methyl pseudouridine
  modified_base 2584: mod_base = OTHER; note = N1-methyl pseudouridine
  modified_base 2593: mod_base = OTHER; note = N1-methyl pseudouridine
  modified_base 2607: mod_base = OTHER; note = N1-methyl pseudouridine
  modified_base 2616: mod_base = OTHER; note = N1-methyl pseudouridine
  modified_base 2626: mod_base = OTHER; note = N1-methyl pseudouridine
  modified_base 2638: mod_base = OTHER; note = N1-methyl pseudouridine
  modified_base 2641: mod_base = OTHER; note = N1-methyl pseudouridine
  modified_base 2650: mod_base = OTHER; note = N1-methyl pseudouridine
  modified_base 2677: mod_base = OTHER; note = N1-methyl pseudouridine
  modified_base 2680: mod_base = OTHER; note = N1-methyl pseudouridine
  modified_base 2685: mod_base = OTHER; note = N1-methyl pseudouridine
  modified_base 2686: mod_base = OTHER; note = N1-methyl pseudouridine
  modified_base 2689: mod_base = OTHER; note = N1-methyl pseudouridine
  modified_base 2703: mod_base = OTHER; note = N1-methyl pseudouridine
  modified_base 2704: mod_base = OTHER; note = N1-methyl pseudouridine
  modified_base 2718: mod_base = OTHER; note = N1-methyl pseudouridine
  modified_base 2719: mod_base = OTHER; note = N1-methyl pseudouridine
  modified_base 2722: mod_base = OTHER; note = N1-methyl pseudouridine
  modified_base 2728: mod_base = OTHER; note = N1-methyl pseudouridine
  modified_base 2731: mod_base = OTHER; note = N1-methyl pseudouridine
  modified_base 2746: mod_base = OTHER; note = N1-methyl pseudouridine
  modified_base 2751: mod_base = OTHER; note = N1-methyl pseudouridine
  modified_base 2752: mod_base = OTHER; note = N1-methyl pseudouridine
  modified_base 2764: mod_base = OTHER; note = N1-methyl pseudouridine
  modified_base 2779: mod_base = OTHER; note = N1-methyl pseudouridine
  modified_base 2800: mod_base = OTHER; note = N1-methyl pseudouridine
  modified_base 2812: mod_base = OTHER; note = N1-methyl pseudouridine
  modified_base 2821: mod_base = OTHER; note = N1-methyl pseudouridine
  modified_base 2839: mod_base = OTHER; note = N1-methyl pseudouridine
  modified_base 2851: mod_base = OTHER; note = N1-methyl pseudouridine
  modified_base 2854: mod_base = OTHER; note = N1-methyl pseudouridine
  modified_base 2863: mod_base = OTHER; note = N1-methyl pseudouridine
  modified_base 2869: mod_base = OTHER; note = N1-methyl pseudouridine
  modified_base 2872: mod_base = OTHER; note = N1-methyl pseudouridine
  modified_base 2881: mod_base = OTHER; note = N1-methyl pseudouridine
  modified_base 2884: mod_base = OTHER; note = N1-methyl pseudouridine
  modified_base 2890: mod_base = OTHER; note = N1-methyl pseudouridine
  modified_base 2893: mod_base = OTHER; note = N1-methyl pseudouridine
  modified_base 2917: mod_base = OTHER; note = N1-methyl pseudouridine
  modified_base 2920: mod_base = OTHER; note = N1-methyl pseudouridine
  modified_base 2923: mod_base = OTHER; note = N1-methyl pseudouridine
  modified_base 2929: mod_base = OTHER; note = N1-methyl pseudouridine
  modified_base 2983: mod_base = OTHER; note = N1-methyl pseudouridine
  modified_base 2992: mod_base = OTHER; note = N1-methyl pseudouridine
  modified_base 3004: mod_base = OTHER; note = N1-methyl pseudouridine
  modified_base 3013: mod_base = OTHER; note = N1-methyl pseudouridine
  modified_base 3025: mod_base = OTHER; note = N1-methyl pseudouridine
  modified_base 3028: mod_base = OTHER; note = N1-methyl pseudouridine
  modified_base 3043: mod_base = OTHER; note = N1-methyl pseudouridine
  modified_base 3058: mod_base = OTHER; note = N1-methyl pseudouridine
  modified_base 3073: mod_base = OTHER; note = N1-methyl pseudouridine
  modified_base 3075: mod_base = OTHER; note = N1-methyl pseudouridine
  modified_base 3079: mod_base = OTHER; note = N1-methyl pseudouridine
  modified_base 3081: mod_base = OTHER; note = N1-methyl pseudouridine
  modified_base 3084: mod_base = OTHER; note = N1-methyl pseudouridine
  modified_base 3088: mod_base = OTHER; note = N1-methyl pseudouridine
  modified_base 3106: mod_base = OTHER; note = N1-methyl pseudouridine
  modified_base 3108: mod_base = OTHER; note = N1-methyl pseudouridine
  modified_base 3112: mod_base = OTHER; note = N1-methyl pseudouridine
  modified_base 3124: mod_base = OTHER; note = N1-methyl pseudouridine
  modified_base 3130: mod_base = OTHER; note = N1-methyl pseudouridine
  modified_base 3139: mod_base = OTHER; note = N1-methyl pseudouridine
  modified_base 3147: mod_base = OTHER; note = N1-methyl pseudouridine
  modified_base 3154: mod_base = OTHER; note = N1-methyl pseudouridine
  modified_base 3163: mod_base = OTHER; note = N1-methyl pseudouridine
  modified_base 3166: mod_base = OTHER; note = N1-methyl pseudouridine
  modified_base 3177: mod_base = OTHER; note = N1-methyl pseudouridine
  modified_base 3178: mod_base = OTHER; note = N1-methyl pseudouridine
  modified_base 3181: mod_base = OTHER; note = N1-methyl pseudouridine
  modified_base 3196: mod_base = OTHER; note = N1-methyl pseudouridine
  modified_base 3208: mod_base = OTHER; note = N1-methyl pseudouridine
  modified_base 3211: mod_base = OTHER; note = N1-methyl pseudouridine
  modified_base 3250: mod_base = OTHER; note = N1-methyl pseudouridine
  modified_base 3265: mod_base = OTHER; note = N1-methyl pseudouridine
  modified_base 3268: mod_base = OTHER; note = N1-methyl pseudouridine
  modified_base 3277: mod_base = OTHER; note = N1-methyl pseudouridine
  modified_base 3285: mod_base = OTHER; note = N1-methyl pseudouridine
  modified_base 3288: mod_base = OTHER; note = N1-methyl pseudouridine
  modified_base 3298: mod_base = OTHER; note = N1-methyl pseudouridine
  modified_base 3301: mod_base = OTHER; note = N1-methyl pseudouridine
  modified_base 3313: mod_base = OTHER; note = N1-methyl pseudouridine
  modified_base 3316: mod_base = OTHER; note = N1-methyl pseudouridine
  modified_base 3330: mod_base = OTHER; note = N1-methyl pseudouridine
  modified_base 3331: mod_base = OTHER; note = N1-methyl pseudouridine
  modified_base 3340: mod_base = OTHER; note = N1-methyl pseudouridine
  modified_base 3364: mod_base = OTHER; note = N1-methyl pseudouridine
  modified_base 3373: mod_base = OTHER; note = N1-methyl pseudouridine
  modified_base 3387: mod_base = OTHER; note = N1-methyl pseudouridine
  modified_base 3388: mod_base = OTHER; note = N1-methyl pseudouridine
  modified_base 3391: mod_base = OTHER; note = N1-methyl pseudouridine
  modified_base 3403: mod_base = OTHER; note = N1-methyl pseudouridine
  modified_base 3406: mod_base = OTHER; note = N1-methyl pseudouridine
  modified_base 3421: mod_base = OTHER; note = N1-methyl pseudouridine
  modified_base 3433: mod_base = OTHER; note = N1-methyl pseudouridine
  modified_base 3442: mod_base = OTHER; note = N1-methyl pseudouridine
  modified_base 3445: mod_base = OTHER; note = N1-methyl pseudouridine
  modified_base 3457: mod_base = OTHER; note = N1-methyl pseudouridine
  modified_base 3468: mod_base = OTHER; note = N1-methyl pseudouridine
  modified_base 3487: mod_base = OTHER; note = N1-methyl pseudouridine
  modified_base 3490: mod_base = OTHER; note = N1-methyl pseudouridine
  modified_base 3499: mod_base = OTHER; note = N1-methyl pseudouridine
  modified_base 3505: mod_base = OTHER; note = N1-methyl pseudouridine
  modified_base 3508: mod_base = OTHER; note = N1-methyl pseudouridine
  modified_base 3514: mod_base = OTHER; note = N1-methyl pseudouridine
  modified_base 3526: mod_base = OTHER; note = N1-methyl pseudouridine
  modified_base 3529: mod_base = OTHER; note = N1-methyl pseudouridine
  modified_base 3537: mod_base = OTHER; note = N1-methyl pseudouridine
  modified_base 3538: mod_base = OTHER; note = N1-methyl pseudouridine
  modified_base 3549: mod_base = OTHER; note = N1-methyl pseudouridine
  modified_base 3550: mod_base = OTHER; note = N1-methyl pseudouridine
  modified_base 3555: mod_base = OTHER; note = N1-methyl pseudouridine
  modified_base 3556: mod_base = OTHER; note = N1-methyl pseudouridine
  modified_base 3558: mod_base = OTHER; note = N1-methyl pseudouridine
  modified_base 3565: mod_base = OTHER; note = N1-methyl pseudouridine
  modified_base 3574: mod_base = OTHER; note = N1-methyl pseudouridine
  modified_base 3582: mod_base = OTHER; note = N1-methyl pseudouridine
  modified_base 3603: mod_base = OTHER; note = N1-methyl pseudouridine
  modified_base 3607: mod_base = OTHER; note = N1-methyl pseudouridine
  modified_base 3616: mod_base = OTHER; note = N1-methyl pseudouridine
  modified_base 3619: mod_base = OTHER; note = N1-methyl pseudouridine
  modified_base 3631: mod_base = OTHER; note = N1-methyl pseudouridine
  modified_base 3634: mod_base = OTHER; note = N1-methyl pseudouridine
  modified_base 3642: mod_base = OTHER; note = N1-methyl pseudouridine
  modified_base 3652: mod_base = OTHER; note = N1-methyl pseudouridine
  modified_base 3663: mod_base = OTHER; note = N1-methyl pseudouridine
  modified_base 3664: mod_base = OTHER; note = N1-methyl pseudouridine
  modified_base 3667: mod_base = OTHER; note = N1-methyl pseudouridine
  modified_base 3669: mod_base = OTHER; note = N1-methyl pseudouridine
  modified_base 3678: mod_base = OTHER; note = N1-methyl pseudouridine
  modified_base 3685: mod_base = OTHER; note = N1-methyl pseudouridine
  modified_base 3687: mod_base = OTHER; note = N1-methyl pseudouridine
  modified_base 3694: mod_base = OTHER; note = N1-methyl pseudouridine
  modified_base 3703: mod_base = OTHER; note = N1-methyl pseudouridine
  modified_base 3706: mod_base = OTHER; note = N1-methyl pseudouridine
  modified_base 3727: mod_base = OTHER; note = N1-methyl pseudouridine
  modified_base 3747: mod_base = OTHER; note = N1-methyl pseudouridine
  modified_base 3750: mod_base = OTHER; note = N1-methyl pseudouridine
  modified_base 3751: mod_base = OTHER; note = N1-methyl pseudouridine
  modified_base 3753: mod_base = OTHER; note = N1-methyl pseudouridine
  modified_base 3754: mod_base = OTHER; note = N1-methyl pseudouridine
  modified_base 3756: mod_base = OTHER; note = N1-methyl pseudouridine
  modified_base 3766: mod_base = OTHER; note = N1-methyl pseudouridine
  modified_base 3769: mod_base = OTHER; note = N1-methyl pseudouridine
  modified_base 3774: mod_base = OTHER; note = N1-methyl pseudouridine
  modified_base 3775: mod_base = OTHER; note = N1-methyl pseudouridine
  modified_base 3777: mod_base = OTHER; note = N1-methyl pseudouridine
  modified_base 3778: mod_base = OTHER; note = N1-methyl pseudouridine
  modified_base 3790: mod_base = OTHER; note = N1-methyl pseudouridine
  modified_base 3796: mod_base = OTHER; note = N1-methyl pseudouridine
  modified_base 3811: mod_base = OTHER; note = N1-methyl pseudouridine
  modified_base 3826: mod_base = OTHER; note = N1-methyl pseudouridine
  modified_base 3829: mod_base = OTHER; note = N1-methyl pseudouridine
  modified_base 3856: mod_base = OTHER; note = N1-methyl pseudouridine
  modified_base 3859: mod_base = OTHER; note = N1-methyl pseudouridine
  modified_base 3861: mod_base = OTHER; note = N1-methyl pseudouridine
  modified_base 3879: mod_base = OTHER; note = N1-methyl pseudouridine
  modified_base 3880: mod_base = OTHER; note = N1-methyl pseudouridine
  modified_base 3889: mod_base = OTHER; note = N1-methyl pseudouridine
  modified_base 3898: mod_base = OTHER; note = N1-methyl pseudouridine
  modified_base 3901: mod_base = OTHER; note = N1-methyl pseudouridine
  modified_base 3907: mod_base = OTHER; note = N1-methyl pseudouridine
  modified_base 3916: mod_base = OTHER; note = N1-methyl pseudouridine
  modified_base 3922: mod_base = OTHER; note = N1-methyl pseudouridine
  modified_base 3925: mod_base = OTHER; note = N1-methyl pseudouridine
  modified_base 3940: mod_base = OTHER; note = N1-methyl pseudouridine
  modified_base 3954: mod_base = OTHER; note = N1-methyl pseudouridine
  modified_base 3955: mod_base = OTHER; note = N1-methyl pseudouridine
  modified_base 3970: mod_base = OTHER; note = N1-methyl pseudouridine
  modified_base 3973: mod_base = OTHER; note = N1-methyl pseudouridine
  modified_base 3997: mod_base = OTHER; note = N1-methyl pseudouridine
  modified_base 4000: mod_base = OTHER; note = N1-methyl pseudouridine
  modified_base 4017: mod_base = OTHER; note = N1-methyl pseudouridine
  modified_base 4032: mod_base = OTHER; note = N1-methyl pseudouridine
  modified_base 4041: mod_base = OTHER; note = N1-methyl pseudouridine
  modified_base 4042: mod_base = OTHER; note = N1-methyl pseudouridine
  modified_base 4057: mod_base = OTHER; note = N1-methyl pseudouridine
  modified_base 4062: mod_base = OTHER; note = N1-methyl pseudouridine
  modified_base 4069: mod_base = OTHER; note = N1-methyl pseudouridine
  modified_base 4072: mod_base = OTHER; note = N1-methyl pseudouridine
  modified_base 4075: mod_base = OTHER; note = N1-methyl pseudouridine
  modified_base 4078: mod_base = OTHER; note = N1-methyl pseudouridine
  modified_base 4087: mod_base = OTHER; note = N1-methyl pseudouridine
  modified_base 4111: mod_base = OTHER; note = N1-methyl pseudouridine
  modified_base 4120: mod_base = OTHER; note = N1-methyl pseudouridine
  modified_base 4129: mod_base = OTHER; note = N1-methyl pseudouridine
  modified_base 4132: mod_base = OTHER; note = N1-methyl pseudouridine
  modified_base 4138: mod_base = OTHER; note = N1-methyl pseudouridine
  modified_base 4144: mod_base = OTHER; note = N1-methyl pseudouridine
  modified_base 4147: mod_base = OTHER; note = N1-methyl pseudouridine
  modified_base 4161: mod_base = OTHER; note = N1-methyl pseudouridine
  modified_base 4162: mod_base = OTHER; note = N1-methyl pseudouridine
  modified_base 4177: mod_base = OTHER; note = N1-methyl pseudouridine
  modified_base 4182: mod_base = OTHER; note = N1-methyl pseudouridine
  modified_base 4183: mod_base = OTHER; note = N1-methyl pseudouridine
  modified_base 4186: mod_base = OTHER; note = N1-methyl pseudouridine
  modified_base 4200: mod_base = OTHER; note = N1-methyl pseudouridine
  modified_base 4210: mod_base = OTHER; note = N1-methyl pseudouridine
  modified_base 4222: mod_base = OTHER; note = N1-methyl pseudouridine
  modified_base 4225: mod_base = OTHER; note = N1-methyl pseudouridine
  modified_base 4228: mod_base = OTHER; note = N1-methyl pseudouridine
  modified_base 4234: mod_base = OTHER; note = N1-methyl pseudouridine
  modified_base 4242: mod_base = OTHER; note = N1-methyl pseudouridine
  modified_base 4249: mod_base = OTHER; note = N1-methyl pseudouridine
  modified_base 4251: mod_base = OTHER; note = N1-methyl pseudouridine
  modified_base 4252: mod_base = OTHER; note = N1-methyl pseudouridine
  modified_base 4258: mod_base = OTHER; note = N1-methyl pseudouridine
  modified_base 4279: mod_base = OTHER; note = N1-methyl pseudouridine
  modified_base 4282: mod_base = OTHER; note = N1-methyl pseudouridine
  modified_base 4300: mod_base = OTHER; note = N1-methyl pseudouridine
  modified_base 4318: mod_base = OTHER; note = N1-methyl pseudouridine
  modified_base 4324: mod_base = OTHER; note = N1-methyl pseudouridine
  modified_base 4335: mod_base = OTHER; note = N1-methyl pseudouridine
  modified_base 4339: mod_base = OTHER; note = N1-methyl pseudouridine
  modified_base 4344: mod_base = OTHER; note = N1-methyl pseudouridine
  modified_base 4345: mod_base = OTHER; note = N1-methyl pseudouridine
  modified_base 4348: mod_base = OTHER; note = N1-methyl pseudouridine
  modified_base 4350: mod_base = OTHER; note = N1-methyl pseudouridine
  modified_base 4354: mod_base = OTHER; note = N1-methyl pseudouridine
  modified_base 4365: mod_base = OTHER; note = N1-methyl pseudouridine
  modified_base 4375: mod_base = OTHER; note = N1-methyl pseudouridine
  modified_base 4411: mod_base = OTHER; note = N1-methyl pseudouridine
  modified_base 4413: mod_base = OTHER; note = N1-methyl pseudouridine
  modified_base 4414: mod_base = OTHER; note = N1-methyl pseudouridine
  modified_base 4417: mod_base = OTHER; note = N1-methyl pseudouridine
  modified_base 4434: mod_base = OTHER; note = N1-methyl pseudouridine
  modified_base 4438: mod_base = OTHER; note = N1-methyl pseudouridine
  modified_base 4447: mod_base = OTHER; note = N1-methyl pseudouridine
  modified_base 4450: mod_base = OTHER; note = N1-methyl pseudouridine
  modified_base 4459: mod_base = OTHER; note = N1-methyl pseudouridine
  modified_base 4467: mod_base = OTHER; note = N1-methyl pseudouridine
  modified_base 4468: mod_base = OTHER; note = N1-methyl pseudouridine
  modified_base 4480: mod_base = OTHER; note = N1-methyl pseudouridine
  modified_base 4483: mod_base = OTHER; note = N1-methyl pseudouridine
  modified_base 4486: mod_base = OTHER; note = N1-methyl pseudouridine
  modified_base 4501: mod_base = OTHER; note = N1-methyl pseudouridine
  modified_base 4510: mod_base = OTHER; note = N1-methyl pseudouridine
  modified_base 4513: mod_base = OTHER; note = N1-methyl pseudouridine
  modified_base 4521: mod_base = OTHER; note = N1-methyl pseudouridine
  modified_base 4546: mod_base = OTHER; note = N1-methyl pseudouridine
  modified_base 4567: mod_base = OTHER; note = N1-methyl pseudouridine
  modified_base 4570: mod_base = OTHER; note = N1-methyl pseudouridine
  modified_base 4576: mod_base = OTHER; note = N1-methyl pseudouridine
  modified_base 4578: mod_base = OTHER; note = N1-methyl pseudouridine
  modified_base 4579: mod_base = OTHER; note = N1-methyl pseudouridine
  modified_base 4585: mod_base = OTHER; note = N1-methyl pseudouridine
  modified_base 4594: mod_base = OTHER; note = N1-methyl pseudouridine
  modified_base 4611: mod_base = OTHER; note = N1-methyl pseudouridine
  modified_base 4612: mod_base = OTHER; note = N1-methyl pseudouridine
  modified_base 4617: mod_base = OTHER; note = N1-methyl pseudouridine
  modified_base 4620: mod_base = OTHER; note = N1-methyl pseudouridine
  modified_base 4621: mod_base = OTHER; note = N1-methyl pseudouridine
  modified_base 4633: mod_base = OTHER; note = N1-methyl pseudouridine
  modified_base 4647: mod_base = OTHER; note = N1-methyl pseudouridine
  modified_base 4666: mod_base = OTHER; note = N1-methyl pseudouridine
  modified_base 4669: mod_base = OTHER; note = N1-methyl pseudouridine
  modified_base 4681: mod_base = OTHER; note = N1-methyl pseudouridine
  modified_base 4684: mod_base = OTHER; note = N1-methyl pseudouridine
  modified_base 4696: mod_base = OTHER; note = N1-methyl pseudouridine
  modified_base 4705: mod_base = OTHER; note = N1-methyl pseudouridine
  modified_base 4707: mod_base = OTHER; note = N1-methyl pseudouridine
  modified_base 4720: mod_base = OTHER; note = N1-methyl pseudouridine
  modified_base 4726: mod_base = OTHER; note = N1-methyl pseudouridine
  modified_base 4735: mod_base = OTHER; note = N1-methyl pseudouridine
  modified_base 4782: mod_base = OTHER; note = N1-methyl pseudouridine
  modified_base 4783: mod_base = OTHER; note = N1-methyl pseudouridine
  modified_base 4810: mod_base = OTHER; note = N1-methyl pseudouridine
  modified_base 4812: mod_base = OTHER; note = N1-methyl pseudouridine
  modified_base 4823: mod_base = OTHER; note = N1-methyl pseudouridine
  modified_base 4824: mod_base = OTHER; note = N1-methyl pseudouridine
  modified_base 4827: mod_base = OTHER; note = N1-methyl pseudouridine
  modified_base 4828: mod_base = OTHER; note = N1-methyl pseudouridine
  modified_base 4833: mod_base = OTHER; note = N1-methyl pseudouridine
  modified_base 4837: mod_base = OTHER; note = N1-methyl pseudouridine
  modified_base 4838: mod_base = OTHER; note = N1-methyl pseudouridine
  modified_base 4840: mod_base = OTHER; note = N1-methyl pseudouridine
  modified_base 4848: mod_base = OTHER; note = N1-methyl pseudouridine
  modified_base 4849: mod_base = OTHER; note = N1-methyl pseudouridine
  modified_base 4853: mod_base = OTHER; note = N1-methyl pseudouridine
  modified_base 4854: mod_base = OTHER; note = N1-methyl pseudouridine
  modified_base 4856: mod_base = OTHER; note = N1-methyl pseudouridine
  modified_base 4862: mod_base = OTHER; note = N1-methyl pseudouridine
  modified_base 4867: mod_base = OTHER; note = N1-methyl pseudouridine
  modified_base 4868: mod_base = OTHER; note = N1-methyl pseudouridine
  modified_base 4870: mod_base = OTHER; note = N1-methyl pseudouridine
  modified_base 4871: mod_base = OTHER; note = N1-methyl pseudouridine
  modified_base 4873: mod_base = OTHER; note = N1-methyl pseudouridine
  modified_base 4875: mod_base = OTHER; note = N1-methyl pseudouridine
  modified_base 4879: mod_base = OTHER; note = N1-methyl pseudouridine
  modified_base 4880: mod_base = OTHER; note = N1-methyl pseudouridine
  modified_base 4886: mod_base = OTHER; note = N1-methyl pseudouridine
  modified_base 4888: mod_base = OTHER; note = N1-methyl pseudouridine
  modified_base 4892: mod_base = OTHER; note = N1-methyl pseudouridine
  modified_base 4894: mod_base = OTHER; note = N1-methyl pseudouridine
  modified_base 4895: mod_base = OTHER; note = N1-methyl pseudouridine
  modified_base 4898: mod_base = OTHER; note = N1-methyl pseudouridine
  modified_base 4900: mod_base = OTHER; note = N1-methyl pseudouridine
  modified_base 4901: mod_base = OTHER; note = N1-methyl pseudouridine
  modified_base 4902: mod_base = OTHER; note = N1-methyl pseudouridine
  modified_base 4906: mod_base = OTHER; note = N1-methyl pseudouridine
  modified_base 4913: mod_base = OTHER; note = N1-methyl pseudouridine
  modified_base 4917: mod_base = OTHER; note = N1-methyl pseudouridine
  modified_base 4924: mod_base = OTHER; note = N1-methyl pseudouridine
  modified_base 4926: mod_base = OTHER; note = N1-methyl pseudouridine
aggaaataagagagaaaagaagagtaagaagaaatataagagccaccatgagcgaggtggagttcagccacgagtactggatgcggcacgccctgaccctggccaagcgggcccgggacgagcgggaggtgcccgtgggcgccgtgctggtgctgaacaaccgggtgatcggcgagggctggaaccgggccatcggcctgcacgaccccaccgcccacgccgagatcatggccctgcggcagggcggcctggtgatgcagaactaccggctgatcgacgccaccctgtacgtgaccttcgagccctgcgtgatgtgcgccggcgccatgatccacagccggatcggccgggtggtgttcggcgtgcggaacgccaagaccggcgccgccggcagcctgatggacgtgctgcaccaccccggcatgaaccaccgggtggagatcaccgagggcatcctggccgacgagtgcgccgccctgctgtgccggttcttccggatgccccggcgggtgttcaacgcccagaagaaggcccagagcagcaccgacagcggcggcagcagcggcggcagcagcggcagcgagacacccggcaccagcgagagcgccacccccgagagcagcggcggcagcagcggcggcagcgacaagaagtacagcatcggcctggccatcggcaccaacagcgtgggctgggccgtgatcaccgacgagtacaaggtgcccagcaagaagttcaaggtgctgggcaacaccgaccggcacagcatcaagaagaacctgatcggcgccctgctgttcgacagcggcgagacagccgaggccacccggctgaagcggaccgcccggcggcggtacacccggcggaagaaccggatctgctacctgcaggagatcttcagcaacgagatggccaaggtggacgacagcttcttccaccggctggaggagagcttcctggtggaggaggacaagaagcacgagcggcaccccatcttcggcaacatcgtggacgaggtggcctaccacgagaagtaccccaccatctaccacctgcggaagaagctggtggacagcaccgacaaggccgacctgcggctgatctacctggccctggcccacatgatcaagttccggggccacttcctgatcgagggcgacctgaaccccgacaacagcgacgtggacaagctgttcatccagctggtgcagacctacaaccagctgttcgaggagaaccccatcaacgccagcggcgtggacgccaaggccatcctgagcgcccggctgagcaagagccggcggctggagaacctgatcgcccagctgcccggcgagaagaagaacggcctgttcggcaacctgatcgccctgagcctgggcctgacccccaacttcaagagcaacttcgacctggccgaggacgccaagctgcagctgagcaaggacacctacgacgacgacctggacaacctgctggcccagatcggcgaccagtacgccgacctgttcctggccgccaagaacctgagcgacgccatcctgctgagcgacatcctgcgggtgaacaccgagatcaccaaggcccccctgagcgccagcatgatcaagcggtacgacgagcaccaccaggacctgaccctgctgaaggccctggtgcggcagcagctgcccgagaagtacaaggagatcttcttcgaccagagcaagaacggctacgccggctacatcgacggcggcgccagccaggaggagttctacaagttcatcaagcccatcctggagaagatggacggcaccgaggagctgctggtgaagctgaaccgggaggacctgctgcggaagcagcggaccttcgacaacggcagcatcccccaccagatccacctgggcgagctgcacgccatcctgcggcggcaggaggacttctaccccttcctgaaggacaaccgggagaagatcgagaagatcctgaccttccggatcccctactacgtgggccccctggcccggggcaacagccggttcgcctggatgacccgcaagagcgaggagacaatcaccccctggaacttcgaggaggtggtggacaagggcgccagcgcccagagcttcatcgagcggatgaccaacttcgacaagaacctgcccaacgagaaggtgctgcccaagcacagcctgctgtacgagtacttcaccgtgtacaacgagctgaccaaggtgaagtacgtgaccgagggcatgcggaagcccgccttcctgagcggcgagcagaagaaggccatcgtggacctgctgttcaagaccaaccggaaggtgaccgtgaagcagctgaaggaggactacttcaagaagatcgagtgcttcgacagcgtggagatcagcggcgtggaggaccggttcaacgccagcctgggcacctaccacgacctgctgaagatcatcaaggacaaggacttcctggacaacgaggagaacgaggacatcctggaggacatcgtgctgaccctgaccctgttcgaggaccgggagatgatcgaggagcggctgaagacctacgcccacctgttcgacgacaaggtgatgaagcagctgaagcggcggcggtacaccggctggggccggctgagccggaagctgatcaacggcatccgggacaagcagagcggcaagaccatcctggacttcctcaagagcgacggcttcgccaaccggaacttcatgcagctgatccacgacgacagcctgaccttcaaggaggacatccagaaggcccaggtgagcggccagggcgacagcctgcacgagcacatcgccaacctggccggcagccccgccatcaagaagggcatcctgcagaccgtgaaggtggtggacgagctggtgaaggtgatgggccggcacaagcccgagaacatcgtgatcgagatggcccgggagaaccagaccacccagaagggccagaagaacagccgggagcggatgaagcggatcgaggagggcatcaaggagctgggcagccagatcctgaaggagcaccccgtggagaacacccagctgcagaacgagaagctgtacctgtactacctgcagaacggccgggacatgtacgtggaccaggagctggacatcaaccggctgagcgactacgacgtggaccacatcgtgccccagagcttcctgaaggacgacagcatcgacaacaaggtgctgacccggagcgacaagaaccggggcaagagcgacaacgtgcccagcgaggaggtggtgaagaagatgaagaactactggcggcagctgctgaacgccaagctgatcacccagcggaagttcgacaacctgaccaaggccgagcggggcggcctgagcgagctggacaaggccggcttcatcaagcggcagctggtggagacacggcagatcaccaagcacgtggcccagatcctggacagccggatgaacaccaagtacgacgagaacgacaagctgatccgggaggtgaaggtgatcaccctcaagagcaagctggtgagcgacttccggaaggacttccagttctacaaggtgcgggagatcaacaactaccaccacgcccacgacgcctacctgaacgccgtggtgggcaccgccctgatcaagaagtaccccaagctggagagcgagttcgtgtacggcgactacaaggtgtacgacgtgcggaagatgatcgccaagagcgagcaggagatcggcaaggccaccgccaagtacttcttctacagcaacatcatgaacttcttcaagaccgagatcaccctggccaacggcgagatccggaagcggcccctgatcgagacaaacggcgagacaggcgagatcgtgtgggacaagggccgggacttcgccaccgtgcggaaggtgctgagcatgccccaggtgaacatcgtgaagaagaccgaggtgcagaccggcggcttcagcaaggagagcatcctgcccaagcggaacagcgacaagctgatcgcccggaagaaggactgggaccccaagaagtacggcggcttcgacagccccaccgtggcctacagcgtgctggtggtggccaaggtggagaagggcaagagcaagaagctcaagagcgtgaaggagctgctgggcatcaccatcatggagcggagcagcttcgagaagaaccccatcgacttcctggaggccaagggctacaaggaggtgaagaaggacctgatcatcaagctgcccaagtacagcctgttcgagctggagaacggccggaagcggatgctggccagcgccggcgagctgcagaagggcaacgagctggccctgcccagcaagtacgtgaacttcctgtacctggccagccactacgagaagctgaagggcagccccgaggacaacgagcagaagcagctgttcgtggagcagcacaagcactacctggacgagatcatcgagcagatcagcgagttcagcaagcgggtgatcctggccgacgccaacctggacaaggtgctgagcgcctacaacaagcaccgggacaagcccatccgggagcaggccgagaacatcatccacctgttcaccctgaccaacctgggcgcccccgccgccttcaagtacttcgacaccaccatcgaccggaagcggtacaccagcaccaaggaggtgctggacgccaccctgatccaccagagcatcaccggcctgtacgagacacggatcgacctgagccagctgggcggcgacgagggcgccgacaagcggaccgccgacggcagcgagttcgagagccccaagaagaagcggaaggtgtgagcggccgcttaattaagctgccttctgcggggcttgccttctggccatgcccttcttctctcccttgcacctgtacctcttggtctttgaataaagcctgagtaggaagtctaga

SEQ ID NO: 2193 - DNA, 22 bp, synthetic construct
  source 1..22: mol_type = other DNA
cccgcacctggcacagagaggg

SEQ ID NO: 2194 - DNA, 24 bp, synthetic construct
  source 1..24: mol_type = other DNA
acagcaccttggcagcagaggtgg

SEQ ID NO: 2195 - DNA, 22 bp, synthetic construct
  source 1..22: mol_type = other DNA
cccgcacctggtgcagcaagtg

SEQ ID NO: 2196 - DNA, 22 bp, synthetic construct
  source 1..22: mol_type = other DNA
accgcaccaggcccagcggcgg

SEQ ID NO: 2197 - DNA, 22 bp, synthetic construct
  source 1..22: mol_type = other DNA
accacacctggcccagcagagg

SEQ ID NO: 2198 - DNA, 23 bp, synthetic construct
  source 1..23: mol_type = other DNA
cctgcaccttggagcagcagggg

SEQ ID NO: 2199 - DNA, 23 bp, synthetic construct
  source 1..23: mol_type = other DNA
ccagcaccttagtgcagcagaag

SEQ ID NO: 2200 - DNA, 23 bp, synthetic construct
  source 1..23: mol_type = other DNA
cccgcacccagacacagcggcgg

SEQ ID NO: 2201 - DNA, 22 bp, synthetic construct
  source 1..22: mol_type = other DNA
cccacacctggcacagcgccgg

SEQ ID NO: 2202 - DNA, 24 bp, synthetic construct
  source 1..24: mol_type = other DNA
cccgcactcatggagcagctgtgg

SEQ ID NO: 2203 - DNA, 22 bp, synthetic construct
  source 1..22: mol_type = other DNA
gccgcacctggcgcaggggagg

SEQ ID NO: 2204 - DNA, 23 bp, synthetic construct
  source 1..23: mol_type = other DNA
cccacacctaggcacagctaggg

SEQ ID NO: 2205 - DNA, 23 bp, synthetic construct
  source 1..23: mol_type = other DNA
accacaccttggtgcaaaggagg

SEQ ID NO: 2206 - DNA, 23 bp, synthetic construct
  source 1..23: mol_type = other DNA
aatgcaccttggcatagtggggg

SEQ ID NO: 2207 - DNA, 23 bp, synthetic construct
  source 1..23: mol_type = other DNA
gccgcaccttggcacaccagtgg

SEQ ID NO: 2208 - DNA, 22 bp, synthetic construct
  source 1..22: mol_type = other DNA
cccacacctggcccagcggggc

SEQ ID NO: 2209 - DNA, 23 bp, synthetic construct
  source 1..23: mol_type = other DNA
gtggcaccttggtgcagccaagg

SEQ ID NO: 2210 - DNA, 23 bp, synthetic construct
  source 1..23: mol_type = other DNA
ccagcaccctagtgcagcgtggg

SEQ ID NO: 2211 - DNA, 22 bp, synthetic construct
  source 1..22: mol_type = other DNA
cccacacatggagcagcagggg

SEQ ID NO: 2212 - DNA, 24 bp, synthetic construct
  source 1..24: mol_type = other DNA
caagcaccttggcagcagctgagg

SEQ ID NO: 2213 - DNA, 23 bp, synthetic construct
  source 1..23: mol_type = other DNA
tctgcaccttggcccagcgtaag

SEQ ID NO: 2214 - DNA, 22 bp, synthetic construct
  source 1..22: mol_type = other DNA
cccgcacctggctcagcagtga

SEQ ID NO: 2215 - DNA, 22 bp, synthetic construct
  source 1..22: mol_type = other DNA
cccgcactgggtgcagaggtgg

SEQ ID NO: 2216 - DNA, 22 bp, synthetic construct
  source 1..22: mol_type = other DNA
cccgcactcggcgcagccatgg

SEQ ID NO: 2217 - DNA, 22 bp, synthetic construct
  source 1..22: mol_type = other DNA
cccgcacccggcgtagcgacgg

SEQ ID NO: 2218 - DNA, 23 bp, synthetic construct
  source 1..23: mol_type = other DNA
gctgcaccctgccgcagaggagg

SEQ ID NO: 2219 - DNA, 24 bp, synthetic construct
  source 1..24: mol_type = other DNA
ggagcaccttggcagcagctgagg

SEQ ID NO: 2220 - DNA, 22 bp, synthetic construct
  source 1..22: mol_type = other DNA
cccgcacctggcgcagcgcccg

SEQ ID NO: 2221 - DNA, 23 bp, synthetic construct
  source 1..23: mol_type = other DNA
atggcaccttggcacagcagagg

SEQ ID NO: 2222 - DNA, 23 bp, synthetic construct
  source 1..23: mol_type = other DNA
gaggcaccatgacgcagcagtgg

SEQ ID NO: 2223 - DNA, 23 bp, synthetic construct
  source 1..23: mol_type = other DNA
cccacaacctggcacagaggcgg

SEQ ID NO: 2224 - DNA, 23 bp, synthetic construct
  source 1..23: mol_type = other DNA
tctgcaccatggtgcagctgagg

SEQ ID NO: 2225 - DNA, 22 bp, synthetic construct
  source 1..22: mol_type = other DNA
accgcacctggcccagccaggg

SEQ ID NO: 2226 - DNA, 23 bp, synthetic construct
  source 1..23: mol_type = other DNA
ccagcaccttggcacagagtagg

SEQ ID NO: 2227 - DNA, 22 bp, synthetic construct
  source 1..22: mol_type = other DNA
cccgcagttggcccagctgagg

SEQ ID NO: 2228 - DNA, 23 bp, synthetic construct
  source 1..23: mol_type = other DNA
ccagcacctttgtgcagtggagg

SEQ ID NO: 2229 - DNA, 23 bp, synthetic construct
  source 1..23: mol_type = other DNA
ccagcaccaagacacagcagtgg

SEQ ID NO: 2230 - DNA, 23 bp, synthetic construct
  source 1..23: mol_type = other DNA
ttagcatcttggtgcagaggtgg

SEQ ID NO: 2231 - DNA, 22 bp, synthetic construct
  source 1..22: mol_type = other DNA
tccacacctggcccagcagagg

SEQ ID NO: 2232 - DNA, 23 bp, synthetic construct
  source 1..23: mol_type = other DNA
tcccacccttggtgcagaggagg

SEQ ID NO: 2233 - DNA, 22 bp, synthetic construct
  source 1..22: mol_type = other DNA
cccacactaggctcagcagtgg

SEQ ID NO: 2234 - RNA, 100 nt, synthetic construct; identical to SEQ ID NO: 9
  source 1..100: mol_type = other RNA
  modified_base 1: mod_base = OTHER; note = 2'-O-methyl ribonucleotide
  modified_base 2: mod_base = OTHER; note = 2'-O-methyl ribonucleotide
  modified_base 3: mod_base = OTHER; note = 2'-O-methyl ribonucleotide
  modified_base 21: mod_base = OTHER; note = 2'-O-methyl ribonucleotide
  modified_base 28: mod_base = OTHER; note = 2'-O-methyl ribonucleotide
  modified_base 29: mod_base = OTHER; note = 2'-O-methyl ribonucleotide
  modified_base 30: mod_base = OTHER; note = 2'-O-methyl ribonucleotide
  modified_base 31: mod_base = OTHER; note = 2'-O-methyl ribonucleotide
  modified_base 32: mod_base = OTHER; note = 2'-O-methyl ribonucleotide
  modified_base 33: mod_base = OTHER; note = 2'-O-methyl ribonucleotide
  modified_base 34: mod_base = OTHER; note = 2'-O-methyl ribonucleotide
  modified_base 35: mod_base = OTHER; note = 2'-O-methyl ribonucleotide
  modified_base 36: mod_base = OTHER; note = 2'-O-methyl ribonucleotide
  modified_base 37: mod_base = OTHER; note = 2'-O-methyl ribonucleotide
  modified_base 38: mod_base = OTHER; note = 2'-O-methyl ribonucleotide
  modified_base 39: mod_base = OTHER; note = 2'-O-methyl ribonucleotide
  modified_base 40: mod_base = OTHER; note = 2'-O-methyl ribonucleotide
  modified_base 41: mod_base = OTHER; note = 2'-O-methyl ribonucleotide
  modified_base 42: mod_base = OTHER; note = 2'-O-methyl ribonucleotide
  modified_base 46: mod_base = OTHER; note = 2'-O-methyl ribonucleotide
  modified_base 48: mod_base = OTHER; note = 2'-O-methyl ribonucleotide
  modified_base 50: mod_base = OTHER; note = 2'-O-methyl ribonucleotide
  modified_base 52: mod_base = OTHER; note = 2'-O-methyl ribonucleotide
  modified_base 53: mod_base = OTHER; note = 2'-O-methyl ribonucleotide
  modified_base 54: mod_base = OTHER; note = 2'-O-methyl ribonucleotide
  modified_base 55: mod_base = OTHER; note = 2'-O-methyl ribonucleotide
  modified_base 56: mod_base = OTHER; note = 2'-O-methyl ribonucleotide
  modified_base 57: mod_base = OTHER; note = 2'-O-methyl ribonucleotide
  modified_base 60: mod_base = OTHER; note = 2'-O-methyl ribonucleotide
  modified_base 61: mod_base = OTHER; note = 2'-O-methyl ribonucleotide
  modified_base 66: mod_base = OTHER; note = 2'-O-methyl ribonucleotide
  modified_base 67: mod_base = OTHER; note = 2'-O-methyl ribonucleotide
  modified_base 70: mod_base = OTHER; note = 2'-O-methyl ribonucleotide
  modified_base 71: mod_base = OTHER; note = 2'-O-methyl ribonucleotide
  modified_base 72: mod_base = OTHER; note = 2'-O-methyl ribonucleotide
  modified_base 73: mod_base = OTHER; note = 2'-O-methyl ribonucleotide
  modified_base 74: mod_base = OTHER; note = 2'-O-methyl ribonucleotide
  modified_base 75: mod_base = OTHER; note = 2'-O-methyl ribonucleotide
  modified_base 76: mod_base = OTHER; note = 2'-O-methyl ribonucleotide
  modified_base 77: mod_base = OTHER; note = 2'-O-methyl ribonucleotide
  modified_base 78: mod_base = OTHER; note = 2'-O-methyl ribonucleotide
  modified_base 79: mod_base = OTHER; note = 2'-O-methyl ribonucleotide
  modified_base 80: mod_base = OTHER; note = 2'-O-methyl ribonucleotide
  modified_base 81: mod_base = OTHER; note = 2'-O-methyl ribonucleotide
  modified_base 83: mod_base = OTHER; note = 2'-O-methyl ribonucleotide
  modified_base 84: mod_base = OTHER; note = 2'-O-methyl ribonucleotide
  modified_base 85: mod_base = OTHER; note = 2'-O-methyl ribonucleotide
  modified_base 86: mod_base = OTHER; note = 2'-O-methyl ribonucleotide
  modified_base 87: mod_base = OTHER; note = 2'-O-methyl ribonucleotide
  modified_base 88: mod_base = OTHER; note = 2'-O-methyl ribonucleotide
  modified_base 89: mod_base = OTHER; note = 2'-O-methyl ribonucleotide
  modified_base 90: mod_base = OTHER; note = 2'-O-methyl ribonucleotide
  modified_base 91: mod_base = OTHER; note = 2'-O-methyl ribonucleotide
  modified_base 92: mod_base = OTHER; note = 2'-O-methyl ribonucleotide
  modified_base 93: mod_base = OTHER; note = 2'-O-methyl ribonucleotide
  modified_base 94: mod_base = OTHER; note = 2'-O-methyl ribonucleotide
  modified_base 95: mod_base = OTHER; note = 2'-O-methyl ribonucleotide
  modified_base 96: mod_base = OTHER; note = 2'-O-methyl ribonucleotide
  modified_base 97: mod_base = OTHER; note = 2'-O-methyl ribonucleotide
  modified_base 98: mod_base = OTHER; note = 2'-O-methyl ribonucleotide
  modified_base 99: mod_base = OTHER; note = 2'-O-methyl ribonucleotide
  modified_base 100: mod_base = OTHER; note = 2'-O-methyl ribonucleotide
  modified_base 1..4: mod_base = OTHER; note = phosphorothioate linkage
  modified_base 97..100: mod_base = OTHER; note = phosphorothioate linkage

SEQ ID NO: 2235 - RNA, 100 nt, synthetic construct; identical to SEQ ID NO: 9
  source 1..100: mol_type = other RNA
  modified_base 1: mod_base = OTHER; note = 2'-O-methyl ribonucleotide
  modified_base 2: mod_base = OTHER; note = 2'-O-methyl ribonucleotide
  modified_base 3: mod_base = OTHER; note = 2'-O-methyl ribonucleotide
  modified_base 21: mod_base = OTHER; note = 2'-O-methyl ribonucleotide
  modified_base 28: mod_base = OTHER; note = 2'-O-methyl ribonucleotide
  modified_base 29: mod_base = OTHER; note = 2'-O-methyl ribonucleotide
  modified_base 30: mod_base = OTHER; note = 2'-O-methyl ribonucleotide
  modified_base 31: mod_base = OTHER; note = 2'-O-methyl ribonucleotide
  modified_base 32: mod_base = OTHER; note = 2'-O-methyl ribonucleotide
  modified_base 34: mod_base = OTHER; note = 2'-O-methyl ribonucleotide
  modified_base 35: mod_base = OTHER; note = 2'-O-methyl ribonucleotide
  modified_base 36: mod_base = OTHER; note = 2'-O-methyl ribonucleotide
  modified_base 37: mod_base = OTHER; note = 2'-O-methyl ribonucleotide
  modified_base 38: mod_base = OTHER; note = 2'-O-methyl ribonucleotide
  modified_base 39: mod_base = OTHER; note = 2'-O-methyl ribonucleotide
  modified_base 40: mod_base = OTHER; note = 2'-O-methyl ribonucleotide
  modified_base 41: mod_base = OTHER; note = 2'-O-methyl ribonucleotide
  modified_base 42: mod_base = OTHER; note = 2'-O-methyl ribonucleotide
  modified_base 46: mod_base = OTHER; note = 2'-O-methyl ribonucleotide
  modified_base 48: mod_base = OTHER; note = 2'-O-methyl ribonucleotide
  modified_base 50: mod_base = OTHER; note = 2'-O-methyl ribonucleotide
  modified_base 52: mod_base = OTHER; note = 2'-O-methyl ribonucleotide
  modified_base 53: mod_base = OTHER; note = 2'-O-methyl ribonucleotide
  modified_base 54: mod_base = OTHER; note = 2'-O-methyl ribonucleotide
  modified_base 55: mod_base = OTHER; note = 2'-O-methyl ribonucleotide
  modified_base 56: mod_base = OTHER; note = 2'-O-methyl ribonucleotide
  modified_base 57: mod_base = OTHER; note = 2'-O-methyl ribonucleotide
  modified_base 60: mod_base = OTHER; note = 2'-O-methyl ribonucleotide
  modified_base 61: mod_base = OTHER; note = 2'-O-methyl ribonucleotide
  modified_base 66: mod_base = OTHER; note = 2'-O-methyl ribonucleotide
  modified_base 67: mod_base = OTHER; note = 2'-O-methyl ribonucleotide
  modified_base 70: mod_base = OTHER; note = 2'-O-methyl ribonucleotide
  modified_base 71: mod_base = OTHER; note = 2'-O-methyl ribonucleotide
  modified_base 72: mod_base = OTHER; note = 2'-O-methyl ribonucleotide
  modified_base 74: mod_base = OTHER; note = 2'-O-methyl ribonucleotide
  modified_base 75: mod_base = OTHER; note = 2'-O-methyl ribonucleotide
  modified_base 76: mod_base = OTHER; note = 2'-O-methyl ribonucleotide
  modified_base 77: mod_base = OTHER; note = 2'-O-methyl ribonucleotide
  modified_base 78: mod_base = OTHER; note = 2'-O-methyl ribonucleotide
  modified_base 79: mod_base = OTHER; note = 2'-O-methyl ribonucleotide
  modified_base 80: mod_base = OTHER; note = 2'-O-methyl ribonucleotide
  modified_base 81: mod_base = OTHER; note = 2'-O-methyl ribonucleotide
  modified_base 83: mod_base = OTHER; note = 2'-O-methyl ribonucleotide
  modified_base 84: mod_base = OTHER; note = 2'-O-methyl ribonucleotide
  modified_base 85: mod_base = OTHER; note = 2'-O-methyl ribonucleotide
  modified_base 86: mod_base = OTHER; note = 2'-O-methyl ribonucleotide
  modified_base 87: mod_base = OTHER; note = 2'-O-methyl ribonucleotide
  modified_base 88: mod_base = OTHER; note = 2'-O-methyl ribonucleotide
  modified_base 89: mod_base = OTHER; note = 2'-O-methyl ribonucleotide
  modified_base 90: mod_base = OTHER; note = 2'-O-methyl ribonucleotide
  modified_base 91: mod_base = OTHER; note = 2'-O-methyl ribonucleotide
  modified_base 92: mod_base = OTHER; note = 2'-O-methyl ribonucleotide
  modified_base 93: mod_base = OTHER; note = 2'-O-methyl ribonucleotide
  modified_base 94: mod_base = OTHER; note = 2'-O-methyl ribonucleotide
  modified_base 95: mod_base = OTHER; note = 2'-O-methyl ribonucleotide
  modified_base 96: mod_base = OTHER; note = 2'-O-methyl ribonucleotide
  modified_base 97: mod_base = OTHER; note = 2'-O-methyl ribonucleotide
  modified_base 98: mod_base = OTHER; note = 2'-O-methyl ribonucleotide
  modified_base 99: mod_base = OTHER; note = 2'-O-methyl ribonucleotide
  modified_base 100: mod_base = OTHER; note = 2'-O-methyl ribonucleotide
  modified_base 1..4: mod_base = OTHER; note = phosphorothioate linkage
  modified_base 97..100: mod_base = OTHER; note = phosphorothioate linkage

SEQ ID NO: 2236 - RNA, 100 nt, synthetic construct; identical to SEQ ID NO: 9
  source 1..100: mol_type = other RNA
  modified_base 1: mod_base = OTHER; note = 2'-O-methyl ribonucleotide
  modified_base 2: mod_base = OTHER; note = 2'-O-methyl ribonucleotide
  modified_base 3: mod_base = OTHER; note = 2'-O-methyl ribonucleotide
  modified_base 29: mod_base = OTHER; note = 2'-O-methyl ribonucleotide
  modified_base 30: mod_base = OTHER; note = 2'-O-methyl ribonucleotide
  modified_base 31: mod_base = OTHER; note = 2'-O-methyl ribonucleotide
  modified_base 32: mod_base = OTHER; note = 2'-O-methyl ribonucleotide
  modified_base 33: mod_base = OTHER; note = 2'-O-methyl ribonucleotide
  modified_base 34: mod_base = OTHER; note = 2'-O-methyl ribonucleotide
  modified_base 35: mod_base = OTHER; note = 2'-O-methyl ribonucleotide
  modified_base 36: mod_base = OTHER; note = 2'-O-methyl ribonucleotide
  modified_base 37: mod_base = OTHER; note = 2'-O-methyl ribonucleotide
  modified_base 38: mod_base = OTHER; note = 2'-O-methyl ribonucleotide
  modified_base 39: mod_base = OTHER; note = 2'-O-methyl ribonucleotide
  modified_base 40: mod_base = OTHER; note = 2'-O-methyl ribonucleotide
  modified_base 69: mod_base = OTHER; note = 2'-O-methyl ribonucleotide
  modified_base 70: mod_base = OTHER; note = 2'-O-methyl ribonucleotide
  modified_base 71: mod_base = OTHER; note = 2'-O-methyl ribonucleotide
  modified_base 72: mod_base = OTHER; note = 2'-O-methyl ribonucleotide
  modified_base 73: mod_base = OTHER; note = 2'-O-methyl ribonucleotide
  modified_base 74: mod_base = OTHER; note = 2'-O-methyl ribonucleotide
  modified_base 75: mod_base = OTHER; note = 2'-O-methyl ribonucleotide
  modified_base 76: mod_base = OTHER; note = 2'-O-methyl ribonucleotide
  modified_base 77: mod_base = OTHER; note = 2'-O-methyl ribonucleotide
  modified_base 78: mod_base = OTHER; note = 2'-O-methyl ribonucleotide
  modified_base 79: mod_base = OTHER; note = 2'-O-methyl ribonucleotide
  modified_base 80: mod_base = OTHER; note = 2'-O-methyl ribonucleotide
  modified_base 81: mod_base = OTHER; note = 2'-O-methyl ribonucleotide
  modified_base 82: mod_base = OTHER; note = 2'-O-methyl ribonucleotide
  modified_base 83: mod_base = OTHER; note = 2'-O-methyl ribonucleotide
  modified_base 84: mod_base = OTHER; note = 2'-O-methyl ribonucleotide
  modified_base 85: mod_base = OTHER; note = 2'-O-methyl ribonucleotide
  modified_base 86: mod_base = OTHER; note = 2'-O-methyl ribonucleotide
  modified_base 87: mod_base = OTHER; note = 2'-O-methyl ribonucleotide
  modified_base 88: mod_base = OTHER; note = 2'-O-methyl ribonucleotide
  modified_base 89: mod_base = OTHER; note = 2'-O-methyl ribonucleotide
  modified_base 90: mod_base = OTHER; note = 2'-O-methyl ribonucleotide
  modified_base 91: mod_base = OTHER; note = 2'-O-methyl ribonucleotide
  modified_base 92: mod_base = OTHER; note = 2'-O-methyl ribonucleotide
  modified_base 93: mod_base = OTHER; note = 2'-O-methyl ribonucleotide
  modified_base 94: mod_base = OTHER; note = 2'-O-methyl ribonucleotide
  modified_base 95: mod_base = OTHER; note = 2'-O-methyl ribonucleotide
  modified_base 96: mod_base = OTHER; note = 2'-O-methyl ribonucleotide
  modified_base 97: mod_base = OTHER; note = 2'-O-methyl ribonucleotide
  modified_base 98: mod_base = OTHER; note = 2'-O-methyl ribonucleotide
  modified_base 99: mod_base = OTHER; note = 2'-O-methyl ribonucleotide
  modified_base 100: mod_base = OTHER; note = 2'-O-methyl ribonucleotide
  modified_base 1..4: mod_base = OTHER; note = phosphorothioate linkage
  modified_base 97..100: mod_base = OTHER; note = phosphorothioate linkage

SEQ ID NO: 2237 - RNA, 100 nt, synthetic construct; identical to SEQ ID NO: 9
  source 1..100: mol_type = other RNA
  modified_base 1: mod_base = OTHER; note = 2'-O-methyl ribonucleotide
  modified_base 2: mod_base = OTHER; note = 2'-O-methyl ribonucleotide
  modified_base 3: mod_base = OTHER; note = 2'-O-methyl ribonucleotide
  modified_base 98: mod_base = OTHER; note = 2'-O-methyl ribonucleotide
  modified_base 99: mod_base = OTHER; note = 2'-O-methyl ribonucleotide
  modified_base 100: mod_base = OTHER; note = 2'-O-methyl ribonucleotide
  modified_base 1..4: mod_base = OTHER; note = phosphorothioate linkage
  modified_base 97..100: mod_base = OTHER; note = phosphorothioate linkage

SEQ ID NO: 2238 - RNA, 100 nt, synthetic construct; identical to SEQ ID NO: 9
  source 1..100: mol_type = other RNA
  modified_base 1: mod_base = OTHER; note = 2'-O-methyl ribonucleotide
  modified_base 2: mod_base = OTHER; note = 2'-O-methyl ribonucleotide
  modified_base 3: mod_base = OTHER; note = 2'-O-methyl ribonucleotide
  modified_base 21: mod_base = OTHER; note = 2'-O-methyl ribonucleotide
  modified_base 28: mod_base = OTHER; note = 2'-O-methyl ribonucleotide
  modified_base 29: mod_base = OTHER; note = 2'-O-methyl ribonucleotide
  modified_base 30: mod_base = OTHER; note = 2'-O-methyl ribonucleotide
  modified_base 31: mod_base = OTHER; note = 2'-O-methyl ribonucleotide
  modified_base 32: mod_base = OTHER; note = 2'-O-methyl ribonucleotide
  modified_base 33: mod_base = OTHER; note = 2'-O-methyl ribonucleotide
  modified_base 34: mod_base = OTHER; note = 2'-O-methyl ribonucleotide
  modified_base 35: mod_base = OTHER; note = 2'-O-methyl ribonucleotide
  modified_base 36: mod_base = OTHER; note = 2'-O-methyl ribonucleotide
  modified_base 37: mod_base = OTHER; note = 2'-O-methyl ribonucleotide
  modified_base 38: mod_base = OTHER; note = 2'-O-methyl ribonucleotide
  modified_base 39: mod_base = OTHER; note = 2'-O-methyl ribonucleotide
  modified_base 40: mod_base = OTHER; note = 2'-O-methyl ribonucleotide
  modified_base 41: mod_base = OTHER; note = 2'-O-methyl ribonucleotide
  modified_base 42: mod_base = OTHER; note = 2'-O-methyl ribonucleotide
  modified_base 46: mod_base = OTHER; note = 2'-O-methyl ribonucleotide
  modified_base 48: mod_base = OTHER; note = 2'-O-methyl ribonucleotide
  modified_base 50: mod_base = OTHER; note = 2'-O-methyl ribonucleotide
  modified_base 52: mod_base = OTHER; note = 2'-O-methyl ribonucleotide
  modified_base 53: mod_base = OTHER; note = 2'-O-methyl ribonucleotide
  modified_base 54: mod_base = OTHER; note = 2'-O-methyl ribonucleotide
  modified_base 55: mod_base = OTHER; note = 2'-O-methyl ribonucleotide
  modified_base 56: mod_base = OTHER; note = 2'-O-methyl ribonucleotide
  modified_base 57: mod_base = OTHER; note = 2'-O-methyl ribonucleotide
  modified_base 61: mod_base = OTHER; note = 2'-O-methyl ribonucleotide
  modified_base 66: mod_base = OTHER; note = 2'-O-methyl ribonucleotide
  modified_base 67: mod_base = OTHER; note = 2'-O-methyl ribonucleotide
  modified_base 70: mod_base = OTHER; note = 2'-O-methyl ribonucleotide
  modified_base 71: mod_base = OTHER; note = 2'-O-methyl ribonucleotide
  modified_base 72: mod_base = OTHER; note = 2'-O-methyl ribonucleotide
  modified_base 73: mod_base = OTHER; note = 2'-O-methyl ribonucleotide
  modified_base 74: mod_base = OTHER; note = 2'-O-methyl ribonucleotide
  modified_base 75: mod_base = OTHER; note = 2'-O-methyl ribonucleotide
  modified_base 76: mod_base = OTHER; note = 2'-O-methyl ribonucleotide
  modified_base 77: mod_base = OTHER; note = 2'-O-methyl ribonucleotide
  modified_base 78: mod_base = OTHER; note = 2'-O-methyl ribonucleotide
  modified_base 79: mod_base = OTHER; note = 2'-O-methyl ribonucleotide
  modified_base 80: mod_base = OTHER; note = 2'-O-methyl ribonucleotide
  modified_base 81: mod_base = OTHER; note = 2'-O-methyl ribonucleotide
  modified_base 82: mod_base = OTHER; note = 2'-O-methyl ribonucleotide
  modified_base 83: mod_base = OTHER; note = 2'-O-methyl ribonucleotide
  modified_base 84: mod_base = OTHER; note = 2'-O-methyl ribonucleotide
  modified_base 85: mod_base = OTHER; note = 2'-O-methyl ribonucleotide
  modified_base 86: mod_base = OTHER; note = 2'-O-methyl ribonucleotide
  modified_base 87: mod_base = OTHER; note = 2'-O-methyl ribonucleotide
  modified_base 88: mod_base = OTHER; note = 2'-O-methyl ribonucleotide
  modified_base 89: mod_base = OTHER; note = 2'-O-methyl ribonucleotide
  modified_base 90: mod_base = OTHER; note = 2'-O-methyl ribonucleotide
  modified_base 91: mod_base = OTHER; note = 2'-O-methyl ribonucleotide
  modified_base 92: mod_base = OTHER; note = 2'-O-methyl ribonucleotide
  modified_base 93: mod_base = OTHER; note = 2'-O-methyl ribonucleotide
  modified_base 94: mod_base = OTHER; note = 2'-O-methyl ribonucleotide
  modified_base 95: mod_base = OTHER; note = 2'-O-methyl ribonucleotide
  modified_base 96: mod_base = OTHER; note = 2'-O-methyl ribonucleotide
  modified_base 97: mod_base = OTHER; note = 2'-O-methyl ribonucleotide
  modified_base 98: mod_base = OTHER; note = 2'-O-methyl ribonucleotide
  modified_base 99: mod_base = OTHER; note = 2'-O-methyl ribonucleotide
  modified_base 100: mod_base = OTHER; note = 2'-O-methyl ribonucleotide
  modified_base 1..4: mod_base = OTHER; note = phosphorothioate linkage
  modified_base 97..100: mod_base = OTHER; note = phosphorothioate linkage

SEQ ID NO: 2239 - RNA, 100 nt, synthetic construct; identical to SEQ ID NO: 9
  source 1..100: mol_type = other RNA
  modified_base 1: mod_base = OTHER; note = 2'-O-methyl ribonucleotide
  modified_base 2: mod_base = OTHER; note = 2'-O-methyl ribonucleotide
  modified_base 3: mod_base = OTHER; note = 2'-O-methyl ribonucleotide
  modified_base 21: mod_base = OTHER; note = 2'-O-methyl ribonucleotide
  modified_base 28: mod_base = OTHER; note = 2'-O-methyl ribonucleotide
  modified_base 29: mod_base = OTHER; note = 2'-O-methyl ribonucleotide
  modified_base 30: mod_base = OTHER; note = 2'-O-methyl ribonucleotide
  modified_base 31: mod_base = OTHER; note = 2'-O-methyl ribonucleotide
  modified_base 32: mod_base = OTHER; note = 2'-O-methyl ribonucleotide
  modified_base 33: mod_base = OTHER; note = 2'-O-methyl ribonucleotide
  modified_base 34: mod_base = OTHER; note = 2'-O-methyl ribonucleotide
  modified_base 35: mod_base = OTHER; note = 2'-O-methyl ribonucleotide
  modified_base 36: mod_base = OTHER; note = 2'-O-methyl ribonucleotide
  modified_base 37: mod_base = OTHER; note = 2'-O-methyl ribonucleotide
  modified_base 38: mod_base = OTHER; note = 2'-O-methyl ribonucleotide
  modified_base 39: mod_base = OTHER; note = 2'-O-methyl ribonucleotide
  modified_base 40: mod_base = OTHER; note = 2'-O-methyl ribonucleotide
  modified_base 41: mod_base = OTHER; note = 2'-O-methyl ribonucleotide
  modified_base 42: mod_base = OTHER; note = 2'-O-methyl ribonucleotide
  modified_base 46: mod_base = OTHER; note = 2'-O-methyl ribonucleotide
  modified_base 48: mod_base = OTHER; note = 2'-O-methyl ribonucleotide
  modified_base 50: mod_base = OTHER; note = 2'-O-methyl ribonucleotide
  modified_base 52: mod_base = OTHER; note = 2'-O-methyl ribonucleotide
  modified_base 53: mod_base = OTHER; note = 2'-O-methyl ribonucleotide
  modified_base 54: mod_base = OTHER; note = 2'-O-methyl ribonucleotide
  modified_base 55: mod_base = OTHER; note = 2'-O-methyl ribonucleotide
  modified_base 56: mod_base = OTHER; note = 2'-O-methyl ribonucleotide
  modified_base 57: mod_base = OTHER; note = 2'-O-methyl ribonucleotide
  modified_base 59: mod_base = OTHER; note = 2'-O-methyl ribonucleotide
  modified_base 61: mod_base = OTHER; note = 2'-O-methyl ribonucleotide
  modified_base 65: mod_base = OTHER; note = 2'-O-methyl ribonucleotide
  modified_base 66: mod_base = OTHER; note = 2'-O-methyl ribonucleotide
  modified_base 67: mod_base = OTHER; note = 2'-O-methyl ribonucleotide
  modified_base 70: mod_base = OTHER; note = 2'-O-methyl ribonucleotide
  modified_base 71: mod_base = OTHER; note = 2'-O-methyl ribonucleotide
  modified_base 72: mod_base = OTHER; note = 2'-O-methyl ribonucleotide
  modified_base 73: mod_base = OTHER; note = 2'-O-methyl ribonucleotide
  modified_base 74: mod_base = OTHER; note = 2'-O-methyl ribonucleotide
  modified_base 75: mod_base = OTHER; note = 2'-O-methyl ribonucleotide
  modified_base 76: mod_base = OTHER; note = 2'-O-methyl ribonucleotide
  modified_base 77: mod_base = OTHER; note = 2'-O-methyl ribonucleotide
  modified_base 78: mod_base = OTHER; note = 2'-O-methyl ribonucleotide
  modified_base 79: mod_base = OTHER; note = 2'-O-methyl ribonucleotide
  modified_base 80: mod_base = OTHER; note = 2'-O-methyl ribonucleotide
  modified_base 81: mod_base = OTHER; note = 2'-O-methyl ribonucleotide
  modified_base 82: mod_base = OTHER; note = 2'-O-methyl ribonucleotide
  modified_base 83: mod_base = OTHER; note = 2'-O-methyl ribonucleotide
  modified_base 84: mod_base = OTHER; note = 2'-O-methyl ribonucleotide
  modified_base 85: mod_base = OTHER; note = 2'-O-methyl ribonucleotide
  modified_base 86: mod_base = OTHER; note = 2'-O-methyl ribonucleotide
  modified_base 87: mod_base = OTHER; note = 2'-O-methyl ribonucleotide
  modified_base 88: mod_base = OTHER; note = 2'-O-methyl ribonucleotide
  modified_base 89: mod_base = OTHER; note = 2'-O-methyl ribonucleotide
  modified_base 90: mod_base = OTHER; note = 2'-O-methyl ribonucleotide
  modified_base 91: mod_base = OTHER; note = 2'-O-methyl ribonucleotide
  modified_base 92: mod_base = OTHER; note = 2'-O-methyl ribonucleotide
  modified_base 93: mod_base = OTHER; note = 2'-O-methyl ribonucleotide
  modified_base 94: mod_base = OTHER; note = 2'-O-methyl ribonucleotide
  modified_base 95: mod_base = OTHER; note = 2'-O-methyl ribonucleotide
  modified_base 96: mod_base = OTHER; note = 2'-O-methyl ribonucleotide
  modified_base 97: mod_base = OTHER; note = 2'-O-methyl ribonucleotide
  modified_base 98: mod_base = OTHER; note = 2'-O-methyl ribonucleotide
  modified_base 99: mod_base = OTHER; note = 2'-O-methyl ribonucleotide
  modified_base 100: mod_base = OTHER; note = 2'-O-methyl ribonucleotide
  modified_base 1..4: mod_base = OTHER; note = phosphorothioate linkage
  modified_base 97..100: mod_base = OTHER; note = phosphorothioate linkage

SEQ ID NO: 2240 - RNA, 100 nt, synthetic construct; identical to SEQ ID NO: 9
  source 1..100: mol_type = other RNA
  modified_base 1: mod_base = OTHER; note = 2'-O-methyl ribonucleotide
  modified_base 2: mod_base = OTHER; note = 2'-O-methyl ribonucleotide
  modified_base 3: mod_base = OTHER; note = 2'-O-methyl ribonucleotide
  modified_base 21: mod_base = OTHER; note = 2'-O-methyl ribonucleotide
  modified_base 25: mod_base = OTHER; note = 2'-O-methyl ribonucleotide
  modified_base 26: mod_base = OTHER; note = 2'-O-methyl ribonucleotide
  modified_base 27: mod_base = OTHER; note = 2'-O-methyl ribonucleotide
  modified_base 28: mod_base = OTHER; note = 2'-O-methyl ribonucleotide
  modified_base 29: mod_base = OTHER; note = 2'-O-methyl ribonucleotide
  modified_base 30: mod_base = OTHER; note = 2'-O-methyl ribonucleotide
  modified_base 31: mod_base = OTHER; note = 2'-O-methyl ribonucleotide
  modified_base 32: mod_base = OTHER; note = 2'-O-methyl ribonucleotide
  modified_base 33: mod_base = OTHER; note = 2'-O-methyl ribonucleotide
  modified_base 34: mod_base = OTHER; note = 2'-O-methyl ribonucleotide
  modified_base 35: mod_base = OTHER; note = 2'-O-methyl ribonucleotide
  modified_base 36: mod_base = OTHER; note = 2'-O-methyl ribonucleotide
  modified_base 37: mod_base = OTHER; note = 2'-O-methyl ribonucleotide
  modified_base 38: mod_base = OTHER; note = 2'-O-methyl ribonucleotide
  modified_base 39: mod_base = OTHER; note = 2'-O-methyl ribonucleotide
  modified_base 40: mod_base = OTHER; note = 2'-O-methyl ribonucleotide
  modified_base 41: mod_base = OTHER; note = 2'-O-methyl ribonucleotide
  modified_base 42: mod_base = OTHER; note = 2'-O-methyl ribonucleotide
  modified_base 46: mod_base = OTHER; note = 2'-O-methyl ribonucleotide
  modified_base 48: mod_base = OTHER; note = 2'-O-methyl ribonucleotide
  modified_base 50: mod_base = OTHER; note = 2'-O-methyl ribonucleotide
  modified_base 51: mod_base = OTHER; note = 2'-O-methyl ribonucleotide
  modified_base 52: mod_base = OTHER; note = 2'-O-methyl ribonucleotide
  modified_base 53: mod_base = OTHER; note = 2'-O-methyl ribonucleotide
  modified_base 54: mod_base = OTHER; note = 2'-O-methyl ribonucleotide
  modified_base 55: mod_base = OTHER; note = 2'-O-methyl ribonucleotide
  modified_base 56: mod_base = OTHER; note = 2'-O-methyl ribonucleotide
  modified_base 57: mod_base = OTHER; note = 2'-O-methyl ribonucleotide
  modified_base 59: mod_base = OTHER; note = 2'-O-methyl ribonucleotide
  modified_base 60: mod_base = OTHER; note = 2'-O-methyl ribonucleotide
  modified_base 61: mod_base = OTHER; note = 2'-O-methyl ribonucleotide
  modified_base 62: mod_base = OTHER; note = 2'-O-methyl ribonucleotide
  modified_base 65: mod_base = OTHER; note = 2'-O-methyl ribonucleotide
  modified_base 66: mod_base = OTHER; note = 2'-O-methyl ribonucleotide
  modified_base 67: mod_base = OTHER; note = 2'-O-methyl ribonucleotide
  modified_base 68: mod_base = OTHER; note = 2'-O-methyl ribonucleotide
  modified_base 69: mod_base = OTHER; note = 2'-O-methyl ribonucleotide
  modified_base 70: mod_base = OTHER; note = 2'-O-methyl ribonucleotide
  modified_base 71: mod_base = OTHER; note = 2'-O-methyl ribonucleotide
  modified_base 72: mod_base = OTHER; note = 2'-O-methyl ribonucleotide
  modified_base 73: mod_base = OTHER; note = 2'-O-methyl ribonucleotide
  modified_base 74: mod_base = OTHER; note = 2'-O-methyl ribonucleotide
  modified_base 75: mod_base = OTHER; note = 2'-O-methyl ribonucleotide
  modified_base 76: mod_base = OTHER; note = 2'-O-methyl ribonucleotide
  modified_base 77: mod_base = OTHER; note = 2'-O-methyl ribonucleotide
  modified_base 78: mod_base = OTHER; note = 2'-O-methyl ribonucleotide
  modified_base 79: mod_base = OTHER; note = 2'-O-methyl ribonucleotide
  modified_base 80: mod_base = OTHER; note = 2'-O-methyl ribonucleotide
  modified_base 81: mod_base = OTHER; note = 2'-O-methyl ribonucleotide
  modified_base 82: mod_base = OTHER; note = 2'-O-methyl ribonucleotide
  modified_base 83: mod_base = OTHER; note = 2'-O-methyl ribonucleotide
  modified_base 84: mod_base = OTHER; note = 2'-O-methyl ribonucleotide
  modified_base 85: mod_base = OTHER; note = 2'-O-methyl ribonucleotide
  modified_base 86: mod_base = OTHER; note = 2'-O-methyl ribonucleotide
  modified_base 87: mod_base = OTHER; note = 2'-O-methyl ribonucleotide
  modified_base 88: mod_base = OTHER; note = 2'-O-methyl ribonucleotide
  modified_base 89: mod_base = OTHER; note = 2'-O-methyl ribonucleotide
  modified_base 90: mod_base = OTHER; note = 2'-O-methyl ribonucleotide
  modified_base 91: mod_base = OTHER; note = 2'-O-methyl ribonucleotide
  modified_base 92: mod_base = OTHER; note = 2'-O-methyl ribonucleotide
  modified_base 93: mod_base = OTHER; note = 2'-O-methyl ribonucleotide
  modified_base 94: mod_base = OTHER; note = 2'-O-methyl ribonucleotide
  modified_base 95: mod_base = OTHER; note = 2'-O-methyl ribonucleotide
  modified_base 96: mod_base = OTHER; note = 2'-O-methyl ribonucleotide
  modified_base 97: mod_base = OTHER; note = 2'-O-methyl ribonucleotide
  modified_base 98: mod_base = OTHER; note = 2'-O-methyl ribonucleotide
  modified_base 99: mod_base = OTHER; note = 2'-O-methyl ribonucleotide
  modified_base 100: mod_base = OTHER; note = 2'-O-methyl ribonucleotide
  modified_base 1..4: mod_base = OTHER; note = phosphorothioate linkage
  modified_base 97..100: mod_base = OTHER; note = phosphorothioate linkage

SEQ ID NO: 2241 - RNA, 103 nt, synthetic construct; identical to SEQ ID NO: 11
  source 1..103: mol_type = other RNA
  modified_base 1: mod_base = OTHER; note = 2'-O-methyl ribonucleotide
  modified_base 2: mod_base = OTHER; note = 2'-O-methyl ribonucleotide
  modified_base 3: mod_base = OTHER; note = 2'-O-methyl ribonucleotide
  modified_base 21: mod_base = OTHER; note = 2'-O-methyl ribonucleotide
  modified_base 28: mod_base = OTHER; note = 2'-O-methyl ribonucleotide
  modified_base 29: mod_base = OTHER; note = 2'-O-methyl ribonucleotide
  modified_base 30: mod_base = OTHER; note = 2'-O-methyl ribonucleotide
  modified_base 31: mod_base = OTHER; note = 2'-O-methyl ribonucleotide
  modified_base 32: mod_base = OTHER; note = 2'-O-methyl ribonucleotide
  modified_base 33: mod_base = OTHER; note = 2'-O-methyl ribonucleotide
  modified_base 34: mod_base = OTHER; note = 2'-O-methyl ribonucleotide
  modified_base 35: mod_base = OTHER; note = 2'-O-methyl ribonucleotide
  modified_base 36: mod_base = OTHER; note = 2'-O-methyl ribonucleotide
  modified_base 37: mod_base = OTHER; note = 2'-O-methyl ribonucleotide
  modified_base 38: mod_base = OTHER; note = 2'-O-methyl ribonucleotide
  modified_base 39: mod_base = OTHER; note = 2'-O-methyl ribonucleotide
  modified_base 40: mod_base = OTHER; note = 2'-O-methyl ribonucleotide
  modified_base 41: mod_base = OTHER; note = 2'-O-methyl ribonucleotide
  modified_base 42: mod_base = OTHER; note = 2'-O-methyl ribonucleotide
  modified_base 46: mod_base = OTHER; note = 2'-O-methyl ribonucleotide
  modified_base 48: mod_base = OTHER; note = 2'-O-methyl ribonucleotide
  modified_base 50: mod_base = OTHER; note = 2'-O-methyl ribonucleotide
  modified_base 52: mod_base = OTHER; note = 2'-O-methyl ribonucleotide
  modified_base 53: mod_base = OTHER; note = 2'-O-methyl ribonucleotide
  modified_base 54: mod_base = OTHER; note = 2'-O-methyl ribonucleotide
  modified_base 55: mod_base = OTHER; note = 2'-O-methyl ribonucleotide
  modified_base 56: mod_base = OTHER; note = 2'-O-methyl ribonucleotide
  modified_base 57: mod_base = OTHER; note = 2'-O-methyl ribonucleotide
  modified_base 60: mod_base = OTHER; note = 2'-O-methyl ribonucleotide
  modified_base 61: mod_base = OTHER; note = 2'-O-methyl ribonucleotide
  modified_base 66: mod_base = OTHER; note = 2'-O-methyl ribonucleotide
  modified_base 67: mod_base = OTHER; note = 2'-O-methyl ribonucleotide
  modified_base 70: mod_base = OTHER; note = 2'-O-methyl ribonucleotide
  modified_base 71: mod_base = OTHER; note = 2'-O-methyl ribonucleotide
  modified_base 72: mod_base = OTHER; note = 2'-O-methyl ribonucleotide
  modified_base 73: mod_base = OTHER; note = 2'-O-methyl ribonucleotide
  modified_base 74: mod_base = OTHER; note = 2'-O-methyl ribonucleotide
  modified_base 75: mod_base = OTHER; note = 2'-O-methyl ribonucleotide
  modified_base 76: mod_base = OTHER; note = 2'-O-methyl ribonucleotide
  modified_base 77: mod_base = OTHER; note = 2'-O-methyl ribonucleotide
  modified_base 78: mod_base = OTHER; note = 2'-O-methyl ribonucleotide
  modified_base 79: mod_base = OTHER; note = 2'-O-methyl ribonucleotide
  modified_base 80: mod_base = OTHER; note = 2'-O-methyl ribonucleotide
  modified_base 81: mod_base = OTHER; note = 2'-O-methyl ribonucleotide
  modified_base 83: mod_base = OTHER; note = 2'-O-methyl ribonucleotide
  modified_base 84: mod_base = OTHER; note = 2'-O-methyl ribonucleotide
  modified_base 85: mod_base = OTHER; note = 2'-O-methyl ribonucleotide
  modified_base 86: mod_base = OTHER; note = 2'-O-methyl ribonucleotide
  modified_base 87: mod_base = OTHER; note = 2'-O-methyl ribonucleotide
  modified_base 88: mod_base = OTHER; note = 2'-O-methyl ribonucleotide
  modified_base 89: mod_base = OTHER; note = 2'-O-methyl ribonucleotide
  modified_base 90: mod_base = OTHER; note = 2'-O-methyl ribonucleotide
  modified_base 91: mod_base = OTHER; note = 2'-O-methyl ribonucleotide
  modified_base 92: mod_base = OTHER; note = 2'-O-methyl ribonucleotide
  modified_base 93: mod_base = OTHER; note = 2'-O-methyl ribonucleotide
  modified_base 94: mod_base = OTHER; note = 2'-O-methyl ribonucleotide
  modified_base 95: mod_base = OTHER; note = 2'-O-methyl ribonucleotide
  modified_base 96: mod_base = OTHER; note = 2'-O-methyl ribonucleotide
  modified_base 97: mod_base = OTHER; note = 2'-O-methyl ribonucleotide
  modified_base 98: mod_base = OTHER; note = 2'-O-methyl ribonucleotide
  modified_base 99: mod_base = OTHER; note = 2'-O-methyl ribonucleotide
  modified_base 100: mod_base = OTHER; note = 2'-O-methyl ribonucleotide
  modified_base 101: mod_base = OTHER; note = 2'-O-methyl ribonucleotide
  modified_base 103: mod_base = OTHER; note = 2'-O-methyl ribonucleotide
  modified_base 1..4: mod_base = OTHER; note = phosphorothioate linkage
  modified_base 97..100: mod_base = OTHER; note = phosphorothioate linkage

SEQ ID NO: 2242 - RNA, 103 nt, synthetic construct; identical to SEQ ID NO: 11
  source 1..103: mol_type = other RNA
  modified_base 1: mod_base = OTHER; note = 2'-O-methyl ribonucleotide
  modified_base 2: mod_base = OTHER; note = 2'-O-methyl ribonucleotide
  modified_base 3: mod_base = OTHER; note = 2'-O-methyl ribonucleotide
  modified_base 21: mod_base = OTHER; note = 2'-O-methyl ribonucleotide
  modified_base 28: mod_base = OTHER; note = 2'-O-methyl ribonucleotide
  modified_base 29: mod_base = OTHER; note = 2'-O-methyl ribonucleotide
  modified_base 30: mod_base = OTHER; note = 2'-O-methyl ribonucleotide
  modified_base 31: mod_base = OTHER; note = 2'-O-methyl ribonucleotide
  modified_base 32: mod_base = OTHER; note = 2'-O-methyl ribonucleotide
  modified_base 34: mod_base = OTHER; note = 2'-O-methyl ribonucleotide
  modified_base 35: mod_base = OTHER; note = 2'-O-methyl ribonucleotide
  modified_base 36: mod_base = OTHER; note = 2'-O-methyl ribonucleotide
  modified_base 37: mod_base = OTHER; note = 2'-O-methyl ribonucleotide
  modified_base 38: mod_base = OTHER; note = 2'-O-methyl ribonucleotide
  modified_base 39: mod_base = OTHER; note = 2'-O-methyl ribonucleotide
  modified_base 40: mod_base = OTHER; note = 2'-O-methyl ribonucleotide
  modified_base 41: mod_base = OTHER; note = 2'-O-methyl ribonucleotide
  modified_base 42: mod_base = OTHER; note = 2'-O-methyl ribonucleotide
  modified_base 46: mod_base = OTHER; note = 2'-O-methyl ribonucleotide
  modified_base 48: mod_base = OTHER; note = 2'-O-methyl ribonucleotide
  modified_base 50: mod_base = OTHER; note = 2'-O-methyl ribonucleotide
  modified_base 52: mod_base = OTHER; note = 2'-O-methyl ribonucleotide
  modified_base 53: mod_base = OTHER; note = 2'-O-methyl ribonucleotide
  modified_base 54: mod_base = OTHER; note = 2'-O-methyl ribonucleotide
  modified_base 55: mod_base = OTHER; note = 2'-O-methyl ribonucleotide
  modified_base 56: mod_base = OTHER; note = 2'-O-methyl ribonucleotide
  modified_base 57: mod_base = OTHER; note = 2'-O-methyl ribonucleotide
  modified_base 60: mod_base = OTHER; note = 2'-O-methyl ribonucleotide
  modified_base 61: mod_base = OTHER; note = 2'-O-methyl ribonucleotide
  modified_base 66: mod_base = OTHER; note = 2'-O-methyl ribonucleotide
  modified_base 67: mod_base = OTHER; note = 2'-O-methyl ribonucleotide
  modified_base 70: mod_base = OTHER; note = 2'-O-methyl ribonucleotide
  modified_base 71: mod_base = OTHER; note = 2'-O-methyl ribonucleotide
  modified_base 72: mod_base = OTHER; note = 2'-O-methyl ribonucleotide
  modified_base 74: mod_base = OTHER; note = 2'-O-methyl ribonucleotide
  modified_base 75: mod_base = OTHER; note = 2'-O-methyl ribonucleotide
  modified_base 76: mod_base = OTHER; note = 2'-O-methyl ribonucleotide
  modified_base 77: mod_base = OTHER; note = 2'-O-methyl ribonucleotide
  modified_base 78: mod_base = OTHER; note = 2'-O-methyl ribonucleotide
  modified_base 79: mod_base = OTHER; note = 2'-O-methyl ribonucleotide
  modified_base 80: mod_base = OTHER; note = 2'-O-methyl ribonucleotide
  modified_base 81: mod_base = OTHER; note = 2'-O-methyl ribonucleotide
  modified_base 83: mod_base = OTHER; note = 2'-O-methyl ribonucleotide
  modified_base 84: mod_base = OTHER; note = 2'-O-methyl ribonucleotide
  modified_base 85: mod_base = OTHER; note = 2'-O-methyl ribonucleotide
  modified_base 86: mod_base = OTHER; note = 2'-O-methyl ribonucleotide
  modified_base 87: mod_base = OTHER; note = 2'-O-methyl ribonucleotide
  modified_base 88: mod_base = OTHER; note = 2'-O-methyl ribonucleotide
  modified_base 89: mod_base = OTHER; note = 2'-O-methyl ribonucleotide
  modified_base 90: mod_base = OTHER; note = 2'-O-methyl ribonucleotide
  modified_base 91: mod_base = OTHER; note = 2'-O-methyl ribonucleotide
  modified_base 92: mod_base = OTHER; note = 2'-O-methyl ribonucleotide
  modified_base 93: mod_base = OTHER; note = 2'-O-methyl ribonucleotide
  modified_base 94: mod_base = OTHER; note = 2'-O-methyl ribonucleotide
  modified_base 95: mod_base = OTHER; note = 2'-O-methyl ribonucleotide
  modified_base 96: mod_base = OTHER; note = 2'-O-methyl ribonucleotide
  modified_base 97: mod_base = OTHER; note = 2'-O-methyl ribonucleotide
  modified_base 98: mod_base = OTHER; note = 2'-O-methyl ribonucleotide
  modified_base 99: mod_base = OTHER; note = 2'-O-methyl ribonucleotide
  modified_base 100: mod_base = OTHER; note = 2'-O-methyl ribonucleotide
  modified_base 103: mod_base = OTHER; note = 2'-O-methyl ribonucleotide
  modified_base 1..4: mod_base = OTHER; note = phosphorothioate linkage
  modified_base 97..100: mod_base = OTHER; note = phosphorothioate linkage

SEQ ID NO: 2243 - RNA, 103 nt, synthetic construct; identical to SEQ ID NO: 11
  source 1..103: mol_type = other RNA
  modified_base 1: mod_base = OTHER; note = 2'-O-methyl ribonucleotide
  modified_base 2: mod_base = OTHER; note = 2'-O-methyl ribonucleotide
  modified_base 3: mod_base = OTHER; note = 2'-O-methyl ribonucleotide
  modified_base 21: mod_base = OTHER; note = 2'-O-methyl ribonucleotide
  modified_base 28: mod_base = OTHER; note = 2'-O-methyl ribonucleotide
  modified_base 29: mod_base = OTHER; note = 2'-O-methyl ribonucleotide
  modified_base 30: mod_base = OTHER; note = 2'-O-methyl ribonucleotide
  modified_base 31: mod_base = OTHER; note = 2'-O-methyl ribonucleotide
  modified_base 32: mod_base = OTHER; note = 2'-O-methyl ribonucleotide
  modified_base 33: mod_base = OTHER; note = 2'-O-methyl ribonucleotide
  modified_base 34: mod_base = OTHER; note = 2'-O-methyl ribonucleotide
  modified_base 35: mod_base = OTHER; note = 2'-O-methyl ribonucleotide
  modified_base 36: mod_base = OTHER; note = 2'-O-methyl ribonucleotide
  modified_base 37: mod_base = OTHER; note = 2'-O-methyl ribonucleotide
  modified_base 38: mod_base = OTHER; note = 2'-O-methyl ribonucleotide
  modified_base 39: mod_base = OTHER; note = 2'-O-methyl ribonucleotide
  modified_base 40: mod_base = OTHER; note = 2'-O-methyl ribonucleotide
  modified_base 41: mod_base = OTHER; note = 2'-O-methyl ribonucleotide
  modified_base 42: mod_base = OTHER; note = 2'-O-methyl ribonucleotide
  modified_base 46: mod_base = OTHER; note = 2'-O-methyl ribonucleotide
  modified_base 48: mod_base = OTHER; note = 2'-O-methyl ribonucleotide
  modified_base 50: mod_base = OTHER; note = 2'-O-methyl ribonucleotide
  modified_base 52: mod_base = OTHER; note = 2'-O-methyl ribonucleotide
  modified_base 53: mod_base = OTHER; note = 2'-O-methyl ribonucleotide
  modified_base 54: mod_base = OTHER; note = 2'-O-methyl ribonucleotide
  modified_base 55: mod_base = OTHER; note = 2'-O-methyl ribonucleotide
  modified_base 56: mod_base = OTHER; note = 2'-O-methyl ribonucleotide
  modified_base 57: mod_base = OTHER; note = 2'-O-methyl ribonucleotide
  modified_base 60: mod_base = OTHER; note = 2'-O-methyl ribonucleotide
  modified_base 61: mod_base = OTHER; note = 2'-O-methyl ribonucleotide
  modified_base 66: mod_base = OTHER; note = 2'-O-methyl ribonucleotide
  modified_base 67: mod_base = OTHER; note = 2'-O-methyl ribonucleotide
  modified_base 70: mod_base = OTHER; note = 2'-O-methyl ribonucleotide
  modified_base 71: mod_base = OTHER; note = 2'-O-methyl ribonucleotide
  modified_base 72: mod_base = OTHER; note = 2'-O-methyl ribonucleotide
  modified_base 73: mod_base = OTHER; note = 2'-O-methyl ribonucleotide
  modified_base 74: mod_base = OTHER; note = 2'-O-methyl ribonucleotide
  modified_base 75: mod_base = OTHER; note = 2'-O-methyl ribonucleotide
  modified_base 76: mod_base = OTHER; note = 2'-O-methyl ribonucleotide
  modified_base 77: mod_base = OTHER; note = 2'-O-methyl ribonucleotide
  modified_base 78: mod_base = OTHER; note = 2'-O-methyl ribonucleotide
  modified_base 79: mod_base = OTHER; note = 2'-O-methyl ribonucleotide
  modified_base 80: mod_base = OTHER; note = 2'-O-methyl ribonucleotide
  modified_base 81: mod_base = OTHER; note = 2'-O-methyl ribonucleotide
  modified_base 83: mod_base = OTHER; note = 2'-O-methyl ribonucleotide
  modified_base 84: mod_base = OTHER; note = 2'-O-methyl ribonucleotide
  modified_base 85: mod_base = OTHER; note = 2'-O-methyl ribonucleotide
  modified_base 86: mod_base = OTHER; note = 2'-O-methyl ribonucleotide
  modified_base 87: mod_base = OTHER; note = 2'-O-methyl ribonucleotide
  modified_base 88: mod_base = OTHER; note = 2'-O-methyl ribonucleotide
  modified_base 89: mod_base = OTHER; note = 2'-O-methyl ribonucleotide
  modified_base 90: mod_base = OTHER; note = 2'-O-methyl ribonucleotide
  modified_base 91: mod_base = OTHER; note = 2'-O-methyl ribonucleotide
  modified_base 92: mod_base = OTHER; note = 2'-O-methyl ribonucleotide
  modified_base 93: mod_base = OTHER; note = 2'-O-methyl ribonucleotide
  modified_base 94: mod_base = OTHER; note = 2'-O-methyl ribonucleotide
  modified_base 95: mod_base = OTHER; note = 2'-O-methyl ribonucleotide
  modified_base 96: mod_base = OTHER; note = 2'-O-methyl ribonucleotide
  modified_base 97: mod_base = OTHER; note = 2'-O-methyl ribonucleotide
  modified_base 98: mod_base = OTHER; note = 2'-O-methyl ribonucleotide
  modified_base 99: mod_base = OTHER; note = 2'-O-methyl ribonucleotide
  modified_base 100: mod_base = OTHER; note = 2'-O-methyl ribonucleotide
  modified_base 103: mod_base = OTHER; note = 2'-O-methyl ribonucleotide
  modified_base 1..4: mod_base = OTHER; note = phosphorothioate linkage
  modified_base 97..100: mod_base = OTHER; note = phosphorothioate linkage

SEQ ID NO: 2244 - RNA, 100 nt, synthetic construct; identical to SEQ ID NO: 55
  source 1..100: mol_type = other RNA
  modified_base 1: mod_base = OTHER; note = 2'-O-methyl ribonucleotide
  modified_base 2: mod_base = OTHER; note = 2'-O-methyl ribonucleotide
  modified_base 3: mod_base = OTHER; note = 2'-O-methyl ribonucleotide
  modified_base 21: mod_base = OTHER; note = 2'-O-methyl ribonucleotide
  modified_base 28: mod_base = OTHER; note = 2'-O-methyl ribonucleotide
  modified_base 29: mod_base = OTHER; note = 2'-O-methyl ribonucleotide
  modified_base 30: mod_base = OTHER; note = 2'-O-methyl ribonucleotide
  modified_base 31: mod_base = OTHER; note = 2'-O-methyl ribonucleotide
  modified_base 32: mod_base = OTHER; note = 2'-O-methyl ribonucleotide
  modified_base 33: mod_base = OTHER; note = 2'-O-methyl ribonucleotide
  modified_base 34: mod_base = OTHER; note = 2'-O-methyl ribonucleotide
  modified_base 35: mod_base = OTHER; note = 2'-O-methyl ribonucleotide
  modified_base 36: mod_base = OTHER; note = 2'-O-methyl ribonucleotide
  modified_base 37: mod_base = OTHER; note = 2'-O-methyl ribonucleotide
  modified_base 38: mod_base = OTHER; note = 2'-O-methyl ribonucleotide
  modified_base 39: mod_base = OTHER; note = 2'-O-methyl ribonucleotide
  modified_base 40: mod_base = OTHER; note = 2'-O-methyl ribonucleotide
  modified_base 41: mod_base = OTHER; note = 2'-O-methyl ribonucleotide
  modified_base 42: mod_base = OTHER; note = 2'-O-methyl ribonucleotide
  modified_base 46: mod_base = OTHER; note = 2'-O-methyl ribonucleotide
  modified_base 48: mod_base = OTHER; note = 2'-O-methyl ribonucleotide
  modified_base 50: mod_base = OTHER; note = 2'-O-methyl ribonucleotide
  modified_base 52: mod_base = OTHER; note = 2'-O-methyl ribonucleotide
  modified_base 53: mod_base = OTHER; note = 2'-O-methyl ribonucleotide
  modified_base 54: mod_base = OTHER; note = 2'-O-methyl ribonucleotide
  modified_base 55: mod_base = OTHER; note = 2'-O-methyl ribonucleotide
  modified_base 56: mod_base = OTHER; note = 2'-O-methyl ribonucleotide
  modified_base 57: mod_base = OTHER; note = 2'-O-methyl ribonucleotide
  modified_base 60: mod_base = OTHER; note = 2'-O-methyl ribonucleotide
  modified_base 61: mod_base = OTHER; note = 2'-O-methyl ribonucleotide
  modified_base 66: mod_base = OTHER; note = 2'-O-methyl ribonucleotide
  modified_base 67: mod_base = OTHER; note = 2'-O-methyl ribonucleotide
  modified_base 70: mod_base = OTHER; note = 2'-O-methyl ribonucleotide
  modified_base 71: mod_base = OTHER; note = 2'-O-methyl ribonucleotide
  modified_base 72: mod_base = OTHER; note = 2'-O-methyl ribonucleotide
  modified_base 73: mod_base = OTHER; note = 2'-O-methyl ribonucleotide
  modified_base 74: mod_base = OTHER; note = 2'-O-methyl ribonucleotide
  modified_base 75: mod_base = OTHER; note = 2'-O-methyl ribonucleotide
  modified_base 76: mod_base = OTHER; note = 2'-O-methyl ribonucleotide
  modified_base 77: mod_base = OTHER; note = 2'-O-methyl ribonucleotide
  modified_base 78: mod_base = OTHER; note = 2'-O-methyl ribonucleotide
  modified_base 79: mod_base = OTHER; note = 2'-O-methyl ribonucleotide
  modified_base 80: mod_base = OTHER; note = 2'-O-methyl ribonucleotide
  modified_base 81: mod_base = OTHER; note = 2'-O-methyl ribonucleotide
  modified_base 83: mod_base = OTHER; note = 2'-O-methyl ribonucleotide
  modified_base 84: mod_base = OTHER; note = 2'-O-methyl ribonucleotide
  modified_base 85: mod_base = OTHER; note = 2'-O-methyl ribonucleotide
  modified_base 86: mod_base = OTHER; note = 2'-O-methyl ribonucleotide
  modified_base 87: mod_base = OTHER; note = 2'-O-methyl ribonucleotide
  modified_base 88: mod_base = OTHER; note = 2'-O-methyl ribonucleotide
  modified_base 89: mod_base = OTHER; note = 2'-O-methyl ribonucleotide
  modified_base 90: mod_base = OTHER; note = 2'-O-methyl ribonucleotide
  modified_base 91: mod_base = OTHER; note = 2'-O-methyl ribonucleotide
  modified_base 92: mod_base = OTHER; note = 2'-O-methyl ribonucleotide
  modified_base 93: mod_base = OTHER; note = 2'-O-methyl ribonucleotide
  modified_base 94: mod_base = OTHER; note = 2'-O-methyl ribonucleotide
  modified_base 95: mod_base = OTHER; note = 2'-O-methyl ribonucleotide
  modified_base 96: mod_base = OTHER; note = 2'-O-methyl ribonucleotide
  modified_base 97: mod_base = OTHER; note = 2'-O-methyl ribonucleotide
  modified_base 98: mod_base = OTHER; note = 2'-O-methyl ribonucleotide
  modified_base 99: mod_base = OTHER; note = 2'-O-methyl ribonucleotide
  modified_base 100: mod_base = OTHER; note = 2'-O-methyl ribonucleotide
  modified_base 1..4: mod_base = OTHER; note = phosphorothioate linkage
  modified_base 97..100: mod_base = OTHER; note = phosphorothioate linkage

SEQ ID NO: 2245 - RNA, 100 nt, synthetic construct; identical to SEQ ID NO: 55
  source 1..100: mol_type = other RNA
  modified_base 1: mod_base = OTHER; note = 2'-O-methyl ribonucleotide
  modified_base 2: mod_base = OTHER; note = 2'-O-methyl ribonucleotide
  modified_base 3: mod_base = OTHER; note = 2'-O-methyl ribonucleotide
  modified_base 98: mod_base = OTHER; note = 2'-O-methyl ribonucleotide
  modified_base 99: mod_base = OTHER; note = 2'-O-methyl ribonucleotide
  modified_base 100: mod_base = OTHER; note = 2'-O-methyl ribonucleotide
  modified_base 1..4: mod_base = OTHER; note = phosphorothioate linkage
  modified_base 97..100: mod_base = OTHER; note = phosphorothioate linkage

SEQ ID NO: 2246 - RNA, 100 nt, synthetic construct; identical to SEQ ID NO: 55
  source 1..100: mol_type = other RNA
  modified_base 1: mod_base = OTHER; note = 2'-O-methyl ribonucleotide
  modified_base 2: mod_base = OTHER; note = 2'-O-methyl ribonucleotide
  modified_base 3: mod_base = OTHER; note = 2'-O-methyl ribonucleotide
  modified_base 29: mod_base = OTHER; note = 2'-O-methyl ribonucleotide
  modified_base 30: mod_base = OTHER; note = 2'-O-methyl ribonucleotide
  modified_base 31: mod_base = OTHER; note = 2'-O-methyl ribonucleotide
  modified_base 32: mod_base = OTHER; note = 2'-O-methyl ribonucleotide
  modified_base 33: mod_base = OTHER; note = 2'-O-methyl ribonucleotide
  modified_base 34: mod_base = OTHER; note = 2'-O-methyl ribonucleotide
  modified_base 35: mod_base = OTHER; note = 2'-O-methyl ribonucleotide
  modified_base 36: mod_base = OTHER; note = 2'-O-methyl ribonucleotide
  modified_base 37: mod_base = OTHER; note = 2'-O-methyl ribonucleotide
  modified_base 38: mod_base = OTHER; note = 2'-O-methyl ribonucleotide
  modified_base 39: mod_base = OTHER; note = 2'-O-methyl ribonucleotide
  modified_base 40: mod_base = OTHER; note = 2'-O-methyl ribonucleotide
  modified_base 69: mod_base = OTHER; note = 2'-O-methyl ribonucleotide
  modified_base 70: mod_base = OTHER; note = 2'-O-methyl ribonucleotide
  modified_base 71: mod_base = OTHER; note = 2'-O-methyl ribonucleotide
  modified_base 72: mod_base = OTHER; note = 2'-O-methyl ribonucleotide
  modified_base 73: mod_base = OTHER; note = 2'-O-methyl ribonucleotide
  modified_base 74: mod_base = OTHER; note = 2'-O-methyl ribonucleotide
  modified_base 75: mod_base = OTHER; note = 2'-O-methyl ribonucleotide
  modified_base 76: mod_base = OTHER; note = 2'-O-methyl ribonucleotide
  modified_base 77: mod_base = OTHER; note = 2'-O-methyl ribonucleotide
  modified_base 78: mod_base = OTHER; note = 2'-O-methyl ribonucleotide
  modified_base 79: mod_base = OTHER; note = 2'-O-methyl ribonucleotide
  modified_base 80: mod_base = OTHER; note = 2'-O-methyl ribonucleotide
  modified_base 81: mod_base = OTHER; note = 2'-O-methyl ribonucleotide
  modified_base 82: mod_base = OTHER; note = 2'-O-methyl ribonucleotide
  modified_base 83: mod_base = OTHER; note = 2'-O-methyl ribonucleotide
  modified_base 84: mod_base = OTHER; note = 2'-O-methyl ribonucleotide
  modified_base 85: mod_base = OTHER; note = 2'-O-methyl ribonucleotide
  modified_base 86: mod_base = OTHER; note = 2'-O-methyl ribonucleotide
  modified_base 87: mod_base = OTHER; note = 2'-O-methyl ribonucleotide
  modified_base 88: mod_base = OTHER; note = 2'-O-methyl ribonucleotide
  modified_base 89: mod_base = OTHER; note = 2'-O-methyl ribonucleotide
  modified_base 90: mod_base = OTHER; note = 2'-O-methyl ribonucleotide
  modified_base 91: mod_base = OTHER; note = 2'-O-methyl ribonucleotide
  modified_base 92: mod_base = OTHER; note = 2'-O-methyl ribonucleotide
  modified_base 93: mod_base = OTHER; note = 2'-O-methyl ribonucleotide
  modified_base 94: mod_base = OTHER; note = 2'-O-methyl ribonucleotide
  modified_base 95: mod_base = OTHER; note = 2'-O-methyl ribonucleotide
  modified_base 96: mod_base = OTHER; note = 2'-O-methyl ribonucleotide
  modified_base 97: mod_base = OTHER; note = 2'-O-methyl ribonucleotide
  modified_base 98: mod_base = OTHER; note = 2'-O-methyl ribonucleotide
  modified_base 99: mod_base = OTHER; note = 2'-O-methyl ribonucleotide
  modified_base 100: mod_base = OTHER; note = 2'-O-methyl ribonucleotide
  modified_base 1..4: mod_base = OTHER; note = phosphorothioate linkage
  modified_base 97..100: mod_base = OTHER; note = phosphorothioate linkage

SEQ ID NO: 2247 - RNA, 100 nt, synthetic construct; identical to SEQ ID NO: 55
  source 1..100: mol_type = other RNA
  modified_base 1: mod_base = OTHER; note = 2'-O-methyl ribonucleotide
  modified_base 2: mod_base = OTHER; note = 2'-O-methyl ribonucleotide
  modified_base 3: mod_base = OTHER; note = 2'-O-methyl ribonucleotide
  modified_base 21: mod_base = OTHER; note = 2'-O-methyl ribonucleotide
  modified_base 28: mod_base = OTHER; note = 2'-O-methyl ribonucleotide
  modified_base 29: mod_base = OTHER; note = 2'-O-methyl ribonucleotide
  modified_base 30: mod_base = OTHER; note = 2'-O-methyl ribonucleotide
  modified_base 31: mod_base = OTHER; note = 2'-O-methyl ribonucleotide
  modified_base 32: mod_base = OTHER; note = 2'-O-methyl ribonucleotide
  modified_base 34: mod_base = OTHER; note = 2'-O-methyl ribonucleotide
  modified_base 35: mod_base = OTHER; note = 2'-O-methyl ribonucleotide
  modified_base 36: mod_base = OTHER; note = 2'-O-methyl ribonucleotide
  modified_base 37: mod_base = OTHER; note = 2'-O-methyl ribonucleotide
  modified_base 38: mod_base = OTHER; note = 2'-O-methyl ribonucleotide
  modified_base 39: mod_base = OTHER; note = 2'-O-methyl ribonucleotide
  modified_base 40: mod_base = OTHER; note = 2'-O-methyl ribonucleotide
  modified_base 41: mod_base = OTHER; note = 2'-O-methyl ribonucleotide
  modified_base 42: mod_base = OTHER; note = 2'-O-methyl ribonucleotide
  modified_base 46: mod_base = OTHER; note = 2'-O-methyl ribonucleotide
  modified_base 48: mod_base = OTHER; note = 2'-O-methyl ribonucleotide
  modified_base 50: mod_base = OTHER; note = 2'-O-methyl ribonucleotide
  modified_base 52: mod_base = OTHER; note = 2'-O-methyl ribonucleotide
  modified_base 53: mod_base = OTHER; note = 2'-O-methyl ribonucleotide
  modified_base 54: mod_base = OTHER; note = 2'-O-methyl ribonucleotide
  modified_base 57: mod_base = OTHER; note = 2'-O-methyl ribonucleotide
  modified_base 61: mod_base = OTHER; note = 2'-O-methyl ribonucleotide
  modified_base 66: mod_base = OTHER; note = 2'-O-methyl ribonucleotide
  modified_base 67: mod_base = OTHER; note = 2'-O-methyl ribonucleotide
  modified_base 70: mod_base = OTHER; note = 2'-O-methyl ribonucleotide
  modified_base 71: mod_base = OTHER; note = 2'-O-methyl ribonucleotide
  modified_base 72: mod_base = OTHER; note = 2'-O-methyl ribonucleotide
  modified_base 74: mod_base = OTHER; note = 2'-O-methyl ribonucleotide
  modified_base 75: mod_base = OTHER; note = 2'-O-methyl ribonucleotide
  modified_base 76: mod_base = OTHER; note = 2'-O-methyl ribonucleotide
  modified_base 77: mod_base = OTHER; note = 2'-O-methyl ribonucleotide
  modified_base 78: mod_base = OTHER; note = 2'-O-methyl ribonucleotide
  modified_base 79: mod_base = OTHER; note = 2'-O-methyl ribonucleotide
  modified_base 80: mod_base = OTHER; note = 2'-O-methyl ribonucleotide
  modified_base 83: mod_base = OTHER; note = 2'-O-methyl ribonucleotide
  modified_base 84: mod_base = OTHER; note = 2'-O-methyl ribonucleotide
  modified_base 85: mod_base = OTHER; note = 2'-O-methyl ribonucleotide
  modified_base 86: mod_base = OTHER; note = 2'-O-methyl ribonucleotide
  modified_base 87: mod_base = OTHER; note = 2'-O-methyl ribonucleotide
  modified_base 89: mod_base = OTHER; note = 2'-O-methyl ribonucleotide
  modified_base 92: mod_base = OTHER; note = 2'-O-methyl ribonucleotide
  modified_base 93: mod_base = OTHER; note = 2'-O-methyl ribonucleotide
  modified_base 94: mod_base = OTHER; note = 2'-O-methyl ribonucleotide
  modified_base 95: mod_base = OTHER; note = 2'-O-methyl ribonucleotide
  modified_base 96: mod_base = OTHER; note = 2'-O-methyl ribonucleotide
  modified_base 97: mod_base = OTHER; note = 2'-O-methyl ribonucleotide
  modified_base 98: mod_base = OTHER; note = 2'-O-methyl ribonucleotide
  modified_base 99: mod_base = OTHER; note = 2'-O-methyl ribonucleotide
  modified_base 100: mod_base = OTHER; note = 2'-O-methyl ribonucleotide
  modified_base 1..4: mod_base = OTHER; note = phosphorothioate linkage
  modified_base 97..100: mod_base = OTHER; note = phosphorothioate linkage

SEQ ID NO: 2248 - RNA, 100 nt, synthetic construct; identical to SEQ ID NO: 55
  source 1..100: mol_type = other RNA
  modified_base 1: mod_base = OTHER; note = 2'-O-methyl ribonucleotide
  modified_base 2: mod_base = OTHER; note = 2'-O-methyl ribonucleotide
  modified_base 3: mod_base = OTHER; note = 2'-O-methyl ribonucleotide
  modified_base 21: mod_base = OTHER; note = 2'-O-methyl ribonucleotide
  modified_base 28: mod_base = OTHER; note = 2'-O-methyl ribonucleotide
  modified_base 29: mod_base = OTHER; note = 2'-O-methyl ribonucleotide
  modified_base 30: mod_base = OTHER; note = 2'-O-methyl ribonucleotide
  modified_base 31: mod_base = OTHER; note = 2'-O-methyl ribonucleotide
  modified_base 32: mod_base = OTHER; note = 2'-O-methyl ribonucleotide
  modified_base 33: mod_base = OTHER; note = 2'-O-methyl ribonucleotide
  modified_base 34: mod_base = OTHER; note = 2'-O-methyl ribonucleotide
  modified_base 35: mod_base = OTHER; note = 2'-O-methyl ribonucleotide
  modified_base 36: mod_base = OTHER; note = 2'-O-methyl ribonucleotide
  modified_base 37: mod_base = OTHER; note = 2'-O-methyl ribonucleotide
  modified_base 38: mod_base = OTHER; note = 2'-O-methyl ribonucleotide
  modified_base 39: mod_base = OTHER; note = 2'-O-methyl ribonucleotide
  modified_base 40: mod_base = OTHER; note = 2'-O-methyl ribonucleotide
  modified_base 41: mod_base = OTHER; note = 2'-O-methyl ribonucleotide
  modified_base 42: mod_base = OTHER; note = 2'-O-methyl ribonucleotide
  modified_base 46: mod_base = OTHER; note = 2'-O-methyl ribonucleotide
  modified_base 48: mod_base = OTHER; note = 2'-O-methyl ribonucleotide
  modified_base 50: mod_base = OTHER; note = 2'-O-methyl ribonucleotide
  modified_base 52: mod_base = OTHER; note = 2'-O-methyl ribonucleotide
  modified_base 53: mod_base = OTHER; note = 2'-O-methyl ribonucleotide
  modified_base 54: mod_base = OTHER; note = 2'-O-methyl ribonucleotide
  modified_base 55: mod_base = OTHER; note = 2'-O-methyl ribonucleotide
  modified_base 56: mod_base = OTHER; note = 2'-O-methyl ribonucleotide
  modified_base 57: mod_base = OTHER; note = 2'-O-methyl ribonucleotide
  modified_base 60: mod_base = OTHER; note = 2'-O-methyl ribonucleotide
  modified_base 61: mod_base = OTHER; note = 2'-O-methyl ribonucleotide
  modified_base 66: mod_base = OTHER; note = 2'-O-methyl ribonucleotide
  modified_base 67: mod_base = OTHER; note = 2'-O-methyl ribonucleotide
  modified_base 70: mod_base = OTHER; note = 2'-O-methyl ribonucleotide
  modified_base 71: mod_base = OTHER; note = 2'-O-methyl ribonucleotide
  modified_base 72: mod_base = OTHER; note = 2'-O-methyl ribonucleotide
  modified_base 73: mod_base = OTHER; note = 2'-O-methyl ribonucleotide
  modified_base 74: mod_base = OTHER; note = 2'-O-methyl ribonucleotide
  modified_base 75: mod_base = OTHER; note = 2'-O-methyl ribonucleotide
  modified_base 76: mod_base = OTHER; note = 2'-O-methyl ribonucleotide
  modified_base 77: mod_base = OTHER; note = 2'-O-methyl ribonucleotide
  modified_base 78: mod_base = OTHER; note = 2'-O-methyl ribonucleotide
  modified_base 79: mod_base = OTHER; note = 2'-O-methyl ribonucleotide
  modified_base 80: mod_base = OTHER; note = 2'-O-methyl ribonucleotide
  modified_base 83: mod_base = OTHER; note = 2'-O-methyl ribonucleotide
  modified_base 84: mod_base = OTHER; note = 2'-O-methyl ribonucleotide
  modified_base 85: mod_base = OTHER; note = 2'-O-methyl ribonucleotide
  modified_base 86: mod_base = OTHER; note = 2'-O-methyl ribonucleotide
  modified_base 87: mod_base = OTHER; note = 2'-O-methyl ribonucleotide
  modified_base 88: mod_base = OTHER; note = 2'-O-methyl ribonucleotide
  modified_base 89: mod_base = OTHER; note = 2'-O-methyl ribonucleotide
  modified_base 90: mod_base = OTHER; note = 2'-O-methyl ribonucleotide
  modified_base 91: mod_base = OTHER; note = 2'-O-methyl ribonucleotide
  modified_base 92: mod_base = OTHER; note = 2'-O-methyl ribonucleotide
  modified_base 93: mod_base = OTHER; note = 2'-O-methyl ribonucleotide
  modified_base 94: mod_base = OTHER; note = 2'-O-methyl ribonucleotide
  modified_base 95: mod_base = OTHER; note = 2'-O-methyl ribonucleotide
  modified_base 96: mod_base = OTHER; note = 2'-O-methyl ribonucleotide
  modified_base 97: mod_base = OTHER; note = 2'-O-methyl ribonucleotide
  modified_base 98: mod_base = OTHER; note = 2'-O-methyl ribonucleotide
  modified_base 99: mod_base = OTHER; note = 2'-O-methyl ribonucleotide
  modified_base 100: mod_base = OTHER; note = 2'-O-methyl ribonucleotide
  modified_base 1..4: mod_base = OTHER; note = phosphorothioate linkage
  modified_base 97..100: mod_base = OTHER; note = phosphorothioate linkage

SEQ ID NO: 2249 - RNA, 80 nt, synthetic construct; identical to SEQ ID NO: 57
  source 1..80: mol_type = other RNA
  modified_base 1: mod_base = OTHER; note = 2'-O-methyl ribonucleotide
  modified_base 8: mod_base = OTHER; note = 2'-O-methyl ribonucleotide
  modified_base 9: mod_base = OTHER; note = 2'-O-methyl ribonucleotide
  modified_base 10: mod_base = OTHER; note = 2'-O-methyl ribonucleotide
  modified_base 11: mod_base = OTHER; note = 2'-O-methyl ribonucleotide
  modified_base 12: mod_base = OTHER; note = 2'-O-methyl ribonucleotide
  modified_base 13: mod_base = OTHER; note = 2'-O-methyl ribonucleotide
  modified_base 14: mod_base = OTHER; note = 2'-O-methyl ribonucleotide
  modified_base 15: mod_base = OTHER; note = 2'-O-methyl ribonucleotide
  modified_base 16: mod_base = OTHER; note = 2'-O-methyl ribonucleotide
  modified_base 17: mod_base = OTHER; note = 2'-O-methyl ribonucleotide
  modified_base 18: mod_base = OTHER; note = 2'-O-methyl ribonucleotide
  modified_base 19: mod_base = OTHER; note = 2'-O-methyl ribonucleotide
  modified_base 20: mod_base = OTHER; note = 2'-O-methyl ribonucleotide
  modified_base 21: mod_base = OTHER; note = 2'-O-methyl ribonucleotide
  modified_base 22: mod_base = OTHER; note = 2'-O-methyl ribonucleotide
  modified_base 26: mod_base = OTHER; note = 2'-O-methyl ribonucleotide
  modified_base 28: mod_base = OTHER; note = 2'-O-methyl ribonucleotide
  modified_base 30: mod_base = OTHER; note = 2'-O-methyl ribonucleotide
  modified_base 32: mod_base = OTHER; note = 2'-O-methyl ribonucleotide
  modified_base 33: mod_base = OTHER; note = 2'-O-methyl ribonucleotide
  modified_base 34: mod_base = OTHER; note = 2'-O-methyl ribonucleotide
  modified_base 35: mod_base = OTHER; note = 2'-O-methyl ribonucleotide
  modified_base 36: mod_base = OTHER; note = 2'-O-methyl ribonucleotide
  modified_base 37: mod_base = OTHER; note = 2'-O-methyl ribonucleotide
  modified_base 40: mod_base = OTHER; note = 2'-O-methyl ribonucleotide
  modified_base 41: mod_base = OTHER; note = 2'-O-methyl ribonucleotide
  modified_base 46: mod_base = OTHER; note = 2'-O-methyl ribonucleotide
  modified_base 47: mod_base = OTHER; note = 2'-O-methyl ribonucleotide
  modified_base 50: mod_base = OTHER; note = 2'-O-methyl ribonucleotide
  modified_base 51: mod_base = OTHER; note = 2'-O-methyl ribonucleotide
  modified_base 52: mod_base = OTHER; note = 2'-O-methyl ribonucleotide
  modified_base 53: mod_base = OTHER; note = 2'-O-methyl ribonucleotide
  modified_base 54: mod_base = OTHER; note = 2'-O-methyl ribonucleotide
  modified_base 55: mod_base = OTHER; note = 2'-O-methyl ribonucleotide
  modified_base 56: mod_base = OTHER; note = 2'-O-methyl ribonucleotide
  modified_base 57: mod_base = OTHER; note = 2'-O-methyl ribonucleotide
  modified_base 58: mod_base = OTHER; note = 2'-O-methyl ribonucleotide
  modified_base 59: mod_base = OTHER; note = 2'-O-methyl ribonucleotide
  modified_base 60: mod_base = OTHER; note = 2'-O-methyl ribonucleotide
  modified_base 61: mod_base = OTHER; note = 2'-O-methyl ribonucleotide
  modified_base 63: mod_base = OTHER; note = 2'-O-methyl ribonucleotide
  modified_base 64: mod_base = OTHER; note = 2'-O-methyl ribonucleotide
  modified_base 65: mod_base = OTHER; note = 2'-O-methyl ribonucleotide
  modified_base 66: mod_base = OTHER; note = 2'-O-methyl ribonucleotide
  modified_base 67: mod_base = OTHER; note = 2'-O-methyl ribonucleotide
  modified_base 68: mod_base = OTHER; note = 2'-O-methyl ribonucleotide
  modified_base 69: mod_base = OTHER; note = 2'-O-methyl ribonucleotide
  modified_base 70: mod_base = OTHER; note = 2'-O-methyl ribonucleotide
  modified_base 71: mod_base = OTHER; note = 2'-O-methyl ribonucleotide
  modified_base 72: mod_base = OTHER; note = 2'-O-methyl ribonucleotide
  modified_base 73: mod_base = OTHER; note = 2'-O-methyl ribonucleotide
  modified_base 74: mod_base = OTHER; note = 2'-O-methyl ribonucleotide
  modified_base 75: mod_base = OTHER; note = 2'-O-methyl ribonucleotide
  modified_base 76: mod_base = OTHER; note = 2'-O-methyl ribonucleotide
  modified_base 77: mod_base = OTHER; note = 2'-O-methyl ribonucleotide
  modified_base 78: mod_base = OTHER; note = 2'-O-methyl ribonucleotide
  modified_base 79: mod_base = OTHER; note = 2'-O-methyl ribonucleotide
  modified_base 80: mod_base = OTHER; note = 2'-O-methyl ribonucleotide
  modified_base 77..80: mod_base = OTHER; note = phosphorothioate linkage

SEQ ID NO: 2250 - RNA, 100 nt, synthetic construct; identical to SEQ ID NO: 59
  source 1..100: mol_type = other RNA
  modified_base 1: mod_base = OTHER; note = 2'-O-methyl ribonucleotide
  modified_base 2: mod_base = OTHER; note = 2'-O-methyl ribonucleotide
  modified_base 3: mod_base = OTHER; note = 2'-O-methyl ribonucleotide
  modified_base 21: mod_base = OTHER; note = 2'-O-methyl ribonucleotide
  modified_base 28: mod_base = OTHER; note = 2'-O-methyl ribonucleotide
  modified_base 29: mod_base = OTHER; note = 2'-O-methyl ribonucleotide
  modified_base 30: mod_base = OTHER; note = 2'-O-methyl ribonucleotide
  modified_base 31: mod_base = OTHER; note = 2'-O-methyl ribonucleotide
  modified_base 32: mod_base = OTHER; note = 2'-O-methyl ribonucleotide
  modified_base 34: mod_base = OTHER; note = 2'-O-methyl ribonucleotide
  modified_base 35: mod_base = OTHER; note = 2'-O-methyl ribonucleotide
  modified_base 36: mod_base = OTHER; note = 2'-O-methyl ribonucleotide
  modified_base 37: mod_base = OTHER; note = 2'-O-methyl ribonucleotide
  modified_base 38: mod_base = OTHER; note = 2'-O-methyl ribonucleotide
  modified_base 39: mod_base = OTHER; note = 2'-O-methyl ribonucleotide
  modified_base 40: mod_base = OTHER; note = 2'-O-methyl ribonucleotide
  modified_base 41: mod_base = OTHER; note = 2'-O-methyl ribonucleotide
  modified_base 42: mod_base = OTHER; note = 2'-O-methyl ribonucleotide
  modified_base 46: mod_base = OTHER; note = 2'-O-methyl ribonucleotide
  modified_base 48: mod_base = OTHER; note = 2'-O-methyl ribonucleotide
  modified_base 50: mod_base = OTHER; note = 2'-O-methyl ribonucleotide
  modified_base 52: mod_base = OTHER; note = 2'-O-methyl ribonucleotide
  modified_base 53: mod_base = OTHER; note = 2'-O-methyl ribonucleotide
  modified_base 54: mod_base = OTHER; note = 2'-O-methyl ribonucleotide
  modified_base 57: mod_base = OTHER; note = 2'-O-methyl ribonucleotide
  modified_base 61: mod_base = OTHER; note = 2'-O-methyl ribonucleotide
  modified_base 66: mod_base = OTHER; note = 2'-O-methyl ribonucleotide
  modified_base 67: mod_base = OTHER; note = 2'-O-methyl ribonucleotide
  modified_base 70: mod_base = OTHER; note = 2'-O-methyl ribonucleotide
  modified_base 71: mod_base = OTHER; note = 2'-O-methyl ribonucleotide
  modified_base 72: mod_base = OTHER; note = 2'-O-methyl ribonucleotide
  modified_base 74: mod_base = OTHER; note = 2'-O-methyl ribonucleotide
  modified_base 75: mod_base = OTHER; note = 2'-O-methyl ribonucleotide
  modified_base 76: mod_base = OTHER; note = 2'-O-methyl ribonucleotide
  modified_base 77: mod_base = OTHER; note = 2'-O-methyl ribonucleotide
  modified_base 78: mod_base = OTHER; note = 2'-O-methyl ribonucleotide
  modified_base 79: mod_base = OTHER; note = 2'-O-methyl ribonucleotide
  modified_base 80: mod_base = OTHER; note = 2'-O-methyl ribonucleotide
  modified_base 82: mod_base = OTHER; note = 2'-O-methyl ribonucleotide
  modified_base 83: mod_base = OTHER; note = 2'-O-methyl ribonucleotide
  modified_base 84: mod_base = OTHER; note = 2'-O-methyl ribonucleotide
  modified_base 85: mod_base = OTHER; note = 2'-O-methyl ribonucleotide
  modified_base 86: mod_base = OTHER; note = 2'-O-methyl ribonucleotide
  modified_base 87: mod_base = OTHER; note = 2'-O-methyl ribonucleotide
  modified_base 89: mod_base = OTHER; note = 2'-O-methyl ribonucleotide
  modified_base 92: mod_base = OTHER; note = 2'-O-methyl ribonucleotide
  modified_base 93: mod_base = OTHER; note = 2'-O-methyl ribonucleotide
  modified_base 94: mod_base = OTHER; note = 2'-O-methyl ribonucleotide
  modified_base 95: mod_base = OTHER; note = 2'-O-methyl ribonucleotide
  modified_base 96: mod_base = OTHER; note = 2'-O-methyl ribonucleotide
  modified_base 97: mod_base = OTHER; note = 2'-O-methyl ribonucleotide
  modified_base 98: mod_base = OTHER; note = 2'-O-methyl ribonucleotide
  modified_base 99: mod_base = OTHER; note = 2'-O-methyl ribonucleotide
  modified_base 100: mod_base = OTHER; note = 2'-O-methyl ribonucleotide
  modified_base 1..4: mod_base = OTHER; note = phosphorothioate linkage
  modified_base 97..100: mod_base = OTHER; note = phosphorothioate linkage

SEQ ID NO: 2251 - RNA, 100 nt, synthetic construct; identical to SEQ ID NO: 59
  source 1..100: mol_type = other RNA
  modified_base 1: mod_base = OTHER; note = 2'-O-methyl ribonucleotide
  modified_base 2: mod_base = OTHER; note = 2'-O-methyl ribonucleotide
  modified_base 3: mod_base = OTHER; note = 2'-O-methyl ribonucleotide
  modified_base 21: mod_base = OTHER; note = 2'-O-methyl ribonucleotide
  modified_base 28: mod_base = OTHER; note = 2'-O-methyl ribonucleotide
  modified_base 29: mod_base = OTHER; note = 2'-O-methyl ribonucleotide
  modified_base 30: mod_base = OTHER; note = 2'-O-methyl ribonucleotide
  modified_base 31: mod_base = OTHER; note = 2'-O-methyl ribonucleotide
  modified_base 32: mod_base = OTHER; note = 2'-O-methyl ribonucleotide
  modified_base 33: mod_base = OTHER; note = 2'-O-methyl ribonucleotide
  modified_base 34: mod_base = OTHER; note = 2'-O-methyl ribonucleotide
  modified_base 35: mod_base = OTHER; note = 2'-O-methyl ribonucleotide
  modified_base 36: mod_base = OTHER; note = 2'-O-methyl ribonucleotide
  modified_base 37: mod_base = OTHER; note = 2'-O-methyl ribonucleotide
  modified_base 38: mod_base = OTHER; note = 2'-O-methyl ribonucleotide
  modified_base 39: mod_base = OTHER; note = 2'-O-methyl ribonucleotide
  modified_base 40: mod_base = OTHER; note = 2'-O-methyl ribonucleotide
  modified_base 41: mod_base = OTHER; note = 2'-O-methyl ribonucleotide
  modified_base 42: mod_base = OTHER; note = 2'-O-methyl ribonucleotide
  modified_base 46: mod_base = OTHER; note = 2'-O-methyl ribonucleotide
  modified_base 48: mod_base = OTHER; note = 2'-O-methyl ribonucleotide
  modified_base 50: mod_base = OTHER; note = 2'-O-methyl ribonucleotide
  modified_base 52: mod_base = OTHER; note = 2'-O-methyl ribonucleotide
  modified_base 53: mod_base = OTHER; note = 2'-O-methyl ribonucleotide
  modified_base 54: mod_base = OTHER; note = 2'-O-methyl ribonucleotide
  modified_base 55: mod_base = OTHER; note = 2'-O-methyl ribonucleotide
  modified_base 56: mod_base = OTHER; note = 2'-O-methyl ribonucleotide
  modified_base 57: mod_base = OTHER; note = 2'-O-methyl ribonucleotide
  modified_base 60: mod_base = OTHER; note = 2'-O-methyl ribonucleotide
  modified_base 61: mod_base = OTHER; note = 2'-O-methyl ribonucleotide
  modified_base 66: mod_base = OTHER; note = 2'-O-methyl ribonucleotide
  modified_base 67: mod_base = OTHER; note = 2'-O-methyl ribonucleotide
  modified_base 70: mod_base = OTHER; note = 2'-O-methyl ribonucleotide
  modified_base 71: mod_base = OTHER; note = 2'-O-methyl ribonucleotide
  modified_base 72: mod_base = OTHER; note = 2'-O-methyl ribonucleotide
  modified_base 73: mod_base = OTHER; note = 2'-O-methyl ribonucleotide
  modified_base 74: mod_base = OTHER; note = 2'-O-methyl ribonucleotide
  modified_base 75: mod_base = OTHER; note = 2'-O-methyl ribonucleotide
  modified_base 76: mod_base = OTHER; note = 2'-O-methyl ribonucleotide
  modified_base 77: mod_base = OTHER; note = 2'-O-methyl ribonucleotide
  modified_base 78: mod_base = OTHER; note = 2'-O-methyl ribonucleotide
  modified_base 79: mod_base = OTHER; note = 2'-O-methyl ribonucleotide
  modified_base 80: mod_base = OTHER; note = 2'-O-methyl ribonucleotide
  modified_base 81: mod_base = OTHER; note = 2'-O-methyl ribonucleotide
  modified_base 83: mod_base = OTHER; note = 2'-O-methyl ribonucleotide
  modified_base 84: mod_base = OTHER; note = 2'-O-methyl ribonucleotide
  modified_base 85: mod_base = OTHER; note = 2'-O-methyl ribonucleotide
  modified_base 86: mod_base = OTHER; note = 2'-O-methyl ribonucleotide
  modified_base 87: mod_base = OTHER; note = 2'-O-methyl ribonucleotide
  modified_base 88: mod_base = OTHER; note = 2'-O-methyl ribonucleotide
  modified_base 89: mod_base = OTHER; note = 2'-O-methyl ribonucleotide
  modified_base 90: mod_base = OTHER; note = 2'-O-methyl ribonucleotide
  modified_base 91: mod_base = OTHER; note = 2'-O-methyl ribonucleotide
  modified_base 92: mod_base = OTHER; note = 2'-O-methyl ribonucleotide
  modified_base 93: mod_base = OTHER; note = 2'-O-methyl ribonucleotide
  modified_base 94: mod_base = OTHER; note = 2'-O-methyl ribonucleotide
  modified_base 95: mod_base = OTHER; note = 2'-O-methyl ribonucleotide
  modified_base 96: mod_base = OTHER; note = 2'-O-methyl ribonucleotide
  modified_base 97: mod_base = OTHER; note = 2'-O-methyl ribonucleotide
  modified_base 98: mod_base = OTHER; note = 2'-O-methyl ribonucleotide
  modified_base 99: mod_base = OTHER; note = 2'-O-methyl ribonucleotide
  modified_base 100: mod_base = OTHER; note = 2'-O-methyl ribonucleotide
  modified_base 1..4: mod_base = OTHER; note = phosphorothioate linkage
  modified_base 97..100: mod_base = OTHER; note = phosphorothioate linkage

SEQ ID NO: 2252 - RNA, 100 nt, synthetic construct; identical to SEQ ID NO: 59
  source 1..100: mol_type = other RNA
  modified_base 1: mod_base = OTHER; note = 2'-O-methyl ribonucleotide
  modified_base 2: mod_base = OTHER; note = 2'-O-methyl ribonucleotide
  modified_base 3: mod_base = OTHER; note = 2'-O-methyl ribonucleotide
  modified_base 29: mod_base = OTHER; note = 2'-O-methyl ribonucleotide
  modified_base 30: mod_base = OTHER; note = 2'-O-methyl ribonucleotide
  modified_base 31: mod_base = OTHER; note = 2'-O-methyl ribonucleotide
  modified_base 32: mod_base = OTHER; note = 2'-O-methyl ribonucleotide
  modified_base 33: mod_base = OTHER; note = 2'-O-methyl ribonucleotide
  modified_base 34: mod_base = OTHER; note = 2'-O-methyl ribonucleotide
  modified_base 35: mod_base = OTHER; note = 2'-O-methyl ribonucleotide
  modified_base 36: mod_base = OTHER; note = 2'-O-methyl ribonucleotide
  modified_base 37: mod_base = OTHER; note = 2'-O-methyl ribonucleotide
  modified_base 38: mod_base = OTHER; note = 2'-O-methyl ribonucleotide
  modified_base 39: mod_base = OTHER; note = 2'-O-methyl ribonucleotide
  modified_base 40: mod_base = OTHER; note = 2'-O-methyl ribonucleotide
  modified_base 69: mod_base = OTHER; note = 2'-O-methyl ribonucleotide
  modified_base 70: mod_base = OTHER; note = 2'-O-methyl ribonucleotide
  modified_base 71: mod_base = OTHER; note = 2'-O-methyl ribonucleotide
  modified_base 72: mod_base = OTHER; note = 2'-O-methyl ribonucleotide
  modified_base 73: mod_base = OTHER; note = 2'-O-methyl ribonucleotide
  modified_base 74: mod_base = OTHER; note = 2'-O-methyl ribonucleotide
  modified_base 75: mod_base = OTHER; note = 2'-O-methyl ribonucleotide
  modified_base 76: mod_base = OTHER; note = 2'-O-methyl ribonucleotide
  modified_base 77: mod_base = OTHER; note = 2'-O-methyl ribonucleotide
  modified_base 78: mod_base = OTHER; note = 2'-O-methyl ribonucleotide
  modified_base 79: mod_base = OTHER; note = 2'-O-methyl ribonucleotide
  modified_base 80: mod_base = OTHER; note = 2'-O-methyl ribonucleotide
  modified_base 81: mod_base = OTHER; note = 2'-O-methyl ribonucleotide
  modified_base 82: mod_base = OTHER; note = 2'-O-methyl ribonucleotide
  modified_base 83: mod_base = OTHER; note = 2'-O-methyl ribonucleotide
  modified_base 84: mod_base = OTHER; note = 2'-O-methyl ribonucleotide
  modified_base 85: mod_base = OTHER; note = 2'-O-methyl ribonucleotide
  modified_base 86: mod_base = OTHER; note = 2'-O-methyl ribonucleotide
  modified_base 87: mod_base = OTHER; note = 2'-O-methyl ribonucleotide
  modified_base 88: mod_base = OTHER; note = 2'-O-methyl ribonucleotide
  modified_base 89: mod_base = OTHER; note = 2'-O-methyl ribonucleotide
  modified_base 90: mod_base = OTHER; note = 2'-O-methyl ribonucleotide
  modified_base 91: mod_base = OTHER; note = 2'-O-methyl ribonucleotide
  modified_base 92: mod_base = OTHER; note = 2'-O-methyl ribonucleotide
  modified_base 93: mod_base = OTHER; note = 2'-O-methyl ribonucleotide
  modified_base 94: mod_base = OTHER; note = 2'-O-methyl ribonucleotide
  modified_base 95: mod_base = OTHER; note = 2'-O-methyl ribonucleotide
  modified_base 96: mod_base = OTHER; note = 2'-O-methyl ribonucleotide
  modified_base 97: mod_base = OTHER; note = 2'-O-methyl ribonucleotide
  modified_base 98: mod_base = OTHER; note = 2'-O-methyl ribonucleotide
  modified_base 99: mod_base = OTHER; note = 2'-O-methyl ribonucleotide
  modified_base 100: mod_base = OTHER; note = 2'-O-methyl ribonucleotide
  modified_base 1..4: mod_base = OTHER; note = phosphorothioate linkage
  modified_base 97..100: mod_base = OTHER; note = phosphorothioate linkage

SEQ ID NO: 2253 - RNA, 100 nt, synthetic construct; identical to SEQ ID NO: 59
  source 1..100: mol_type = other RNA
  modified_base 1: mod_base = OTHER; note = 2'-O-methyl ribonucleotide
  modified_base 2: mod_base = OTHER; note = 2'-O-methyl ribonucleotide
  modified_base 3: mod_base = OTHER; note = 2'-O-methyl ribonucleotide
  modified_base 21: mod_base = OTHER; note = 2'-O-methyl ribonucleotide
  modified_base 28: mod_base = OTHER; note = 2'-O-methyl ribonucleotide
  modified_base 29: mod_base = OTHER; note = 2'-O-methyl ribonucleotide
  modified_base 30: mod_base = OTHER; note = 2'-O-methyl ribonucleotide
  modified_base 31: mod_base = OTHER; note = 2'-O-methyl ribonucleotide
  modified_base 32: mod_base = OTHER; note = 2'-O-methyl ribonucleotide
  modified_base 34: mod_base = OTHER; note = 2'-O-methyl ribonucleotide
  modified_base 35: mod_base = OTHER; note = 2'-O-methyl ribonucleotide
  modified_base 36: mod_base = OTHER; note = 2'-O-methyl ribonucleotide
  modified_base 37: mod_base = OTHER; note = 2'-O-methyl ribonucleotide
  modified_base 38: mod_base = OTHER; note = 2'-O-methyl ribonucleotide
  modified_base 39: mod_base = OTHER; note = 2'-O-methyl ribonucleotide
  modified_base 40: mod_base = OTHER; note = 2'-O-methyl ribonucleotide
  modified_base 41: mod_base = OTHER; note = 2'-O-methyl ribonucleotide
  modified_base 42: mod_base = OTHER; note = 2'-O-methyl ribonucleotide
  modified_base 46: mod_base = OTHER; note = 2'-O-methyl ribonucleotide
  modified_base 48: mod_base = OTHER; note = 2'-O-methyl ribonucleotide
  modified_base 50: mod_base = OTHER; note = 2'-O-methyl ribonucleotide
  modified_base 52: mod_base = OTHER; note = 2'-O-methyl ribonucleotide
  modified_base 53: mod_base = OTHER; note = 2'-O-methyl ribonucleotide
  modified_base 54: mod_base = OTHER; note = 2'-O-methyl ribonucleotide
  modified_base 55: mod_base = OTHER; note = 2'-O-methyl ribonucleotide
  modified_base 56: mod_base = OTHER; note = 2'-O-methyl ribonucleotide
  modified_base 57: mod_base = OTHER; note = 2'-O-methyl ribonucleotide
  modified_base 60: mod_base = OTHER; note = 2'-O-methyl ribonucleotide
  modified_base 61: mod_base = OTHER; note = 2'-O-methyl ribonucleotide
  modified_base 66: mod_base = OTHER; note = 2'-O-methyl ribonucleotide
  modified_base 67: mod_base = OTHER; note = 2'-O-methyl ribonucleotide
  modified_base 70: mod_base = OTHER; note = 2'-O-methyl ribonucleotide
  modified_base 71: mod_base = OTHER; note = 2'-O-methyl ribonucleotide
  modified_base 72: mod_base = OTHER; note = 2'-O-methyl ribonucleotide
  modified_base 74: mod_base = OTHER; note = 2'-O-methyl ribonucleotide
  modified_base 75: mod_base = OTHER; note = 2'-O-methyl ribonucleotide
  modified_base 76: mod_base = OTHER; note = 2'-O-methyl ribonucleotide
  modified_base 77: mod_base = OTHER; note = 2'-O-methyl ribonucleotide
  modified_base 78: mod_base = OTHER; note = 2'-O-methyl ribonucleotide
  modified_base 79: mod_base = OTHER; note = 2'-O-methyl ribonucleotide
  modified_base 80: mod_base = OTHER; note = 2'-O-methyl ribonucleotide
  modified_base 81: mod_base = OTHER; note = 2'-O-methyl ribonucleotide
  modified_base 83: mod_base = OTHER; note = 2'-O-methyl ribonucleotide
  modified_base 84: mod_base = OTHER; note = 2'-O-methyl ribonucleotide
  modified_base 85: mod_base = OTHER; note = 2'-O-methyl ribonucleotide
  modified_base 86: mod_base = OTHER; note = 2'-O-methyl ribonucleotide
  modified_base 87: mod_base = OTHER; note = 2'-O-methyl ribonucleotide
  modified_base 88: mod_base = OTHER; note = 2'-O-methyl ribonucleotide
  modified_base 89: mod_base = OTHER; note = 2'-O-methyl ribonucleotide
  modified_base 90: mod_base = OTHER; note = 2'-O-methyl ribonucleotide
  modified_base 91: mod_base = OTHER; note = 2'-O-methyl ribonucleotide
  modified_base 92: mod_base = OTHER; note = 2'-O-methyl ribonucleotide
  modified_base 93: mod_base = OTHER; note = 2'-O-methyl ribonucleotide
  modified_base 94: mod_base = OTHER; note = 2'-O-methyl ribonucleotide
  modified_base 95: mod_base = OTHER; note = 2'-O-methyl ribonucleotide
  modified_base 96: mod_base = OTHER; note = 2'-O-methyl ribonucleotide
  modified_base 97: mod_base = OTHER; note = 2'-O-methyl ribonucleotide
  modified_base 98: mod_base = OTHER; note = 2'-O-methyl ribonucleotide
  modified_base 99: mod_base = OTHER; note = 2'-O-methyl ribonucleotide
  modified_base 100: mod_base = OTHER; note = 2'-O-methyl ribonucleotide
  modified_base 1..4: mod_base = OTHER; note = phosphorothioate linkage
  modified_base 97..100: mod_base = OTHER; note = phosphorothioate linkage

SEQ ID NO: 2254 - RNA, 100 nt, synthetic construct; identical to SEQ ID NO: 253
  source 1..100: mol_type = other RNA
  modified_base 1: mod_base = OTHER; note = 2'-O-methyl ribonucleotide
  modified_base 2: mod_base = OTHER; note = 2'-O-methyl ribonucleotide
  modified_base 3: mod_base = OTHER; note = 2'-O-methyl ribonucleotide
  modified_base 29: mod_base = OTHER; note = 2'-O-methyl ribonucleotide
  modified_base 30: mod_base = OTHER; note = 2'-O-methyl ribonucleotide
  modified_base 31: mod_base = OTHER; note = 2'-O-methyl ribonucleotide
  modified_base 32: mod_base = OTHER; note = 2'-O-methyl ribonucleotide
  modified_base 33: mod_base = OTHER; note = 2'-O-methyl ribonucleotide
  modified_base 34: mod_base = OTHER; note = 2'-O-methyl ribonucleotide
  modified_base 35: mod_base = OTHER; note = 2'-O-methyl ribonucleotide
  modified_base 36: mod_base = OTHER; note = 2'-O-methyl ribonucleotide
  modified_base 37: mod_base = OTHER; note = 2'-O-methyl ribonucleotide
  modified_base 38: mod_base = OTHER; note = 2'-O-methyl ribonucleotide
  modified_base 39: mod_base = OTHER; note = 2'-O-methyl ribonucleotide
  modified_base 40: mod_base = OTHER; note = 2'-O-methyl ribonucleotide
  modified_base 69: mod_base = OTHER; note = 2'-O-methyl ribonucleotide
  modified_base 70: mod_base = OTHER; note = 2'-O-methyl ribonucleotide
  modified_base 71: mod_base = OTHER; note = 2'-O-methyl ribonucleotide
  modified_base 72: mod_base = OTHER; note = 2'-O-methyl ribonucleotide
  modified_base 73: mod_base = OTHER; note = 2'-O-methyl ribonucleotide
  modified_base 74: mod_base = OTHER; note = 2'-O-methyl ribonucleotide
  modified_base 75: mod_base = OTHER; note = 2'-O-methyl ribonucleotide
  modified_base 76: mod_base = OTHER; note = 2'-O-methyl ribonucleotide
  modified_base 77: mod_base = OTHER; note = 2'-O-methyl ribonucleotide
  modified_base 78: mod_base = OTHER; note = 2'-O-methyl ribonucleotide
  modified_base 79: mod_base = OTHER; note = 2'-O-methyl ribonucleotide
  modified_base 80: mod_base = OTHER; note = 2'-O-methyl ribonucleotide
  modified_base 81: mod_base = OTHER; note = 2'-O-methyl ribonucleotide
  modified_base 82: mod_base = OTHER; note = 2'-O-methyl ribonucleotide
  modified_base 83: mod_base = OTHER; note = 2'-O-methyl ribonucleotide
  modified_base 84: mod_base = OTHER; note = 2'-O-methyl ribonucleotide
  modified_base 85: mod_base = OTHER; note = 2'-O-methyl ribonucleotide
  modified_base 86: mod_base = OTHER; note = 2'-O-methyl ribonucleotide
  modified_base 87: mod_base = OTHER; note = 2'-O-methyl ribonucleotide
  modified_base 88: mod_base = OTHER; note = 2'-O-methyl ribonucleotide
  modified_base 89: mod_base = OTHER; note = 2'-O-methyl ribonucleotide
  modified_base 90: mod_base = OTHER; note = 2'-O-methyl ribonucleotide
  modified_base 91: mod_base = OTHER; note = 2'-O-methyl ribonucleotide
  modified_base 92: mod_base = OTHER; note = 2'-O-methyl ribonucleotide
  modified_base 93: mod_base = OTHER; note = 2'-O-methyl ribonucleotide
  modified_base 94: mod_base = OTHER; note = 2'-O-methyl ribonucleotide
  modified_base 95: mod_base = OTHER; note = 2'-O-methyl ribonucleotide
  modified_base 96: mod_base = OTHER; note = 2'-O-methyl ribonucleotide
  modified_base 97: mod_base = OTHER; note = 2'-O-methyl ribonucleotide
  modified_base 98: mod_base = OTHER; note = 2'-O-methyl ribonucleotide
  modified_base 99: mod_base = OTHER; note = 2'-O-methyl ribonucleotide
  modified_base 100: mod_base = OTHER; note = 2'-O-methyl ribonucleotide
  modified_base 1..4: mod_base = OTHER; note = phosphorothioate linkage
  modified_base 97..100: mod_base = OTHER; note = phosphorothioate linkage

SEQ ID NO: 2255 - RNA, 100 nt, synthetic construct; identical to SEQ ID NO: 253
  source 1..100: mol_type = other RNA
  modified_base 21: mod_base = OTHER; note = 2'-O-methyl ribonucleotide
  modified_base 28: mod_base = OTHER; note = 2'-O-methyl ribonucleotide
  modified_base 29: mod_base = OTHER; note = 2'-O-methyl ribonucleotide
  modified_base 30: mod_base = OTHER; note = 2'-O-methyl ribonucleotide
  modified_base 31: mod_base = OTHER; note = 2'-O-methyl ribonucleotide
  modified_base 32: mod_base = OTHER; note = 2'-O-methyl ribonucleotide
  modified_base 33: mod_base = OTHER; note = 2'-O-methyl ribonucleotide
  modified_base 34: mod_base = OTHER; note = 2'-O-methyl ribonucleotide
  modified_base 35: mod_base = OTHER; note = 2'-O-methyl ribonucleotide
  modified_base 36: mod_base = OTHER; note = 2'-O-methyl ribonucleotide
  modified_base 37: mod_base = OTHER; note = 2'-O-methyl ribonucleotide
  modified_base 38: mod_base = OTHER; note = 2'-O-methyl ribonucleotide
  modified_base 39: mod_base = OTHER; note = 2'-O-methyl ribonucleotide
  modified_base 40: mod_base = OTHER; note = 2'-O-methyl ribonucleotide
  modified_base 41: mod_base = OTHER; note = 2'-O-methyl ribonucleotide
  modified_base 42: mod_base = OTHER; note = 2'-O-methyl ribonucleotide
  modified_base 46: mod_base = OTHER; note = 2'-O-methyl ribonucleotide
  modified_base 48: mod_base = OTHER; note = 2'-O-methyl ribonucleotide
  modified_base 50: mod_base = OTHER; note = 2'-O-methyl ribonucleotide
  modified_base 52: mod_base = OTHER; note = 2'-O-methyl ribonucleotide
  modified_base 53: mod_base = OTHER; note = 2'-O-methyl ribonucleotide
  modified_base 54: mod_base = OTHER; note = 2'-O-methyl ribonucleotide
  modified_base 55: mod_base = OTHER; note = 2'-O-methyl ribonucleotide
  modified_base 56: mod_base = OTHER; note = 2'-O-methyl ribonucleotide
  modified_base 57: mod_base = OTHER; note = 2'-O-methyl ribonucleotide
  modified_base 60: mod_base = OTHER; note = 2'-O-methyl ribonucleotide
  modified_base 61: mod_base = OTHER; note = 2'-O-methyl ribonucleotide
  modified_base 66: mod_base = OTHER; note = 2'-O-methyl ribonucleotide
  modified_base 67: mod_base = OTHER; note = 2'-O-methyl ribonucleotide
  modified_base 70: mod_base = OTHER; note = 2'-O-methyl ribonucleotide
  modified_base 71: mod_base = OTHER; note = 2'-O-methyl ribonucleotide
  modified_base 72: mod_base = OTHER; note = 2'-O-methyl ribonucleotide
  modified_base 73: mod_base = OTHER; note = 2'-O-methyl ribonucleotide
  modified_base 74: mod_base = OTHER; note = 2'-O-methyl ribonucleotide
  modified_base 75: mod_base = OTHER; note = 2'-O-methyl ribonucleotide
  modified_base 76: mod_base = OTHER; note = 2'-O-methyl ribonucleotide
  modified_base 77: mod_base = OTHER; note = 2'-O-methyl ribonucleotide
  modified_base 78: mod_base = OTHER; note = 2'-O-methyl ribonucleotide
  modified_base 79: mod_base = OTHER; note = 2'-O-methyl ribonucleotide
  modified_base 80: mod_base = OTHER; note = 2'-O-methyl ribonucleotide
  modified_base 81: mod_base = OTHER; note = 2'-O-methyl ribonucleotide
  modified_base 83: mod_base = OTHER; note = 2'-O-methyl ribonucleotide
  modified_base 84: mod_base = OTHER; note = 2'-O-methyl ribonucleotide
  modified_base 85: mod_base = OTHER; note = 2'-O-methyl ribonucleotide
  modified_base 86: mod_base = OTHER; note = 2'-O-methyl ribonucleotide
  modified_base 87: mod_base = OTHER; note = 2'-O-methyl ribonucleotide
  modified_base 88: mod_base = OTHER; note = 2'-O-methyl ribonucleotide
  modified_base 89: mod_base = OTHER; note = 2'-O-methyl ribonucleotide
  modified_base 90: mod_base = OTHER; note = 2'-O-methyl ribonucleotide
  modified_base 91: mod_base = OTHER; note = 2'-O-methyl ribonucleotide
  modified_base 92: mod_base = OTHER; note = 2'-O-methyl ribonucleotide
  modified_base 93: mod_base = OTHER; note = 2'-O-methyl ribonucleotide
  modified_base 94: mod_base = OTHER; note = 2'-O-methyl ribonucleotide
  modified_base 95: mod_base = OTHER; note = 2'-O-methyl ribonucleotide
  modified_base 96: mod_base = OTHER; note = 2'-O-methyl ribonucleotide
  modified_base 97: mod_base = OTHER; note = 2'-O-methyl ribonucleotide
  modified_base 98: mod_base = OTHER; note = 2'-O-methyl ribonucleotide
  modified_base 99: mod_base = OTHER; note = 2'-O-methyl ribonucleotide
  modified_base 100: mod_base = OTHER; note = 2'-O-methyl ribonucleotide
  modified_base 1..4: mod_base = OTHER; note = phosphorothioate linkage
  modified_base 97..100: mod_base = OTHER; note = phosphorothioate linkage

SEQ ID NO: 2256 - RNA, 100 nt, synthetic construct; identical to SEQ ID NO: 253
  source 1..100: mol_type = other RNA
  modified_base 1: mod_base = OTHER; note = 2'-O-methyl ribonucleotide
  modified_base 2: mod_base = OTHER; note = 2'-O-methyl ribonucleotide
  modified_base 3: mod_base = OTHER; note = 2'-O-methyl ribonucleotide
  modified_base 21: mod_base = OTHER; note = 2'-O-methyl ribonucleotide
  modified_base 28: mod_base = OTHER; note = 2'-O-methyl ribonucleotide
  modified_base 29: mod_base = OTHER; note = 2'-O-methyl ribonucleotide
  modified_base 30: mod_base = OTHER; note = 2'-O-methyl ribonucleotide
  modified_base 31: mod_base = OTHER; note = 2'-O-methyl ribonucleotide
  modified_base 32: mod_base = OTHER; note = 2'-O-methyl ribonucleotide
  modified_base 33: mod_base = OTHER; note = 2'-O-methyl ribonucleotide
  modified_base 34: mod_base = OTHER; note = 2'-O-methyl ribonucleotide
  modified_base 35: mod_base = OTHER; note = 2'-O-methyl ribonucleotide
  modified_base 36: mod_base = OTHER; note = 2'-O-methyl ribonucleotide
  modified_base 37: mod_base = OTHER; note = 2'-O-methyl ribonucleotide
  modified_base 38: mod_base = OTHER; note = 2'-O-methyl ribonucleotide
  modified_base 39: mod_base = OTHER; note = 2'-O-methyl ribonucleotide
  modified_base 40: mod_base = OTHER; note = 2'-O-methyl ribonucleotide
  modified_base 41: mod_base = OTHER; note = 2'-O-methyl ribonucleotide
  modified_base 42: mod_base = OTHER; note = 2'-O-methyl ribonucleotide
  modified_base 46: mod_base = OTHER; note = 2'-O-methyl ribonucleotide
  modified_base 48: mod_base = OTHER; note = 2'-O-methyl ribonucleotide
  modified_base 50: mod_base = OTHER; note = 2'-O-methyl ribonucleotide
  modified_base 52: mod_base = OTHER; note = 2'-O-methyl ribonucleotide
  modified_base 53: mod_base = OTHER; note = 2'-O-methyl ribonucleotide
  modified_base 54: mod_base = OTHER; note = 2'-O-methyl ribonucleotide
  modified_base 55: mod_base = OTHER; note = 2'-O-methyl ribonucleotide
  modified_base 56: mod_base = OTHER; note = 2'-O-methyl ribonucleotide
  modified_base 57: mod_base = OTHER; note = 2'-O-methyl ribonucleotide
  modified_base 60: mod_base = OTHER; note = 2'-O-methyl ribonucleotide
  modified_base 61: mod_base = OTHER; note = 2'-O-methyl ribonucleotide
  modified_base 66: mod_base = OTHER; note = 2'-O-methyl ribonucleotide
  modified_base 67: mod_base = OTHER; note = 2'-O-methyl ribonucleotide
  modified_base 70: mod_base = OTHER; note = 2'-O-methyl ribonucleotide
  modified_base 71: mod_base = OTHER; note = 2'-O-methyl ribonucleotide
  modified_base 72: mod_base = OTHER; note = 2'-O-methyl ribonucleotide
  modified_base 73: mod_base = OTHER; note = 2'-O-methyl ribonucleotide
  modified_base 74: mod_base = OTHER; note = 2'-O-methyl ribonucleotide
  modified_base 75: mod_base = OTHER; note = 2'-O-methyl ribonucleotide
  modified_base 76: mod_base = OTHER; note = 2'-O-methyl ribonucleotide
  modified_base 77: mod_base = OTHER; note = 2'-O-methyl ribonucleotide
  modified_base 78: mod_base = OTHER; note = 2'-O-methyl ribonucleotide
  modified_base 79: mod_base = OTHER; note = 2'-O-methyl ribonucleotide
  modified_base 80: mod_base = OTHER; note = 2'-O-methyl ribonucleotide
  modified_base 81: mod_base = OTHER; note = 2'-O-methyl ribonucleotide
  modified_base 83: mod_base = OTHER; note = 2'-O-methyl ribonucleotide
  modified_base 84: mod_base = OTHER; note = 2'-O-methyl ribonucleotide
  modified_base 85: mod_base = OTHER; note = 2'-O-methyl ribonucleotide
  modified_base 86: mod_base = OTHER; note = 2'-O-methyl ribonucleotide
  modified_base 87: mod_base = OTHER; note = 2'-O-methyl ribonucleotide
  modified_base 88: mod_base = OTHER; note = 2'-O-methyl ribonucleotide
  modified_base 89: mod_base = OTHER; note = 2'-O-methyl ribonucleotide
  modified_base 90: mod_base = OTHER; note = 2'-O-methyl ribonucleotide
  modified_base 91: mod_base = OTHER; note = 2'-O-methyl ribonucleotide
  modified_base 92: mod_base = OTHER; note = 2'-O-methyl ribonucleotide
  modified_base 93: mod_base = OTHER; note = 2'-O-methyl ribonucleotide
  modified_base 94: mod_base = OTHER; note = 2'-O-methyl ribonucleotide
  modified_base 95: mod_base = OTHER; note = 2'-O-methyl ribonucleotide
  modified_base 96: mod_base = OTHER; note = 2'-O-methyl ribonucleotide
  modified_base 97: mod_base = OTHER; note = 2'-O-methyl ribonucleotide
  modified_base 98: mod_base = OTHER; note = 2'-O-methyl ribonucleotide
  modified_base 99: mod_base = OTHER; note = 2'-O-methyl ribonucleotide
  modified_base 100: mod_base = OTHER; note = 2'-O-methyl ribonucleotide
  modified_base 1..4: mod_base = OTHER; note = phosphorothioate linkage
  modified_base 97..100: mod_base = OTHER; note = phosphorothioate linkage

SEQ ID NO: 2257 - RNA, 100 nt, synthetic construct; identical to SEQ ID NO: 253
  source 1..100: mol_type = other RNA
  modified_base 1: mod_base = OTHER; note = 2'-O-methyl ribonucleotide
  modified_base 2: mod_base = OTHER; note = 2'-O-methyl ribonucleotide
  modified_base 3: mod_base = OTHER; note = 2'-O-methyl ribonucleotide
  modified_base 98: mod_base = OTHER; note = 2'-O-methyl ribonucleotide
  modified_base 99: mod_base = OTHER; note = 2'-O-methyl ribonucleotide
  modified_base 100: mod_base = OTHER; note = 2'-O-methyl ribonucleotide
  modified_base 1..4: mod_base = OTHER; note = phosphorothioate linkage
  modified_base 97..100: mod_base = OTHER; note = phosphorothioate linkage

SEQ ID NO: 2258 - RNA, 100 nt, synthetic construct; identical to SEQ ID NO: 253
  source 1..100: mol_type = other RNA
  modified_base 1: mod_base = OTHER; note = 2'-O-methyl ribonucleotide
  modified_base 2: mod_base = OTHER; note = 2'-O-methyl ribonucleotide
  modified_base 3: mod_base = OTHER; note = 2'-O-methyl ribonucleotide
  modified_base 5: mod_base = OTHER; note = 2'-O-methyl ribonucleotide
  modified_base 29: mod_base = OTHER; note = 2'-O-methyl ribonucleotide
  modified_base 30: mod_base = OTHER; note = 2'-O-methyl ribonucleotide
  modified_base 31: mod_base = OTHER; note = 2'-O-methyl ribonucleotide
  modified_base 32: mod_base = OTHER; note = 2'-O-methyl ribonucleotide
  modified_base 33: mod_base = OTHER; note = 2'-O-methyl ribonucleotide
  modified_base 34: mod_base = OTHER; note = 2'-O-methyl ribonucleotide
  modified_base 35: mod_base = OTHER; note = 2'-O-methyl ribonucleotide
  modified_base 36: mod_base = OTHER; note = 2'-O-methyl ribonucleotide
  modified_base 37: mod_base = OTHER; note = 2'-O-methyl ribonucleotide
  modified_base 38: mod_base = OTHER; note = 2'-O-methyl ribonucleotide
  modified_base 39: mod_base = OTHER; note = 2'-O-methyl ribonucleotide
  modified_base 40: mod_base = OTHER; note = 2'-O-methyl ribonucleotide
  modified_base 69: mod_base = OTHER; note = 2'-O-methyl ribonucleotide
  modified_base 70: mod_base = OTHER; note = 2'-O-methyl ribonucleotide
  modified_base 71: mod_base = OTHER; note = 2'-O-methyl ribonucleotide
  modified_base 72: mod_base = OTHER; note = 2'-O-methyl ribonucleotide
  modified_base 73: mod_base = OTHER; note = 2'-O-methyl ribonucleotide
  modified_base 74: mod_base = OTHER; note = 2'-O-methyl ribonucleotide
  modified_base 75: mod_base = OTHER; note = 2'-O-methyl ribonucleotide
  modified_base 76: mod_base = OTHER; note = 2'-O-methyl ribonucleotide
  modified_base 77: mod_base = OTHER; note = 2'-O-methyl ribonucleotide
  modified_base 78: mod_base = OTHER; note = 2'-O-methyl ribonucleotide
  modified_base 79: mod_base = OTHER; note = 2'-O-methyl ribonucleotide
  modified_base 80: mod_base = OTHER; note = 2'-O-methyl ribonucleotide
  modified_base 81: mod_base = OTHER; note = 2'-O-methyl ribonucleotide
  modified_base 82: mod_base = OTHER; note = 2'-O-methyl ribonucleotide
  modified_base 83: mod_base = OTHER; note = 2'-O-methyl ribonucleotide
  modified_base 84: mod_base = OTHER; note = 2'-O-methyl ribonucleotide
  modified_base 85: mod_base = OTHER; note = 2'-O-methyl ribonucleotide
  modified_base 86: mod_base = OTHER; note = 2'-O-methyl ribonucleotide
  modified_base 87: mod_base = OTHER; note = 2'-O-methyl ribonucleotide
  modified_base 88: mod_base = OTHER; note = 2'-O-methyl ribonucleotide
  modified_base 89: mod_base = OTHER; note = 2'-O-methyl ribonucleotide
  modified_base 90: mod_base = OTHER; note = 2'-O-methyl ribonucleotide
  modified_base 91: mod_base = OTHER; note = 2'-O-methyl ribonucleotide
  modified_base 92: mod_base = OTHER; note = 2'-O-methyl ribonucleotide
  modified_base 93: mod_base = OTHER; note = 2'-O-methyl ribonucleotide
  modified_base 94: mod_base = OTHER; note = 2'-O-methyl ribonucleotide
  modified_base 95: mod_base = OTHER; note = 2'-O-methyl ribonucleotide
  modified_base 96: mod_base = OTHER; note = 2'-O-methyl ribonucleotide
  modified_base 97: mod_base = OTHER; note = 2'-O-methyl ribonucleotide
  modified_base 98: mod_base = OTHER; note = 2'-O-methyl ribonucleotide
  modified_base 99: mod_base = OTHER; note = 2'-O-methyl ribonucleotide
  modified_base 100: mod_base = OTHER; note = 2'-O-methyl ribonucleotide
  modified_base 1..4: mod_base = OTHER; note = phosphorothioate linkage
  modified_base 97..100: mod_base = OTHER; note = phosphorothioate linkage

SEQ ID NO: 2259 - RNA, 100 nt, synthetic construct; identical to SEQ ID NO: 253
  source 1..100: mol_type = other RNA
  modified_base 1: mod_base = OTHER; note = 2'-O-methyl ribonucleotide
  modified_base 2: mod_base = OTHER; note = 2'-O-methyl ribonucleotide
  modified_base 3: mod_base = OTHER; note = 2'-O-methyl ribonucleotide
  modified_base 11: mod_base = OTHER; note = 2'-O-methyl ribonucleotide
  modified_base 29: mod_base = OTHER; note = 2'-O-methyl ribonucleotide
  modified_base 30: mod_base = OTHER; note = 2'-O-methyl ribonucleotide
  modified_base 31: mod_base = OTHER; note = 2'-O-methyl ribonucleotide
  modified_base 32: mod_base = OTHER; note = 2'-O-methyl ribonucleotide
  modified_base 33: mod_base = OTHER; note = 2'-O-methyl ribonucleotide
  modified_base 34: mod_base = OTHER; note = 2'-O-methyl ribonucleotide
  modified_base 35: mod_base = OTHER; note = 2'-O-methyl ribonucleotide
  modified_base 36: mod_base = OTHER; note = 2'-O-methyl ribonucleotide
  modified_base 37: mod_base = OTHER; note = 2'-O-methyl ribonucleotide
  modified_base 38: mod_base = OTHER; note = 2'-O-methyl ribonucleotide
  modified_base 39: mod_base = OTHER; note = 2'-O-methyl ribonucleotide
  modified_base 40: mod_base = OTHER; note = 2'-O-methyl ribonucleotide
  modified_base 69: mod_base = OTHER; note = 2'-O-methyl ribonucleotide
  modified_base 70: mod_base = OTHER; note = 2'-O-methyl ribonucleotide
  modified_base 71: mod_base = OTHER; note = 2'-O-methyl ribonucleotide
  modified_base 72: mod_base = OTHER; note = 2'-O-methyl ribonucleotide
  modified_base 73: mod_base = OTHER; note = 2'-O-methyl ribonucleotide
  modified_base 74: mod_base = OTHER; note = 2'-O-methyl ribonucleotide
  modified_base 75: mod_base = OTHER; note = 2'-O-methyl ribonucleotide
  modified_base 76: mod_base = OTHER; note = 2'-O-methyl ribonucleotide
  modified_base 77: mod_base = OTHER; note = 2'-O-methyl ribonucleotide
  modified_base 78: mod_base = OTHER; note = 2'-O-methyl ribonucleotide
  modified_base 79: mod_base = OTHER; note = 2'-O-methyl ribonucleotide
  modified_base 80: mod_base = OTHER; note = 2'-O-methyl ribonucleotide
  modified_base 81: mod_base = OTHER; note = 2'-O-methyl ribonucleotide
  modified_base 82: mod_base = OTHER; note = 2'-O-methyl ribonucleotide
  modified_base 83: mod_base = OTHER; note = 2'-O-methyl ribonucleotide
  modified_base 84: mod_base = OTHER; note = 2'-O-methyl ribonucleotide
  modified_base 85: mod_base = OTHER; note = 2'-O-methyl ribonucleotide
  modified_base 86: mod_base = OTHER; note = 2'-O-methyl ribonucleotide
  modified_base 87: mod_base = OTHER; note = 2'-O-methyl ribonucleotide
  modified_base 88: mod_base = OTHER; note = 2'-O-methyl ribonucleotide
  modified_base 89: mod_base = OTHER; note = 2'-O-methyl ribonucleotide
  modified_base 90: mod_base = OTHER; note = 2'-O-methyl ribonucleotide
  modified_base 91: mod_base = OTHER; note = 2'-O-methyl ribonucleotide
  modified_base 92: mod_base = OTHER; note = 2'-O-methyl ribonucleotide
  modified_base 93: mod_base = OTHER; note = 2'-O-methyl ribonucleotide
  modified_base 94: mod_base = OTHER; note = 2'-O-methyl ribonucleotide
  modified_base 95: mod_base = OTHER; note = 2'-O-methyl ribonucleotide
  modified_base 96: mod_base = OTHER; note = 2'-O-methyl ribonucleotide
  modified_base 97: mod_base = OTHER; note = 2'-O-methyl ribonucleotide
  modified_base 98: mod_base = OTHER; note = 2'-O-methyl ribonucleotide
  modified_base 99: mod_base = OTHER; note = 2'-O-methyl ribonucleotide
  modified_base 100: mod_base = OTHER; note = 2'-O-methyl ribonucleotide
  modified_base 1..4: mod_base = OTHER; note = phosphorothioate linkage
  modified_base 97..100: mod_base = OTHER; note = phosphorothioate linkage

SEQ ID NO: 2260 - RNA, 100 nt, synthetic construct; identical to SEQ ID NO: 253
  source 1..100: mol_type = other RNA
  modified_base 1: mod_base = OTHER; note = 2'-O-methyl ribonucleotide
  modified_base 2: mod_base = OTHER; note = 2'-O-methyl ribonucleotide
  modified_base 3: mod_base = OTHER; note = 2'-O-methyl ribonucleotide
  modified_base 21: mod_base = OTHER; note = 2'-O-methyl ribonucleotide
  modified_base 25: mod_base = OTHER; note = 2'-O-methyl ribonucleotide
  modified_base 28: mod_base = OTHER; note = 2'-O-methyl ribonucleotide
  modified_base 29: mod_base = OTHER; note = 2'-O-methyl ribonucleotide
  modified_base 30: mod_base = OTHER; note = 2'-O-methyl ribonucleotide
  modified_base 31: mod_base = OTHER; note = 2'-O-methyl ribonucleotide
  modified_base 32: mod_base = OTHER; note = 2'-O-methyl ribonucleotide
  modified_base 33: mod_base = OTHER; note = 2'-O-methyl ribonucleotide
  modified_base 34: mod_base = OTHER; note = 2'-O-methyl ribonucleotide
  modified_base 35: mod_base = OTHER; note = 2'-O-methyl ribonucleotide
  modified_base 36: mod_base = OTHER; note = 2'-O-methyl ribonucleotide
  modified_base 37: mod_base = OTHER; note = 2'-O-methyl ribonucleotide
  modified_base 38: mod_base = OTHER; note = 2'-O-methyl ribonucleotide
  modified_base 39: mod_base = OTHER; note = 2'-O-methyl ribonucleotide
  modified_base 40: mod_base = OTHER; note = 2'-O-methyl ribonucleotide
  modified_base 41: mod_base = OTHER; note = 2'-O-methyl ribonucleotide
  modified_base 42: mod_base = OTHER; note = 2'-O-methyl ribonucleotide
  modified_base 46: mod_base = OTHER; note = 2'-O-methyl ribonucleotide
  modified_base 48: mod_base = OTHER; note = 2'-O-methyl ribonucleotide
  modified_base 50: mod_base = OTHER; note = 2'-O-methyl ribonucleotide
  modified_base 52: mod_base = OTHER; note = 2'-O-methyl ribonucleotide
  modified_base 53: mod_base = OTHER; note = 2'-O-methyl ribonucleotide
  modified_base 54: mod_base = OTHER; note = 2'-O-methyl ribonucleotide
  modified_base 55: mod_base = OTHER; note = 2'-O-methyl ribonucleotide
  modified_base 56: mod_base = OTHER; note = 2'-O-methyl ribonucleotide
  modified_base 57: mod_base = OTHER; note = 2'-O-methyl ribonucleotide
  modified_base 60: mod_base = OTHER; note = 2'-O-methyl ribonucleotide
  modified_base 61: mod_base = OTHER; note = 2'-O-methyl ribonucleotide
  modified_base 66: mod_base = OTHER; note = 2'-O-methyl ribonucleotide
  modified_base 67: mod_base = OTHER; note = 2'-O-methyl ribonucleotide
  modified_base 70: mod_base = OTHER; note = 2'-O-methyl ribonucleotide
  modified_base 71: mod_base = OTHER; note = 2'-O-methyl ribonucleotide
  modified_base 72: mod_base = OTHER; note = 2'-O-methyl ribonucleotide
  modified_base 73: mod_base = OTHER; note = 2'-O-methyl ribonucleotide
  modified_base 74: mod_base = OTHER; note = 2'-O-methyl ribonucleotide
  modified_base 75: mod_base = OTHER; note = 2'-O-methyl ribonucleotide
  modified_base 76: mod_base = OTHER; note = 2'-O-methyl ribonucleotide
  modified_base 77: mod_base = OTHER; note = 2'-O-methyl ribonucleotide
  modified_base 78: mod_base = OTHER; note = 2'-O-methyl ribonucleotide
  modified_base 79: mod_base = OTHER; note = 2'-O-methyl ribonucleotide
  modified_base 80: mod_base = OTHER; note = 2'-O-methyl ribonucleotide
  modified_base 81: mod_base = OTHER; note = 2'-O-methyl ribonucleotide
  modified_base 83: mod_base = OTHER; note = 2'-O-methyl ribonucleotide
  modified_base 84: mod_base = OTHER; note = 2'-O-methyl ribonucleotide
  modified_base 85: mod_base = OTHER; note = 2'-O-methyl ribonucleotide
  modified_base 86: mod_base = OTHER; note = 2'-O-methyl ribonucleotide
  modified_base 87: mod_base = OTHER; note = 2'-O-methyl ribonucleotide
  modified_base 88: mod_base = OTHER; note = 2'-O-methyl ribonucleotide
  modified_base 89: mod_base = OTHER; note = 2'-O-methyl ribonucleotide
  modified_base 90: mod_base = OTHER; note = 2'-O-methyl ribonucleotide
  modified_base 91: mod_base = OTHER; note = 2'-O-methyl ribonucleotide
  modified_base 92: mod_base = OTHER; note = 2'-O-methyl ribonucleotide
  modified_base 93: mod_base = OTHER; note = 2'-O-methyl ribonucleotide
  modified_base 94: mod_base = OTHER; note = 2'-O-methyl ribonucleotide
  modified_base 95: mod_base = OTHER; note = 2'-O-methyl ribonucleotide
  modified_base 96: mod_base = OTHER; note = 2'-O-methyl ribonucleotide
  modified_base 97: mod_base = OTHER; note = 2'-O-methyl ribonucleotide
  modified_base 98: mod_base = OTHER; note = 2'-O-methyl ribonucleotide
  modified_base 99: mod_base = OTHER; note = 2'-O-methyl ribonucleotide
  modified_base 100: mod_base = OTHER; note = 2'-O-methyl ribonucleotide
  modified_base 1..4: mod_base = OTHER; note = phosphorothioate linkage
  modified_base 97..100: mod_base = OTHER; note = phosphorothioate linkage

SEQ ID NO: 2261 - RNA, 100 nt, synthetic construct; identical to SEQ ID NO: 253
  source 1..100: mol_type = other RNA
  modified_base 1: mod_base = OTHER; note = 2'-O-methyl ribonucleotide
  modified_base 2: mod_base = OTHER; note = 2'-O-methyl ribonucleotide
  modified_base 3: mod_base = OTHER; note = 2'-O-methyl ribonucleotide
  modified_base 21: mod_base = OTHER; note = 2'-O-methyl ribonucleotide
  modified_base 28: mod_base = OTHER; note = 2'-O-methyl ribonucleotide
  modified_base 29: mod_base = OTHER; note = 2'-O-methyl ribonucleotide
  modified_base 30: mod_base = OTHER; note = 2'-O-methyl ribonucleotide
  modified_base 31: mod_base = OTHER; note = 2'-O-methyl ribonucleotide
  modified_base 32: mod_base = OTHER; note = 2'-O-methyl ribonucleotide
  modified_base 33: mod_base = OTHER; note = 2'-O-methyl ribonucleotide
  modified_base 34: mod_base = OTHER; note = 2'-O-methyl ribonucleotide
  modified_base 35: mod_base = OTHER; note = 2'-O-methyl ribonucleotide
  modified_base 36: mod_base = OTHER; note = 2'-O-methyl ribonucleotide
  modified_base 37: mod_base = OTHER; note = 2'-O-methyl ribonucleotide
  modified_base 38: mod_base = OTHER; note = 2'-O-methyl ribonucleotide
  modified_base 39: mod_base = OTHER; note = 2'-O-methyl ribonucleotide
  modified_base 40: mod_base = OTHER; note = 2'-O-methyl ribonucleotide
  modified_base 41: mod_base = OTHER; note = 2'-O-methyl ribonucleotide
  modified_base 42: mod_base = OTHER; note = 2'-O-methyl ribonucleotide
  modified_base 46: mod_base = OTHER; note = 2'-O-methyl ribonucleotide
  modified_base 48: mod_base = OTHER; note = 2'-O-methyl ribonucleotide
  modified_base 50: mod_base = OTHER; note = 2'-O-methyl ribonucleotide
  modified_base 52: mod_base = OTHER; note = 2'-O-methyl ribonucleotide
  modified_base 53: mod_base = OTHER; note = 2'-O-methyl ribonucleotide
  modified_base 54: mod_base = OTHER; note = 2'-O-methyl ribonucleotide
  modified_base 55: mod_base = OTHER; note = 2'-O-methyl ribonucleotide
  modified_base 56: mod_base = OTHER; note = 2'-O-methyl ribonucleotide
  modified_base 57: mod_base = OTHER; note = 2'-O-methyl ribonucleotide
  modified_base 60: mod_base = OTHER; note = 2'-O-methyl ribonucleotide
  modified_base 61: mod_base = OTHER; note = 2'-O-methyl ribonucleotide
  modified_base 64: mod_base = OTHER; note = 2'-O-methyl ribonucleotide
  modified_base 66: mod_base = OTHER; note = 2'-O-methyl ribonucleotide
  modified_base 67: mod_base = OTHER; note = 2'-O-methyl ribonucleotide
  modified_base 70: mod_base = OTHER; note = 2'-O-methyl ribonucleotide
  modified_base 71: mod_base = OTHER; note = 2'-O-methyl ribonucleotide
  modified_base 72: mod_base = OTHER; note = 2'-O-methyl ribonucleotide
  modified_base 73: mod_base = OTHER; note = 2'-O-methyl ribonucleotide
  modified_base 74: mod_base = OTHER; note = 2'-O-methyl ribonucleotide
  modified_base 75: mod_base = OTHER; note = 2'-O-methyl ribonucleotide
  modified_base 76: mod_base = OTHER; note = 2'-O-methyl ribonucleotide
  modified_base 77: mod_base = OTHER; note = 2'-O-methyl ribonucleotide
  modified_base 78: mod_base = OTHER; note = 2'-O-methyl ribonucleotide
  modified_base 79: mod_base = OTHER; note = 2'-O-methyl ribonucleotide
  modified_base 80: mod_base = OTHER; note = 2'-O-methyl ribonucleotide
  modified_base 81: mod_base = OTHER; note = 2'-O-methyl ribonucleotide
  modified_base 83: mod_base = OTHER; note = 2'-O-methyl ribonucleotide
  modified_base 84: mod_base = OTHER; note = 2'-O-methyl ribonucleotide
  modified_base 85: mod_base = OTHER; note = 2'-O-methyl ribonucleotide
  modified_base 86: mod_base = OTHER; note = 2'-O-methyl ribonucleotide
  modified_base 87: mod_base = OTHER; note = 2'-O-methyl ribonucleotide
  modified_base 88: mod_base = OTHER; note = 2'-O-methyl ribonucleotide
  modified_base 89: mod_base = OTHER; note = 2'-O-methyl ribonucleotide
  modified_base 90: mod_base = OTHER; note = 2'-O-methyl ribonucleotide
  modified_base 91: mod_base = OTHER; note = 2'-O-methyl ribonucleotide
  modified_base 92: mod_base = OTHER; note = 2'-O-methyl ribonucleotide
  modified_base 93: mod_base = OTHER; note = 2'-O-methyl ribonucleotide
  modified_base 94: mod_base = OTHER; note = 2'-O-methyl ribonucleotide
  modified_base 95: mod_base = OTHER; note = 2'-O-methyl ribonucleotide
  modified_base 96: mod_base = OTHER; note = 2'-O-methyl ribonucleotide
  modified_base 97: mod_base = OTHER; note = 2'-O-methyl ribonucleotide
  modified_base 98: mod_base = OTHER; note = 2'-O-methyl ribonucleotide
  modified_base 99: mod_base = OTHER; note = 2'-O-methyl ribonucleotide
  modified_base 100: mod_base = OTHER; note = 2'-O-methyl ribonucleotide
  modified_base 1..4: mod_base = OTHER; note = phosphorothioate linkage
  modified_base 97..100: mod_base = OTHER; note = phosphorothioate linkage

SEQ ID NO: 2262 - RNA, 100 nt, synthetic construct; identical to SEQ ID NO: 253
  source 1..100: mol_type = other RNA
  modified_base 1: mod_base = OTHER; note = 2'-O-methyl ribonucleotide
  modified_base 2: mod_base = OTHER; note = 2'-O-methyl ribonucleotide
  modified_base 3: mod_base = OTHER; note = 2'-O-methyl ribonucleotide
  modified_base 21: mod_base = OTHER; note = 2'-O-methyl ribonucleotide
  modified_base 25: mod_base = OTHER; note = 2'-O-methyl ribonucleotide
  modified_base 28: mod_base = OTHER; note = 2'-O-methyl ribonucleotide
  modified_base 29: mod_base = OTHER; note = 2'-O-methyl ribonucleotide
  modified_base 30: mod_base = OTHER; note = 2'-O-methyl ribonucleotide
  modified_base 31: mod_base = OTHER; note = 2'-O-methyl ribonucleotide
  modified_base 32: mod_base = OTHER; note = 2'-O-methyl ribonucleotide
  modified_base 33: mod_base = OTHER; note = 2'-O-methyl ribonucleotide
  modified_base 34: mod_base = OTHER; note = 2'-O-methyl ribonucleotide
  modified_base 35: mod_base = OTHER; note = 2'-O-methyl ribonucleotide
  modified_base 36: mod_base = OTHER; note = 2'-O-methyl ribonucleotide
  modified_base 37: mod_base = OTHER; note = 2'-O-methyl ribonucleotide
  modified_base 38: mod_base = OTHER; note = 2'-O-methyl ribonucleotide
  modified_base 39: mod_base = OTHER; note = 2'-O-methyl ribonucleotide
  modified_base 40: mod_base = OTHER; note = 2'-O-methyl ribonucleotide
  modified_base 41: mod_base = OTHER; note = 2'-O-methyl ribonucleotide
  modified_base 42: mod_base = OTHER; note = 2'-O-methyl ribonucleotide
  modified_base 46: mod_base = OTHER; note = 2'-O-methyl ribonucleotide
  modified_base 48: mod_base = OTHER; note = 2'-O-methyl ribonucleotide
  modified_base 50: mod_base = OTHER; note = 2'-O-methyl ribonucleotide
  modified_base 52: mod_base = OTHER; note = 2'-O-methyl ribonucleotide
  modified_base 53: mod_base = OTHER; note = 2'-O-methyl ribonucleotide
  modified_base 54: mod_base = OTHER; note = 2'-O-methyl ribonucleotide
  modified_base 55: mod_base = OTHER; note = 2'-O-methyl ribonucleotide
  modified_base 56: mod_base = OTHER; note = 2'-O-methyl ribonucleotide
  modified_base 57: mod_base = OTHER; note = 2'-O-methyl ribonucleotide
  modified_base 60: mod_base = OTHER; note = 2'-O-methyl ribonucleotide
  modified_base 61: mod_base = OTHER; note = 2'-O-methyl ribonucleotide
  modified_base 64: mod_base = OTHER; note = 2'-O-methyl ribonucleotide
  modified_base 66: mod_base = OTHER; note = 2'-O-methyl ribonucleotide
  modified_base 67: mod_base = OTHER; note = 2'-O-methyl ribonucleotide
  modified_base 70: mod_base = OTHER; note = 2'-O-methyl ribonucleotide
  modified_base 71: mod_base = OTHER; note = 2'-O-methyl ribonucleotide
  modified_base 72: mod_base = OTHER; note = 2'-O-methyl ribonucleotide
  modified_base 73: mod_base = OTHER; note = 2'-O-methyl ribonucleotide
  modified_base 74: mod_base = OTHER; note = 2'-O-methyl ribonucleotide
  modified_base 75: mod_base = OTHER; note = 2'-O-methyl ribonucleotide
  modified_base 76: mod_base = OTHER; note = 2'-O-methyl ribonucleotide
  modified_base 77: mod_base = OTHER; note = 2'-O-methyl ribonucleotide
  modified_base 78: mod_base = OTHER; note = 2'-O-methyl ribonucleotide
  modified_base 79: mod_base = OTHER; note = 2'-O-methyl ribonucleotide
  modified_base 80: mod_base = OTHER; note = 2'-O-methyl ribonucleotide
  modified_base 81: mod_base = OTHER; note = 2'-O-methyl ribonucleotide
  modified_base 83: mod_base = OTHER; note = 2'-O-methyl ribonucleotide
  modified_base 84: mod_base = OTHER; note = 2'-O-methyl ribonucleotide
  modified_base 85: mod_base = OTHER; note = 2'-O-methyl ribonucleotide
  modified_base 86: mod_base = OTHER; note = 2'-O-methyl ribonucleotide
  modified_base 87: mod_base = OTHER; note = 2'-O-methyl ribonucleotide
  modified_base 88: mod_base = OTHER; note = 2'-O-methyl ribonucleotide
  modified_base 89: mod_base = OTHER; note = 2'-O-methyl ribonucleotide
  modified_base 90: mod_base = OTHER; note = 2'-O-methyl ribonucleotide
  modified_base 91: mod_base = OTHER; note = 2'-O-methyl ribonucleotide
  modified_base 92: mod_base = OTHER; note = 2'-O-methyl ribonucleotide
  modified_base 93: mod_base = OTHER; note = 2'-O-methyl ribonucleotide
  modified_base 94: mod_base = OTHER; note = 2'-O-methyl ribonucleotide
  modified_base 95: mod_base = OTHER; note = 2'-O-methyl ribonucleotide
  modified_base 96: mod_base = OTHER; note = 2'-O-methyl ribonucleotide
  modified_base 97: mod_base = OTHER; note = 2'-O-methyl ribonucleotide
  modified_base 98: mod_base = OTHER; note = 2'-O-methyl ribonucleotide
  modified_base 99: mod_base = OTHER; note = 2'-O-methyl ribonucleotide
  modified_base 100: mod_base = OTHER; note = 2'-O-methyl ribonucleotide
  modified_base 1..4: mod_base = OTHER; note = phosphorothioate linkage
  modified_base 97..100: mod_base = OTHER; note = phosphorothioate linkage

SEQ ID NO: 2263 - RNA, 100 nt, synthetic construct; identical to SEQ ID NO: 253
  source 1..100: mol_type = other RNA
  modified_base 1: mod_base = OTHER; note = 2'-O-methyl ribonucleotide
  modified_base 2: mod_base = OTHER; note = 2'-O-methyl ribonucleotide
  modified_base 3: mod_base = OTHER; note = 2'-O-methyl ribonucleotide
  modified_base 21: mod_base = OTHER; note = 2'-O-methyl ribonucleotide
  modified_base 25: mod_base = OTHER; note = 2'-O-methyl ribonucleotide
  modified_base 28: mod_base = OTHER; note = 2'-O-methyl ribonucleotide
  modified_base 29: mod_base = OTHER; note = 2'-O-methyl ribonucleotide
  modified_base 30: mod_base = OTHER; note = 2'-O-methyl ribonucleotide
  modified_base 31: mod_base = OTHER; note = 2'-O-methyl ribonucleotide
  modified_base 32: mod_base = OTHER; note = 2'-O-methyl ribonucleotide
  modified_base 33: mod_base = OTHER; note = 2'-O-methyl ribonucleotide
  modified_base 34: mod_base = OTHER; note = 2'-O-methyl ribonucleotide
  modified_base 35: mod_base = OTHER; note = 2'-O-methyl ribonucleotide
  modified_base 36: mod_base = OTHER; note = 2'-O-methyl ribonucleotide
  modified_base 37: mod_base = OTHER; note = 2'-O-methyl ribonucleotide
  modified_base 38: mod_base = OTHER; note = 2'-O-methyl ribonucleotide
  modified_base 39: mod_base = OTHER; note = 2'-O-methyl ribonucleotide
  modified_base 40: mod_base = OTHER; note = 2'-O-methyl ribonucleotide
  modified_base 41: mod_base = OTHER; note = 2'-O-methyl ribonucleotide
  modified_base 42: mod_base = OTHER; note = 2'-O-methyl ribonucleotide
  modified_base 45: mod_base = OTHER; note = 2'-O-methyl ribonucleotide
  modified_base 46: mod_base = OTHER; note = 2'-O-methyl ribonucleotide
  modified_base 48: mod_base = OTHER; note = 2'-O-methyl ribonucleotide
  modified_base 50: mod_base = OTHER; note = 2'-O-methyl ribonucleotide
  modified_base 52: mod_base = OTHER; note = 2'-O-methyl ribonucleotide
  modified_base 53: mod_base = OTHER; note = 2'-O-methyl ribonucleotide
  modified_base 54: mod_base = OTHER; note = 2'-O-methyl ribonucleotide
  modified_base 55: mod_base = OTHER; note = 2'-O-methyl ribonucleotide
  modified_base 56: mod_base = OTHER; note = 2'-O-methyl ribonucleotide
  modified_base 57: mod_base = OTHER; note = 2'-O-methyl ribonucleotide
  modified_base 60: mod_base = OTHER; note = 2'-O-methyl ribonucleotide
  modified_base 61: mod_base = OTHER; note = 2'-O-methyl ribonucleotide
  modified_base 66: mod_base = OTHER; note = 2'-O-methyl ribonucleotide
  modified_base 67: mod_base = OTHER; note = 2'-O-methyl ribonucleotide
  modified_base 70: mod_base = OTHER; note = 2'-O-methyl ribonucleotide
  modified_base 71: mod_base = OTHER; note = 2'-O-methyl ribonucleotide
  modified_base 72: mod_base = OTHER; note = 2'-O-methyl ribonucleotide
  modified_base 73: mod_base = OTHER; note = 2'-O-methyl ribonucleotide
  modified_base 74: mod_base = OTHER; note = 2'-O-methyl ribonucleotide
  modified_base 75: mod_base = OTHER; note = 2'-O-methyl ribonucleotide
  modified_base 76: mod_base = OTHER; note = 2'-O-methyl ribonucleotide
  modified_base 77: mod_base = OTHER; note = 2'-O-methyl ribonucleotide
  modified_base 78: mod_base = OTHER; note = 2'-O-methyl ribonucleotide
  modified_base 79: mod_base = OTHER; note = 2'-O-methyl ribonucleotide
  modified_base 80: mod_base = OTHER; note = 2'-O-methyl ribonucleotide
  modified_base 81: mod_base = OTHER; note = 2'-O-methyl ribonucleotide
  modified_base 83: mod_base = OTHER; note = 2'-O-methyl ribonucleotide
  modified_base 84: mod_base = OTHER; note = 2'-O-methyl ribonucleotide
  modified_base 85: mod_base = OTHER; note = 2'-O-methyl ribonucleotide
  modified_base 86: mod_base = OTHER; note = 2'-O-methyl ribonucleotide
  modified_base 87: mod_base = OTHER; note = 2'-O-methyl ribonucleotide
  modified_base 88: mod_base = OTHER; note = 2'-O-methyl ribonucleotide
  modified_base 89: mod_base = OTHER; note = 2'-O-methyl ribonucleotide
  modified_base 90: mod_base = OTHER; note = 2'-O-methyl ribonucleotide
  modified_base 91: mod_base = OTHER; note = 2'-O-methyl ribonucleotide
  modified_base 92: mod_base = OTHER; note = 2'-O-methyl ribonucleotide
  modified_base 93: mod_base = OTHER; note = 2'-O-methyl ribonucleotide
  modified_base 94: mod_base = OTHER; note = 2'-O-methyl ribonucleotide
  modified_base 95: mod_base = OTHER; note = 2'-O-methyl ribonucleotide
  modified_base 96: mod_base = OTHER; note = 2'-O-methyl ribonucleotide
  modified_base 97: mod_base = OTHER; note = 2'-O-methyl ribonucleotide
  modified_base 98: mod_base = OTHER; note = 2'-O-methyl ribonucleotide
  modified_base 99: mod_base = OTHER; note = 2'-O-methyl ribonucleotide
  modified_base 100: mod_base = OTHER; note = 2'-O-methyl ribonucleotide
  modified_base 1..4: mod_base = OTHER; note = phosphorothioate linkage
  modified_base 97..100: mod_base = OTHER; note = phosphorothioate linkage

SEQ ID NO: 2264 - RNA, 100 nt, synthetic construct; identical to SEQ ID NO: 253
  source 1..100: mol_type = other RNA
  modified_base 1: mod_base = OTHER; note = 2'-O-methyl ribonucleotide
  modified_base 2: mod_base = OTHER; note = 2'-O-methyl ribonucleotide
  modified_base 3: mod_base = OTHER; note = 2'-O-methyl ribonucleotide
  modified_base 21: mod_base = OTHER; note = 2'-O-methyl ribonucleotide
  modified_base 28: mod_base = OTHER; note = 2'-O-methyl ribonucleotide
  modified_base 29: mod_base = OTHER; note = 2'-O-methyl ribonucleotide
  modified_base 30: mod_base = OTHER; note = 2'-O-methyl ribonucleotide
  modified_base 31: mod_base = OTHER; note = 2'-O-methyl ribonucleotide
  modified_base 32: mod_base = OTHER; note = 2'-O-methyl ribonucleotide
  modified_base 33: mod_base = OTHER; note = 2'-O-methyl ribonucleotide
  modified_base 34: mod_base = OTHER; note = 2'-O-methyl ribonucleotide
  modified_base 35: mod_base = OTHER; note = 2'-O-methyl ribonucleotide
  modified_base 36: mod_base = OTHER; note = 2'-O-methyl ribonucleotide
  modified_base 37: mod_base = OTHER; note = 2'-O-methyl ribonucleotide
  modified_base 38: mod_base = OTHER; note = 2'-O-methyl ribonucleotide
  modified_base 39: mod_base = OTHER; note = 2'-O-methyl ribonucleotide
  modified_base 40: mod_base = OTHER; note = 2'-O-methyl ribonucleotide
  modified_base 41: mod_base = OTHER; note = 2'-O-methyl ribonucleotide
  modified_base 42: mod_base = OTHER; note = 2'-O-methyl ribonucleotide
  modified_base 45: mod_base = OTHER; note = 2'-O-methyl ribonucleotide
  modified_base 46: mod_base = OTHER; note = 2'-O-methyl ribonucleotide
  modified_base 48: mod_base = OTHER; note = 2'-O-methyl ribonucleotide
  modified_base 50: mod_base = OTHER; note = 2'-O-methyl ribonucleotide
  modified_base 52: mod_base = OTHER; note = 2'-O-methyl ribonucleotide
  modified_base 53: mod_base = OTHER; note = 2'-O-methyl ribonucleotide
  modified_base 54: mod_base = OTHER; note = 2'-O-methyl ribonucleotide
  modified_base 55: mod_base = OTHER; note = 2'-O-methyl ribonucleotide
  modified_base 56: mod_base = OTHER; note = 2'-O-methyl ribonucleotide
  modified_base 57: mod_base = OTHER; note = 2'-O-methyl ribonucleotide
  modified_base 60: mod_base = OTHER; note = 2'-O-methyl ribonucleotide
  modified_base 61: mod_base = OTHER; note = 2'-O-methyl ribonucleotide
  modified_base 64: mod_base = OTHER; note = 2'-O-methyl ribonucleotide
  modified_base 66: mod_base = OTHER; note = 2'-O-methyl ribonucleotide
  modified_base 67: mod_base = OTHER; note = 2'-O-methyl ribonucleotide
  modified_base 70: mod_base = OTHER; note = 2'-O-methyl ribonucleotide
  modified_base 71: mod_base = OTHER; note = 2'-O-methyl ribonucleotide
  modified_base 72: mod_base = OTHER; note = 2'-O-methyl ribonucleotide
  modified_base 73: mod_base = OTHER; note = 2'-O-methyl ribonucleotide
  modified_base 74: mod_base = OTHER; note = 2'-O-methyl ribonucleotide
  modified_base 75: mod_base = OTHER; note = 2'-O-methyl ribonucleotide
  modified_base 76: mod_base = OTHER; note = 2'-O-methyl ribonucleotide
  modified_base 77: mod_base = OTHER; note = 2'-O-methyl ribonucleotide
  modified_base 78: mod_base = OTHER; note = 2'-O-methyl ribonucleotide
  modified_base 79: mod_base = OTHER; note = 2'-O-methyl ribonucleotide
  modified_base 80: mod_base = OTHER; note = 2'-O-methyl ribonucleotide
  modified_base 81: mod_base = OTHER; note = 2'-O-methyl ribonucleotide
  modified_base 83: mod_base = OTHER; note = 2'-O-methyl ribonucleotide
  modified_base 84: mod_base = OTHER; note = 2'-O-methyl ribonucleotide
  modified_base 85: mod_base = OTHER; note = 2'-O-methyl ribonucleotide
  modified_base 86: mod_base = OTHER; note = 2'-O-methyl ribonucleotide
  modified_base 87: mod_base = OTHER; note = 2'-O-methyl ribonucleotide
  modified_base 88: mod_base = OTHER; note = 2'-O-methyl ribonucleotide
  modified_base 89: mod_base = OTHER; note = 2'-O-methyl ribonucleotide
  modified_base 90: mod_base = OTHER; note = 2'-O-methyl ribonucleotide
  modified_base 91: mod_base = OTHER; note = 2'-O-methyl ribonucleotide
  modified_base 92: mod_base = OTHER; note = 2'-O-methyl ribonucleotide
  modified_base 93: mod_base = OTHER; note = 2'-O-methyl ribonucleotide
  modified_base 94: mod_base = OTHER; note = 2'-O-methyl ribonucleotide
  modified_base 95: mod_base = OTHER; note = 2'-O-methyl ribonucleotide
  modified_base 96: mod_base = OTHER; note = 2'-O-methyl ribonucleotide
  modified_base 97: mod_base = OTHER; note = 2'-O-methyl ribonucleotide
  modified_base 98: mod_base = OTHER; note = 2'-O-methyl ribonucleotide
  modified_base 99: mod_base = OTHER; note = 2'-O-methyl ribonucleotide
  modified_base 100: mod_base = OTHER; note = 2'-O-methyl ribonucleotide
  modified_base 1..4: mod_base = OTHER; note = phosphorothioate linkage
  modified_base 97..100: mod_base = OTHER; note = phosphorothioate linkage

SEQ ID NO: 2265 - RNA, 100 nt, synthetic construct; identical to SEQ ID NO: 253
  source 1..100: mol_type = other RNA
  modified_base 1: mod_base = OTHER; note = 2'-O-methyl ribonucleotide
  modified_base 2: mod_base = OTHER; note = 2'-O-methyl ribonucleotide
  modified_base 3: mod_base = OTHER; note = 2'-O-methyl ribonucleotide
  modified_base 21: mod_base = OTHER; note = 2'-O-methyl ribonucleotide
  modified_base 25: mod_base = OTHER; note = 2'-O-methyl ribonucleotide
  modified_base 28: mod_base = OTHER; note = 2'-O-methyl ribonucleotide
  modified_base 29: mod_base = OTHER; note = 2'-O-methyl ribonucleotide
  modified_base 30: mod_base = OTHER; note = 2'-O-methyl ribonucleotide
  modified_base 31: mod_base = OTHER; note = 2'-O-methyl ribonucleotide
  modified_base 32: mod_base = OTHER; note = 2'-O-methyl ribonucleotide
  modified_base 33: mod_base = OTHER; note = 2'-O-methyl ribonucleotide
  modified_base 34: mod_base = OTHER; note = 2'-O-methyl ribonucleotide
  modified_base 35: mod_base = OTHER; note = 2'-O-methyl ribonucleotide
  modified_base 36: mod_base = OTHER; note = 2'-O-methyl ribonucleotide
  modified_base 37: mod_base = OTHER; note = 2'-O-methyl ribonucleotide
  modified_base 38: mod_base = OTHER; note = 2'-O-methyl ribonucleotide
  modified_base 39: mod_base = OTHER; note = 2'-O-methyl ribonucleotide
  modified_base 40: mod_base = OTHER; note = 2'-O-methyl ribonucleotide
  modified_base 41: mod_base = OTHER; note = 2'-O-methyl ribonucleotide
  modified_base 42: mod_base = OTHER; note = 2'-O-methyl ribonucleotide
  modified_base 45: mod_base = OTHER; note = 2'-O-methyl ribonucleotide
  modified_base 46: mod_base = OTHER; note = 2'-O-methyl ribonucleotide
  modified_base 48: mod_base = OTHER; note = 2'-O-methyl ribonucleotide
  modified_base 50: mod_base = OTHER; note = 2'-O-methyl ribonucleotide
  modified_base 52: mod_base = OTHER; note = 2'-O-methyl ribonucleotide
  modified_base 53: mod_base = OTHER; note = 2'-O-methyl ribonucleotide
  modified_base 54: mod_base = OTHER; note = 2'-O-methyl ribonucleotide
  modified_base 55: mod_base = OTHER; note = 2'-O-methyl ribonucleotide
  modified_base 56: mod_base = OTHER; note = 2'-O-methyl ribonucleotide
  modified_base 57: mod_base = OTHER; note = 2'-O-methyl ribonucleotide
  modified_base 60: mod_base = OTHER; note = 2'-O-methyl ribonucleotide
  modified_base 61: mod_base = OTHER; note = 2'-O-methyl ribonucleotide
  modified_base 64: mod_base = OTHER; note = 2'-O-methyl ribonucleotide
  modified_base 66: mod_base = OTHER; note = 2'-O-methyl ribonucleotide
  modified_base 67: mod_base = OTHER; note = 2'-O-methyl ribonucleotide
  modified_base 70: mod_base = OTHER; note = 2'-O-methyl ribonucleotide
  modified_base 71: mod_base = OTHER; note = 2'-O-methyl ribonucleotide
  modified_base 72: mod_base = OTHER; note = 2'-O-methyl ribonucleotide
  modified_base 73: mod_base = OTHER; note = 2'-O-methyl ribonucleotide
  modified_base 74: mod_base = OTHER; note = 2'-O-methyl ribonucleotide
  modified_base 75: mod_base = OTHER; note = 2'-O-methyl ribonucleotide
  modified_base 76: mod_base = OTHER; note = 2'-O-methyl ribonucleotide
  modified_base 77: mod_base = OTHER; note = 2'-O-methyl ribonucleotide
  modified_base 78: mod_base = OTHER; note = 2'-O-methyl ribonucleotide
  modified_base 79: mod_base = OTHER; note = 2'-O-methyl ribonucleotide
  modified_base 80: mod_base = OTHER; note = 2'-O-methyl ribonucleotide
  modified_base 81: mod_base = OTHER; note = 2'-O-methyl ribonucleotide
  modified_base 83: mod_base = OTHER; note = 2'-O-methyl ribonucleotide
  modified_base 84: mod_base = OTHER; note = 2'-O-methyl ribonucleotide
  modified_base 85: mod_base = OTHER; note = 2'-O-methyl ribonucleotide
  modified_base 86: mod_base = OTHER; note = 2'-O-methyl ribonucleotide
  modified_base 87: mod_base = OTHER; note = 2'-O-methyl ribonucleotide
  modified_base 88: mod_base = OTHER; note = 2'-O-methyl ribonucleotide
  modified_base 89: mod_base = OTHER; note = 2'-O-methyl ribonucleotide
  modified_base 90: mod_base = OTHER; note = 2'-O-methyl ribonucleotide
  modified_base 91: mod_base = OTHER; note = 2'-O-methyl ribonucleotide
  modified_base 92: mod_base = OTHER; note = 2'-O-methyl ribonucleotide
  modified_base 93: mod_base = OTHER; note = 2'-O-methyl ribonucleotide
  modified_base 94: mod_base = OTHER; note = 2'-O-methyl ribonucleotide
  modified_base 95: mod_base = OTHER; note = 2'-O-methyl ribonucleotide
  modified_base 96: mod_base = OTHER; note = 2'-O-methyl ribonucleotide
  modified_base 97: mod_base = OTHER; note = 2'-O-methyl ribonucleotide
  modified_base 98: mod_base = OTHER; note = 2'-O-methyl ribonucleotide
  modified_base 99: mod_base = OTHER; note = 2'-O-methyl ribonucleotide
  modified_base 100: mod_base = OTHER; note = 2'-O-methyl ribonucleotide
  modified_base 1..4: mod_base = OTHER; note = phosphorothioate linkage
  modified_base 97..100: mod_base = OTHER; note = phosphorothioate linkage

SEQ ID NO: 2266 - RNA, 100 nt, synthetic construct; identical to SEQ ID NO: 253
  source 1..100: mol_type = other RNA
  modified_base 1: mod_base = OTHER; note = 2'-O-methyl ribonucleotide
  modified_base 2: mod_base = OTHER; note = 2'-O-methyl ribonucleotide
  modified_base 3: mod_base = OTHER; note = 2'-O-methyl ribonucleotide
  modified_base 6: mod_base = OTHER; note = 2'-O-methyl ribonucleotide
  modified_base 12: mod_base = OTHER; note = 2'-O-methyl ribonucleotide
  modified_base 19: mod_base = OTHER; note = 2'-O-methyl ribonucleotide
  modified_base 21: mod_base = OTHER; note = 2'-O-methyl ribonucleotide
  modified_base 28: mod_base = OTHER; note = 2'-O-methyl ribonucleotide
  modified_base 29: mod_base = OTHER; note = 2'-O-methyl ribonucleotide
  modified_base 30: mod_base = OTHER; note = 2'-O-methyl ribonucleotide
  modified_base 31: mod_base = OTHER; note = 2'-O-methyl ribonucleotide
  modified_base 32: mod_base = OTHER; note = 2'-O-methyl ribonucleotide
  modified_base 33: mod_base = OTHER; note = 2'-O-methyl ribonucleotide
  modified_base 34: mod_base = OTHER; note = 2'-O-methyl ribonucleotide
  modified_base 35: mod_base = OTHER; note = 2'-O-methyl ribonucleotide
  modified_base 36: mod_base = OTHER; note = 2'-O-methyl ribonucleotide
  modified_base 37: mod_base = OTHER; note = 2'-O-methyl ribonucleotide
  modified_base 38: mod_base = OTHER; note = 2'-O-methyl ribonucleotide
  modified_base 39: mod_base = OTHER; note = 2'-O-methyl ribonucleotide
  modified_base 40: mod_base = OTHER; note = 2'-O-methyl ribonucleotide
  modified_base 41: mod_base = OTHER; note = 2'-O-methyl ribonucleotide
  modified_base 42: mod_base = OTHER; note = 2'-O-methyl ribonucleotide
  modified_base 46: mod_base = OTHER; note = 2'-O-methyl ribonucleotide
  modified_base 48: mod_base = OTHER; note = 2'-O-methyl ribonucleotide
  modified_base 50: mod_base = OTHER; note = 2'-O-methyl ribonucleotide
  modified_base 52: mod_base = OTHER; note = 2'-O-methyl ribonucleotide
  modified_base 53: mod_base = OTHER; note = 2'-O-methyl ribonucleotide
  modified_base 54: mod_base = OTHER; note = 2'-O-methyl ribonucleotide
  modified_base 55: mod_base = OTHER; note = 2'-O-methyl ribonucleotide
  modified_base 56: mod_base = OTHER; note = 2'-O-methyl ribonucleotide
  modified_base 57: mod_base = OTHER; note = 2'-O-methyl ribonucleotide
  modified_base 60: mod_base = OTHER; note = 2'-O-methyl ribonucleotide
  modified_base 61: mod_base = OTHER; note = 2'-O-methyl ribonucleotide
  modified_base 66: mod_base = OTHER; note = 2'-O-methyl ribonucleotide
  modified_base 67: mod_base = OTHER; note = 2'-O-methyl ribonucleotide
  modified_base 70: mod_base = OTHER; note = 2'-O-methyl ribonucleotide
  modified_base 71: mod_base = OTHER; note = 2'-O-methyl ribonucleotide
  modified_base 72: mod_base = OTHER; note = 2'-O-methyl ribonucleotide
  modified_base 73: mod_base = OTHER; note = 2'-O-methyl ribonucleotide
  modified_base 74: mod_base = OTHER; note = 2'-O-methyl ribonucleotide
  modified_base 75: mod_base = OTHER; note = 2'-O-methyl ribonucleotide
  modified_base 76: mod_base = OTHER; note = 2'-O-methyl ribonucleotide
  modified_base 77: mod_base = OTHER; note = 2'-O-methyl ribonucleotide
  modified_base 78: mod_base = OTHER; note = 2'-O-methyl ribonucleotide
  modified_base 79: mod_base = OTHER; note = 2'-O-methyl ribonucleotide
  modified_base 80: mod_base = OTHER; note = 2'-O-methyl ribonucleotide
  modified_base 81: mod_base = OTHER; note = 2'-O-methyl ribonucleotide
  modified_base 83: mod_base = OTHER; note = 2'-O-methyl ribonucleotide
  modified_base 84: mod_base = OTHER; note = 2'-O-methyl ribonucleotide
  modified_base 85: mod_base = OTHER; note = 2'-O-methyl ribonucleotide
  modified_base 86: mod_base = OTHER; note = 2'-O-methyl ribonucleotide
  modified_base 87: mod_base = OTHER; note = 2'-O-methyl ribonucleotide
  modified_base 88: mod_base = OTHER; note = 2'-O-methyl ribonucleotide
  modified_base 89: mod_base = OTHER; note = 2'-O-methyl ribonucleotide
  modified_base 90: mod_base = OTHER; note = 2'-O-methyl ribonucleotide
  modified_base 91: mod_base = OTHER; note = 2'-O-methyl ribonucleotide
  modified_base 92: mod_base = OTHER; note = 2'-O-methyl ribonucleotide
  modified_base 93: mod_base = OTHER; note = 2'-O-methyl ribonucleotide
  modified_base 94: mod_base = OTHER; note = 2'-O-methyl ribonucleotide
  modified_base 95: mod_base = OTHER; note = 2'-O-methyl ribonucleotide
  modified_base 96: mod_base = OTHER; note = 2'-O-methyl ribonucleotide
  modified_base 97: mod_base = OTHER; note = 2'-O-methyl ribonucleotide
  modified_base 98: mod_base = OTHER; note = 2'-O-methyl ribonucleotide
  modified_base 99: mod_base = OTHER; note = 2'-O-methyl ribonucleotide
  modified_base 100: mod_base = OTHER; note = 2'-O-methyl ribonucleotide
  modified_base 1..4: mod_base = OTHER; note = phosphorothioate linkage
  modified_base 97..100: mod_base = OTHER; note = phosphorothioate linkage

SEQ ID NO: 2267 - RNA, 101 nt, synthetic construct; identical to SEQ ID NO: 255
  source 1..101: mol_type = other RNA
  modified_base 21: mod_base = OTHER; note = 2'-O-methyl ribonucleotide
  modified_base 28: mod_base = OTHER; note = 2'-O-methyl ribonucleotide
  modified_base 29: mod_base = OTHER; note = 2'-O-methyl ribonucleotide
  modified_base 30: mod_base = OTHER; note = 2'-O-methyl ribonucleotide
  modified_base 31: mod_base = OTHER; note = 2'-O-methyl ribonucleotide
  modified_base 32: mod_base = OTHER; note = 2'-O-methyl ribonucleotide
  modified_base 33: mod_base = OTHER; note = 2'-O-methyl ribonucleotide
  modified_base 34: mod_base = OTHER; note = 2'-O-methyl ribonucleotide
  modified_base 35: mod_base = OTHER; note = 2'-O-methyl ribonucleotide
  modified_base 36: mod_base = OTHER; note = 2'-O-methyl ribonucleotide
  modified_base 37: mod_base = OTHER; note = 2'-O-methyl ribonucleotide
  modified_base 38: mod_base = OTHER; note = 2'-O-methyl ribonucleotide
  modified_base 39: mod_base = OTHER; note = 2'-O-methyl ribonucleotide
  modified_base 40: mod_base = OTHER; note = 2'-O-methyl ribonucleotide
  modified_base 41: mod_base = OTHER; note = 2'-O-methyl ribonucleotide
  modified_base 42: mod_base = OTHER; note = 2'-O-methyl ribonucleotide
  modified_base 46: mod_base = OTHER; note = 2'-O-methyl ribonucleotide
  modified_base 48: mod_base = OTHER; note = 2'-O-methyl ribonucleotide
  modified_base 50: mod_base = OTHER; note = 2'-O-methyl ribonucleotide
  modified_base 52: mod_base = OTHER; note = 2'-O-methyl ribonucleotide
  modified_base 53: mod_base = OTHER; note = 2'-O-methyl ribonucleotide
  modified_base 54: mod_base = OTHER; note = 2'-O-methyl ribonucleotide
  modified_base 55: mod_base = OTHER; note = 2'-O-methyl ribonucleotide
  modified_base 56: mod_base = OTHER; note = 2'-O-methyl ribonucleotide
  modified_base 57: mod_base = OTHER; note = 2'-O-methyl ribonucleotide
  modified_base 60: mod_base = OTHER; note = 2'-O-methyl ribonucleotide
  modified_base 61: mod_base = OTHER; note = 2'-O-methyl ribonucleotide
  modified_base 66: mod_base = OTHER; note = 2'-O-methyl ribonucleotide
  modified_base 67: mod_base = OTHER; note = 2'-O-methyl ribonucleotide
  modified_base 70: mod_base = OTHER; note = 2'-O-methyl ribonucleotide
  modified_base 71: mod_base = OTHER; note = 2'-O-methyl ribonucleotide
  modified_base 72: mod_base = OTHER; note = 2'-O-methyl ribonucleotide
  modified_base 73: mod_base = OTHER; note = 2'-O-methyl ribonucleotide
  modified_base 74: mod_base = OTHER; note = 2'-O-methyl ribonucleotide
  modified_base 75: mod_base = OTHER; note = 2'-O-methyl ribonucleotide
  modified_base 76: mod_base = OTHER; note = 2'-O-methyl ribonucleotide
  modified_base 77: mod_base = OTHER; note = 2'-O-methyl ribonucleotide
  modified_base 78: mod_base = OTHER; note = 2'-O-methyl ribonucleotide
  modified_base 79: mod_base = OTHER; note = 2'-O-methyl ribonucleotide
  modified_base 80: mod_base = OTHER; note = 2'-O-methyl ribonucleotide
  modified_base 81: mod_base = OTHER; note = 2'-O-methyl ribonucleotide
  modified_base 83: mod_base = OTHER; note = 2'-O-methyl ribonucleotide
  modified_base 84: mod_base = OTHER; note = 2'-O-methyl ribonucleotide
  modified_base 85: mod_base = OTHER; note = 2'-O-methyl ribonucleotide
  modified_base 86: mod_base = OTHER; note = 2'-O-methyl ribonucleotide
  modified_base 87: mod_base = OTHER; note = 2'-O-methyl ribonucleotide
  modified_base 88: mod_base = OTHER; note = 2'-O-methyl ribonucleotide
  modified_base 89: mod_base = OTHER; note = 2'-O-methyl ribonucleotide
  modified_base 90: mod_base = OTHER; note = 2'-O-methyl ribonucleotide
  modified_base 91: mod_base = OTHER; note = 2'-O-methyl ribonucleotide
  modified_base 92: mod_base = OTHER; note = 2'-O-methyl ribonucleotide
  modified_base 93: mod_base = OTHER; note = 2'-O-methyl ribonucleotide
  modified_base 94: mod_base = OTHER; note = 2'-O-methyl ribonucleotide
  modified_base 95: mod_base = OTHER; note = 2'-O-methyl ribonucleotide
  modified_base 96: mod_base = OTHER; note = 2'-O-methyl ribonucleotide
  modified_base 97: mod_base = OTHER; note = 2'-O-methyl ribonucleotide
  modified_base 98: mod_base = OTHER; note = 2'-O-methyl ribonucleotide
  modified_base 99: mod_base = OTHER; note = 2'-O-methyl ribonucleotide
  modified_base 100: mod_base = OTHER; note = 2'-O-methyl ribonucleotide
  modified_base 101: mod_base = OTHER; note = 2'-O-methyl ribonucleotide
  modified_base 1..4: mod_base = OTHER; note = phosphorothioate linkage

SEQ ID NO: 2268 - RNA, 100 nt, synthetic construct; identical to SEQ ID NO: 253
  source 1..100: mol_type = other RNA
  modified_base 1: mod_base = OTHER; note = 2'-O-methyl ribonucleotide
  modified_base 2: mod_base = OTHER; note = 2'-O-methyl ribonucleotide
  modified_base 3: mod_base = OTHER; note = 2'-O-methyl ribonucleotide
  modified_base 21: mod_base = OTHER; note = 2'-O-methyl ribonucleotide
  modified_base 25: mod_base = OTHER; note = 2'-O-methyl ribonucleotide
  modified_base 28: mod_base = OTHER; note = 2'-O-methyl ribonucleotide
  modified_base 29: mod_base = OTHER; note = 2'-O-methyl ribonucleotide
  modified_base 30: mod_base = OTHER; note = 2'-O-methyl ribonucleotide
  modified_base 31: mod_base = OTHER; note = 2'-O-methyl ribonucleotide
  modified_base 32: mod_base = OTHER; note = 2'-O-methyl ribonucleotide
  modified_base 33: mod_base = OTHER; note = 2'-O-methyl ribonucleotide
  modified_base 34: mod_base = OTHER; note = 2'-O-methyl ribonucleotide
  modified_base 35: mod_base = OTHER; note = 2'-O-methyl ribonucleotide
  modified_base 36: mod_base = OTHER; note = 2'-O-methyl ribonucleotide
  modified_base 37: mod_base = OTHER; note = 2'-O-methyl ribonucleotide
  modified_base 38: mod_base = OTHER; note = 2'-O-methyl ribonucleotide
  modified_base 39: mod_base = OTHER; note = 2'-O-methyl ribonucleotide
  modified_base 40: mod_base = OTHER; note = 2'-O-methyl ribonucleotide
  modified_base 41: mod_base = OTHER; note = 2'-O-methyl ribonucleotide
  modified_base 42: mod_base = OTHER; note = 2'-O-methyl ribonucleotide
  modified_base 45: mod_base = OTHER; note = 2'-O-methyl ribonucleotide
  modified_base 46: mod_base = OTHER; note = 2'-O-methyl ribonucleotide
  modified_base 48: mod_base = OTHER; note = 2'-O-methyl ribonucleotide
  modified_base 50: mod_base = OTHER; note = 2'-O-methyl ribonucleotide
  modified_base 52: mod_base = OTHER; note = 2'-O-methyl ribonucleotide
  modified_base 53: mod_base = OTHER; note = 2'-O-methyl ribonucleotide
  modified_base 54: mod_base = OTHER; note = 2'-O-methyl ribonucleotide
  modified_base 55: mod_base = OTHER; note = 2'-O-methyl ribonucleotide
  modified_base 56: mod_base = OTHER; note = 2'-O-methyl ribonucleotide
  modified_base 57: mod_base = OTHER; note = 2'-O-methyl ribonucleotide
  modified_base 60: mod_base = OTHER; note = 2'-O-methyl ribonucleotide
  modified_base 61: mod_base = OTHER; note = 2'-O-methyl ribonucleotide
  modified_base 64: mod_base = OTHER; note = 2'-O-methyl ribonucleotide
  modified_base 66: mod_base = OTHER; note = 2'-O-methyl ribonucleotide
  modified_base 67: mod_base = OTHER; note = 2'-O-methyl ribonucleotide
  modified_base 70: mod_base = OTHER; note = 2'-O-methyl ribonucleotide
  modified_base 71: mod_base = OTHER; note = 2'-O-methyl ribonucleotide
  modified_base 72: mod_base = OTHER; note = 2'-O-methyl ribonucleotide
  modified_base 73: mod_base = OTHER; note = 2'-O-methyl ribonucleotide
  modified_base 74: mod_base = OTHER; note = 2'-O-methyl ribonucleotide
  modified_base 75: mod_base = OTHER; note = 2'-O-methyl ribonucleotide
  modified_base 76: mod_base = OTHER; note = 2'-O-methyl ribonucleotide
  modified_base 77: mod_base = OTHER; note = 2'-O-methyl ribonucleotide
  modified_base 78: mod_base = OTHER; note = 2'-O-methyl ribonucleotide
  modified_base 79: mod_base = OTHER; note = 2'-O-methyl ribonucleotide
  modified_base 80: mod_base = OTHER; note = 2'-O-methyl ribonucleotide
  modified_base 81: mod_base = OTHER; note = 2'-O-methyl ribonucleotide
  modified_base 83: mod_base = OTHER; note = 2'-O-methyl ribonucleotide
  modified_base 84: mod_base = OTHER; note = 2'-O-methyl ribonucleotide
  modified_base 85: mod_base = OTHER; note = 2'-O-methyl ribonucleotide
  modified_base 86: mod_base = OTHER; note = 2'-O-methyl ribonucleotide
  modified_base 87: mod_base = OTHER; note = 2'-O-methyl ribonucleotide
  modified_base 88: mod_base = OTHER; note = 2'-O-methyl ribonucleotide
  modified_base 89: mod_base = OTHER; note = 2'-O-methyl ribonucleotide
  modified_base 90: mod_base = OTHER; note = 2'-O-methyl ribonucleotide
  modified_base 91: mod_base = OTHER; note = 2'-O-methyl ribonucleotide
  modified_base 92: mod_base = OTHER; note = 2'-O-methyl ribonucleotide
  modified_base 93: mod_base = OTHER; note = 2'-O-methyl ribonucleotide
  modified_base 94: mod_base = OTHER; note = 2'-O-methyl ribonucleotide
  modified_base 95: mod_base = OTHER; note = 2'-O-methyl ribonucleotide
  modified_base 96: mod_base = OTHER; note = 2'-O-methyl ribonucleotide
  modified_base 97: mod_base = OTHER; note = 2'-O-methyl ribonucleotide
  modified_base 98: mod_base = OTHER; note = 2'-O-methyl ribonucleotide
  modified_base 99: mod_base = OTHER; note = 2'-O-methyl ribonucleotide
  modified_base 100: mod_base = OTHER; note = 2'-O-methyl ribonucleotide
  modified_base 1..4: mod_base = OTHER; note = phosphorothioate linkage
  modified_base 45..46: mod_base = OTHER; note = phosphorothioate linkage
  modified_base 64..65: mod_base = OTHER; note = phosphorothioate linkage
  modified_base 97..100: mod_base = OTHER; note = phosphorothioate linkage

SEQ ID NO: 2269 - RNA, 100 nt, synthetic construct; identical to SEQ ID NO: 253
  source 1..100: mol_type = other RNA
  modified_base 1: mod_base = OTHER; note = 2'-O-methyl ribonucleotide
  modified_base 2: mod_base = OTHER; note = 2'-O-methyl ribonucleotide
  modified_base 3: mod_base = OTHER; note = 2'-O-methyl ribonucleotide
  modified_base 6: mod_base = OTHER; note = 2'-O-methyl ribonucleotide
  modified_base 12: mod_base = OTHER; note = 2'-O-methyl ribonucleotide
  modified_base 19: mod_base = OTHER; note = 2'-O-methyl ribonucleotide
  modified_base 21: mod_base = OTHER; note = 2'-O-methyl ribonucleotide
  modified_base 28: mod_base = OTHER; note = 2'-O-methyl ribonucleotide
  modified_base 29: mod_base = OTHER; note = 2'-O-methyl ribonucleotide
  modified_base 30: mod_base = OTHER; note = 2'-O-methyl ribonucleotide
  modified_base 31: mod_base = OTHER; note = 2'-O-methyl ribonucleotide
  modified_base 32: mod_base = OTHER; note = 2'-O-methyl ribonucleotide
  modified_base 33: mod_base = OTHER; note = 2'-O-methyl ribonucleotide
  modified_base 34: mod_base = OTHER; note = 2'-O-methyl ribonucleotide
  modified_base 35: mod_base = OTHER; note = 2'-O-methyl ribonucleotide
  modified_base 36: mod_base = OTHER; note = 2'-O-methyl ribonucleotide
  modified_base 37: mod_base = OTHER; note = 2'-O-methyl ribonucleotide
  modified_base 38: mod_base = OTHER; note = 2'-O-methyl ribonucleotide
  modified_base 39: mod_base = OTHER; note = 2'-O-methyl ribonucleotide
  modified_base 40: mod_base = OTHER; note = 2'-O-methyl ribonucleotide
  modified_base 41: mod_base = OTHER; note = 2'-O-methyl ribonucleotide
  modified_base 42: mod_base = OTHER; note = 2'-O-methyl ribonucleotide
  modified_base 46: mod_base = OTHER; note = 2'-O-methyl ribonucleotide
  modified_base 48: mod_base = OTHER; note = 2'-O-methyl ribonucleotide
  modified_base 50: mod_base = OTHER; note = 2'-O-methyl ribonucleotide
  modified_base 52: mod_base = OTHER; note = 2'-O-methyl ribonucleotide
  modified_base 53: mod_base = OTHER; note = 2'-O-methyl ribonucleotide
  modified_base 54: mod_base = OTHER; note = 2'-O-methyl ribonucleotide
  modified_base 55: mod_base = OTHER; note = 2'-O-methyl ribonucleotide
  modified_base 56: mod_base = OTHER; note = 2'-O-methyl ribonucleotide
  modified_base 57: mod_base = OTHER; note = 2'-O-methyl ribonucleotide
  modified_base 60: mod_base = OTHER; note = 2'-O-methyl ribonucleotide
  modified_base 61: mod_base = OTHER; note = 2'-O-methyl ribonucleotide
  modified_base 66: mod_base = OTHER; note = 2'-O-methyl ribonucleotide
  modified_base 67: mod_base = OTHER; note = 2'-O-methyl ribonucleotide
  modified_base 70: mod_base = OTHER; note = 2'-O-methyl ribonucleotide
  modified_base 71: mod_base = OTHER; note = 2'-O-methyl ribonucleotide
  modified_base 72: mod_base = OTHER; note = 2'-O-methyl ribonucleotide
  modified_base 73: mod_base = OTHER; note = 2'-O-methyl ribonucleotide
  modified_base 74: mod_base = OTHER; note = 2'-O-methyl ribonucleotide
  modified_base 75: mod_base = OTHER; note = 2'-O-methyl ribonucleotide
  modified_base 76: mod_base = OTHER; note = 2'-O-methyl ribonucleotide
  modified_base 77: mod_base = OTHER; note = 2'-O-methyl ribonucleotide
  modified_base 78: mod_base = OTHER; note = 2'-O-methyl ribonucleotide
  modified_base 79: mod_base = OTHER; note = 2'-O-methyl ribonucleotide
  modified_base 80: mod_base = OTHER; note = 2'-O-methyl ribonucleotide
  modified_base 81: mod_base = OTHER; note = 2'-O-methyl ribonucleotide
  modified_base 83: mod_base = OTHER; note = 2'-O-methyl ribonucleotide
  modified_base 84: mod_base = OTHER; note = 2'-O-methyl ribonucleotide
  modified_base 85: mod_base = OTHER; note = 2'-O-methyl ribonucleotide
  modified_base 86: mod_base = OTHER; note = 2'-O-methyl ribonucleotide
  modified_base 87: mod_base = OTHER; note = 2'-O-methyl ribonucleotide
  modified_base 88: mod_base = OTHER; note = 2'-O-methyl ribonucleotide
  modified_base 89: mod_base = OTHER; note = 2'-O-methyl ribonucleotide
  modified_base 90: mod_base = OTHER; note = 2'-O-methyl ribonucleotide
  modified_base 91: mod_base = OTHER; note = 2'-O-methyl ribonucleotide
  modified_base 92: mod_base = OTHER; note = 2'-O-methyl ribonucleotide
  modified_base 93: mod_base = OTHER; note = 2'-O-methyl ribonucleotide
  modified_base 94: mod_base = OTHER; note = 2'-O-methyl ribonucleotide
  modified_base 95: mod_base = OTHER; note = 2'-O-methyl ribonucleotide
  modified_base 96: mod_base = OTHER; note = 2'-O-methyl ribonucleotide
  modified_base 97: mod_base = OTHER; note = 2'-O-methyl ribonucleotide
  modified_base 98: mod_base = OTHER; note = 2'-O-methyl ribonucleotide
  modified_base 99: mod_base = OTHER; note = 2'-O-methyl ribonucleotide
  modified_base 100: mod_base = OTHER; note = 2'-O-methyl ribonucleotide
  modified_base 1..4: mod_base = OTHER; note = phosphorothioate linkage
  modified_base 45..46: mod_base = OTHER; note = phosphorothioate linkage
  modified_base 64..65: mod_base = OTHER; note = phosphorothioate linkage
  modified_base 97..100: mod_base = OTHER; note = phosphorothioate linkage

SEQ ID NO: 2270 - RNA, 100 nt, synthetic construct; identical to SEQ ID NO: 257
  source 1..100: mol_type = other RNA
  modified_base 1: mod_base = OTHER; note = 2'-O-methyl ribonucleotide
  modified_base 2: mod_base = OTHER; note = 2'-O-methyl ribonucleotide
  modified_base 3: mod_base = OTHER; note = 2'-O-methyl ribonucleotide
  modified_base 21: mod_base = OTHER; note = 2'-O-methyl ribonucleotide
  modified_base 28: mod_base = OTHER; note = 2'-O-methyl ribonucleotide
  modified_base 29: mod_base = OTHER; note = 2'-O-methyl ribonucleotide
  modified_base 30: mod_base = OTHER; note = 2'-O-methyl ribonucleotide
  modified_base 31: mod_base = OTHER; note = 2'-O-methyl ribonucleotide
  modified_base 32: mod_base = OTHER; note = 2'-O-methyl ribonucleotide
  modified_base 34: mod_base = OTHER; note = 2'-O-methyl ribonucleotide
  modified_base 35: mod_base = OTHER; note = 2'-O-methyl ribonucleotide
  modified_base 36: mod_base = OTHER; note = 2'-O-methyl ribonucleotide
  modified_base 37: mod_base = OTHER; note = 2'-O-methyl ribonucleotide
  modified_base 38: mod_base = OTHER; note = 2'-O-methyl ribonucleotide
  modified_base 39: mod_base = OTHER; note = 2'-O-methyl ribonucleotide
  modified_base 40: mod_base = OTHER; note = 2'-O-methyl ribonucleotide
  modified_base 41: mod_base = OTHER; note = 2'-O-methyl ribonucleotide
  modified_base 42: mod_base = OTHER; note = 2'-O-methyl ribonucleotide
  modified_base 46: mod_base = OTHER; note = 2'-O-methyl ribonucleotide
  modified_base 48: mod_base = OTHER; note = 2'-O-methyl ribonucleotide
  modified_base 50: mod_base = OTHER; note = 2'-O-methyl ribonucleotide
  modified_base 52: mod_base = OTHER; note = 2'-O-methyl ribonucleotide
  modified_base 53: mod_base = OTHER; note = 2'-O-methyl ribonucleotide
  modified_base 54: mod_base = OTHER; note = 2'-O-methyl ribonucleotide
  modified_base 57: mod_base = OTHER; note = 2'-O-methyl ribonucleotide
  modified_base 61: mod_base = OTHER; note = 2'-O-methyl ribonucleotide
  modified_base 66: mod_base = OTHER; note = 2'-O-methyl ribonucleotide
  modified_base 67: mod_base = OTHER; note = 2'-O-methyl ribonucleotide
  modified_base 70: mod_base = OTHER; note = 2'-O-methyl ribonucleotide
  modified_base 71: mod_base = OTHER; note = 2'-O-methyl ribonucleotide
  modified_base 72: mod_base = OTHER; note = 2'-O-methyl ribonucleotide
  modified_base 74: mod_base = OTHER; note = 2'-O-methyl ribonucleotide
  modified_base 75: mod_base = OTHER; note = 2'-O-methyl ribonucleotide
  modified_base 76: mod_base = OTHER; note = 2'-O-methyl ribonucleotide
  modified_base 77: mod_base = OTHER; note = 2'-O-methyl ribonucleotide
  modified_base 78: mod_base = OTHER; note = 2'-O-methyl ribonucleotide
  modified_base 79: mod_base = OTHER; note = 2'-O-methyl ribonucleotide
  modified_base 80: mod_base = OTHER; note = 2'-O-methyl ribonucleotide
  modified_base 82: mod_base = OTHER; note = 2'-O-methyl ribonucleotide
  modified_base 83: mod_base = OTHER; note = 2'-O-methyl ribonucleotide
  modified_base 84: mod_base = OTHER; note = 2'-O-methyl ribonucleotide
  modified_base 85: mod_base = OTHER; note = 2'-O-methyl ribonucleotide
  modified_base 86: mod_base = OTHER; note = 2'-O-methyl ribonucleotide
  modified_base 87: mod_base = OTHER; note = 2'-O-methyl ribonucleotide
  modified_base 89: mod_base = OTHER; note = 2'-O-methyl ribonucleotide
  modified_base 92: mod_base = OTHER; note = 2'-O-methyl ribonucleotide
  modified_base 93: mod_base = OTHER; note = 2'-O-methyl ribonucleotide
  modified_base 94: mod_base = OTHER; note = 2'-O-methyl ribonucleotide
  modified_base 95: mod_base = OTHER; note = 2'-O-methyl ribonucleotide
  modified_base 96: mod_base = OTHER; note = 2'-O-methyl ribonucleotide
  modified_base 97: mod_base = OTHER; note = 2'-O-methyl ribonucleotide
  modified_base 98: mod_base = OTHER; note = 2'-O-methyl ribonucleotide
  modified_base 99: mod_base = OTHER; note = 2'-O-methyl ribonucleotide
  modified_base 100: mod_base = OTHER; note = 2'-O-methyl ribonucleotide
  modified_base 1..4: mod_base = OTHER; note = phosphorothioate linkage
  modified_base 97..100: mod_base = OTHER; note = phosphorothioate linkage

SEQ ID NO: 2271 - RNA, 100 nt, synthetic construct; identical to SEQ ID NO: 257
  source 1..100: mol_type = other RNA
  modified_base 1: mod_base = OTHER; note = 2'-O-methyl ribonucleotide
  modified_base 2: mod_base = OTHER; note = 2'-O-methyl ribonucleotide
  modified_base 3: mod_base = OTHER; note = 2'-O-methyl ribonucleotide
  modified_base 21: mod_base = OTHER; note = 2'-O-methyl ribonucleotide
  modified_base 28: mod_base = OTHER; note = 2'-O-methyl ribonucleotide
  modified_base 29: mod_base = OTHER; note = 2'-O-methyl ribonucleotide
  modified_base 30: mod_base = OTHER; note = 2'-O-methyl ribonucleotide
  modified_base 31: mod_base = OTHER; note = 2'-O-methyl ribonucleotide
  modified_base 32: mod_base = OTHER; note = 2'-O-methyl ribonucleotide
  modified_base 33: mod_base = OTHER; note = 2'-O-methyl ribonucleotide
  modified_base 34: mod_base = OTHER; note = 2'-O-methyl ribonucleotide
  modified_base 35: mod_base = OTHER; note = 2'-O-methyl ribonucleotide
  modified_base 36: mod_base = OTHER; note = 2'-O-methyl ribonucleotide
  modified_base 37: mod_base = OTHER; note = 2'-O-methyl ribonucleotide
  modified_base 38: mod_base = OTHER; note = 2'-O-methyl ribonucleotide
  modified_base 39: mod_base = OTHER; note = 2'-O-methyl ribonucleotide
  modified_base 40: mod_base = OTHER; note = 2'-O-methyl ribonucleotide
  modified_base 41: mod_base = OTHER; note = 2'-O-methyl ribonucleotide
  modified_base 42: mod_base = OTHER; note = 2'-O-methyl ribonucleotide
  modified_base 46: mod_base = OTHER; note = 2'-O-methyl ribonucleotide
  modified_base 48: mod_base = OTHER; note = 2'-O-methyl ribonucleotide
  modified_base 50: mod_base = OTHER; note = 2'-O-methyl ribonucleotide
  modified_base 52: mod_base = OTHER; note = 2'-O-methyl ribonucleotide
  modified_base 53: mod_base = OTHER; note = 2'-O-methyl ribonucleotide
  modified_base 54: mod_base = OTHER; note = 2'-O-methyl ribonucleotide
  modified_base 55: mod_base = OTHER; note = 2'-O-methyl ribonucleotide
  modified_base 56: mod_base = OTHER; note = 2'-O-methyl ribonucleotide
  modified_base 57: mod_base = OTHER; note = 2'-O-methyl ribonucleotide
  modified_base 60: mod_base = OTHER; note = 2'-O-methyl ribonucleotide
  modified_base 61: mod_base = OTHER; note = 2'-O-methyl ribonucleotide
  modified_base 66: mod_base = OTHER; note = 2'-O-methyl ribonucleotide
  modified_base 67: mod_base = OTHER; note = 2'-O-methyl ribonucleotide
  modified_base 70: mod_base = OTHER; note = 2'-O-methyl ribonucleotide
  modified_base 71: mod_base = OTHER; note = 2'-O-methyl ribonucleotide
  modified_base 72: mod_base = OTHER; note = 2'-O-methyl ribonucleotide
  modified_base 73: mod_base = OTHER; note = 2'-O-methyl ribonucleotide
  modified_base 74: mod_base = OTHER; note = 2'-O-methyl ribonucleotide
  modified_base 75: mod_base = OTHER; note = 2'-O-methyl ribonucleotide
  modified_base 76: mod_base = OTHER; note = 2'-O-methyl ribonucleotide
  modified_base 77: mod_base = OTHER; note = 2'-O-methyl ribonucleotide
  modified_base 78: mod_base = OTHER; note = 2'-O-methyl ribonucleotide
  modified_base 79: mod_base = OTHER; note = 2'-O-methyl ribonucleotide
  modified_base 80: mod_base = OTHER; note = 2'-O-methyl ribonucleotide
  modified_base 81: mod_base = OTHER; note = 2'-O-methyl ribonucleotide
  modified_base 83: mod_base = OTHER; note = 2'-O-methyl ribonucleotide
  modified_base 84: mod_base = OTHER; note = 2'-O-methyl ribonucleotide
  modified_base 85: mod_base = OTHER; note = 2'-O-methyl ribonucleotide
  modified_base 86: mod_base = OTHER; note = 2'-O-methyl ribonucleotide
  modified_base 87: mod_base = OTHER; note = 2'-O-methyl ribonucleotide
  modified_base 88: mod_base = OTHER; note = 2'-O-methyl ribonucleotide
  modified_base 89: mod_base = OTHER; note = 2'-O-methyl ribonucleotide
  modified_base 90: mod_base = OTHER; note = 2'-O-methyl ribonucleotide
  modified_base 91: mod_base = OTHER; note = 2'-O-methyl ribonucleotide
  modified_base 92: mod_base = OTHER; note = 2'-O-methyl ribonucleotide
  modified_base 93: mod_base = OTHER; note = 2'-O-methyl ribonucleotide
  modified_base 94: mod_base = OTHER; note = 2'-O-methyl ribonucleotide
  modified_base 95: mod_base = OTHER; note = 2'-O-methyl ribonucleotide
  modified_base 96: mod_base = OTHER; note = 2'-O-methyl ribonucleotide
  modified_base 97: mod_base = OTHER; note = 2'-O-methyl ribonucleotide
  modified_base 98: mod_base = OTHER; note = 2'-O-methyl ribonucleotide
  modified_base 99: mod_base = OTHER; note = 2'-O-methyl ribonucleotide
  modified_base 100: mod_base = OTHER; note = 2'-O-methyl ribonucleotide
  modified_base 1..4: mod_base = OTHER; note = phosphorothioate linkage
  modified_base 97..100: mod_base = OTHER; note = phosphorothioate linkage

SEQ ID NO: 2272 - RNA, 100 nt, synthetic construct; identical to SEQ ID NO: 257
  source 1..100: mol_type = other RNA
  modified_base 1: mod_base = OTHER; note = 2'-O-methyl ribonucleotide
  modified_base 2: mod_base = OTHER; note = 2'-O-methyl ribonucleotide
  modified_base 3: mod_base = OTHER; note = 2'-O-methyl ribonucleotide
  modified_base 98: mod_base = OTHER; note = 2'-O-methyl ribonucleotide
  modified_base 99: mod_base = OTHER; note = 2'-O-methyl ribonucleotide
  modified_base 100: mod_base = OTHER; note = 2'-O-methyl ribonucleotide
  modified_base 1..4: mod_base = OTHER; note = phosphorothioate linkage
  modified_base 97..100: mod_base = OTHER; note = phosphorothioate linkage

SEQ ID NO: 2273 - RNA, 100 nt, synthetic construct; identical to SEQ ID NO: 257
  source 1..100: mol_type = other RNA
  modified_base 1: mod_base = OTHER; note = 2'-O-methyl ribonucleotide
  modified_base 2: mod_base = OTHER; note = 2'-O-methyl ribonucleotide
  modified_base 3: mod_base = OTHER; note = 2'-O-methyl ribonucleotide
  modified_base 21: mod_base = OTHER; note = 2'-O-methyl ribonucleotide
  modified_base 28: mod_base = OTHER; note = 2'-O-methyl ribonucleotide
  modified_base 29: mod_base = OTHER; note = 2'-O-methyl ribonucleotide
  modified_base 30: mod_base = OTHER; note = 2'-O-methyl ribonucleotide
  modified_base 31: mod_base = OTHER; note = 2'-O-methyl ribonucleotide
  modified_base 32: mod_base = OTHER; note = 2'-O-methyl ribonucleotide
  modified_base 34: mod_base = OTHER; note = 2'-O-methyl ribonucleotide
  modified_base 35: mod_base = OTHER; note = 2'-O-methyl ribonucleotide
  modified_base 36: mod_base = OTHER; note = 2'-O-methyl ribonucleotide
  modified_base 37: mod_base = OTHER; note = 2'-O-methyl ribonucleotide
  modified_base 38: mod_base = OTHER; note = 2'-O-methyl ribonucleotide
  modified_base 39: mod_base = OTHER; note = 2'-O-methyl ribonucleotide
  modified_base 40: mod_base = OTHER; note = 2'-O-methyl ribonucleotide
  modified_base 41: mod_base = OTHER; note = 2'-O-methyl ribonucleotide
  modified_base 42: mod_base = OTHER; note = 2'-O-methyl ribonucleotide
  modified_base 46: mod_base = OTHER; note = 2'-O-methyl ribonucleotide
  modified_base 48: mod_base = OTHER; note = 2'-O-methyl ribonucleotide
  modified_base 50: mod_base = OTHER; note = 2'-O-methyl ribonucleotide
  modified_base 52: mod_base = OTHER; note = 2'-O-methyl ribonucleotide
  modified_base 53: mod_base = OTHER; note = 2'-O-methyl ribonucleotide
  modified_base 54: mod_base = OTHER; note = 2'-O-methyl ribonucleotide
  modified_base 55: mod_base = OTHER; note = 2'-O-methyl ribonucleotide
  modified_base 56: mod_base = OTHER; note = 2'-O-methyl ribonucleotide
  modified_base 57: mod_base = OTHER; note = 2'-O-methyl ribonucleotide
  modified_base 60: mod_base = OTHER; note = 2'-O-methyl ribonucleotide
  modified_base 61: mod_base = OTHER; note = 2'-O-methyl ribonucleotide
  modified_base 66: mod_base = OTHER; note = 2'-O-methyl ribonucleotide
  modified_base 67: mod_base = OTHER; note = 2'-O-methyl ribonucleotide
  modified_base 70: mod_base = OTHER; note = 2'-O-methyl ribonucleotide
  modified_base 71: mod_base = OTHER; note = 2'-O-methyl ribonucleotide
  modified_base 72: mod_base = OTHER; note = 2'-O-methyl ribonucleotide
  modified_base 74: mod_base = OTHER; note = 2'-O-methyl ribonucleotide
  modified_base 75: mod_base = OTHER; note = 2'-O-methyl ribonucleotide
  modified_base 76: mod_base = OTHER; note = 2'-O-methyl ribonucleotide
  modified_base 77: mod_base = OTHER; note = 2'-O-methyl ribonucleotide
  modified_base 78: mod_base = OTHER; note = 2'-O-methyl ribonucleotide
  modified_base 79: mod_base = OTHER; note = 2'-O-methyl ribonucleotide
  modified_base 80: mod_base = OTHER; note = 2'-O-methyl ribonucleotide
  modified_base 81: mod_base = OTHER; note = 2'-O-methyl ribonucleotide
  modified_base 83: mod_base = OTHER; note = 2'-O-methyl ribonucleotide
  modified_base 84: mod_base = OTHER; note = 2'-O-methyl ribonucleotide
  modified_base 85: mod_base = OTHER; note = 2'-O-methyl ribonucleotide
  modified_base 86: mod_base = OTHER; note = 2'-O-methyl ribonucleotide
  modified_base 87: mod_base = OTHER; note = 2'-O-methyl ribonucleotide
  modified_base 88: mod_base = OTHER; note = 2'-O-methyl ribonucleotide
  modified_base 89: mod_base = OTHER; note = 2'-O-methyl ribonucleotide
  modified_base 90: mod_base = OTHER; note = 2'-O-methyl ribonucleotide
  modified_base 91: mod_base = OTHER; note = 2'-O-methyl ribonucleotide
  modified_base 92: mod_base = OTHER; note = 2'-O-methyl ribonucleotide
  modified_base 93: mod_base = OTHER; note = 2'-O-methyl ribonucleotide
  modified_base 94: mod_base = OTHER; note = 2'-O-methyl ribonucleotide
  modified_base 95: mod_base = OTHER; note = 2'-O-methyl ribonucleotide
  modified_base 96: mod_base = OTHER; note = 2'-O-methyl ribonucleotide
  modified_base 97: mod_base = OTHER; note = 2'-O-methyl ribonucleotide
  modified_base 98: mod_base = OTHER; note = 2'-O-methyl ribonucleotide
  modified_base 99: mod_base = OTHER; note = 2'-O-methyl ribonucleotide
  modified_base 100: mod_base = OTHER; note = 2'-O-methyl ribonucleotide
  modified_base 1..4: mod_base = OTHER; note = phosphorothioate linkage
  modified_base 97..100: mod_base = OTHER; note = phosphorothioate linkage

SEQ ID NO: 2274 - RNA, 100 nt, synthetic construct; identical to SEQ ID NO: 259
  source 1..100: mol_type = other RNA
  modified_base 1: mod_base = OTHER; note = 2'-O-methyl ribonucleotide
  modified_base 2: mod_base = OTHER; note = 2'-O-methyl ribonucleotide
  modified_base 3: mod_base = OTHER; note = 2'-O-methyl ribonucleotide
  modified_base 21: mod_base = OTHER; note = 2'-O-methyl ribonucleotide
  modified_base 28: mod_base = OTHER; note = 2'-O-methyl ribonucleotide
  modified_base 29: mod_base = OTHER; note = 2'-O-methyl ribonucleotide
  modified_base 30: mod_base = OTHER; note = 2'-O-methyl ribonucleotide
  modified_base 31: mod_base = OTHER; note = 2'-O-methyl ribonucleotide
  modified_base 32: mod_base = OTHER; note = 2'-O-methyl ribonucleotide
  modified_base 33: mod_base = OTHER; note = 2'-O-methyl ribonucleotide
  modified_base 34: mod_base = OTHER; note = 2'-O-methyl ribonucleotide
  modified_base 35: mod_base = OTHER; note = 2'-O-methyl ribonucleotide
  modified_base 36: mod_base = OTHER; note = 2'-O-methyl ribonucleotide
  modified_base 37: mod_base = OTHER; note = 2'-O-methyl ribonucleotide
  modified_base 38: mod_base = OTHER; note = 2'-O-methyl ribonucleotide
  modified_base 39: mod_base = OTHER; note = 2'-O-methyl ribonucleotide
  modified_base 40: mod_base = OTHER; note = 2'-O-methyl ribonucleotide
  modified_base 41: mod_base = OTHER; note = 2'-O-methyl ribonucleotide
  modified_base 42: mod_base = OTHER; note = 2'-O-methyl ribonucleotide
  modified_base 46: mod_base = OTHER; note = 2'-O-methyl ribonucleotide
  modified_base 48: mod_base = OTHER; note = 2'-O-methyl ribonucleotide
  modified_base 50: mod_base = OTHER; note = 2'-O-methyl ribonucleotide
  modified_base 52: mod_base = OTHER; note = 2'-O-methyl ribonucleotide
  modified_base 53: mod_base = OTHER; note = 2'-O-methyl ribonucleotide
  modified_base 54: mod_base = OTHER; note = 2'-O-methyl ribonucleotide
  modified_base 55: mod_base = OTHER; note = 2'-O-methyl ribonucleotide
  modified_base 56: mod_base = OTHER; note = 2'-O-methyl ribonucleotide
  modified_base 57: mod_base = OTHER; note = 2'-O-methyl ribonucleotide
  modified_base 60: mod_base = OTHER; note = 2'-O-methyl ribonucleotide
  modified_base 61: mod_base = OTHER; note = 2'-O-methyl ribonucleotide
  modified_base 66: mod_base = OTHER; note = 2'-O-methyl ribonucleotide
  modified_base 67: mod_base = OTHER; note = 2'-O-methyl ribonucleotide
  modified_base 70: mod_base = OTHER; note = 2'-O-methyl ribonucleotide
  modified_base 71: mod_base = OTHER; note = 2'-O-methyl ribonucleotide
  modified_base 72: mod_base = OTHER; note = 2'-O-methyl ribonucleotide
  modified_base 73: mod_base = OTHER; note = 2'-O-methyl ribonucleotide
  modified_base 74: mod_base = OTHER; note = 2'-O-methyl ribonucleotide
  modified_base 75: mod_base = OTHER; note = 2'-O-methyl ribonucleotide
  modified_base 76: mod_base = OTHER; note = 2'-O-methyl ribonucleotide
  modified_base 77: mod_base = OTHER; note = 2'-O-methyl ribonucleotide
  modified_base 78: mod_base = OTHER; note = 2'-O-methyl ribonucleotide
  modified_base 79: mod_base = OTHER; note = 2'-O-methyl ribonucleotide
  modified_base 80: mod_base = OTHER; note = 2'-O-methyl ribonucleotide
  modified_base 81: mod_base = OTHER; note = 2'-O-methyl ribonucleotide
  modified_base 83: mod_base = OTHER; note = 2'-O-methyl ribonucleotide
  modified_base 84: mod_base = OTHER; note = 2'-O-methyl ribonucleotide
  modified_base 85: mod_base = OTHER; note = 2'-O-methyl ribonucleotide
  modified_base 86: mod_base = OTHER; note = 2'-O-methyl ribonucleotide
  modified_base 87: mod_base = OTHER; note = 2'-O-methyl ribonucleotide
  modified_base 88: mod_base = OTHER; note = 2'-O-methyl ribonucleotide
  modified_base 89: mod_base = OTHER; note = 2'-O-methyl ribonucleotide
  modified_base 90: mod_base = OTHER; note = 2'-O-methyl ribonucleotide
  modified_base 91: mod_base = OTHER; note = 2'-O-methyl ribonucleotide
  modified_base 92: mod_base = OTHER; note = 2'-O-methyl ribonucleotide
  modified_base 93: mod_base = OTHER; note = 2'-O-methyl ribonucleotide
  modified_base 94: mod_base = OTHER; note = 2'-O-methyl ribonucleotide
  modified_base 95: mod_base = OTHER; note = 2'-O-methyl ribonucleotide
  modified_base 96: mod_base = OTHER; note = 2'-O-methyl ribonucleotide
  modified_base 97: mod_base = OTHER; note = 2'-O-methyl ribonucleotide
  modified_base 98: mod_base = OTHER; note = 2'-O-methyl ribonucleotide
  modified_base 99: mod_base = OTHER; note = 2'-O-methyl ribonucleotide
  modified_base 100: mod_base = OTHER; note = 2'-O-methyl ribonucleotide
  modified_base 1..4: mod_base = OTHER; note = phosphorothioate linkage
  modified_base 97..100: mod_base = OTHER; note = phosphorothioate linkage

SEQ ID NO: 2275 - RNA, 100 nt, synthetic construct; identical to SEQ ID NO: 260
  source 1..100: mol_type = other RNA
  modified_base 1: mod_base = OTHER; note = 2'-O-methyl ribonucleotide
  modified_base 2: mod_base = OTHER; note = 2'-O-methyl ribonucleotide
  modified_base 3: mod_base = OTHER; note = 2'-O-methyl ribonucleotide
  modified_base 21: mod_base = OTHER; note = 2'-O-methyl ribonucleotide
  modified_base 28: mod_base = OTHER; note = 2'-O-methyl ribonucleotide
  modified_base 29: mod_base = OTHER; note = 2'-O-methyl ribonucleotide
  modified_base 30: mod_base = OTHER; note = 2'-O-methyl ribonucleotide
  modified_base 31: mod_base = OTHER; note = 2'-O-methyl ribonucleotide
  modified_base 32: mod_base = OTHER; note = 2'-O-methyl ribonucleotide
  modified_base 33: mod_base = OTHER; note = 2'-O-methyl ribonucleotide
  modified_base 34: mod_base = OTHER; note = 2'-O-methyl ribonucleotide
  modified_base 35: mod_base = OTHER; note = 2'-O-methyl ribonucleotide
  modified_base 36: mod_base = OTHER; note = 2'-O-methyl ribonucleotide
  modified_base 37: mod_base = OTHER; note = 2'-O-methyl ribonucleotide
  modified_base 38: mod_base = OTHER; note = 2'-O-methyl ribonucleotide
  modified_base 39: mod_base = OTHER; note = 2'-O-methyl ribonucleotide
  modified_base 40: mod_base = OTHER; note = 2'-O-methyl ribonucleotide
  modified_base 41: mod_base = OTHER; note = 2'-O-methyl ribonucleotide
  modified_base 42: mod_base = OTHER; note = 2'-O-methyl ribonucleotide
  modified_base 46: mod_base = OTHER; note = 2'-O-methyl ribonucleotide
  modified_base 48: mod_base = OTHER; note = 2'-O-methyl ribonucleotide
  modified_base 50: mod_base = OTHER; note = 2'-O-methyl ribonucleotide
  modified_base 52: mod_base = OTHER; note = 2'-O-methyl ribonucleotide
  modified_base 53: mod_base = OTHER; note = 2'-O-methyl ribonucleotide
  modified_base 54: mod_base = OTHER; note = 2'-O-methyl ribonucleotide
  modified_base 55: mod_base = OTHER; note = 2'-O-methyl ribonucleotide
  modified_base 56: mod_base = OTHER; note = 2'-O-methyl ribonucleotide
  modified_base 57: mod_base = OTHER; note = 2'-O-methyl ribonucleotide
  modified_base 60: mod_base = OTHER; note = 2'-O-methyl ribonucleotide
  modified_base 61: mod_base = OTHER; note = 2'-O-methyl ribonucleotide
  modified_base 66: mod_base = OTHER; note = 2'-O-methyl ribonucleotide
  modified_base 67: mod_base = OTHER; note = 2'-O-methyl ribonucleotide
  modified_base 70: mod_base = OTHER; note = 2'-O-methyl ribonucleotide
  modified_base 71: mod_base = OTHER; note = 2'-O-methyl ribonucleotide
  modified_base 72: mod_base = OTHER; note = 2'-O-methyl ribonucleotide
  modified_base 73: mod_base = OTHER; note = 2'-O-methyl ribonucleotide
  modified_base 74: mod_base = OTHER; note = 2'-O-methyl ribonucleotide
  modified_base 75: mod_base = OTHER; note = 2'-O-methyl ribonucleotide
  modified_base 76: mod_base = OTHER; note = 2'-O-methyl ribonucleotide
  modified_base 77: mod_base = OTHER; note = 2'-O-methyl ribonucleotide
  modified_base 78: mod_base = OTHER; note = 2'-O-methyl ribonucleotide
  modified_base 79: mod_base = OTHER; note = 2'-O-methyl ribonucleotide
  modified_base 80: mod_base = OTHER; note = 2'-O-methyl ribonucleotide
  modified_base 81: mod_base = OTHER; note = 2'-O-methyl ribonucleotide
  modified_base 83: mod_base = OTHER; note = 2'-O-methyl ribonucleotide
  modified_base 84: mod_base = OTHER; note = 2'-O-methyl ribonucleotide
  modified_base 85: mod_base = OTHER; note = 2'-O-methyl ribonucleotide
  modified_base 86: mod_base = OTHER; note = 2'-O-methyl ribonucleotide
  modified_base 87: mod_base = OTHER; note = 2'-O-methyl ribonucleotide
  modified_base 88: mod_base = OTHER; note = 2'-O-methyl ribonucleotide
  modified_base 89: mod_base = OTHER; note = 2'-O-methyl ribonucleotide
  modified_base 90: mod_base = OTHER; note = 2'-O-methyl ribonucleotide
  modified_base 91: mod_base = OTHER; note = 2'-O-methyl ribonucleotide
  modified_base 92: mod_base = OTHER; note = 2'-O-methyl ribonucleotide
  modified_base 93: mod_base = OTHER; note = 2'-O-methyl ribonucleotide
  modified_base 94: mod_base = OTHER; note = 2'-O-methyl ribonucleotide
  modified_base 95: mod_base = OTHER; note = 2'-O-methyl ribonucleotide
  modified_base 96: mod_base = OTHER; note = 2'-O-methyl ribonucleotide
  modified_base 97: mod_base = OTHER; note = 2'-O-methyl ribonucleotide
  modified_base 98: mod_base = OTHER; note = 2'-O-methyl ribonucleotide
  modified_base 99: mod_base = OTHER; note = 2'-O-methyl ribonucleotide
  modified_base 100: mod_base = OTHER; note = 2'-O-methyl ribonucleotide
  modified_base 1..4: mod_base = OTHER; note = phosphorothioate linkage
  modified_base 97..100: mod_base = OTHER; note = phosphorothioate linkage

SEQ ID NO: 2276 - RNA, 100 nt, synthetic construct; identical to SEQ ID NO: 284
  source 1..100: mol_type = other RNA
  modified_base 1: mod_base = OTHER; note = 2'-O-methyl ribonucleotide
  modified_base 2: mod_base = OTHER; note = 2'-O-methyl ribonucleotide
  modified_base 3: mod_base = OTHER; note = 2'-O-methyl ribonucleotide
  modified_base 29: mod_base = OTHER; note = 2'-O-methyl ribonucleotide
  modified_base 30: mod_base = OTHER; note = 2'-O-methyl ribonucleotide
  modified_base 31: mod_base = OTHER; note = 2'-O-methyl ribonucleotide
  modified_base 32: mod_base = OTHER; note = 2'-O-methyl ribonucleotide
  modified_base 33: mod_base = OTHER; note = 2'-O-methyl ribonucleotide
  modified_base 34: mod_base = OTHER; note = 2'-O-methyl ribonucleotide
  modified_base 35: mod_base = OTHER; note = 2'-O-methyl ribonucleotide
  modified_base 36: mod_base = OTHER; note = 2'-O-methyl ribonucleotide
  modified_base 37: mod_base = OTHER; note = 2'-O-methyl ribonucleotide
  modified_base 38: mod_base = OTHER; note = 2'-O-methyl ribonucleotide
  modified_base 39: mod_base = OTHER; note = 2'-O-methyl ribonucleotide
  modified_base 40: mod_base = OTHER; note = 2'-O-methyl ribonucleotide
  modified_base 69: mod_base = OTHER; note = 2'-O-methyl ribonucleotide
  modified_base 70: mod_base = OTHER; note = 2'-O-methyl ribonucleotide
  modified_base 71: mod_base = OTHER; note = 2'-O-methyl ribonucleotide
  modified_base 72: mod_base = OTHER; note = 2'-O-methyl ribonucleotide
  modified_base 73: mod_base = OTHER; note = 2'-O-methyl ribonucleotide
  modified_base 74: mod_base = OTHER; note = 2'-O-methyl ribonucleotide
  modified_base 75: mod_base = OTHER; note = 2'-O-methyl ribonucleotide
  modified_base 76: mod_base = OTHER; note = 2'-O-methyl ribonucleotide
  modified_base 77: mod_base = OTHER; note = 2'-O-methyl ribonucleotide
  modified_base 78: mod_base = OTHER; note = 2'-O-methyl ribonucleotide
  modified_base 79: mod_base = OTHER; note = 2'-O-methyl ribonucleotide
  modified_base 80: mod_base = OTHER; note = 2'-O-methyl ribonucleotide
  modified_base 81: mod_base = OTHER; note = 2'-O-methyl ribonucleotide
  modified_base 82: mod_base = OTHER; note = 2'-O-methyl ribonucleotide
  modified_base 83: mod_base = OTHER; note = 2'-O-methyl ribonucleotide
  modified_base 84: mod_base = OTHER; note = 2'-O-methyl ribonucleotide
  modified_base 85: mod_base = OTHER; note = 2'-O-methyl ribonucleotide
  modified_base 86: mod_base = OTHER; note = 2'-O-methyl ribonucleotide
  modified_base 87: mod_base = OTHER; note = 2'-O-methyl ribonucleotide
  modified_base 88: mod_base = OTHER; note = 2'-O-methyl ribonucleotide
  modified_base 89: mod_base = OTHER; note = 2'-O-methyl ribonucleotide
  modified_base 90: mod_base = OTHER; note = 2'-O-methyl ribonucleotide
  modified_base 91: mod_base = OTHER; note = 2'-O-methyl ribonucleotide
  modified_base 92: mod_base = OTHER; note = 2'-O-methyl ribonucleotide
  modified_base 93: mod_base = OTHER; note = 2'-O-methyl ribonucleotide
  modified_base 94: mod_base = OTHER; note = 2'-O-methyl ribonucleotide
  modified_base 95: mod_base = OTHER; note = 2'-O-methyl ribonucleotide
  modified_base 96: mod_base = OTHER; note = 2'-O-methyl ribonucleotide
  modified_base 97: mod_base = OTHER; note = 2'-O-methyl ribonucleotide
  modified_base 98: mod_base = OTHER; note = 2'-O-methyl ribonucleotide
  modified_base 99: mod_base = OTHER; note = 2'-O-methyl ribonucleotide
  modified_base 100: mod_base = OTHER; note = 2'-O-methyl ribonucleotide
  modified_base 1..4: mod_base = OTHER; note = phosphorothioate linkage
  modified_base 97..100: mod_base = OTHER; note = phosphorothioate linkage

SEQ ID NO: 2277 - RNA, 100 nt, synthetic construct; identical to SEQ ID NO: 285
  source 1..100: mol_type = other RNA
  modified_base 1: mod_base = OTHER; note = 2'-O-methyl ribonucleotide
  modified_base 2: mod_base = OTHER; note = 2'-O-methyl ribonucleotide
  modified_base 3: mod_base = OTHER; note = 2'-O-methyl ribonucleotide
  modified_base 29: mod_base = OTHER; note = 2'-O-methyl ribonucleotide
  modified_base 30: mod_base = OTHER; note = 2'-O-methyl ribonucleotide
  modified_base 31: mod_base = OTHER; note = 2'-O-methyl ribonucleotide
  modified_base 32: mod_base = OTHER; note = 2'-O-methyl ribonucleotide
  modified_base 33: mod_base = OTHER; note = 2'-O-methyl ribonucleotide
  modified_base 34: mod_base = OTHER; note = 2'-O-methyl ribonucleotide
  modified_base 35: mod_base = OTHER; note = 2'-O-methyl ribonucleotide
  modified_base 36: mod_base = OTHER; note = 2'-O-methyl ribonucleotide
  modified_base 37: mod_base = OTHER; note = 2'-O-methyl ribonucleotide
  modified_base 38: mod_base = OTHER; note = 2'-O-methyl ribonucleotide
  modified_base 39: mod_base = OTHER; note = 2'-O-methyl ribonucleotide
  modified_base 40: mod_base = OTHER; note = 2'-O-methyl ribonucleotide
  modified_base 69: mod_base = OTHER; note = 2'-O-methyl ribonucleotide
  modified_base 70: mod_base = OTHER; note = 2'-O-methyl ribonucleotide
  modified_base 71: mod_base = OTHER; note = 2'-O-methyl ribonucleotide
  modified_base 72: mod_base = OTHER; note = 2'-O-methyl ribonucleotide
  modified_base 73: mod_base = OTHER; note = 2'-O-methyl ribonucleotide
  modified_base 74: mod_base = OTHER; note = 2'-O-methyl ribonucleotide
  modified_base 75: mod_base = OTHER; note = 2'-O-methyl ribonucleotide
  modified_base 76: mod_base = OTHER; note = 2'-O-methyl ribonucleotide
  modified_base 77: mod_base = OTHER; note = 2'-O-methyl ribonucleotide
  modified_base 78: mod_base = OTHER; note = 2'-O-methyl ribonucleotide
  modified_base 79: mod_base = OTHER; note = 2'-O-methyl ribonucleotide
  modified_base 80: mod_base = OTHER; note = 2'-O-methyl ribonucleotide
  modified_base 81: mod_base = OTHER; note = 2'-O-methyl ribonucleotide
  modified_base 82: mod_base = OTHER; note = 2'-O-methyl ribonucleotide
  modified_base 83: mod_base = OTHER; note = 2'-O-methyl ribonucleotide
  modified_base 84: mod_base = OTHER; note = 2'-O-methyl ribonucleotide
  modified_base 85: mod_base = OTHER; note = 2'-O-methyl ribonucleotide
  modified_base 86: mod_base = OTHER; note = 2'-O-methyl ribonucleotide
  modified_base 87: mod_base = OTHER; note = 2'-O-methyl ribonucleotide
  modified_base 88: mod_base = OTHER; note = 2'-O-methyl ribonucleotide
  modified_base 89: mod_base = OTHER; note = 2'-O-methyl ribonucleotide
  modified_base 90: mod_base = OTHER; note = 2'-O-methyl ribonucleotide
  modified_base 91: mod_base = OTHER; note = 2'-O-methyl ribonucleotide
  modified_base 92: mod_base = OTHER; note = 2'-O-methyl ribonucleotide
  modified_base 93: mod_base = OTHER; note = 2'-O-methyl ribonucleotide
  modified_base 94: mod_base = OTHER; note = 2'-O-methyl ribonucleotide
  modified_base 95: mod_base = OTHER; note = 2'-O-methyl ribonucleotide
  modified_base 96: mod_base = OTHER; note = 2'-O-methyl ribonucleotide
  modified_base 97: mod_base = OTHER; note = 2'-O-methyl ribonucleotide
  modified_base 98: mod_base = OTHER; note = 2'-O-methyl ribonucleotide
  modified_base 99: mod_base = OTHER; note = 2'-O-methyl ribonucleotide
  modified_base 100: mod_base = OTHER; note = 2'-O-methyl ribonucleotide
  modified_base 1..4: mod_base = OTHER; note = phosphorothioate linkage
  modified_base 97..100: mod_base = OTHER; note = phosphorothioate linkage

SEQ ID NO: 2278 - RNA, 100 nt, synthetic construct; identical to SEQ ID NO: 287
  source 1..100: mol_type = other RNA
  modified_base 1: mod_base = OTHER; note = 2'-O-methyl ribonucleotide
  modified_base 2: mod_base = OTHER; note = 2'-O-methyl ribonucleotide
  modified_base 3: mod_base = OTHER; note = 2'-O-methyl ribonucleotide
  modified_base 29: mod_base = OTHER; note = 2'-O-methyl ribonucleotide
  modified_base 30: mod_base = OTHER; note = 2'-O-methyl ribonucleotide
  modified_base 31: mod_base = OTHER; note = 2'-O-methyl ribonucleotide
  modified_base 32: mod_base = OTHER; note = 2'-O-methyl ribonucleotide
  modified_base 33: mod_base = OTHER; note = 2'-O-methyl ribonucleotide
  modified_base 34: mod_base = OTHER; note = 2'-O-methyl ribonucleotide
  modified_base 35: mod_base = OTHER; note = 2'-O-methyl ribonucleotide
  modified_base 36: mod_base = OTHER; note = 2'-O-methyl ribonucleotide
  modified_base 37: mod_base = OTHER; note = 2'-O-methyl ribonucleotide
  modified_base 38: mod_base = OTHER; note = 2'-O-methyl ribonucleotide
  modified_base 39: mod_base = OTHER; note = 2'-O-methyl ribonucleotide
  modified_base 40: mod_base = OTHER; note = 2'-O-methyl ribonucleotide
  modified_base 69: mod_base = OTHER; note = 2'-O-methyl ribonucleotide
  modified_base 70: mod_base = OTHER; note = 2'-O-methyl ribonucleotide
  modified_base 71: mod_base = OTHER; note = 2'-O-methyl ribonucleotide
  modified_base 72: mod_base = OTHER; note = 2'-O-methyl ribonucleotide
  modified_base 73: mod_base = OTHER; note = 2'-O-methyl ribonucleotide
  modified_base 74: mod_base = OTHER; note = 2'-O-methyl ribonucleotide
  modified_base 75: mod_base = OTHER; note = 2'-O-methyl ribonucleotide
  modified_base 76: mod_base = OTHER; note = 2'-O-methyl ribonucleotide
  modified_base 77: mod_base = OTHER; note = 2'-O-methyl ribonucleotide
  modified_base 78: mod_base = OTHER; note = 2'-O-methyl ribonucleotide
  modified_base 79: mod_base = OTHER; note = 2'-O-methyl ribonucleotide
  modified_base 80: mod_base = OTHER; note = 2'-O-methyl ribonucleotide
  modified_base 81: mod_base = OTHER; note = 2'-O-methyl ribonucleotide
  modified_base 82: mod_base = OTHER; note = 2'-O-methyl ribonucleotide
  modified_base 83: mod_base = OTHER; note = 2'-O-methyl ribonucleotide
  modified_base 84: mod_base = OTHER; note = 2'-O-methyl ribonucleotide
  modified_base 85: mod_base = OTHER; note = 2'-O-methyl ribonucleotide
  modified_base 86: mod_base = OTHER; note = 2'-O-methyl ribonucleotide
  modified_base 87: mod_base = OTHER; note = 2'-O-methyl ribonucleotide
  modified_base 88: mod_base = OTHER; note = 2'-O-methyl ribonucleotide
  modified_base 89: mod_base = OTHER; note = 2'-O-methyl ribonucleotide
  modified_base 90: mod_base = OTHER; note = 2'-O-methyl ribonucleotide
  modified_base 91: mod_base = OTHER; note = 2'-O-methyl ribonucleotide
  modified_base 92: mod_base = OTHER; note = 2'-O-methyl ribonucleotide
  modified_base 93: mod_base = OTHER; note = 2'-O-methyl ribonucleotide
  modified_base 94: mod_base = OTHER; note = 2'-O-methyl ribonucleotide
  modified_base 95: mod_base = OTHER; note = 2'-O-methyl ribonucleotide
  modified_base 96: mod_base = OTHER; note = 2'-O-methyl ribonucleotide
  modified_base 97: mod_base = OTHER; note = 2'-O-methyl ribonucleotide
  modified_base 98: mod_base = OTHER; note = 2'-O-methyl ribonucleotide
  modified_base 99: mod_base = OTHER; note = 2'-O-methyl ribonucleotide
  modified_base 100: mod_base = OTHER; note = 2'-O-methyl ribonucleotide
  modified_base 1..4: mod_base = OTHER; note = phosphorothioate linkage
  modified_base 97..100: mod_base = OTHER; note = phosphorothioate linkage

SEQ ID NO: 2279 - RNA, 100 nt, synthetic construct; identical to SEQ ID NO: 287
  source 1..100: mol_type = other RNA
  modified_base 1: mod_base = OTHER; note = 2'-O-methyl ribonucleotide
  modified_base 2: mod_base = OTHER; note = 2'-O-methyl ribonucleotide
  modified_base 3: mod_base = OTHER; note = 2'-O-methyl ribonucleotide
  modified_base 21: mod_base = OTHER; note = 2'-O-methyl ribonucleotide
  modified_base 28: mod_base = OTHER; note = 2'-O-methyl ribonucleotide
  modified_base 29: mod_base = OTHER; note = 2'-O-methyl ribonucleotide
  modified_base 30: mod_base = OTHER; note = 2'-O-methyl ribonucleotide
  modified_base 31: mod_base = OTHER; note = 2'-O-methyl ribonucleotide
  modified_base 32: mod_base = OTHER; note = 2'-O-methyl ribonucleotide
  modified_base 33: mod_base = OTHER; note = 2'-O-methyl ribonucleotide
  modified_base 34: mod_base = OTHER; note = 2'-O-methyl ribonucleotide
  modified_base 35: mod_base = OTHER; note = 2'-O-methyl ribonucleotide
  modified_base 36: mod_base = OTHER; note = 2'-O-methyl ribonucleotide
  modified_base 37: mod_base = OTHER; note = 2'-O-methyl ribonucleotide
  modified_base 38: mod_base = OTHER; note = 2'-O-methyl ribonucleotide
  modified_base 39: mod_base = OTHER; note = 2'-O-methyl ribonucleotide
  modified_base 40: mod_base = OTHER; note = 2'-O-methyl ribonucleotide
  modified_base 41: mod_base = OTHER; note = 2'-O-methyl ribonucleotide
  modified_base 42: mod_base = OTHER; note = 2'-O-methyl ribonucleotide
  modified_base 46: mod_base = OTHER; note = 2'-O-methyl ribonucleotide
  modified_base 48: mod_base = OTHER; note = 2'-O-methyl ribonucleotide
  modified_base 50: mod_base = OTHER; note = 2'-O-methyl ribonucleotide
  modified_base 52: mod_base = OTHER; note = 2'-O-methyl ribonucleotide
  modified_base 53: mod_base = OTHER; note = 2'-O-methyl ribonucleotide
  modified_base 54: mod_base = OTHER; note = 2'-O-methyl ribonucleotide
  modified_base 55: mod_base = OTHER; note = 2'-O-methyl ribonucleotide
  modified_base 56: mod_base = OTHER; note = 2'-O-methyl ribonucleotide
  modified_base 57: mod_base = OTHER; note = 2'-O-methyl ribonucleotide
  modified_base 60: mod_base = OTHER; note = 2'-O-methyl ribonucleotide
  modified_base 61: mod_base = OTHER; note = 2'-O-methyl ribonucleotide
  modified_base 66: mod_base = OTHER; note = 2'-O-methyl ribonucleotide
  modified_base 67: mod_base = OTHER; note = 2'-O-methyl ribonucleotide
  modified_base 70: mod_base = OTHER; note = 2'-O-methyl ribonucleotide
  modified_base 71: mod_base = OTHER; note = 2'-O-methyl ribonucleotide
  modified_base 72: mod_base = OTHER; note = 2'-O-methyl ribonucleotide
  modified_base 73: mod_base = OTHER; note = 2'-O-methyl ribonucleotide
  modified_base 74: mod_base = OTHER; note = 2'-O-methyl ribonucleotide
  modified_base 75: mod_base = OTHER; note = 2'-O-methyl ribonucleotide
  modified_base 76: mod_base = OTHER; note = 2'-O-methyl ribonucleotide
  modified_base 77: mod_base = OTHER; note = 2'-O-methyl ribonucleotide
  modified_base 78: mod_base = OTHER; note = 2'-O-methyl ribonucleotide
  modified_base 79: mod_base = OTHER; note = 2'-O-methyl ribonucleotide
  modified_base 80: mod_base = OTHER; note = 2'-O-methyl ribonucleotide
  modified_base 81: mod_base = OTHER; note = 2'-O-methyl ribonucleotide
  modified_base 83: mod_base = OTHER; note = 2'-O-methyl ribonucleotide
  modified_base 84: mod_base = OTHER; note = 2'-O-methyl ribonucleotide
  modified_base 85: mod_base = OTHER; note = 2'-O-methyl ribonucleotide
  modified_base 86: mod_base = OTHER; note = 2'-O-methyl ribonucleotide
  modified_base 87: mod_base = OTHER; note = 2'-O-methyl ribonucleotide
  modified_base 88: mod_base = OTHER; note = 2'-O-methyl ribonucleotide
  modified_base 89: mod_base = OTHER; note = 2'-O-methyl ribonucleotide
  modified_base 90: mod_base = OTHER; note = 2'-O-methyl ribonucleotide
  modified_base 91: mod_base = OTHER; note = 2'-O-methyl ribonucleotide
  modified_base 92: mod_base = OTHER; note = 2'-O-methyl ribonucleotide
  modified_base 93: mod_base = OTHER; note = 2'-O-methyl ribonucleotide
  modified_base 94: mod_base = OTHER; note = 2'-O-methyl ribonucleotide
  modified_base 95: mod_base = OTHER; note = 2'-O-methyl ribonucleotide
  modified_base 96: mod_base = OTHER; note = 2'-O-methyl ribonucleotide
  modified_base 97: mod_base = OTHER; note = 2'-O-methyl ribonucleotide
  modified_base 98: mod_base = OTHER; note = 2'-O-methyl ribonucleotide
  modified_base 99: mod_base = OTHER; note = 2'-O-methyl ribonucleotide
  modified_base 100: mod_base = OTHER; note = 2'-O-methyl ribonucleotide
  modified_base 1..4: mod_base = OTHER; note = phosphorothioate linkage
  modified_base 97..100: mod_base = OTHER; note = phosphorothioate linkage

SEQ ID NO: 2280 - RNA, 100 nt, synthetic construct; identical to SEQ ID NO: 287
  source 1..100: mol_type = other RNA
  modified_base 1: mod_base = OTHER; note = 2'-O-methyl ribonucleotide
  modified_base 2: mod_base = OTHER; note = 2'-O-methyl ribonucleotide
  modified_base 3: mod_base = OTHER; note = 2'-O-methyl ribonucleotide
  modified_base 21: mod_base = OTHER; note = 2'-O-methyl ribonucleotide
  modified_base 28: mod_base = OTHER; note = 2'-O-methyl ribonucleotide
  modified_base 29: mod_base = OTHER; note = 2'-O-methyl ribonucleotide
  modified_base 30: mod_base = OTHER; note = 2'-O-methyl ribonucleotide
  modified_base 31: mod_base = OTHER; note = 2'-O-methyl ribonucleotide
  modified_base 32: mod_base = OTHER; note = 2'-O-methyl ribonucleotide
  modified_base 34: mod_base = OTHER; note = 2'-O-methyl ribonucleotide
  modified_base 35: mod_base = OTHER; note = 2'-O-methyl ribonucleotide
  modified_base 36: mod_base = OTHER; note = 2'-O-methyl ribonucleotide
  modified_base 37: mod_base = OTHER; note = 2'-O-methyl ribonucleotide
  modified_base 38: mod_base = OTHER; note = 2'-O-methyl ribonucleotide
  modified_base 39: mod_base = OTHER; note = 2'-O-methyl ribonucleotide
  modified_base 40: mod_base = OTHER; note = 2'-O-methyl ribonucleotide
  modified_base 41: mod_base = OTHER; note = 2'-O-methyl ribonucleotide
  modified_base 42: mod_base = OTHER; note = 2'-O-methyl ribonucleotide
  modified_base 46: mod_base = OTHER; note = 2'-O-methyl ribonucleotide
  modified_base 48: mod_base = OTHER; note = 2'-O-methyl ribonucleotide
  modified_base 50: mod_base = OTHER; note = 2'-O-methyl ribonucleotide
  modified_base 52: mod_base = OTHER; note = 2'-O-methyl ribonucleotide
  modified_base 53: mod_base = OTHER; note = 2'-O-methyl ribonucleotide
  modified_base 54: mod_base = OTHER; note = 2'-O-methyl ribonucleotide
  modified_base 57: mod_base = OTHER; note = 2'-O-methyl ribonucleotide
  modified_base 61: mod_base = OTHER; note = 2'-O-methyl ribonucleotide
  modified_base 66: mod_base = OTHER; note = 2'-O-methyl ribonucleotide
  modified_base 67: mod_base = OTHER; note = 2'-O-methyl ribonucleotide
  modified_base 70: mod_base = OTHER; note = 2'-O-methyl ribonucleotide
  modified_base 71: mod_base = OTHER; note = 2'-O-methyl ribonucleotide
  modified_base 72: mod_base = OTHER; note = 2'-O-methyl ribonucleotide
  modified_base 74: mod_base = OTHER; note = 2'-O-methyl ribonucleotide
  modified_base 75: mod_base = OTHER; note = 2'-O-methyl ribonucleotide
  modified_base 76: mod_base = OTHER; note = 2'-O-methyl ribonucleotide
  modified_base 77: mod_base = OTHER; note = 2'-O-methyl ribonucleotide
  modified_base 78: mod_base = OTHER; note = 2'-O-methyl ribonucleotide
  modified_base 79: mod_base = OTHER; note = 2'-O-methyl ribonucleotide
  modified_base 80: mod_base = OTHER; note = 2'-O-methyl ribonucleotide
  modified_base 82: mod_base = OTHER; note = 2'-O-methyl ribonucleotide
  modified_base 83: mod_base = OTHER; note = 2'-O-methyl ribonucleotide
  modified_base 84: mod_base = OTHER; note = 2'-O-methyl ribonucleotide
  modified_base 85: mod_base = OTHER; note = 2'-O-methyl ribonucleotide
  modified_base 86: mod_base = OTHER; note = 2'-O-methyl ribonucleotide
  modified_base 87: mod_base = OTHER; note = 2'-O-methyl ribonucleotide
  modified_base 89: mod_base = OTHER; note = 2'-O-methyl ribonucleotide
  modified_base 92: mod_base = OTHER; note = 2'-O-methyl ribonucleotide
  modified_base 93: mod_base = OTHER; note = 2'-O-methyl ribonucleotide
  modified_base 94: mod_base = OTHER; note = 2'-O-methyl ribonucleotide
  modified_base 95: mod_base = OTHER; note = 2'-O-methyl ribonucleotide
  modified_base 96: mod_base = OTHER; note = 2'-O-methyl ribonucleotide
  modified_base 97: mod_base = OTHER; note = 2'-O-methyl ribonucleotide
  modified_base 98: mod_base = OTHER; note = 2'-O-methyl ribonucleotide
  modified_base 99: mod_base = OTHER; note = 2'-O-methyl ribonucleotide
  modified_base 100: mod_base = OTHER; note = 2'-O-methyl ribonucleotide
  modified_base 1..4: mod_base = OTHER; note = phosphorothioate linkage
  modified_base 97..100: mod_base = OTHER; note = phosphorothioate linkage

SEQ ID NO: 2281 - RNA, 100 nt, synthetic construct; identical to SEQ ID NO: 287
  source 1..100: mol_type = other RNA
  modified_base 1: mod_base = OTHER; note = 2'-O-methyl ribonucleotide
  modified_base 2: mod_base = OTHER; note = 2'-O-methyl ribonucleotide
  modified_base 3: mod_base = OTHER; note = 2'-O-methyl ribonucleotide
  modified_base 21: mod_base = OTHER; note = 2'-O-methyl ribonucleotide
  modified_base 25: mod_base = OTHER; note = 2'-O-methyl ribonucleotide
  modified_base 28: mod_base = OTHER; note = 2'-O-methyl ribonucleotide
  modified_base 29: mod_base = OTHER; note = 2'-O-methyl ribonucleotide
  modified_base 30: mod_base = OTHER; note = 2'-O-methyl ribonucleotide
  modified_base 31: mod_base = OTHER; note = 2'-O-methyl ribonucleotide
  modified_base 32: mod_base = OTHER; note = 2'-O-methyl ribonucleotide
  modified_base 33: mod_base = OTHER; note = 2'-O-methyl ribonucleotide
  modified_base 34: mod_base = OTHER; note = 2'-O-methyl ribonucleotide
  modified_base 35: mod_base = OTHER; note = 2'-O-methyl ribonucleotide
  modified_base 36: mod_base = OTHER; note = 2'-O-methyl ribonucleotide
  modified_base 37: mod_base = OTHER; note = 2'-O-methyl ribonucleotide
  modified_base 38: mod_base = OTHER; note = 2'-O-methyl ribonucleotide
  modified_base 39: mod_base = OTHER; note = 2'-O-methyl ribonucleotide
  modified_base 40: mod_base = OTHER; note = 2'-O-methyl ribonucleotide
  modified_base 41: mod_base = OTHER; note = 2'-O-methyl ribonucleotide
  modified_base 42: mod_base = OTHER; note = 2'-O-methyl ribonucleotide
  modified_base 46: mod_base = OTHER; note = 2'-O-methyl ribonucleotide
  modified_base 48: mod_base = OTHER; note = 2'-O-methyl ribonucleotide
  modified_base 50: mod_base = OTHER; note = 2'-O-methyl ribonucleotide
  modified_base 52: mod_base = OTHER; note = 2'-O-methyl ribonucleotide
  modified_base 53: mod_base = OTHER; note = 2'-O-methyl ribonucleotide
  modified_base 54: mod_base = OTHER; note = 2'-O-methyl ribonucleotide
  modified_base 55: mod_base = OTHER; note = 2'-O-methyl ribonucleotide
  modified_base 56: mod_base = OTHER; note = 2'-O-methyl ribonucleotide
  modified_base 57: mod_base = OTHER; note = 2'-O-methyl ribonucleotide
  modified_base 60: mod_base = OTHER; note = 2'-O-methyl ribonucleotide
  modified_base 61: mod_base = OTHER; note = 2'-O-methyl ribonucleotide
  modified_base 66: mod_base = OTHER; note = 2'-O-methyl ribonucleotide
  modified_base 67: mod_base = OTHER; note = 2'-O-methyl ribonucleotide
  modified_base 70: mod_base = OTHER; note = 2'-O-methyl ribonucleotide
  modified_base 71: mod_base = OTHER; note = 2'-O-methyl ribonucleotide
  modified_base 72: mod_base = OTHER; note = 2'-O-methyl ribonucleotide
  modified_base 73: mod_base = OTHER; note = 2'-O-methyl ribonucleotide
  modified_base 74: mod_base = OTHER; note = 2'-O-methyl ribonucleotide
  modified_base 75: mod_base = OTHER; note = 2'-O-methyl ribonucleotide
  modified_base 76: mod_base = OTHER; note = 2'-O-methyl ribonucleotide
  modified_base 77: mod_base = OTHER; note = 2'-O-methyl ribonucleotide
  modified_base 78: mod_base = OTHER; note = 2'-O-methyl ribonucleotide
  modified_base 79: mod_base = OTHER; note = 2'-O-methyl ribonucleotide
  modified_base 80: mod_base = OTHER; note = 2'-O-methyl ribonucleotide
  modified_base 81: mod_base = OTHER; note = 2'-O-methyl ribonucleotide
  modified_base 83: mod_base = OTHER; note = 2'-O-methyl ribonucleotide
  modified_base 84: mod_base = OTHER; note = 2'-O-methyl ribonucleotide
  modified_base 85: mod_base = OTHER; note = 2'-O-methyl ribonucleotide
  modified_base 86: mod_base = OTHER; note = 2'-O-methyl ribonucleotide
  modified_base 87: mod_base = OTHER; note = 2'-O-methyl ribonucleotide
  modified_base 88: mod_base = OTHER; note = 2'-O-methyl ribonucleotide
  modified_base 89: mod_base = OTHER; note = 2'-O-methyl ribonucleotide
  modified_base 90: mod_base = OTHER; note = 2'-O-methyl ribonucleotide
  modified_base 91: mod_base = OTHER; note = 2'-O-methyl ribonucleotide
  modified_base 92: mod_base = OTHER; note = 2'-O-methyl ribonucleotide
  modified_base 93: mod_base = OTHER; note = 2'-O-methyl ribonucleotide
  modified_base 94: mod_base = OTHER; note = 2'-O-methyl ribonucleotide
  modified_base 95: mod_base = OTHER; note = 2'-O-methyl ribonucleotide
  modified_base 96: mod_base = OTHER; note = 2'-O-methyl ribonucleotide
  modified_base 97: mod_base = OTHER; note = 2'-O-methyl ribonucleotide
  modified_base 98: mod_base = OTHER; note = 2'-O-methyl ribonucleotide
  modified_base 99: mod_base = OTHER; note = 2'-O-methyl ribonucleotide
  modified_base 100: mod_base = OTHER; note = 2'-O-methyl ribonucleotide
  modified_base 1..4: mod_base = OTHER; note = phosphorothioate linkage
  modified_base 97..100: mod_base = OTHER; note = phosphorothioate linkage

SEQ ID NO: 2282 - RNA, 100 nt, synthetic construct; identical to SEQ ID NO: 287
  source 1..100: mol_type = other RNA
  modified_base 1: mod_base = OTHER; note = 2'-O-methyl ribonucleotide
  modified_base 2: mod_base = OTHER; note = 2'-O-methyl ribonucleotide
  modified_base 3: mod_base = OTHER; note = 2'-O-methyl ribonucleotide
  modified_base 21: mod_base = OTHER; note = 2'-O-methyl ribonucleotide
  modified_base 28: mod_base = OTHER; note = 2'-O-methyl ribonucleotide
  modified_base 29: mod_base = OTHER; note = 2'-O-methyl ribonucleotide
  modified_base 30: mod_base = OTHER; note = 2'-O-methyl ribonucleotide
  modified_base 31: mod_base = OTHER; note = 2'-O-methyl ribonucleotide
  modified_base 32: mod_base = OTHER; note = 2'-O-methyl ribonucleotide
  modified_base 33: mod_base = OTHER; note = 2'-O-methyl ribonucleotide
  modified_base 34: mod_base = OTHER; note = 2'-O-methyl ribonucleotide
  modified_base 35: mod_base = OTHER; note = 2'-O-methyl ribonucleotide
  modified_base 36: mod_base = OTHER; note = 2'-O-methyl ribonucleotide
  modified_base 37: mod_base = OTHER; note = 2'-O-methyl ribonucleotide
  modified_base 38: mod_base = OTHER; note = 2'-O-methyl ribonucleotide
  modified_base 39: mod_base = OTHER; note = 2'-O-methyl ribonucleotide
  modified_base 40: mod_base = OTHER; note = 2'-O-methyl ribonucleotide
  modified_base 41: mod_base = OTHER; note = 2'-O-methyl ribonucleotide
  modified_base 42: mod_base = OTHER; note = 2'-O-methyl ribonucleotide
  modified_base 46: mod_base = OTHER; note = 2'-O-methyl ribonucleotide
  modified_base 48: mod_base = OTHER; note = 2'-O-methyl ribonucleotide
  modified_base 50: mod_base = OTHER; note = 2'-O-methyl ribonucleotide
  modified_base 52: mod_base = OTHER; note = 2'-O-methyl ribonucleotide
  modified_base 53: mod_base = OTHER; note = 2'-O-methyl ribonucleotide
  modified_base 54: mod_base = OTHER; note = 2'-O-methyl ribonucleotide
  modified_base 55: mod_base = OTHER; note = 2'-O-methyl ribonucleotide
  modified_base 56: mod_base = OTHER; note = 2'-O-methyl ribonucleotide
  modified_base 57: mod_base = OTHER; note = 2'-O-methyl ribonucleotide
  modified_base 60: mod_base = OTHER; note = 2'-O-methyl ribonucleotide
  modified_base 61: mod_base = OTHER; note = 2'-O-methyl ribonucleotide
  modified_base 64: mod_base = OTHER; note = 2'-O-methyl ribonucleotide
  modified_base 66: mod_base = OTHER; note = 2'-O-methyl ribonucleotide
  modified_base 67: mod_base = OTHER; note = 2'-O-methyl ribonucleotide
  modified_base 70: mod_base = OTHER; note = 2'-O-methyl ribonucleotide
  modified_base 71: mod_base = OTHER; note = 2'-O-methyl ribonucleotide
  modified_base 72: mod_base = OTHER; note = 2'-O-methyl ribonucleotide
  modified_base 73: mod_base = OTHER; note = 2'-O-methyl ribonucleotide
  modified_base 74: mod_base = OTHER; note = 2'-O-methyl ribonucleotide
  modified_base 75: mod_base = OTHER; note = 2'-O-methyl ribonucleotide
  modified_base 76: mod_base = OTHER; note = 2'-O-methyl ribonucleotide
  modified_base 77: mod_base = OTHER; note = 2'-O-methyl ribonucleotide
  modified_base 78: mod_base = OTHER; note = 2'-O-methyl ribonucleotide
  modified_base 79: mod_base = OTHER; note = 2'-O-methyl ribonucleotide
  modified_base 80: mod_base = OTHER; note = 2'-O-methyl ribonucleotide
  modified_base 81: mod_base = OTHER; note = 2'-O-methyl ribonucleotide
  modified_base 83: mod_base = OTHER; note = 2'-O-methyl ribonucleotide
  modified_base 84: mod_base = OTHER; note = 2'-O-methyl ribonucleotide
  modified_base 85: mod_base = OTHER; note = 2'-O-methyl ribonucleotide
  modified_base 86: mod_base = OTHER; note = 2'-O-methyl ribonucleotide
  modified_base 87: mod_base = OTHER; note = 2'-O-methyl ribonucleotide
  modified_base 88: mod_base = OTHER; note = 2'-O-methyl ribonucleotide
  modified_base 89: mod_base = OTHER; note = 2'-O-methyl ribonucleotide
  modified_base 90: mod_base = OTHER; note = 2'-O-methyl ribonucleotide
  modified_base 91: mod_base = OTHER; note = 2'-O-methyl ribonucleotide
  modified_base 92: mod_base = OTHER; note = 2'-O-methyl ribonucleotide
  modified_base 93: mod_base = OTHER; note = 2'-O-methyl ribonucleotide
  modified_base 94: mod_base = OTHER; note = 2'-O-methyl ribonucleotide
  modified_base 95: mod_base = OTHER; note = 2'-O-methyl ribonucleotide
  modified_base 96: mod_base = OTHER; note = 2'-O-methyl ribonucleotide
  modified_base 97: mod_base = OTHER; note = 2'-O-methyl ribonucleotide
  modified_base 98: mod_base = OTHER; note = 2'-O-methyl ribonucleotide
  modified_base 99: mod_base = OTHER; note = 2'-O-methyl ribonucleotide
  modified_base 100: mod_base = OTHER; note = 2'-O-methyl ribonucleotide
  modified_base 1..4: mod_base = OTHER; note = phosphorothioate linkage
  modified_base 97..100: mod_base = OTHER; note = phosphorothioate linkage

SEQ ID NO: 2283 - RNA, 100 nt, synthetic construct; identical to SEQ ID NO: 287
  source 1..100: mol_type = other RNA
  modified_base 1: mod_base = OTHER; note = 2'-O-methyl ribonucleotide
  modified_base 2: mod_base = OTHER; note = 2'-O-methyl ribonucleotide
  modified_base 3: mod_base = OTHER; note = 2'-O-methyl ribonucleotide
  modified_base 21: mod_base = OTHER; note = 2'-O-methyl ribonucleotide
  modified_base 25: mod_base = OTHER; note = 2'-O-methyl ribonucleotide
  modified_base 28: mod_base = OTHER; note = 2'-O-methyl ribonucleotide
  modified_base 29: mod_base = OTHER; note = 2'-O-methyl ribonucleotide
  modified_base 30: mod_base = OTHER; note = 2'-O-methyl ribonucleotide
  modified_base 31: mod_base = OTHER; note = 2'-O-methyl ribonucleotide
  modified_base 32: mod_base = OTHER; note = 2'-O-methyl ribonucleotide
  modified_base 33: mod_base = OTHER; note = 2'-O-methyl ribonucleotide
  modified_base 34: mod_base = OTHER; note = 2'-O-methyl ribonucleotide
  modified_base 35: mod_base = OTHER; note = 2'-O-methyl ribonucleotide
  modified_base 36: mod_base = OTHER; note = 2'-O-methyl ribonucleotide
  modified_base 37: mod_base = OTHER; note = 2'-O-methyl ribonucleotide
  modified_base 38: mod_base = OTHER; note = 2'-O-methyl ribonucleotide
  modified_base 39: mod_base = OTHER; note = 2'-O-methyl ribonucleotide
  modified_base 40: mod_base = OTHER; note = 2'-O-methyl ribonucleotide
  modified_base 41: mod_base = OTHER; note = 2'-O-methyl ribonucleotide
  modified_base 42: mod_base = OTHER; note = 2'-O-methyl ribonucleotide
  modified_base 46: mod_base = OTHER; note = 2'-O-methyl ribonucleotide
  modified_base 48: mod_base = OTHER; note = 2'-O-methyl ribonucleotide
  modified_base 50: mod_base = OTHER; note = 2'-O-methyl ribonucleotide
  modified_base 52: mod_base = OTHER; note = 2'-O-methyl ribonucleotide
  modified_base 53: mod_base = OTHER; note = 2'-O-methyl ribonucleotide
  modified_base 54: mod_base = OTHER; note = 2'-O-methyl ribonucleotide
  modified_base 55: mod_base = OTHER; note = 2'-O-methyl ribonucleotide
  modified_base 56: mod_base = OTHER; note = 2'-O-methyl ribonucleotide
  modified_base 57: mod_base = OTHER; note = 2'-O-methyl ribonucleotide
  modified_base 60: mod_base = OTHER; note = 2'-O-methyl ribonucleotide
  modified_base 61: mod_base = OTHER; note = 2'-O-methyl ribonucleotide
  modified_base 64: mod_base = OTHER; note = 2'-O-methyl ribonucleotide
  modified_base 66: mod_base = OTHER; note = 2'-O-methyl ribonucleotide
  modified_base 67: mod_base = OTHER; note = 2'-O-methyl ribonucleotide
  modified_base 70: mod_base = OTHER; note = 2'-O-methyl ribonucleotide
  modified_base 71: mod_base = OTHER; note = 2'-O-methyl ribonucleotide
  modified_base 72: mod_base = OTHER; note = 2'-O-methyl ribonucleotide
  modified_base 73: mod_base = OTHER; note = 2'-O-methyl ribonucleotide
  modified_base 74: mod_base = OTHER; note = 2'-O-methyl ribonucleotide
  modified_base 75: mod_base = OTHER; note = 2'-O-methyl ribonucleotide
  modified_base 76: mod_base = OTHER; note = 2'-O-methyl ribonucleotide
  modified_base 77: mod_base = OTHER; note = 2'-O-methyl ribonucleotide
  modified_base 78: mod_base = OTHER; note = 2'-O-methyl ribonucleotide
  modified_base 79: mod_base = OTHER; note = 2'-O-methyl ribonucleotide
  modified_base 80: mod_base = OTHER; note = 2'-O-methyl ribonucleotide
  modified_base 81: mod_base = OTHER; note = 2'-O-methyl ribonucleotide
  modified_base 83: mod_base = OTHER; note = 2'-O-methyl ribonucleotide
  modified_base 84: mod_base = OTHER; note = 2'-O-methyl ribonucleotide
  modified_base 85: mod_base = OTHER; note = 2'-O-methyl ribonucleotide
  modified_base 86: mod_base = OTHER; note = 2'-O-methyl ribonucleotide
  modified_base 87: mod_base = OTHER; note = 2'-O-methyl ribonucleotide
  modified_base 88: mod_base = OTHER; note = 2'-O-methyl ribonucleotide
  modified_base 89: mod_base = OTHER; note = 2'-O-methyl ribonucleotide
  modified_base 90: mod_base = OTHER; note = 2'-O-methyl ribonucleotide
  modified_base 91: mod_base = OTHER; note = 2'-O-methyl ribonucleotide
  modified_base 92: mod_base = OTHER; note = 2'-O-methyl ribonucleotide
  modified_base 93: mod_base = OTHER; note = 2'-O-methyl ribonucleotide
  modified_base 94: mod_base = OTHER; note = 2'-O-methyl ribonucleotide
  modified_base 95: mod_base = OTHER; note = 2'-O-methyl ribonucleotide
  modified_base 96: mod_base = OTHER; note = 2'-O-methyl ribonucleotide
  modified_base 97: mod_base = OTHER; note = 2'-O-methyl ribonucleotide
  modified_base 98: mod_base = OTHER; note = 2'-O-methyl ribonucleotide
  modified_base 99: mod_base = OTHER; note = 2'-O-methyl ribonucleotide
  modified_base 100: mod_base = OTHER; note = 2'-O-methyl ribonucleotide
  modified_base 1..4: mod_base = OTHER; note = phosphorothioate linkage
  modified_base 97..100: mod_base = OTHER; note = phosphorothioate linkage

SEQ ID NO: 2284 - RNA, 100 nt, synthetic construct; identical to SEQ ID NO: 287
  source 1..100: mol_type = other RNA
  modified_base 1: mod_base = OTHER; note = 2'-O-methyl ribonucleotide
  modified_base 2: mod_base = OTHER; note = 2'-O-methyl ribonucleotide
  modified_base 3: mod_base = OTHER; note = 2'-O-methyl ribonucleotide
  modified_base 21: mod_base = OTHER; note = 2'-O-methyl ribonucleotide
  modified_base 25: mod_base = OTHER; note = 2'-O-methyl ribonucleotide
  modified_base 28: mod_base = OTHER; note = 2'-O-methyl ribonucleotide
  modified_base 29: mod_base = OTHER; note = 2'-O-methyl ribonucleotide
  modified_base 30: mod_base = OTHER; note = 2'-O-methyl ribonucleotide
  modified_base 31: mod_base = OTHER; note = 2'-O-methyl ribonucleotide
  modified_base 32: mod_base = OTHER; note = 2'-O-methyl ribonucleotide
  modified_base 33: mod_base = OTHER; note = 2'-O-methyl ribonucleotide
  modified_base 34: mod_base = OTHER; note = 2'-O-methyl ribonucleotide
  modified_base 35: mod_base = OTHER; note = 2'-O-methyl ribonucleotide
  modified_base 36: mod_base = OTHER; note = 2'-O-methyl ribonucleotide
  modified_base 37: mod_base = OTHER; note = 2'-O-methyl ribonucleotide
  modified_base 38: mod_base = OTHER; note = 2'-O-methyl ribonucleotide
  modified_base 39: mod_base = OTHER; note = 2'-O-methyl ribonucleotide
  modified_base 40: mod_base = OTHER; note = 2'-O-methyl ribonucleotide
  modified_base 41: mod_base = OTHER; note = 2'-O-methyl ribonucleotide
  modified_base 42: mod_base = OTHER; note = 2'-O-methyl ribonucleotide
  modified_base 45: mod_base = OTHER; note = 2'-O-methyl ribonucleotide
  modified_base 46: mod_base = OTHER; note = 2'-O-methyl ribonucleotide
  modified_base 48: mod_base = OTHER; note = 2'-O-methyl ribonucleotide
  modified_base 50: mod_base = OTHER; note = 2'-O-methyl ribonucleotide
  modified_base 52: mod_base = OTHER; note = 2'-O-methyl ribonucleotide
  modified_base 53: mod_base = OTHER; note = 2'-O-methyl ribonucleotide
  modified_base 54: mod_base = OTHER; note = 2'-O-methyl ribonucleotide
  modified_base 55: mod_base = OTHER; note = 2'-O-methyl ribonucleotide
  modified_base 56: mod_base = OTHER; note = 2'-O-methyl ribonucleotide
  modified_base 57: mod_base = OTHER; note = 2'-O-methyl ribonucleotide
  modified_base 60: mod_base = OTHER; note = 2'-O-methyl ribonucleotide
  modified_base 61: mod_base = OTHER; note = 2'-O-methyl ribonucleotide
  modified_base 66: mod_base = OTHER; note = 2'-O-methyl ribonucleotide
  modified_base 67: mod_base = OTHER; note = 2'-O-methyl ribonucleotide
  modified_base 70: mod_base = OTHER; note = 2'-O-methyl ribonucleotide
  modified_base 71: mod_base = OTHER; note = 2'-O-methyl ribonucleotide
  modified_base 72: mod_base = OTHER; note = 2'-O-methyl ribonucleotide
  modified_base 73: mod_base = OTHER; note = 2'-O-methyl ribonucleotide
  modified_base 74: mod_base = OTHER; note = 2'-O-methyl ribonucleotide
  modified_base 75: mod_base = OTHER; note = 2'-O-methyl ribonucleotide
  modified_base 76: mod_base = OTHER; note = 2'-O-methyl ribonucleotide
  modified_base 77: mod_base = OTHER; note = 2'-O-methyl ribonucleotide
  modified_base 78: mod_base = OTHER; note = 2'-O-methyl ribonucleotide
  modified_base 79: mod_base = OTHER; note = 2'-O-methyl ribonucleotide
  modified_base 80: mod_base = OTHER; note = 2'-O-methyl ribonucleotide
  modified_base 81: mod_base = OTHER; note = 2'-O-methyl ribonucleotide
  modified_base 83: mod_base = OTHER; note = 2'-O-methyl ribonucleotide
  modified_base 84: mod_base = OTHER; note = 2'-O-methyl ribonucleotide
  modified_base 85: mod_base = OTHER; note = 2'-O-methyl ribonucleotide
  modified_base 86: mod_base = OTHER; note = 2'-O-methyl ribonucleotide
  modified_base 87: mod_base = OTHER; note = 2'-O-methyl ribonucleotide
  modified_base 88: mod_base = OTHER; note = 2'-O-methyl ribonucleotide
  modified_base 89: mod_base = OTHER; note = 2'-O-methyl ribonucleotide
  modified_base 90: mod_base = OTHER; note = 2'-O-methyl ribonucleotide
  modified_base 91: mod_base = OTHER; note = 2'-O-methyl ribonucleotide
  modified_base 92: mod_base = OTHER; note = 2'-O-methyl ribonucleotide
  modified_base 93: mod_base = OTHER; note = 2'-O-methyl ribonucleotide
  modified_base 94: mod_base = OTHER; note = 2'-O-methyl ribonucleotide
  modified_base 95: mod_base = OTHER; note = 2'-O-methyl ribonucleotide
  modified_base 96: mod_base = OTHER; note = 2'-O-methyl ribonucleotide
  modified_base 97: mod_base = OTHER; note = 2'-O-methyl ribonucleotide
  modified_base 98: mod_base = OTHER; note = 2'-O-methyl ribonucleotide
  modified_base 99: mod_base = OTHER; note = 2'-O-methyl ribonucleotide
  modified_base 100: mod_base = OTHER; note = 2'-O-methyl ribonucleotide
  modified_base 1..4: mod_base = OTHER; note = phosphorothioate linkage
  modified_base 97..100: mod_base = OTHER; note = phosphorothioate linkage

SEQ ID NO: 2285 - RNA, 100 nt, synthetic construct; identical to SEQ ID NO: 287
  source 1..100: mol_type = other RNA
  modified_base 1: mod_base = OTHER; note = 2'-O-methyl ribonucleotide
  modified_base 2: mod_base = OTHER; note = 2'-O-methyl ribonucleotide
  modified_base 3: mod_base = OTHER; note = 2'-O-methyl ribonucleotide
  modified_base 21: mod_base = OTHER; note = 2'-O-methyl ribonucleotide
  modified_base 28: mod_base = OTHER; note = 2'-O-methyl ribonucleotide
  modified_base 29: mod_base = OTHER; note = 2'-O-methyl ribonucleotide
  modified_base 30: mod_base = OTHER; note = 2'-O-methyl ribonucleotide
  modified_base 31: mod_base = OTHER; note = 2'-O-methyl ribonucleotide
  modified_base 32: mod_base = OTHER; note = 2'-O-methyl ribonucleotide
  modified_base 33: mod_base = OTHER; note = 2'-O-methyl ribonucleotide
  modified_base 34: mod_base = OTHER; note = 2'-O-methyl ribonucleotide
  modified_base 35: mod_base = OTHER; note = 2'-O-methyl ribonucleotide
  modified_base 36: mod_base = OTHER; note = 2'-O-methyl ribonucleotide
  modified_base 37: mod_base = OTHER; note = 2'-O-methyl ribonucleotide
  modified_base 38: mod_base = OTHER; note = 2'-O-methyl ribonucleotide
  modified_base 39: mod_base = OTHER; note = 2'-O-methyl ribonucleotide
  modified_base 40: mod_base = OTHER; note = 2'-O-methyl ribonucleotide
  modified_base 41: mod_base = OTHER; note = 2'-O-methyl ribonucleotide
  modified_base 42: mod_base = OTHER; note = 2'-O-methyl ribonucleotide
  modified_base 45: mod_base = OTHER; note = 2'-O-methyl ribonucleotide
  modified_base 46: mod_base = OTHER; note = 2'-O-methyl ribonucleotide
  modified_base 48: mod_base = OTHER; note = 2'-O-methyl ribonucleotide
  modified_base 50: mod_base = OTHER; note = 2'-O-methyl ribonucleotide
  modified_base 52: mod_base = OTHER; note = 2'-O-methyl ribonucleotide
  modified_base 53: mod_base = OTHER; note = 2'-O-methyl ribonucleotide
  modified_base 54: mod_base = OTHER; note = 2'-O-methyl ribonucleotide
  modified_base 55: mod_base = OTHER; note = 2'-O-methyl ribonucleotide
  modified_base 56: mod_base = OTHER; note = 2'-O-methyl ribonucleotide
  modified_base 57: mod_base = OTHER; note = 2'-O-methyl ribonucleotide
  modified_base 60: mod_base = OTHER; note = 2'-O-methyl ribonucleotide
  modified_base 61: mod_base = OTHER; note = 2'-O-methyl ribonucleotide
  modified_base 64: mod_base = OTHER; note = 2'-O-methyl ribonucleotide
  modified_base 66: mod_base = OTHER; note = 2'-O-methyl ribonucleotide
  modified_base 67: mod_base = OTHER; note = 2'-O-methyl ribonucleotide
  modified_base 70: mod_base = OTHER; note = 2'-O-methyl ribonucleotide
  modified_base 71: mod_base = OTHER; note = 2'-O-methyl ribonucleotide
  modified_base 72: mod_base = OTHER; note = 2'-O-methyl ribonucleotide
  modified_base 73: mod_base = OTHER; note = 2'-O-methyl ribonucleotide
  modified_base 74: mod_base = OTHER; note = 2'-O-methyl ribonucleotide
  modified_base 75: mod_base = OTHER; note = 2'-O-methyl ribonucleotide
  modified_base 76: mod_base = OTHER; note = 2'-O-methyl ribonucleotide
  modified_base 77: mod_base = OTHER; note = 2'-O-methyl ribonucleotide
  modified_base 78: mod_base = OTHER; note = 2'-O-methyl ribonucleotide
  modified_base 79: mod_base = OTHER; note = 2'-O-methyl ribonucleotide
  modified_base 80: mod_base = OTHER; note = 2'-O-methyl ribonucleotide
  modified_base 81: mod_base = OTHER; note = 2'-O-methyl ribonucleotide
  modified_base 83: mod_base = OTHER; note = 2'-O-methyl ribonucleotide
  modified_base 84: mod_base = OTHER; note = 2'-O-methyl ribonucleotide
  modified_base 85: mod_base = OTHER; note = 2'-O-methyl ribonucleotide
  modified_base 86: mod_base = OTHER; note = 2'-O-methyl ribonucleotide
  modified_base 87: mod_base = OTHER; note = 2'-O-methyl ribonucleotide
  modified_base 88: mod_base = OTHER; note = 2'-O-methyl ribonucleotide
  modified_base 89: mod_base = OTHER; note = 2'-O-methyl ribonucleotide
  modified_base 90: mod_base = OTHER; note = 2'-O-methyl ribonucleotide
  modified_base 91: mod_base = OTHER; note = 2'-O-methyl ribonucleotide
  modified_base 92: mod_base = OTHER; note = 2'-O-methyl ribonucleotide
  modified_base 93: mod_base = OTHER; note = 2'-O-methyl ribonucleotide
  modified_base 94: mod_base = OTHER; note = 2'-O-methyl ribonucleotide
  modified_base 95: mod_base = OTHER; note = 2'-O-methyl ribonucleotide
  modified_base 96: mod_base = OTHER; note = 2'-O-methyl ribonucleotide
  modified_base 97: mod_base = OTHER; note = 2'-O-methyl ribonucleotide
  modified_base 98: mod_base = OTHER; note = 2'-O-methyl ribonucleotide
  modified_base 99: mod_base = OTHER; note = 2'-O-methyl ribonucleotide
  modified_base 100: mod_base = OTHER; note = 2'-O-methyl ribonucleotide
  modified_base 1..4: mod_base = OTHER; note = phosphorothioate linkage
  modified_base 97..100: mod_base = OTHER; note = phosphorothioate linkage

SEQ ID NO: 2286 - RNA, 100 nt, synthetic construct; identical to SEQ ID NO: 287
  source 1..100: mol_type = other RNA
  modified_base 1: mod_base = OTHER; note = 2'-O-methyl ribonucleotide
  modified_base 2: mod_base = OTHER; note = 2'-O-methyl ribonucleotide
  modified_base 3: mod_base = OTHER; note = 2'-O-methyl ribonucleotide
  modified_base 21: mod_base = OTHER; note = 2'-O-methyl ribonucleotide
  modified_base 25: mod_base = OTHER; note = 2'-O-methyl ribonucleotide
  modified_base 28: mod_base = OTHER; note = 2'-O-methyl ribonucleotide
  modified_base 29: mod_base = OTHER; note = 2'-O-methyl ribonucleotide
  modified_base 30: mod_base = OTHER; note = 2'-O-methyl ribonucleotide
  modified_base 31: mod_base = OTHER; note = 2'-O-methyl ribonucleotide
  modified_base 32: mod_base = OTHER; note = 2'-O-methyl ribonucleotide
  modified_base 33: mod_base = OTHER; note = 2'-O-methyl ribonucleotide
  modified_base 34: mod_base = OTHER; note = 2'-O-methyl ribonucleotide
  modified_base 35: mod_base = OTHER; note = 2'-O-methyl ribonucleotide
  modified_base 36: mod_base = OTHER; note = 2'-O-methyl ribonucleotide
  modified_base 37: mod_base = OTHER; note = 2'-O-methyl ribonucleotide
  modified_base 38: mod_base = OTHER; note = 2'-O-methyl ribonucleotide
  modified_base 39: mod_base = OTHER; note = 2'-O-methyl ribonucleotide
  modified_base 40: mod_base = OTHER; note = 2'-O-methyl ribonucleotide
  modified_base 41: mod_base = OTHER; note = 2'-O-methyl ribonucleotide
  modified_base 42: mod_base = OTHER; note = 2'-O-methyl ribonucleotide
  modified_base 45: mod_base = OTHER; note = 2'-O-methyl ribonucleotide
  modified_base 46: mod_base = OTHER; note = 2'-O-methyl ribonucleotide
  modified_base 48: mod_base = OTHER; note = 2'-O-methyl ribonucleotide
  modified_base 50: mod_base = OTHER; note = 2'-O-methyl ribonucleotide
  modified_base 52: mod_base = OTHER; note = 2'-O-methyl ribonucleotide
  modified_base 53: mod_base = OTHER; note = 2'-O-methyl ribonucleotide
  modified_base 54: mod_base = OTHER; note = 2'-O-methyl ribonucleotide
  modified_base 55: mod_base = OTHER; note = 2'-O-methyl ribonucleotide
  modified_base 56: mod_base = OTHER; note = 2'-O-methyl ribonucleotide
  modified_base 57: mod_base = OTHER; note = 2'-O-methyl ribonucleotide
  modified_base 60: mod_base = OTHER; note = 2'-O-methyl ribonucleotide
  modified_base 61: mod_base = OTHER; note = 2'-O-methyl ribonucleotide
  modified_base 64: mod_base = OTHER; note = 2'-O-methyl ribonucleotide
  modified_base 66: mod_base = OTHER; note = 2'-O-methyl ribonucleotide
  modified_base 67: mod_base = OTHER; note = 2'-O-methyl ribonucleotide
  modified_base 70: mod_base = OTHER; note = 2'-O-methyl ribonucleotide
  modified_base 71: mod_base = OTHER; note = 2'-O-methyl ribonucleotide
  modified_base 72: mod_base = OTHER; note = 2'-O-methyl ribonucleotide
  modified_base 73: mod_base = OTHER; note = 2'-O-methyl ribonucleotide
  modified_base 74: mod_base = OTHER; note = 2'-O-methyl ribonucleotide
  modified_base 75: mod_base = OTHER; note = 2'-O-methyl ribonucleotide
  modified_base 76: mod_base = OTHER; note = 2'-O-methyl ribonucleotide
  modified_base 77: mod_base = OTHER; note = 2'-O-methyl ribonucleotide
  modified_base 78: mod_base = OTHER; note = 2'-O-methyl ribonucleotide
  modified_base 79: mod_base = OTHER; note = 2'-O-methyl ribonucleotide
  modified_base 80: mod_base = OTHER; note = 2'-O-methyl ribonucleotide
  modified_base 81: mod_base = OTHER; note = 2'-O-methyl ribonucleotide
  modified_base 83: mod_base = OTHER; note = 2'-O-methyl ribonucleotide
  modified_base 84: mod_base = OTHER; note = 2'-O-methyl ribonucleotide
  modified_base 85: mod_base = OTHER; note = 2'-O-methyl ribonucleotide
  modified_base 86: mod_base = OTHER; note = 2'-O-methyl ribonucleotide
  modified_base 87: mod_base = OTHER; note = 2'-O-methyl ribonucleotide
  modified_base 88: mod_base = OTHER; note = 2'-O-methyl ribonucleotide
  modified_base 89: mod_base = OTHER; note = 2'-O-methyl ribonucleotide
  modified_base 90: mod_base = OTHER; note = 2'-O-methyl ribonucleotide
  modified_base 91: mod_base = OTHER; note = 2'-O-methyl ribonucleotide
  modified_base 92: mod_base = OTHER; note = 2'-O-methyl ribonucleotide
  modified_base 93: mod_base = OTHER; note = 2'-O-methyl ribonucleotide
  modified_base 94: mod_base = OTHER; note = 2'-O-methyl ribonucleotide
  modified_base 95: mod_base = OTHER; note = 2'-O-methyl ribonucleotide
  modified_base 96: mod_base = OTHER; note = 2'-O-methyl ribonucleotide
  modified_base 97: mod_base = OTHER; note = 2'-O-methyl ribonucleotide
  modified_base 98: mod_base = OTHER; note = 2'-O-methyl ribonucleotide
  modified_base 99: mod_base = OTHER; note = 2'-O-methyl ribonucleotide
  modified_base 100: mod_base = OTHER; note = 2'-O-methyl ribonucleotide
  modified_base 1..4: mod_base = OTHER; note = phosphorothioate linkage
  modified_base 97..100: mod_base = OTHER; note = phosphorothioate linkage

SEQ ID NO: 2287 - RNA, 100 nt, synthetic construct; identical to SEQ ID NO: 287
  source 1..100: mol_type = other RNA
  modified_base 1: mod_base = OTHER; note = 2'-O-methyl ribonucleotide
  modified_base 2: mod_base = OTHER; note = 2'-O-methyl ribonucleotide
  modified_base 3: mod_base = OTHER; note = 2'-O-methyl ribonucleotide
  modified_base 6: mod_base = OTHER; note = 2'-O-methyl ribonucleotide
  modified_base 16: mod_base = OTHER; note = 2'-O-methyl ribonucleotide
  modified_base 21: mod_base = OTHER; note = 2'-O-methyl ribonucleotide
  modified_base 28: mod_base = OTHER; note = 2'-O-methyl ribonucleotide
  modified_base 29: mod_base = OTHER; note = 2'-O-methyl ribonucleotide
  modified_base 30: mod_base = OTHER; note = 2'-O-methyl ribonucleotide
  modified_base 31: mod_base = OTHER; note = 2'-O-methyl ribonucleotide
  modified_base 32: mod_base = OTHER; note = 2'-O-methyl ribonucleotide
  modified_base 33: mod_base = OTHER; note = 2'-O-methyl ribonucleotide
  modified_base 34: mod_base = OTHER; note = 2'-O-methyl ribonucleotide
  modified_base 35: mod_base = OTHER; note = 2'-O-methyl ribonucleotide
  modified_base 36: mod_base = OTHER; note = 2'-O-methyl ribonucleotide
  modified_base 37: mod_base = OTHER; note = 2'-O-methyl ribonucleotide
  modified_base 38: mod_base = OTHER; note = 2'-O-methyl ribonucleotide
  modified_base 39: mod_base = OTHER; note = 2'-O-methyl ribonucleotide
  modified_base 40: mod_base = OTHER; note = 2'-O-methyl ribonucleotide
  modified_base 41: mod_base = OTHER; note = 2'-O-methyl ribonucleotide
  modified_base 42: mod_base = OTHER; note = 2'-O-methyl ribonucleotide
  modified_base 46: mod_base = OTHER; note = 2'-O-methyl ribonucleotide
  modified_base 48: mod_base = OTHER; note = 2'-O-methyl ribonucleotide
  modified_base 50: mod_base = OTHER; note = 2'-O-methyl ribonucleotide
  modified_base 52: mod_base = OTHER; note = 2'-O-methyl ribonucleotide
  modified_base 53: mod_base = OTHER; note = 2'-O-methyl ribonucleotide
  modified_base 54: mod_base = OTHER; note = 2'-O-methyl ribonucleotide
  modified_base 55: mod_base = OTHER; note = 2'-O-methyl ribonucleotide
  modified_base 56: mod_base = OTHER; note = 2'-O-methyl ribonucleotide
  modified_base 57: mod_base = OTHER; note = 2'-O-methyl ribonucleotide
  modified_base 60: mod_base = OTHER; note = 2'-O-methyl ribonucleotide
  modified_base 61: mod_base = OTHER; note = 2'-O-methyl ribonucleotide
  modified_base 66: mod_base = OTHER; note = 2'-O-methyl ribonucleotide
  modified_base 67: mod_base = OTHER; note = 2'-O-methyl ribonucleotide
  modified_base 70: mod_base = OTHER; note = 2'-O-methyl ribonucleotide
  modified_base 71: mod_base = OTHER; note = 2'-O-methyl ribonucleotide
  modified_base 72: mod_base = OTHER; note = 2'-O-methyl ribonucleotide
  modified_base 73: mod_base = OTHER; note = 2'-O-methyl ribonucleotide
  modified_base 74: mod_base = OTHER; note = 2'-O-methyl ribonucleotide
  modified_base 75: mod_base = OTHER; note = 2'-O-methyl ribonucleotide
  modified_base 76: mod_base = OTHER; note = 2'-O-methyl ribonucleotide
  modified_base 77: mod_base = OTHER; note = 2'-O-methyl ribonucleotide
  modified_base 78: mod_base = OTHER; note = 2'-O-methyl ribonucleotide
  modified_base 79: mod_base = OTHER; note = 2'-O-methyl ribonucleotide
  modified_base 80: mod_base = OTHER; note = 2'-O-methyl ribonucleotide
  modified_base 81: mod_base = OTHER; note = 2'-O-methyl ribonucleotide
  modified_base 83: mod_base = OTHER; note = 2'-O-methyl ribonucleotide
  modified_base 84: mod_base = OTHER; note = 2'-O-methyl ribonucleotide
  modified_base 85: mod_base = OTHER; note = 2'-O-methyl ribonucleotide
  modified_base 86: mod_base = OTHER; note = 2'-O-methyl ribonucleotide
  modified_base 87: mod_base = OTHER; note = 2'-O-methyl ribonucleotide
  modified_base 88: mod_base = OTHER; note = 2'-O-methyl ribonucleotide
  modified_base 89: mod_base = OTHER; note = 2'-O-methyl ribonucleotide
  modified_base 90: mod_base = OTHER; note = 2'-O-methyl ribonucleotide
  modified_base 91: mod_base = OTHER; note = 2'-O-methyl ribonucleotide
  modified_base 92: mod_base = OTHER; note = 2'-O-methyl ribonucleotide
  modified_base 93: mod_base = OTHER; note = 2'-O-methyl ribonucleotide
  modified_base 94: mod_base = OTHER; note = 2'-O-methyl ribonucleotide
  modified_base 95: mod_base = OTHER; note = 2'-O-methyl ribonucleotide
  modified_base 96: mod_base = OTHER; note = 2'-O-methyl ribonucleotide
  modified_base 97: mod_base = OTHER; note = 2'-O-methyl ribonucleotide
  modified_base 98: mod_base = OTHER; note = 2'-O-methyl ribonucleotide
  modified_base 99: mod_base = OTHER; note = 2'-O-methyl ribonucleotide
  modified_base 100: mod_base = OTHER; note = 2'-O-methyl ribonucleotide
  modified_base 1..4: mod_base = OTHER; note = phosphorothioate linkage
  modified_base 97..100: mod_base = OTHER; note = phosphorothioate linkage

SEQ ID NO: 2288 - RNA, 100 nt, synthetic construct; identical to SEQ ID NO: 289
  source 1..100: mol_type = other RNA
  modified_base 1: mod_base = OTHER; note = 2'-O-methyl ribonucleotide
  modified_base 2: mod_base = OTHER; note = 2'-O-methyl ribonucleotide
  modified_base 3: mod_base = OTHER; note = 2'-O-methyl ribonucleotide
  modified_base 29: mod_base = OTHER; note = 2'-O-methyl ribonucleotide
  modified_base 30: mod_base = OTHER; note = 2'-O-methyl ribonucleotide
  modified_base 31: mod_base = OTHER; note = 2'-O-methyl ribonucleotide
  modified_base 32: mod_base = OTHER; note = 2'-O-methyl ribonucleotide
  modified_base 33: mod_base = OTHER; note = 2'-O-methyl ribonucleotide
  modified_base 34: mod_base = OTHER; note = 2'-O-methyl ribonucleotide
  modified_base 35: mod_base = OTHER; note = 2'-O-methyl ribonucleotide
  modified_base 36: mod_base = OTHER; note = 2'-O-methyl ribonucleotide
  modified_base 37: mod_base = OTHER; note = 2'-O-methyl ribonucleotide
  modified_base 38: mod_base = OTHER; note = 2'-O-methyl ribonucleotide
  modified_base 39: mod_base = OTHER; note = 2'-O-methyl ribonucleotide
  modified_base 40: mod_base = OTHER; note = 2'-O-methyl ribonucleotide
  modified_base 69: mod_base = OTHER; note = 2'-O-methyl ribonucleotide
  modified_base 70: mod_base = OTHER; note = 2'-O-methyl ribonucleotide
  modified_base 71: mod_base = OTHER; note = 2'-O-methyl ribonucleotide
  modified_base 72: mod_base = OTHER; note = 2'-O-methyl ribonucleotide
  modified_base 73: mod_base = OTHER; note = 2'-O-methyl ribonucleotide
  modified_base 74: mod_base = OTHER; note = 2'-O-methyl ribonucleotide
  modified_base 75: mod_base = OTHER; note = 2'-O-methyl ribonucleotide
  modified_base 76: mod_base = OTHER; note = 2'-O-methyl ribonucleotide
  modified_base 77: mod_base = OTHER; note = 2'-O-methyl ribonucleotide
  modified_base 78: mod_base = OTHER; note = 2'-O-methyl ribonucleotide
  modified_base 79: mod_base = OTHER; note = 2'-O-methyl ribonucleotide
  modified_base 80: mod_base = OTHER; note = 2'-O-methyl ribonucleotide
  modified_base 81: mod_base = OTHER; note = 2'-O-methyl ribonucleotide
  modified_base 82: mod_base = OTHER; note = 2'-O-methyl ribonucleotide
  modified_base 83: mod_base = OTHER; note = 2'-O-methyl ribonucleotide
  modified_base 84: mod_base = OTHER; note = 2'-O-methyl ribonucleotide
  modified_base 85: mod_base = OTHER; note = 2'-O-methyl ribonucleotide
  modified_base 86: mod_base = OTHER; note = 2'-O-methyl ribonucleotide
  modified_base 87: mod_base = OTHER; note = 2'-O-methyl ribonucleotide
  modified_base 88: mod_base = OTHER; note = 2'-O-methyl ribonucleotide
  modified_base 89: mod_base = OTHER; note = 2'-O-methyl ribonucleotide
  modified_base 90: mod_base = OTHER; note = 2'-O-methyl ribonucleotide
  modified_base 91: mod_base = OTHER; note = 2'-O-methyl ribonucleotide
  modified_base 92: mod_base = OTHER; note = 2'-O-methyl ribonucleotide
  modified_base 93: mod_base = OTHER; note = 2'-O-methyl ribonucleotide
  modified_base 94: mod_base = OTHER; note = 2'-O-methyl ribonucleotide
  modified_base 95: mod_base = OTHER; note = 2'-O-methyl ribonucleotide
  modified_base 96: mod_base = OTHER; note = 2'-O-methyl ribonucleotide
  modified_base 97: mod_base = OTHER; note = 2'-O-methyl ribonucleotide
  modified_base 98: mod_base = OTHER; note = 2'-O-methyl ribonucleotide
  modified_base 99: mod_base = OTHER; note = 2'-O-methyl ribonucleotide
  modified_base 100: mod_base = OTHER; note = 2'-O-methyl ribonucleotide
  modified_base 1..4: mod_base = OTHER; note = phosphorothioate linkage
  modified_base 97..100: mod_base = OTHER; note = phosphorothioate linkage

SEQ ID NO: 2289 - RNA, 100 nt, synthetic construct; identical to SEQ ID NO: 293
  source 1..100: mol_type = other RNA
  modified_base 1: mod_base = OTHER; note = 2'-O-methyl ribonucleotide
  modified_base 2: mod_base = OTHER; note = 2'-O-methyl ribonucleotide
  modified_base 3: mod_base = OTHER; note = 2'-O-methyl ribonucleotide
  modified_base 29: mod_base = OTHER; note = 2'-O-methyl ribonucleotide
  modified_base 30: mod_base = OTHER; note = 2'-O-methyl ribonucleotide
  modified_base 31: mod_base = OTHER; note = 2'-O-methyl ribonucleotide
  modified_base 32: mod_base = OTHER; note = 2'-O-methyl ribonucleotide
  modified_base 33: mod_base = OTHER; note = 2'-O-methyl ribonucleotide
  modified_base 34: mod_base = OTHER; note = 2'-O-methyl ribonucleotide
  modified_base 35: mod_base = OTHER; note = 2'-O-methyl ribonucleotide
  modified_base 36: mod_base = OTHER; note = 2'-O-methyl ribonucleotide
  modified_base 37: mod_base = OTHER; note = 2'-O-methyl ribonucleotide
  modified_base 38: mod_base = OTHER; note = 2'-O-methyl ribonucleotide
  modified_base 39: mod_base = OTHER; note = 2'-O-methyl ribonucleotide
  modified_base 40: mod_base = OTHER; note = 2'-O-methyl ribonucleotide
  modified_base 69: mod_base = OTHER; note = 2'-O-methyl ribonucleotide
  modified_base 70: mod_base = OTHER; note = 2'-O-methyl ribonucleotide
  modified_base 71: mod_base = OTHER; note = 2'-O-methyl ribonucleotide
  modified_base 72: mod_base = OTHER; note = 2'-O-methyl ribonucleotide
  modified_base 73: mod_base = OTHER; note = 2'-O-methyl ribonucleotide
  modified_base 74: mod_base = OTHER; note = 2'-O-methyl ribonucleotide
  modified_base 75: mod_base = OTHER; note = 2'-O-methyl ribonucleotide
  modified_base 76: mod_base = OTHER; note = 2'-O-methyl ribonucleotide
  modified_base 77: mod_base = OTHER; note = 2'-O-methyl ribonucleotide
  modified_base 78: mod_base = OTHER; note = 2'-O-methyl ribonucleotide
  modified_base 79: mod_base = OTHER; note = 2'-O-methyl ribonucleotide
  modified_base 80: mod_base = OTHER; note = 2'-O-methyl ribonucleotide
  modified_base 81: mod_base = OTHER; note = 2'-O-methyl ribonucleotide
  modified_base 82: mod_base = OTHER; note = 2'-O-methyl ribonucleotide
  modified_base 83: mod_base = OTHER; note = 2'-O-methyl ribonucleotide
  modified_base 84: mod_base = OTHER; note = 2'-O-methyl ribonucleotide
  modified_base 85: mod_base = OTHER; note = 2'-O-methyl ribonucleotide
  modified_base 86: mod_base = OTHER; note = 2'-O-methyl ribonucleotide
  modified_base 87: mod_base = OTHER; note = 2'-O-methyl ribonucleotide
  modified_base 88: mod_base = OTHER; note = 2'-O-methyl ribonucleotide
  modified_base 89: mod_base = OTHER; note = 2'-O-methyl ribonucleotide
  modified_base 90: mod_base = OTHER; note = 2'-O-methyl ribonucleotide
  modified_base 91: mod_base = OTHER; note = 2'-O-methyl ribonucleotide
  modified_base 92: mod_base = OTHER; note = 2'-O-methyl ribonucleotide
  modified_base 93: mod_base = OTHER; note = 2'-O-methyl ribonucleotide
  modified_base 94: mod_base = OTHER; note = 2'-O-methyl ribonucleotide
  modified_base 95: mod_base = OTHER; note = 2'-O-methyl ribonucleotide
  modified_base 96: mod_base = OTHER; note = 2'-O-methyl ribonucleotide
  modified_base 97: mod_base = OTHER; note = 2'-O-methyl ribonucleotide
  modified_base 98: mod_base = OTHER; note = 2'-O-methyl ribonucleotide
  modified_base 99: mod_base = OTHER; note = 2'-O-methyl ribonucleotide
  modified_base 100: mod_base = OTHER; note = 2'-O-methyl ribonucleotide
  modified_base 1..4: mod_base = OTHER; note = phosphorothioate linkage
  modified_base 97..100: mod_base = OTHER; note = phosphorothioate linkage

SEQ ID NO: 2290 - RNA, 100 nt, synthetic construct; identical to SEQ ID NO: 298
  source 1..100: mol_type = other RNA
  modified_base 1: mod_base = OTHER; note = 2'-O-methyl ribonucleotide
  modified_base 2: mod_base = OTHER; note = 2'-O-methyl ribonucleotide
  modified_base 3: mod_base = OTHER; note = 2'-O-methyl ribonucleotide
  modified_base 29: mod_base = OTHER; note = 2'-O-methyl ribonucleotide
  modified_base 30: mod_base = OTHER; note = 2'-O-methyl ribonucleotide
  modified_base 31: mod_base = OTHER; note = 2'-O-methyl ribonucleotide
  modified_base 32: mod_base = OTHER; note = 2'-O-methyl ribonucleotide
  modified_base 33: mod_base = OTHER; note = 2'-O-methyl ribonucleotide
  modified_base 34: mod_base = OTHER; note = 2'-O-methyl ribonucleotide
  modified_base 35: mod_base = OTHER; note = 2'-O-methyl ribonucleotide
  modified_base 36: mod_base = OTHER; note = 2'-O-methyl ribonucleotide
  modified_base 37: mod_base = OTHER; note = 2'-O-methyl ribonucleotide
  modified_base 38: mod_base = OTHER; note = 2'-O-methyl ribonucleotide
  modified_base 39: mod_base = OTHER; note = 2'-O-methyl ribonucleotide
  modified_base 40: mod_base = OTHER; note = 2'-O-methyl ribonucleotide
  modified_base 69: mod_base = OTHER; note = 2'-O-methyl ribonucleotide
  modified_base 70: mod_base = OTHER; note = 2'-O-methyl ribonucleotide
  modified_base 71: mod_base = OTHER; note = 2'-O-methyl ribonucleotide
  modified_base 72: mod_base = OTHER; note = 2'-O-methyl ribonucleotide
  modified_base 73: mod_base = OTHER; note = 2'-O-methyl ribonucleotide
  modified_base 74: mod_base = OTHER; note = 2'-O-methyl ribonucleotide
  modified_base 75: mod_base = OTHER; note = 2'-O-methyl ribonucleotide
  modified_base 76: mod_base = OTHER; note = 2'-O-methyl ribonucleotide
  modified_base 77: mod_base = OTHER; note = 2'-O-methyl ribonucleotide
  modified_base 78: mod_base = OTHER; note = 2'-O-methyl ribonucleotide
  modified_base 79: mod_base = OTHER; note = 2'-O-methyl ribonucleotide
  modified_base 80: mod_base = OTHER; note = 2'-O-methyl ribonucleotide
  modified_base 81: mod_base = OTHER; note = 2'-O-methyl ribonucleotide
  modified_base 82: mod_base = OTHER; note = 2'-O-methyl ribonucleotide
  modified_base 83: mod_base = OTHER; note = 2'-O-methyl ribonucleotide
  modified_base 84: mod_base = OTHER; note = 2'-O-methyl ribonucleotide
  modified_base 85: mod_base = OTHER; note = 2'-O-methyl ribonucleotide
  modified_base 86: mod_base = OTHER; note = 2'-O-methyl ribonucleotide
  modified_base 87: mod_base = OTHER; note = 2'-O-methyl ribonucleotide
  modified_base 88: mod_base = OTHER; note = 2'-O-methyl ribonucleotide
  modified_base 89: mod_base = OTHER; note = 2'-O-methyl ribonucleotide
  modified_base 90: mod_base = OTHER; note = 2'-O-methyl ribonucleotide
  modified_base 91: mod_base = OTHER; note = 2'-O-methyl ribonucleotide
  modified_base 92: mod_base = OTHER; note = 2'-O-methyl ribonucleotide
  modified_base 93: mod_base = OTHER; note = 2'-O-methyl ribonucleotide
  modified_base 94: mod_base = OTHER; note = 2'-O-methyl ribonucleotide
  modified_base 95: mod_base = OTHER; note = 2'-O-methyl ribonucleotide
  modified_base 96: mod_base = OTHER; note = 2'-O-methyl ribonucleotide
  modified_base 97: mod_base = OTHER; note = 2'-O-methyl ribonucleotide
  modified_base 98: mod_base = OTHER; note = 2'-O-methyl ribonucleotide
  modified_base 99: mod_base = OTHER; note = 2'-O-methyl ribonucleotide
  modified_base 100: mod_base = OTHER; note = 2'-O-methyl ribonucleotide
  modified_base 1..4: mod_base = OTHER; note = phosphorothioate linkage
  modified_base 97..100: mod_base = OTHER; note = phosphorothioate linkage

SEQ ID NO: 2291 - RNA, 100 nt, synthetic construct; identical to SEQ ID NO: 302
  source 1..100: mol_type = other RNA
  modified_base 1: mod_base = OTHER; note = 2'-O-methyl ribonucleotide
  modified_base 2: mod_base = OTHER; note = 2'-O-methyl ribonucleotide
  modified_base 3: mod_base = OTHER; note = 2'-O-methyl ribonucleotide
  modified_base 29: mod_base = OTHER; note = 2'-O-methyl ribonucleotide
  modified_base 30: mod_base = OTHER; note = 2'-O-methyl ribonucleotide
  modified_base 31: mod_base = OTHER; note = 2'-O-methyl ribonucleotide
  modified_base 32: mod_base = OTHER; note = 2'-O-methyl ribonucleotide
  modified_base 33: mod_base = OTHER; note = 2'-O-methyl ribonucleotide
  modified_base 34: mod_base = OTHER; note = 2'-O-methyl ribonucleotide
  modified_base 35: mod_base = OTHER; note = 2'-O-methyl ribonucleotide
  modified_base 36: mod_base = OTHER; note = 2'-O-methyl ribonucleotide
  modified_base 37: mod_base = OTHER; note = 2'-O-methyl ribonucleotide
  modified_base 38: mod_base = OTHER; note = 2'-O-methyl ribonucleotide
  modified_base 39: mod_base = OTHER; note = 2'-O-methyl ribonucleotide
  modified_base 40: mod_base = OTHER; note = 2'-O-methyl ribonucleotide
  modified_base 69: mod_base = OTHER; note = 2'-O-methyl ribonucleotide
  modified_base 70: mod_base = OTHER; note = 2'-O-methyl ribonucleotide
  modified_base 71: mod_base = OTHER; note = 2'-O-methyl ribonucleotide
  modified_base 72: mod_base = OTHER; note = 2'-O-methyl ribonucleotide
  modified_base 73: mod_base = OTHER; note = 2'-O-methyl ribonucleotide
  modified_base 74: mod_base = OTHER; note = 2'-O-methyl ribonucleotide
  modified_base 75: mod_base = OTHER; note = 2'-O-methyl ribonucleotide
  modified_base 76: mod_base = OTHER; note = 2'-O-methyl ribonucleotide
  modified_base 77: mod_base = OTHER; note = 2'-O-methyl ribonucleotide
  modified_base 78: mod_base = OTHER; note = 2'-O-methyl ribonucleotide
  modified_base 79: mod_base = OTHER; note = 2'-O-methyl ribonucleotide
  modified_base 80: mod_base = OTHER; note = 2'-O-methyl ribonucleotide
  modified_base 81: mod_base = OTHER; note = 2'-O-methyl ribonucleotide
  modified_base 82: mod_base = OTHER; note = 2'-O-methyl ribonucleotide
  modified_base 83: mod_base = OTHER; note = 2'-O-methyl ribonucleotide
  modified_base 84: mod_base = OTHER; note = 2'-O-methyl ribonucleotide
  modified_base 85: mod_base = OTHER; note = 2'-O-methyl ribonucleotide
  modified_base 86: mod_base = OTHER; note = 2'-O-methyl ribonucleotide
  modified_base 87: mod_base = OTHER; note = 2'-O-methyl ribonucleotide
  modified_base 88: mod_base = OTHER; note = 2'-O-methyl ribonucleotide
  modified_base 89: mod_base = OTHER; note = 2'-O-methyl ribonucleotide
  modified_base 90: mod_base = OTHER; note = 2'-O-methyl ribonucleotide
  modified_base 91: mod_base = OTHER; note = 2'-O-methyl ribonucleotide
  modified_base 92: mod_base = OTHER; note = 2'-O-methyl ribonucleotide
  modified_base 93: mod_base = OTHER; note = 2'-O-methyl ribonucleotide
  modified_base 94: mod_base = OTHER; note = 2'-O-methyl ribonucleotide
  modified_base 95: mod_base = OTHER; note = 2'-O-methyl ribonucleotide
  modified_base 96: mod_base = OTHER; note = 2'-O-methyl ribonucleotide
  modified_base 97: mod_base = OTHER; note = 2'-O-methyl ribonucleotide
  modified_base 98: mod_base = OTHER; note = 2'-O-methyl ribonucleotide
  modified_base 99: mod_base = OTHER; note = 2'-O-methyl ribonucleotide
  modified_base 100: mod_base = OTHER; note = 2'-O-methyl ribonucleotide
  modified_base 1..4: mod_base = OTHER; note = phosphorothioate linkage
  modified_base 97..100: mod_base = OTHER; note = phosphorothioate linkage

SEQ ID NO: 2292 - RNA, 100 nt, synthetic construct; identical to SEQ ID NO: 304
  source 1..100: mol_type = other RNA
  modified_base 1: mod_base = OTHER; note = 2'-O-methyl ribonucleotide
  modified_base 2: mod_base = OTHER; note = 2'-O-methyl ribonucleotide
  modified_base 3: mod_base = OTHER; note = 2'-O-methyl ribonucleotide
  modified_base 21: mod_base = OTHER; note = 2'-O-methyl ribonucleotide
  modified_base 28: mod_base = OTHER; note = 2'-O-methyl ribonucleotide
  modified_base 29: mod_base = OTHER; note = 2'-O-methyl ribonucleotide
  modified_base 30: mod_base = OTHER; note = 2'-O-methyl ribonucleotide
  modified_base 31: mod_base = OTHER; note = 2'-O-methyl ribonucleotide
  modified_base 32: mod_base = OTHER; note = 2'-O-methyl ribonucleotide
  modified_base 33: mod_base = OTHER; note = 2'-O-methyl ribonucleotide
  modified_base 34: mod_base = OTHER; note = 2'-O-methyl ribonucleotide
  modified_base 35: mod_base = OTHER; note = 2'-O-methyl ribonucleotide
  modified_base 36: mod_base = OTHER; note = 2'-O-methyl ribonucleotide
  modified_base 37: mod_base = OTHER; note = 2'-O-methyl ribonucleotide
  modified_base 38: mod_base = OTHER; note = 2'-O-methyl ribonucleotide
  modified_base 39: mod_base = OTHER; note = 2'-O-methyl ribonucleotide
  modified_base 40: mod_base = OTHER; note = 2'-O-methyl ribonucleotide
  modified_base 41: mod_base = OTHER; note = 2'-O-methyl ribonucleotide
  modified_base 42: mod_base = OTHER; note = 2'-O-methyl ribonucleotide
  modified_base 46: mod_base = OTHER; note = 2'-O-methyl ribonucleotide
  modified_base 48: mod_base = OTHER; note = 2'-O-methyl ribonucleotide
  modified_base 50: mod_base = OTHER; note = 2'-O-methyl ribonucleotide
  modified_base 52: mod_base = OTHER; note = 2'-O-methyl ribonucleotide
  modified_base 53: mod_base = OTHER; note = 2'-O-methyl ribonucleotide
  modified_base 54: mod_base = OTHER; note = 2'-O-methyl ribonucleotide
  modified_base 55: mod_base = OTHER; note = 2'-O-methyl ribonucleotide
  modified_base 56: mod_base = OTHER; note = 2'-O-methyl ribonucleotide
  modified_base 57: mod_base = OTHER; note = 2'-O-methyl ribonucleotide
  modified_base 60: mod_base = OTHER; note = 2'-O-methyl ribonucleotide
  modified_base 61: mod_base = OTHER; note = 2'-O-methyl ribonucleotide
  modified_base 66: mod_base = OTHER; note = 2'-O-methyl ribonucleotide
  modified_base 67: mod_base = OTHER; note = 2'-O-methyl ribonucleotide
  modified_base 70: mod_base = OTHER; note = 2'-O-methyl ribonucleotide
  modified_base 71: mod_base = OTHER; note = 2'-O-methyl ribonucleotide
  modified_base 72: mod_base = OTHER; note = 2'-O-methyl ribonucleotide
  modified_base 73: mod_base = OTHER; note = 2'-O-methyl ribonucleotide
  modified_base 74: mod_base = OTHER; note = 2'-O-methyl ribonucleotide
  modified_base 75: mod_base = OTHER; note = 2'-O-methyl ribonucleotide
  modified_base 76: mod_base = OTHER; note = 2'-O-methyl ribonucleotide
  modified_base 77: mod_base = OTHER; note = 2'-O-methyl ribonucleotide
  modified_base 78: mod_base = OTHER; note = 2'-O-methyl ribonucleotide
  modified_base 79: mod_base = OTHER; note = 2'-O-methyl ribonucleotide
  modified_base 80: mod_base = OTHER; note = 2'-O-methyl ribonucleotide
  modified_base 81: mod_base = OTHER; note = 2'-O-methyl ribonucleotide
  modified_base 83: mod_base = OTHER; note = 2'-O-methyl ribonucleotide
  modified_base 84: mod_base = OTHER; note = 2'-O-methyl ribonucleotide
  modified_base 85: mod_base = OTHER; note = 2'-O-methyl ribonucleotide
  modified_base 86: mod_base = OTHER; note = 2'-O-methyl ribonucleotide
  modified_base 87: mod_base = OTHER; note = 2'-O-methyl ribonucleotide
  modified_base 88: mod_base = OTHER; note = 2'-O-methyl ribonucleotide
  modified_base 89: mod_base = OTHER; note = 2'-O-methyl ribonucleotide
  modified_base 90: mod_base = OTHER; note = 2'-O-methyl ribonucleotide
  modified_base 91: mod_base = OTHER; note = 2'-O-methyl ribonucleotide
  modified_base 92: mod_base = OTHER; note = 2'-O-methyl ribonucleotide
  modified_base 93: mod_base = OTHER; note = 2'-O-methyl ribonucleotide
  modified_base 94: mod_base = OTHER; note = 2'-O-methyl ribonucleotide
  modified_base 95: mod_base = OTHER; note = 2'-O-methyl ribonucleotide
  modified_base 96: mod_base = OTHER; note = 2'-O-methyl ribonucleotide
  modified_base 97: mod_base = OTHER; note = 2'-O-methyl ribonucleotide
  modified_base 98: mod_base = OTHER; note = 2'-O-methyl ribonucleotide
  modified_base 99: mod_base = OTHER; note = 2'-O-methyl ribonucleotide
  modified_base 100: mod_base = OTHER; note = 2'-O-methyl ribonucleotide
  modified_base 1..4: mod_base = OTHER; note = phosphorothioate linkage
  modified_base 97..100: mod_base = OTHER; note = phosphorothioate linkage

SEQ ID NO: 2293 - RNA, 100 nt, synthetic construct; identical to SEQ ID NO: 305
  source 1..100: mol_type = other RNA
  modified_base 1: mod_base = OTHER; note = 2'-O-methyl ribonucleotide
  modified_base 2: mod_base = OTHER; note = 2'-O-methyl ribonucleotide
  modified_base 3: mod_base = OTHER; note = 2'-O-methyl ribonucleotide
  modified_base 29: mod_base = OTHER; note = 2'-O-methyl ribonucleotide
  modified_base 30: mod_base = OTHER; note = 2'-O-methyl ribonucleotide
  modified_base 31: mod_base = OTHER; note = 2'-O-methyl ribonucleotide
  modified_base 32: mod_base = OTHER; note = 2'-O-methyl ribonucleotide
  modified_base 33: mod_base = OTHER; note = 2'-O-methyl ribonucleotide
  modified_base 34: mod_base = OTHER; note = 2'-O-methyl ribonucleotide
  modified_base 35: mod_base = OTHER; note = 2'-O-methyl ribonucleotide
  modified_base 36: mod_base = OTHER; note = 2'-O-methyl ribonucleotide
  modified_base 37: mod_base = OTHER; note = 2'-O-methyl ribonucleotide
  modified_base 38: mod_base = OTHER; note = 2'-O-methyl ribonucleotide
  modified_base 39: mod_base = OTHER; note = 2'-O-methyl ribonucleotide
  modified_base 40: mod_base = OTHER; note = 2'-O-methyl ribonucleotide
  modified_base 69: mod_base = OTHER; note = 2'-O-methyl ribonucleotide
  modified_base 70: mod_base = OTHER; note = 2'-O-methyl ribonucleotide
  modified_base 71: mod_base = OTHER; note = 2'-O-methyl ribonucleotide
  modified_base 72: mod_base = OTHER; note = 2'-O-methyl ribonucleotide
  modified_base 73: mod_base = OTHER; note = 2'-O-methyl ribonucleotide
  modified_base 74: mod_base = OTHER; note = 2'-O-methyl ribonucleotide
  modified_base 75: mod_base = OTHER; note = 2'-O-methyl ribonucleotide
  modified_base 76: mod_base = OTHER; note = 2'-O-methyl ribonucleotide
  modified_base 77: mod_base = OTHER; note = 2'-O-methyl ribonucleotide
  modified_base 78: mod_base = OTHER; note = 2'-O-methyl ribonucleotide
  modified_base 79: mod_base = OTHER; note = 2'-O-methyl ribonucleotide
  modified_base 80: mod_base = OTHER; note = 2'-O-methyl ribonucleotide
  modified_base 81: mod_base = OTHER; note = 2'-O-methyl ribonucleotide
  modified_base 82: mod_base = OTHER; note = 2'-O-methyl ribonucleotide
  modified_base 83: mod_base = OTHER; note = 2'-O-methyl ribonucleotide
  modified_base 84: mod_base = OTHER; note = 2'-O-methyl ribonucleotide
  modified_base 85: mod_base = OTHER; note = 2'-O-methyl ribonucleotide
  modified_base 86: mod_base = OTHER; note = 2'-O-methyl ribonucleotide
  modified_base 87: mod_base = OTHER; note = 2'-O-methyl ribonucleotide
  modified_base 88: mod_base = OTHER; note = 2'-O-methyl ribonucleotide
  modified_base 89: mod_base = OTHER; note = 2'-O-methyl ribonucleotide
  modified_base 90: mod_base = OTHER; note = 2'-O-methyl ribonucleotide
  modified_base 91: mod_base = OTHER; note = 2'-O-methyl ribonucleotide
  modified_base 92: mod_base = OTHER; note = 2'-O-methyl ribonucleotide
  modified_base 93: mod_base = OTHER; note = 2'-O-methyl ribonucleotide
  modified_base 94: mod_base = OTHER; note = 2'-O-methyl ribonucleotide
  modified_base 95: mod_base = OTHER; note = 2'-O-methyl ribonucleotide
  modified_base 96: mod_base = OTHER; note = 2'-O-methyl ribonucleotide
  modified_base 97: mod_base = OTHER; note = 2'-O-methyl ribonucleotide
  modified_base 98: mod_base = OTHER; note = 2'-O-methyl ribonucleotide
  modified_base 99: mod_base = OTHER; note = 2'-O-methyl ribonucleotide
  modified_base 100: mod_base = OTHER; note = 2'-O-methyl ribonucleotide
  modified_base 1..4: mod_base = OTHER; note = phosphorothioate linkage
  modified_base 97..100: mod_base = OTHER; note = phosphorothioate linkage

SEQ ID NO: 2294 - RNA, 100 nt, synthetic construct; identical to SEQ ID NO: 308
  source 1..100: mol_type = other RNA
  modified_base 1: mod_base = OTHER; note = 2'-O-methyl ribonucleotide
  modified_base 2: mod_base = OTHER; note = 2'-O-methyl ribonucleotide
  modified_base 3: mod_base = OTHER; note = 2'-O-methyl ribonucleotide
  modified_base 29: mod_base = OTHER; note = 2'-O-methyl ribonucleotide
  modified_base 30: mod_base = OTHER; note = 2'-O-methyl ribonucleotide
  modified_base 31: mod_base = OTHER; note = 2'-O-methyl ribonucleotide
  modified_base 32: mod_base = OTHER; note = 2'-O-methyl ribonucleotide
  modified_base 33: mod_base = OTHER; note = 2'-O-methyl ribonucleotide
  modified_base 34: mod_base = OTHER; note = 2'-O-methyl ribonucleotide
  modified_base 35: mod_base = OTHER; note = 2'-O-methyl ribonucleotide
  modified_base 36: mod_base = OTHER; note = 2'-O-methyl ribonucleotide
  modified_base 37: mod_base = OTHER; note = 2'-O-methyl ribonucleotide
  modified_base 38: mod_base = OTHER; note = 2'-O-methyl ribonucleotide
  modified_base 39: mod_base = OTHER; note = 2'-O-methyl ribonucleotide
  modified_base 40: mod_base = OTHER; note = 2'-O-methyl ribonucleotide
  modified_base 69: mod_base = OTHER; note = 2'-O-methyl ribonucleotide
  modified_base 70: mod_base = OTHER; note = 2'-O-methyl ribonucleotide
  modified_base 71: mod_base = OTHER; note = 2'-O-methyl ribonucleotide
  modified_base 72: mod_base = OTHER; note = 2'-O-methyl ribonucleotide
  modified_base 73: mod_base = OTHER; note = 2'-O-methyl ribonucleotide
  modified_base 74: mod_base = OTHER; note = 2'-O-methyl ribonucleotide
  modified_base 75: mod_base = OTHER; note = 2'-O-methyl ribonucleotide
  modified_base 76: mod_base = OTHER; note = 2'-O-methyl ribonucleotide
  modified_base 77: mod_base = OTHER; note = 2'-O-methyl ribonucleotide
  modified_base 78: mod_base = OTHER; note = 2'-O-methyl ribonucleotide
  modified_base 79: mod_base = OTHER; note = 2'-O-methyl ribonucleotide
  modified_base 80: mod_base = OTHER; note = 2'-O-methyl ribonucleotide
  modified_base 81: mod_base = OTHER; note = 2'-O-methyl ribonucleotide
  modified_base 82: mod_base = OTHER; note = 2'-O-methyl ribonucleotide
  modified_base 83: mod_base = OTHER; note = 2'-O-methyl ribonucleotide
  modified_base 84: mod_base = OTHER; note = 2'-O-methyl ribonucleotide
  modified_base 85: mod_base = OTHER; note = 2'-O-methyl ribonucleotide
  modified_base 86: mod_base = OTHER; note = 2'-O-methyl ribonucleotide
  modified_base 87: mod_base = OTHER; note = 2'-O-methyl ribonucleotide
  modified_base 88: mod_base = OTHER; note = 2'-O-methyl ribonucleotide
  modified_base 89: mod_base = OTHER; note = 2'-O-methyl ribonucleotide
  modified_base 90: mod_base = OTHER; note = 2'-O-methyl ribonucleotide
  modified_base 91: mod_base = OTHER; note = 2'-O-methyl ribonucleotide
  modified_base 92: mod_base = OTHER; note = 2'-O-methyl ribonucleotide
  modified_base 93: mod_base = OTHER; note = 2'-O-methyl ribonucleotide
  modified_base 94: mod_base = OTHER; note = 2'-O-methyl ribonucleotide
  modified_base 95: mod_base = OTHER; note = 2'-O-methyl ribonucleotide
  modified_base 96: mod_base = OTHER; note = 2'-O-methyl ribonucleotide
  modified_base 97: mod_base = OTHER; note = 2'-O-methyl ribonucleotide
  modified_base 98: mod_base = OTHER; note = 2'-O-methyl ribonucleotide
  modified_base 99: mod_base = OTHER; note = 2'-O-methyl ribonucleotide
  modified_base 100: mod_base = OTHER; note = 2'-O-methyl ribonucleotide
  modified_base 1..4: mod_base = OTHER; note = phosphorothioate linkage
  modified_base 97..100: mod_base = OTHER; note = phosphorothioate linkage

SEQ ID NO: 2295 - RNA, 100 nt, synthetic construct; identical to SEQ ID NO: 321
  source 1..100: mol_type = other RNA
  modified_base 1: mod_base = OTHER; note = 2'-O-methyl ribonucleotide
  modified_base 2: mod_base = OTHER; note = 2'-O-methyl ribonucleotide
  modified_base 3: mod_base = OTHER; note = 2'-O-methyl ribonucleotide
  modified_base 21: mod_base = OTHER; note = 2'-O-methyl ribonucleotide
  modified_base 28: mod_base = OTHER; note = 2'-O-methyl ribonucleotide
  modified_base 29: mod_base = OTHER; note = 2'-O-methyl ribonucleotide
  modified_base 30: mod_base = OTHER; note = 2'-O-methyl ribonucleotide
  modified_base 31: mod_base = OTHER; note = 2'-O-methyl ribonucleotide
  modified_base 32: mod_base = OTHER; note = 2'-O-methyl ribonucleotide
  modified_base 33: mod_base = OTHER; note = 2'-O-methyl ribonucleotide
  modified_base 34: mod_base = OTHER; note = 2'-O-methyl ribonucleotide
  modified_base 35: mod_base = OTHER; note = 2'-O-methyl ribonucleotide
  modified_base 36: mod_base = OTHER; note = 2'-O-methyl ribonucleotide
  modified_base 37: mod_base = OTHER; note = 2'-O-methyl ribonucleotide
  modified_base 38: mod_base = OTHER; note = 2'-O-methyl ribonucleotide
  modified_base 39: mod_base = OTHER; note = 2'-O-methyl ribonucleotide
  modified_base 40: mod_base = OTHER; note = 2'-O-methyl ribonucleotide
  modified_base 41: mod_base = OTHER; note = 2'-O-methyl ribonucleotide
  modified_base 42: mod_base = OTHER; note = 2'-O-methyl ribonucleotide
  modified_base 46: mod_base = OTHER; note = 2'-O-methyl ribonucleotide
  modified_base 48: mod_base = OTHER; note = 2'-O-methyl ribonucleotide
  modified_base 50: mod_base = OTHER; note = 2'-O-methyl ribonucleotide
  modified_base 52: mod_base = OTHER; note = 2'-O-methyl ribonucleotide
  modified_base 53: mod_base = OTHER; note = 2'-O-methyl ribonucleotide
  modified_base 54: mod_base = OTHER; note = 2'-O-methyl ribonucleotide
  modified_base 55: mod_base = OTHER; note = 2'-O-methyl ribonucleotide
  modified_base 56: mod_base = OTHER; note = 2'-O-methyl ribonucleotide
  modified_base 57: mod_base = OTHER; note = 2'-O-methyl ribonucleotide
  modified_base 60: mod_base = OTHER; note = 2'-O-methyl ribonucleotide
  modified_base 61: mod_base = OTHER; note = 2'-O-methyl ribonucleotide
  modified_base 66: mod_base = OTHER; note = 2'-O-methyl ribonucleotide
  modified_base 67: mod_base = OTHER; note = 2'-O-methyl ribonucleotide
  modified_base 70: mod_base = OTHER; note = 2'-O-methyl ribonucleotide
  modified_base 71: mod_base = OTHER; note = 2'-O-methyl ribonucleotide
  modified_base 72: mod_base = OTHER; note = 2'-O-methyl ribonucleotide
  modified_base 73: mod_base = OTHER; note = 2'-O-methyl ribonucleotide
  modified_base 74: mod_base = OTHER; note = 2'-O-methyl ribonucleotide
  modified_base 75: mod_base = OTHER; note = 2'-O-methyl ribonucleotide
  modified_base 76: mod_base = OTHER; note = 2'-O-methyl ribonucleotide
  modified_base 77: mod_base = OTHER; note = 2'-O-methyl ribonucleotide
  modified_base 78: mod_base = OTHER; note = 2'-O-methyl ribonucleotide
  modified_base 79: mod_base = OTHER; note = 2'-O-methyl ribonucleotide
  modified_base 80: mod_base = OTHER; note = 2'-O-methyl ribonucleotide
  modified_base 81: mod_base = OTHER; note = 2'-O-methyl ribonucleotide
  modified_base 83: mod_base = OTHER; note = 2'-O-methyl ribonucleotide
  modified_base 84: mod_base = OTHER; note = 2'-O-methyl ribonucleotide
  modified_base 85: mod_base = OTHER; note = 2'-O-methyl ribonucleotide
  modified_base 86: mod_base = OTHER; note = 2'-O-methyl ribonucleotide
  modified_base 87: mod_base = OTHER; note = 2'-O-methyl ribonucleotide
  modified_base 88: mod_base = OTHER; note = 2'-O-methyl ribonucleotide
  modified_base 89: mod_base = OTHER; note = 2'-O-methyl ribonucleotide
  modified_base 90: mod_base = OTHER; note = 2'-O-methyl ribonucleotide
  modified_base 91: mod_base = OTHER; note = 2'-O-methyl ribonucleotide
  modified_base 92: mod_base = OTHER; note = 2'-O-methyl ribonucleotide
  modified_base 93: mod_base = OTHER; note = 2'-O-methyl ribonucleotide
  modified_base 94: mod_base = OTHER; note = 2'-O-methyl ribonucleotide
  modified_base 95: mod_base = OTHER; note = 2'-O-methyl ribonucleotide
  modified_base 96: mod_base = OTHER; note = 2'-O-methyl ribonucleotide
  modified_base 97: mod_base = OTHER; note = 2'-O-methyl ribonucleotide
  modified_base 98: mod_base = OTHER; note = 2'-O-methyl ribonucleotide
  modified_base 99: mod_base = OTHER; note = 2'-O-methyl ribonucleotide
  modified_base 100: mod_base = OTHER; note = 2'-O-methyl ribonucleotide
  modified_base 1..4: mod_base = OTHER; note = phosphorothioate linkage
  modified_base 97..100: mod_base = OTHER; note = phosphorothioate linkage

SEQ ID NO: 2296 - RNA, 100 nt, synthetic construct; identical to SEQ ID NO: 321
  source 1..100: mol_type = other RNA
  modified_base 1: mod_base = OTHER; note = 2'-O-methyl ribonucleotide
  modified_base 2: mod_base = OTHER; note = 2'-O-methyl ribonucleotide
  modified_base 3: mod_base = OTHER; note = 2'-O-methyl ribonucleotide
  modified_base 29: mod_base = OTHER; note = 2'-O-methyl ribonucleotide
  modified_base 30: mod_base = OTHER; note = 2'-O-methyl ribonucleotide
  modified_base 31: mod_base = OTHER; note = 2'-O-methyl ribonucleotide
  modified_base 32: mod_base = OTHER; note = 2'-O-methyl ribonucleotide
  modified_base 33: mod_base = OTHER; note = 2'-O-methyl ribonucleotide
  modified_base 34: mod_base = OTHER; note = 2'-O-methyl ribonucleotide
  modified_base 35: mod_base = OTHER; note = 2'-O-methyl ribonucleotide
  modified_base 36: mod_base = OTHER; note = 2'-O-methyl ribonucleotide
  modified_base 37: mod_base = OTHER; note = 2'-O-methyl ribonucleotide
  modified_base 38: mod_base = OTHER; note = 2'-O-methyl ribonucleotide
  modified_base 39: mod_base = OTHER; note = 2'-O-methyl ribonucleotide
  modified_base 40: mod_base = OTHER; note = 2'-O-methyl ribonucleotide
  modified_base 69: mod_base = OTHER; note = 2'-O-methyl ribonucleotide
  modified_base 70: mod_base = OTHER; note = 2'-O-methyl ribonucleotide
  modified_base 71: mod_base = OTHER; note = 2'-O-methyl ribonucleotide
  modified_base 72: mod_base = OTHER; note = 2'-O-methyl ribonucleotide
  modified_base 73: mod_base = OTHER; note = 2'-O-methyl ribonucleotide
  modified_base 74: mod_base = OTHER; note = 2'-O-methyl ribonucleotide
  modified_base 75: mod_base = OTHER; note = 2'-O-methyl ribonucleotide
  modified_base 76: mod_base = OTHER; note = 2'-O-methyl ribonucleotide
  modified_base 77: mod_base = OTHER; note = 2'-O-methyl ribonucleotide
  modified_base 78: mod_base = OTHER; note = 2'-O-methyl ribonucleotide
  modified_base 79: mod_base = OTHER; note = 2'-O-methyl ribonucleotide
  modified_base 80: mod_base = OTHER; note = 2'-O-methyl ribonucleotide
  modified_base 81: mod_base = OTHER; note = 2'-O-methyl ribonucleotide
  modified_base 82: mod_base = OTHER; note = 2'-O-methyl ribonucleotide
  modified_base 83: mod_base = OTHER; note = 2'-O-methyl ribonucleotide
  modified_base 84: mod_base = OTHER; note = 2'-O-methyl ribonucleotide
  modified_base 85: mod_base = OTHER; note = 2'-O-methyl ribonucleotide
  modified_base 86: mod_base = OTHER; note = 2'-O-methyl ribonucleotide
  modified_base 87: mod_base = OTHER; note = 2'-O-methyl ribonucleotide
  modified_base 88: mod_base = OTHER; note = 2'-O-methyl ribonucleotide
  modified_base 89: mod_base = OTHER; note = 2'-O-methyl ribonucleotide
  modified_base 90: mod_base = OTHER; note = 2'-O-methyl ribonucleotide
  modified_base 91: mod_base = OTHER; note = 2'-O-methyl ribonucleotide
  modified_base 92: mod_base = OTHER; note = 2'-O-methyl ribonucleotide
  modified_base 93: mod_base = OTHER; note = 2'-O-methyl ribonucleotide
  modified_base 94: mod_base = OTHER; note = 2'-O-methyl ribonucleotide
  modified_base 95: mod_base = OTHER; note = 2'-O-methyl ribonucleotide
  modified_base 96: mod_base = OTHER; note = 2'-O-methyl ribonucleotide
  modified_base 97: mod_base = OTHER; note = 2'-O-methyl ribonucleotide
  modified_base 98: mod_base = OTHER; note = 2'-O-methyl ribonucleotide
  modified_base 99: mod_base = OTHER; note = 2'-O-methyl ribonucleotide
  modified_base 100: mod_base = OTHER; note = 2'-O-methyl ribonucleotide
  modified_base 1..4: mod_base = OTHER; note = phosphorothioate linkage
  modified_base 97..100: mod_base = OTHER; note = phosphorothioate linkage

SEQ ID NO: 2297 - RNA, 100 nt, synthetic construct; identical to SEQ ID NO: 324
  source 1..100: mol_type = other RNA
  modified_base 1: mod_base = OTHER; note = 2'-O-methyl ribonucleotide
  modified_base 2: mod_base = OTHER; note = 2'-O-methyl ribonucleotide
  modified_base 3: mod_base = OTHER; note = 2'-O-methyl ribonucleotide
  modified_base 21: mod_base = OTHER; note = 2'-O-methyl ribonucleotide
  modified_base 28: mod_base = OTHER; note = 2'-O-methyl ribonucleotide
  modified_base 29: mod_base = OTHER; note = 2'-O-methyl ribonucleotide
  modified_base 30: mod_base = OTHER; note = 2'-O-methyl ribonucleotide
  modified_base 31: mod_base = OTHER; note = 2'-O-methyl ribonucleotide
  modified_base 32: mod_base = OTHER; note = 2'-O-methyl ribonucleotide
  modified_base 33: mod_base = OTHER; note = 2'-O-methyl ribonucleotide
  modified_base 34: mod_base = OTHER; note = 2'-O-methyl ribonucleotide
  modified_base 35: mod_base = OTHER; note = 2'-O-methyl ribonucleotide
  modified_base 36: mod_base = OTHER; note = 2'-O-methyl ribonucleotide
  modified_base 37: mod_base = OTHER; note = 2'-O-methyl ribonucleotide
  modified_base 38: mod_base = OTHER; note = 2'-O-methyl ribonucleotide
  modified_base 39: mod_base = OTHER; note = 2'-O-methyl ribonucleotide
  modified_base 40: mod_base = OTHER; note = 2'-O-methyl ribonucleotide
  modified_base 41: mod_base = OTHER; note = 2'-O-methyl ribonucleotide
  modified_base 42: mod_base = OTHER; note = 2'-O-methyl ribonucleotide
  modified_base 46: mod_base = OTHER; note = 2'-O-methyl ribonucleotide
  modified_base 48: mod_base = OTHER; note = 2'-O-methyl ribonucleotide
  modified_base 50: mod_base = OTHER; note = 2'-O-methyl ribonucleotide
  modified_base 52: mod_base = OTHER; note = 2'-O-methyl ribonucleotide
  modified_base 53: mod_base = OTHER; note = 2'-O-methyl ribonucleotide
  modified_base 54: mod_base = OTHER; note = 2'-O-methyl ribonucleotide
  modified_base 55: mod_base = OTHER; note = 2'-O-methyl ribonucleotide
  modified_base 56: mod_base = OTHER; note = 2'-O-methyl ribonucleotide
  modified_base 57: mod_base = OTHER; note = 2'-O-methyl ribonucleotide
  modified_base 60: mod_base = OTHER; note = 2'-O-methyl ribonucleotide
  modified_base 61: mod_base = OTHER; note = 2'-O-methyl ribonucleotide
  modified_base 66: mod_base = OTHER; note = 2'-O-methyl ribonucleotide
  modified_base 67: mod_base = OTHER; note = 2'-O-methyl ribonucleotide
  modified_base 70: mod_base = OTHER; note = 2'-O-methyl ribonucleotide
  modified_base 71: mod_base = OTHER; note = 2'-O-methyl ribonucleotide
  modified_base 72: mod_base = OTHER; note = 2'-O-methyl ribonucleotide
  modified_base 73: mod_base = OTHER; note = 2'-O-methyl ribonucleotide
  modified_base 74: mod_base = OTHER; note = 2'-O-methyl ribonucleotide
  modified_base 75: mod_base = OTHER; note = 2'-O-methyl ribonucleotide
  modified_base 76: mod_base = OTHER; note = 2'-O-methyl ribonucleotide
  modified_base 77: mod_base = OTHER; note = 2'-O-methyl ribonucleotide
  modified_base 78: mod_base = OTHER; note = 2'-O-methyl ribonucleotide
  modified_base 79: mod_base = OTHER; note = 2'-O-methyl ribonucleotide
  modified_base 80: mod_base = OTHER; note = 2'-O-methyl ribonucleotide
  modified_base 81: mod_base = OTHER; note = 2'-O-methyl ribonucleotide
  modified_base 83: mod_base = OTHER; note = 2'-O-methyl ribonucleotide
  modified_base 84: mod_base = OTHER; note = 2'-O-methyl ribonucleotide
  modified_base 85: mod_base = OTHER; note = 2'-O-methyl ribonucleotide
  modified_base 86: mod_base = OTHER; note = 2'-O-methyl ribonucleotide
  modified_base 87: mod_base = OTHER; note = 2'-O-methyl ribonucleotide
  modified_base 88: mod_base = OTHER; note = 2'-O-methyl ribonucleotide
  modified_base 89: mod_base = OTHER; note = 2'-O-methyl ribonucleotide
  modified_base 90: mod_base = OTHER; note = 2'-O-methyl ribonucleotide
  modified_base 91: mod_base = OTHER; note = 2'-O-methyl ribonucleotide
  modified_base 92: mod_base = OTHER; note = 2'-O-methyl ribonucleotide
  modified_base 93: mod_base = OTHER; note = 2'-O-methyl ribonucleotide
  modified_base 94: mod_base = OTHER; note = 2'-O-methyl ribonucleotide
  modified_base 95: mod_base = OTHER; note = 2'-O-methyl ribonucleotide
  modified_base 96: mod_base = OTHER; note = 2'-O-methyl ribonucleotide
  modified_base 97: mod_base = OTHER; note = 2'-O-methyl ribonucleotide
  modified_base 98: mod_base = OTHER; note = 2'-O-methyl ribonucleotide
  modified_base 99: mod_base = OTHER; note = 2'-O-methyl ribonucleotide
  modified_base 100: mod_base = OTHER; note = 2'-O-methyl ribonucleotide
  modified_base 1..4: mod_base = OTHER; note = phosphorothioate linkage
  modified_base 97..100: mod_base = OTHER; note = phosphorothioate linkage

SEQ ID NO: 2298 - RNA, 100 nt, synthetic construct; identical to SEQ ID NO: 324
  source 1..100: mol_type = other RNA
  modified_base 1: mod_base = OTHER; note = 2'-O-methyl ribonucleotide
  modified_base 2: mod_base = OTHER; note = 2'-O-methyl ribonucleotide
  modified_base 3: mod_base = OTHER; note = 2'-O-methyl ribonucleotide
  modified_base 29: mod_base = OTHER; note = 2'-O-methyl ribonucleotide
  modified_base 30: mod_base = OTHER; note = 2'-O-methyl ribonucleotide
  modified_base 31: mod_base = OTHER; note = 2'-O-methyl ribonucleotide
  modified_base 32: mod_base = OTHER; note = 2'-O-methyl ribonucleotide
  modified_base 33: mod_base = OTHER; note = 2'-O-methyl ribonucleotide
  modified_base 34: mod_base = OTHER; note = 2'-O-methyl ribonucleotide
  modified_base 35: mod_base = OTHER; note = 2'-O-methyl ribonucleotide
  modified_base 36: mod_base = OTHER; note = 2'-O-methyl ribonucleotide
  modified_base 37: mod_base = OTHER; note = 2'-O-methyl ribonucleotide
  modified_base 38: mod_base = OTHER; note = 2'-O-methyl ribonucleotide
  modified_base 39: mod_base = OTHER; note = 2'-O-methyl ribonucleotide
  modified_base 40: mod_base = OTHER; note = 2'-O-methyl ribonucleotide
  modified_base 69: mod_base = OTHER; note = 2'-O-methyl ribonucleotide
  modified_base 70: mod_base = OTHER; note = 2'-O-methyl ribonucleotide
  modified_base 71: mod_base = OTHER; note = 2'-O-methyl ribonucleotide
  modified_base 72: mod_base = OTHER; note = 2'-O-methyl ribonucleotide
  modified_base 73: mod_base = OTHER; note = 2'-O-methyl ribonucleotide
  modified_base 74: mod_base = OTHER; note = 2'-O-methyl ribonucleotide
  modified_base 75: mod_base = OTHER; note = 2'-O-methyl ribonucleotide
  modified_base 76: mod_base = OTHER; note = 2'-O-methyl ribonucleotide
  modified_base 77: mod_base = OTHER; note = 2'-O-methyl ribonucleotide
  modified_base 78: mod_base = OTHER; note = 2'-O-methyl ribonucleotide
  modified_base 79: mod_base = OTHER; note = 2'-O-methyl ribonucleotide
  modified_base 80: mod_base = OTHER; note = 2'-O-methyl ribonucleotide
  modified_base 81: mod_base = OTHER; note = 2'-O-methyl ribonucleotide
  modified_base 82: mod_base = OTHER; note = 2'-O-methyl ribonucleotide
  modified_base 83: mod_base = OTHER; note = 2'-O-methyl ribonucleotide
  modified_base 84: mod_base = OTHER; note = 2'-O-methyl ribonucleotide
  modified_base 85: mod_base = OTHER; note = 2'-O-methyl ribonucleotide
  modified_base 86: mod_base = OTHER; note = 2'-O-methyl ribonucleotide
  modified_base 87: mod_base = OTHER; note = 2'-O-methyl ribonucleotide
  modified_base 88: mod_base = OTHER; note = 2'-O-methyl ribonucleotide
  modified_base 89: mod_base = OTHER; note = 2'-O-methyl ribonucleotide
  modified_base 90: mod_base = OTHER; note = 2'-O-methyl ribonucleotide
  modified_base 91: mod_base = OTHER; note = 2'-O-methyl ribonucleotide
  modified_base 92: mod_base = OTHER; note = 2'-O-methyl ribonucleotide
  modified_base 93: mod_base = OTHER; note = 2'-O-methyl ribonucleotide
  modified_base 94: mod_base = OTHER; note = 2'-O-methyl ribonucleotide
  modified_base 95: mod_base = OTHER; note = 2'-O-methyl ribonucleotide
  modified_base 96: mod_base = OTHER; note = 2'-O-methyl ribonucleotide
  modified_base 97: mod_base = OTHER; note = 2'-O-methyl ribonucleotide
  modified_base 98: mod_base = OTHER; note = 2'-O-methyl ribonucleotide
  modified_base 99: mod_base = OTHER; note = 2'-O-methyl ribonucleotide
  modified_base 100: mod_base = OTHER; note = 2'-O-methyl ribonucleotide
  modified_base 1..4: mod_base = OTHER; note = phosphorothioate linkage
  modified_base 97..100: mod_base = OTHER; note = phosphorothioate linkage

SEQ ID NO: 2299 - RNA, 100 nt, synthetic construct; identical to SEQ ID NO: 327
  source 1..100: mol_type = other RNA
  modified_base 1: mod_base = OTHER; note = 2'-O-methyl ribonucleotide
  modified_base 2: mod_base = OTHER; note = 2'-O-methyl ribonucleotide
  modified_base 3: mod_base = OTHER; note = 2'-O-methyl ribonucleotide
  modified_base 29: mod_base = OTHER; note = 2'-O-methyl ribonucleotide
  modified_base 30: mod_base = OTHER; note = 2'-O-methyl ribonucleotide
  modified_base 31: mod_base = OTHER; note = 2'-O-methyl ribonucleotide
  modified_base 32: mod_base = OTHER; note = 2'-O-methyl ribonucleotide
  modified_base 33: mod_base = OTHER; note = 2'-O-methyl ribonucleotide
  modified_base 34: mod_base = OTHER; note = 2'-O-methyl ribonucleotide
  modified_base 35: mod_base = OTHER; note = 2'-O-methyl ribonucleotide
  modified_base 36: mod_base = OTHER; note = 2'-O-methyl ribonucleotide
  modified_base 37: mod_base = OTHER; note = 2'-O-methyl ribonucleotide
  modified_base 38: mod_base = OTHER; note = 2'-O-methyl ribonucleotide
  modified_base 39: mod_base = OTHER; note = 2'-O-methyl ribonucleotide
  modified_base 40: mod_base = OTHER; note = 2'-O-methyl ribonucleotide
  modified_base 69: mod_base = OTHER; note = 2'-O-methyl ribonucleotide
  modified_base 70: mod_base = OTHER; note = 2'-O-methyl ribonucleotide
  modified_base 71: mod_base = OTHER; note = 2'-O-methyl ribonucleotide
  modified_base 72: mod_base = OTHER; note = 2'-O-methyl ribonucleotide
  modified_base 73: mod_base = OTHER; note = 2'-O-methyl ribonucleotide
  modified_base 74: mod_base = OTHER; note = 2'-O-methyl ribonucleotide
  modified_base 75: mod_base = OTHER; note = 2'-O-methyl ribonucleotide
  modified_base 76: mod_base = OTHER; note = 2'-O-methyl ribonucleotide
  modified_base 77: mod_base = OTHER; note = 2'-O-methyl ribonucleotide
  modified_base 78: mod_base = OTHER; note = 2'-O-methyl ribonucleotide
  modified_base 79: mod_base = OTHER; note = 2'-O-methyl ribonucleotide
  modified_base 80: mod_base = OTHER; note = 2'-O-methyl ribonucleotide
  modified_base 81: mod_base = OTHER; note = 2'-O-methyl ribonucleotide
  modified_base 82: mod_base = OTHER; note = 2'-O-methyl ribonucleotide
  modified_base 83: mod_base = OTHER; note = 2'-O-methyl ribonucleotide
  modified_base 84: mod_base = OTHER; note = 2'-O-methyl ribonucleotide
  modified_base 85: mod_base = OTHER; note = 2'-O-methyl ribonucleotide
  modified_base 86: mod_base = OTHER; note = 2'-O-methyl ribonucleotide
  modified_base 87: mod_base = OTHER; note = 2'-O-methyl ribonucleotide
  modified_base 88: mod_base = OTHER; note = 2'-O-methyl ribonucleotide
  modified_base 89: mod_base = OTHER; note = 2'-O-methyl ribonucleotide
  modified_base 90: mod_base = OTHER; note = 2'-O-methyl ribonucleotide
  modified_base 91: mod_base = OTHER; note = 2'-O-methyl ribonucleotide
  modified_base 92: mod_base = OTHER; note = 2'-O-methyl ribonucleotide
  modified_base 93: mod_base = OTHER; note = 2'-O-methyl ribonucleotide
  modified_base 94: mod_base = OTHER; note = 2'-O-methyl ribonucleotide
  modified_base 95: mod_base = OTHER; note = 2'-O-methyl ribonucleotide
  modified_base 96: mod_base = OTHER; note = 2'-O-methyl ribonucleotide
  modified_base 97: mod_base = OTHER; note = 2'-O-methyl ribonucleotide
  modified_base 98: mod_base = OTHER; note = 2'-O-methyl ribonucleotide
  modified_base 99: mod_base = OTHER; note = 2'-O-methyl ribonucleotide
  modified_base 100: mod_base = OTHER; note = 2'-O-methyl ribonucleotide
  modified_base 1..4: mod_base = OTHER; note = phosphorothioate linkage
  modified_base 97..100: mod_base = OTHER; note = phosphorothioate linkage

SEQ ID NO: 2300 - RNA, 100 nt, synthetic construct; identical to SEQ ID NO: 339
  source 1..100: mol_type = other RNA
  modified_base 1: mod_base = OTHER; note = 2'-O-methyl ribonucleotide
  modified_base 2: mod_base = OTHER; note = 2'-O-methyl ribonucleotide
  modified_base 3: mod_base = OTHER; note = 2'-O-methyl ribonucleotide
  modified_base 21: mod_base = OTHER; note = 2'-O-methyl ribonucleotide
  modified_base 28: mod_base = OTHER; note = 2'-O-methyl ribonucleotide
  modified_base 29: mod_base = OTHER; note = 2'-O-methyl ribonucleotide
  modified_base 30: mod_base = OTHER; note = 2'-O-methyl ribonucleotide
  modified_base 31: mod_base = OTHER; note = 2'-O-methyl ribonucleotide
  modified_base 32: mod_base = OTHER; note = 2'-O-methyl ribonucleotide
  modified_base 33: mod_base = OTHER; note = 2'-O-methyl ribonucleotide
  modified_base 34: mod_base = OTHER; note = 2'-O-methyl ribonucleotide
  modified_base 35: mod_base = OTHER; note = 2'-O-methyl ribonucleotide
  modified_base 36: mod_base = OTHER; note = 2'-O-methyl ribonucleotide
  modified_base 37: mod_base = OTHER; note = 2'-O-methyl ribonucleotide
  modified_base 38: mod_base = OTHER; note = 2'-O-methyl ribonucleotide
  modified_base 39: mod_base = OTHER; note = 2'-O-methyl ribonucleotide
  modified_base 40: mod_base = OTHER; note = 2'-O-methyl ribonucleotide
  modified_base 41: mod_base = OTHER; note = 2'-O-methyl ribonucleotide
  modified_base 42: mod_base = OTHER; note = 2'-O-methyl ribonucleotide
  modified_base 46: mod_base = OTHER; note = 2'-O-methyl ribonucleotide
  modified_base 48: mod_base = OTHER; note = 2'-O-methyl ribonucleotide
  modified_base 50: mod_base = OTHER; note = 2'-O-methyl ribonucleotide
  modified_base 52: mod_base = OTHER; note = 2'-O-methyl ribonucleotide
  modified_base 53: mod_base = OTHER; note = 2'-O-methyl ribonucleotide
  modified_base 54: mod_base = OTHER; note = 2'-O-methyl ribonucleotide
  modified_base 55: mod_base = OTHER; note = 2'-O-methyl ribonucleotide
  modified_base 56: mod_base = OTHER; note = 2'-O-methyl ribonucleotide
  modified_base 57: mod_base = OTHER; note = 2'-O-methyl ribonucleotide
  modified_base 60: mod_base = OTHER; note = 2'-O-methyl ribonucleotide
  modified_base 61: mod_base = OTHER; note = 2'-O-methyl ribonucleotide
  modified_base 66: mod_base = OTHER; note = 2'-O-methyl ribonucleotide
  modified_base 67: mod_base = OTHER; note = 2'-O-methyl ribonucleotide
  modified_base 70: mod_base = OTHER; note = 2'-O-methyl ribonucleotide
  modified_base 71: mod_base = OTHER; note = 2'-O-methyl ribonucleotide
  modified_base 72: mod_base = OTHER; note = 2'-O-methyl ribonucleotide
  modified_base 73: mod_base = OTHER; note = 2'-O-methyl ribonucleotide
  modified_base 74: mod_base = OTHER; note = 2'-O-methyl ribonucleotide
  modified_base 75: mod_base = OTHER; note = 2'-O-methyl ribonucleotide
  modified_base 76: mod_base = OTHER; note = 2'-O-methyl ribonucleotide
  modified_base 77: mod_base = OTHER; note = 2'-O-methyl ribonucleotide
  modified_base 78: mod_base = OTHER; note = 2'-O-methyl ribonucleotide
  modified_base 79: mod_base = OTHER; note = 2'-O-methyl ribonucleotide
  modified_base 80: mod_base = OTHER; note = 2'-O-methyl ribonucleotide
  modified_base 81: mod_base = OTHER; note = 2'-O-methyl ribonucleotide
  modified_base 83: mod_base = OTHER; note = 2'-O-methyl ribonucleotide
  modified_base 84: mod_base = OTHER; note = 2'-O-methyl ribonucleotide
  modified_base 85: mod_base = OTHER; note = 2'-O-methyl ribonucleotide
  modified_base 86: mod_base = OTHER; note = 2'-O-methyl ribonucleotide
  modified_base 87: mod_base = OTHER; note = 2'-O-methyl ribonucleotide
  modified_base 88: mod_base = OTHER; note = 2'-O-methyl ribonucleotide
  modified_base 89: mod_base = OTHER; note = 2'-O-methyl ribonucleotide
  modified_base 90: mod_base = OTHER; note = 2'-O-methyl ribonucleotide
  modified_base 91: mod_base = OTHER; note = 2'-O-methyl ribonucleotide
  modified_base 92: mod_base = OTHER; note = 2'-O-methyl ribonucleotide
  modified_base 93: mod_base = OTHER; note = 2'-O-methyl ribonucleotide
  modified_base 94: mod_base = OTHER; note = 2'-O-methyl ribonucleotide
  modified_base 95: mod_base = OTHER; note = 2'-O-methyl ribonucleotide
  modified_base 96: mod_base = OTHER; note = 2'-O-methyl ribonucleotide
  modified_base 97: mod_base = OTHER; note = 2'-O-methyl ribonucleotide
  modified_base 98: mod_base = OTHER; note = 2'-O-methyl ribonucleotide
  modified_base 99: mod_base = OTHER; note = 2'-O-methyl ribonucleotide
  modified_base 100: mod_base = OTHER; note = 2'-O-methyl ribonucleotide
  modified_base 1..4: mod_base = OTHER; note = phosphorothioate linkage
  modified_base 97..100: mod_base = OTHER; note = phosphorothioate linkage

SEQ ID NO: 2301 - RNA, 100 nt, synthetic construct; identical to SEQ ID NO: 341
  source 1..100: mol_type = other RNA
  modified_base 1: mod_base = OTHER; note = 2'-O-methyl ribonucleotide
  modified_base 2: mod_base = OTHER; note = 2'-O-methyl ribonucleotide
  modified_base 3: mod_base = OTHER; note = 2'-O-methyl ribonucleotide
  modified_base 29: mod_base = OTHER; note = 2'-O-methyl ribonucleotide
  modified_base 30: mod_base = OTHER; note = 2'-O-methyl ribonucleotide
  modified_base 31: mod_base = OTHER; note = 2'-O-methyl ribonucleotide
  modified_base 32: mod_base = OTHER; note = 2'-O-methyl ribonucleotide
  modified_base 33: mod_base = OTHER; note = 2'-O-methyl ribonucleotide
  modified_base 34: mod_base = OTHER; note = 2'-O-methyl ribonucleotide
  modified_base 35: mod_base = OTHER; note = 2'-O-methyl ribonucleotide
  modified_base 36: mod_base = OTHER; note = 2'-O-methyl ribonucleotide
  modified_base 37: mod_base = OTHER; note = 2'-O-methyl ribonucleotide
  modified_base 38: mod_base = OTHER; note = 2'-O-methyl ribonucleotide
  modified_base 39: mod_base = OTHER; note = 2'-O-methyl ribonucleotide
  modified_base 40: mod_base = OTHER; note = 2'-O-methyl ribonucleotide
  modified_base 69: mod_base = OTHER; note = 2'-O-methyl ribonucleotide
  modified_base 70: mod_base = OTHER; note = 2'-O-methyl ribonucleotide
  modified_base 71: mod_base = OTHER; note = 2'-O-methyl ribonucleotide
  modified_base 72: mod_base = OTHER; note = 2'-O-methyl ribonucleotide
  modified_base 73: mod_base = OTHER; note = 2'-O-methyl ribonucleotide
  modified_base 74: mod_base = OTHER; note = 2'-O-methyl ribonucleotide
  modified_base 75: mod_base = OTHER; note = 2'-O-methyl ribonucleotide
  modified_base 76: mod_base = OTHER; note = 2'-O-methyl ribonucleotide
  modified_base 77: mod_base = OTHER; note = 2'-O-methyl ribonucleotide
  modified_base 78: mod_base = OTHER; note = 2'-O-methyl ribonucleotide
  modified_base 79: mod_base = OTHER; note = 2'-O-methyl ribonucleotide
  modified_base 80: mod_base = OTHER; note = 2'-O-methyl ribonucleotide
  modified_base 81: mod_base = OTHER; note = 2'-O-methyl ribonucleotide
  modified_base 82: mod_base = OTHER; note = 2'-O-methyl ribonucleotide
  modified_base 83: mod_base = OTHER; note = 2'-O-methyl ribonucleotide
  modified_base 84: mod_base = OTHER; note = 2'-O-methyl ribonucleotide
  modified_base 85: mod_base = OTHER; note = 2'-O-methyl ribonucleotide
  modified_base 86: mod_base = OTHER; note = 2'-O-methyl ribonucleotide
  modified_base 87: mod_base = OTHER; note = 2'-O-methyl ribonucleotide
  modified_base 88: mod_base = OTHER; note = 2'-O-methyl ribonucleotide
  modified_base 89: mod_base = OTHER; note = 2'-O-methyl ribonucleotide
  modified_base 90: mod_base = OTHER; note = 2'-O-methyl ribonucleotide
  modified_base 91: mod_base = OTHER; note = 2'-O-methyl ribonucleotide
  modified_base 92: mod_base = OTHER; note = 2'-O-methyl ribonucleotide
  modified_base 93: mod_base = OTHER; note = 2'-O-methyl ribonucleotide
  modified_base 94: mod_base = OTHER; note = 2'-O-methyl ribonucleotide
  modified_base 95: mod_base = OTHER; note = 2'-O-methyl ribonucleotide
  modified_base 96: mod_base = OTHER; note = 2'-O-methyl ribonucleotide
  modified_base 97: mod_base = OTHER; note = 2'-O-methyl ribonucleotide
  modified_base 98: mod_base = OTHER; note = 2'-O-methyl ribonucleotide
  modified_base 99: mod_base = OTHER; note = 2'-O-methyl ribonucleotide
  modified_base 100: mod_base = OTHER; note = 2'-O-methyl ribonucleotide
  modified_base 1..4: mod_base = OTHER; note = phosphorothioate linkage
  modified_base 97..100: mod_base = OTHER; note = phosphorothioate linkage

SEQ ID NO: 2302 - RNA, 100 nt, synthetic construct; identical to SEQ ID NO: 363
  source 1..100: mol_type = other RNA
  modified_base 1: mod_base = OTHER; note = 2'-O-methyl ribonucleotide
  modified_base 2: mod_base = OTHER; note = 2'-O-methyl ribonucleotide
  modified_base 3: mod_base = OTHER; note = 2'-O-methyl ribonucleotide
  modified_base 21: mod_base = OTHER; note = 2'-O-methyl ribonucleotide
  modified_base 28: mod_base = OTHER; note = 2'-O-methyl ribonucleotide
  modified_base 29: mod_base = OTHER; note = 2'-O-methyl ribonucleotide
  modified_base 30: mod_base = OTHER; note = 2'-O-methyl ribonucleotide
  modified_base 31: mod_base = OTHER; note = 2'-O-methyl ribonucleotide
  modified_base 32: mod_base = OTHER; note = 2'-O-methyl ribonucleotide
  modified_base 33: mod_base = OTHER; note = 2'-O-methyl ribonucleotide
  modified_base 34: mod_base = OTHER; note = 2'-O-methyl ribonucleotide
  modified_base 35: mod_base = OTHER; note = 2'-O-methyl ribonucleotide
  modified_base 36: mod_base = OTHER; note = 2'-O-methyl ribonucleotide
  modified_base 37: mod_base = OTHER; note = 2'-O-methyl ribonucleotide
  modified_base 38: mod_base = OTHER; note = 2'-O-methyl ribonucleotide
  modified_base 39: mod_base = OTHER; note = 2'-O-methyl ribonucleotide
  modified_base 40: mod_base = OTHER; note = 2'-O-methyl ribonucleotide
  modified_base 41: mod_base = OTHER; note = 2'-O-methyl ribonucleotide
  modified_base 42: mod_base = OTHER; note = 2'-O-methyl ribonucleotide
  modified_base 46: mod_base = OTHER; note = 2'-O-methyl ribonucleotide
  modified_base 48: mod_base = OTHER; note = 2'-O-methyl ribonucleotide
  modified_base 50: mod_base = OTHER; note = 2'-O-methyl ribonucleotide
  modified_base 52: mod_base = OTHER; note = 2'-O-methyl ribonucleotide
  modified_base 53: mod_base = OTHER; note = 2'-O-methyl ribonucleotide
  modified_base 54: mod_base = OTHER; note = 2'-O-methyl ribonucleotide
  modified_base 55: mod_base = OTHER; note = 2'-O-methyl ribonucleotide
  modified_base 56: mod_base = OTHER; note = 2'-O-methyl ribonucleotide
  modified_base 57: mod_base = OTHER; note = 2'-O-methyl ribonucleotide
  modified_base 60: mod_base = OTHER; note = 2'-O-methyl ribonucleotide
  modified_base 61: mod_base = OTHER; note = 2'-O-methyl ribonucleotide
  modified_base 66: mod_base = OTHER; note = 2'-O-methyl ribonucleotide
  modified_base 67: mod_base = OTHER; note = 2'-O-methyl ribonucleotide
  modified_base 70: mod_base = OTHER; note = 2'-O-methyl ribonucleotide
  modified_base 71: mod_base = OTHER; note = 2'-O-methyl ribonucleotide
  modified_base 72: mod_base = OTHER; note = 2'-O-methyl ribonucleotide
  modified_base 73: mod_base = OTHER; note = 2'-O-methyl ribonucleotide
  modified_base 74: mod_base = OTHER; note = 2'-O-methyl ribonucleotide
  modified_base 75: mod_base = OTHER; note = 2'-O-methyl ribonucleotide
  modified_base 76: mod_base = OTHER; note = 2'-O-methyl ribonucleotide
  modified_base 77: mod_base = OTHER; note = 2'-O-methyl ribonucleotide
  modified_base 78: mod_base = OTHER; note = 2'-O-methyl ribonucleotide
  modified_base 79: mod_base = OTHER; note = 2'-O-methyl ribonucleotide
  modified_base 80: mod_base = OTHER; note = 2'-O-methyl ribonucleotide
  modified_base 81: mod_base = OTHER; note = 2'-O-methyl ribonucleotide
  modified_base 83: mod_base = OTHER; note = 2'-O-methyl ribonucleotide
  modified_base 84: mod_base = OTHER; note = 2'-O-methyl ribonucleotide
  modified_base 85: mod_base = OTHER; note = 2'-O-methyl ribonucleotide
  modified_base 86: mod_base = OTHER; note = 2'-O-methyl ribonucleotide
  modified_base 87: mod_base = OTHER; note = 2'-O-methyl ribonucleotide
  modified_base 88: mod_base = OTHER; note = 2'-O-methyl ribonucleotide
  modified_base 89: mod_base = OTHER; note = 2'-O-methyl ribonucleotide
  modified_base 90: mod_base = OTHER; note = 2'-O-methyl ribonucleotide
  modified_base 91: mod_base = OTHER; note = 2'-O-methyl ribonucleotide
  modified_base 92: mod_base = OTHER; note = 2'-O-methyl ribonucleotide
  modified_base 93: mod_base = OTHER; note = 2'-O-methyl ribonucleotide
  modified_base 94: mod_base = OTHER; note = 2'-O-methyl ribonucleotide
  modified_base 95: mod_base = OTHER; note = 2'-O-methyl ribonucleotide
  modified_base 96: mod_base = OTHER; note = 2'-O-methyl ribonucleotide
  modified_base 97: mod_base = OTHER; note = 2'-O-methyl ribonucleotide
  modified_base 98: mod_base = OTHER; note = 2'-O-methyl ribonucleotide
  modified_base 99: mod_base = OTHER; note = 2'-O-methyl ribonucleotide
  modified_base 100: mod_base = OTHER; note = 2'-O-methyl ribonucleotide
  modified_base 1..4: mod_base = OTHER; note = phosphorothioate linkage
  modified_base 97..100: mod_base = OTHER; note = phosphorothioate linkage

SEQ ID NO: 2303 - RNA, 100 nt, synthetic construct; identical to SEQ ID NO: 365
  source 1..100: mol_type = other RNA
  modified_base 1: mod_base = OTHER; note = 2'-O-methyl ribonucleotide
  modified_base 2: mod_base = OTHER; note = 2'-O-methyl ribonucleotide
  modified_base 3: mod_base = OTHER; note = 2'-O-methyl ribonucleotide
  modified_base 21: mod_base = OTHER; note = 2'-O-methyl ribonucleotide
  modified_base 28: mod_base = OTHER; note = 2'-O-methyl ribonucleotide
  modified_base 29: mod_base = OTHER; note = 2'-O-methyl ribonucleotide
  modified_base 30: mod_base = OTHER; note = 2'-O-methyl ribonucleotide
  modified_base 31: mod_base = OTHER; note = 2'-O-methyl ribonucleotide
  modified_base 32: mod_base = OTHER; note = 2'-O-methyl ribonucleotide
  modified_base 33: mod_base = OTHER; note = 2'-O-methyl ribonucleotide
  modified_base 34: mod_base = OTHER; note = 2'-O-methyl ribonucleotide
  modified_base 35: mod_base = OTHER; note = 2'-O-methyl ribonucleotide
  modified_base 36: mod_base = OTHER; note = 2'-O-methyl ribonucleotide
  modified_base 37: mod_base = OTHER; note = 2'-O-methyl ribonucleotide
  modified_base 38: mod_base = OTHER; note = 2'-O-methyl ribonucleotide
  modified_base 39: mod_base = OTHER; note = 2'-O-methyl ribonucleotide
  modified_base 40: mod_base = OTHER; note = 2'-O-methyl ribonucleotide
  modified_base 41: mod_base = OTHER; note = 2'-O-methyl ribonucleotide
  modified_base 42: mod_base = OTHER; note = 2'-O-methyl ribonucleotide
  modified_base 46: mod_base = OTHER; note = 2'-O-methyl ribonucleotide
  modified_base 48: mod_base = OTHER; note = 2'-O-methyl ribonucleotide
  modified_base 50: mod_base = OTHER; note = 2'-O-methyl ribonucleotide
  modified_base 52: mod_base = OTHER; note = 2'-O-methyl ribonucleotide
  modified_base 53: mod_base = OTHER; note = 2'-O-methyl ribonucleotide
  modified_base 54: mod_base = OTHER; note = 2'-O-methyl ribonucleotide
  modified_base 55: mod_base = OTHER; note = 2'-O-methyl ribonucleotide
  modified_base 56: mod_base = OTHER; note = 2'-O-methyl ribonucleotide
  modified_base 57: mod_base = OTHER; note = 2'-O-methyl ribonucleotide
  modified_base 60: mod_base = OTHER; note = 2'-O-methyl ribonucleotide
  modified_base 61: mod_base = OTHER; note = 2'-O-methyl ribonucleotide
  modified_base 66: mod_base = OTHER; note = 2'-O-methyl ribonucleotide
  modified_base 67: mod_base = OTHER; note = 2'-O-methyl ribonucleotide
  modified_base 70: mod_base = OTHER; note = 2'-O-methyl ribonucleotide
  modified_base 71: mod_base = OTHER; note = 2'-O-methyl ribonucleotide
  modified_base 72: mod_base = OTHER; note = 2'-O-methyl ribonucleotide
  modified_base 73: mod_base = OTHER; note = 2'-O-methyl ribonucleotide
  modified_base 74: mod_base = OTHER; note = 2'-O-methyl ribonucleotide
  modified_base 75: mod_base = OTHER; note = 2'-O-methyl ribonucleotide
  modified_base 76: mod_base = OTHER; note = 2'-O-methyl ribonucleotide
  modified_base 77: mod_base = OTHER; note = 2'-O-methyl ribonucleotide
  modified_base 78: mod_base = OTHER; note = 2'-O-methyl ribonucleotide
  modified_base 79: mod_base = OTHER; note = 2'-O-methyl ribonucleotide
  modified_base 80: mod_base = OTHER; note = 2'-O-methyl ribonucleotide
  modified_base 81: mod_base = OTHER; note = 2'-O-methyl ribonucleotide
  modified_base 83: mod_base = OTHER; note = 2'-O-methyl ribonucleotide
  modified_base 84: mod_base = OTHER; note = 2'-O-methyl ribonucleotide
  modified_base 85: mod_base = OTHER; note = 2'-O-methyl ribonucleotide
  modified_base 86: mod_base = OTHER; note = 2'-O-methyl ribonucleotide
  modified_base 87: mod_base = OTHER; note = 2'-O-methyl ribonucleotide
  modified_base 88: mod_base = OTHER; note = 2'-O-methyl ribonucleotide
  modified_base 89: mod_base = OTHER; note = 2'-O-methyl ribonucleotide
  modified_base 90: mod_base = OTHER; note = 2'-O-methyl ribonucleotide
  modified_base 91: mod_base = OTHER; note = 2'-O-methyl ribonucleotide
  modified_base 92: mod_base = OTHER; note = 2'-O-methyl ribonucleotide
  modified_base 93: mod_base = OTHER; note = 2'-O-methyl ribonucleotide
  modified_base 94: mod_base = OTHER; note = 2'-O-methyl ribonucleotide
  modified_base 95: mod_base = OTHER; note = 2'-O-methyl ribonucleotide
  modified_base 96: mod_base = OTHER; note = 2'-O-methyl ribonucleotide
  modified_base 97: mod_base = OTHER; note = 2'-O-methyl ribonucleotide
  modified_base 98: mod_base = OTHER; note = 2'-O-methyl ribonucleotide
  modified_base 99: mod_base = OTHER; note = 2'-O-methyl ribonucleotide
  modified_base 100: mod_base = OTHER; note = 2'-O-methyl ribonucleotide
  modified_base 1..4: mod_base = OTHER; note = phosphorothioate linkage
  modified_base 97..100: mod_base = OTHER; note = phosphorothioate linkage

SEQ ID NO: 2304 - RNA, 100 nt, synthetic construct; identical to SEQ ID NO: 370
  source 1..100: mol_type = other RNA
  modified_base 1: mod_base = OTHER; note = 2'-O-methyl ribonucleotide
  modified_base 2: mod_base = OTHER; note = 2'-O-methyl ribonucleotide
  modified_base 3: mod_base = OTHER; note = 2'-O-methyl ribonucleotide
  modified_base 21: mod_base = OTHER; note = 2'-O-methyl ribonucleotide
  modified_base 28: mod_base = OTHER; note = 2'-O-methyl ribonucleotide
  modified_base 29: mod_base = OTHER; note = 2'-O-methyl ribonucleotide
  modified_base 30: mod_base = OTHER; note = 2'-O-methyl ribonucleotide
  modified_base 31: mod_base = OTHER; note = 2'-O-methyl ribonucleotide
  modified_base 32: mod_base = OTHER; note = 2'-O-methyl ribonucleotide
  modified_base 33: mod_base = OTHER; note = 2'-O-methyl ribonucleotide
  modified_base 34: mod_base = OTHER; note = 2'-O-methyl ribonucleotide
  modified_base 35: mod_base = OTHER; note = 2'-O-methyl ribonucleotide
  modified_base 36: mod_base = OTHER; note = 2'-O-methyl ribonucleotide
  modified_base 37: mod_base = OTHER; note = 2'-O-methyl ribonucleotide
  modified_base 38: mod_base = OTHER; note = 2'-O-methyl ribonucleotide
  modified_base 39: mod_base = OTHER; note = 2'-O-methyl ribonucleotide
  modified_base 40: mod_base = OTHER; note = 2'-O-methyl ribonucleotide
  modified_base 41: mod_base = OTHER; note = 2'-O-methyl ribonucleotide
  modified_base 42: mod_base = OTHER; note = 2'-O-methyl ribonucleotide
  modified_base 46: mod_base = OTHER; note = 2'-O-methyl ribonucleotide
  modified_base 48: mod_base = OTHER; note = 2'-O-methyl ribonucleotide
  modified_base 50: mod_base = OTHER; note = 2'-O-methyl ribonucleotide
  modified_base 52: mod_base = OTHER; note = 2'-O-methyl ribonucleotide
  modified_base 53: mod_base = OTHER; note = 2'-O-methyl ribonucleotide
  modified_base 54: mod_base = OTHER; note = 2'-O-methyl ribonucleotide
  modified_base 55: mod_base = OTHER; note = 2'-O-methyl ribonucleotide
  modified_base 56: mod_base = OTHER; note = 2'-O-methyl ribonucleotide
  modified_base 57: mod_base = OTHER; note = 2'-O-methyl ribonucleotide
  modified_base 60: mod_base = OTHER; note = 2'-O-methyl ribonucleotide
  modified_base 61: mod_base = OTHER; note = 2'-O-methyl ribonucleotide
  modified_base 66: mod_base = OTHER; note = 2'-O-methyl ribonucleotide
  modified_base 67: mod_base = OTHER; note = 2'-O-methyl ribonucleotide
  modified_base 70: mod_base = OTHER; note = 2'-O-methyl ribonucleotide
  modified_base 71: mod_base = OTHER; note = 2'-O-methyl ribonucleotide
  modified_base 72: mod_base = OTHER; note = 2'-O-methyl ribonucleotide
  modified_base 73: mod_base = OTHER; note = 2'-O-methyl ribonucleotide
  modified_base 74: mod_base = OTHER; note = 2'-O-methyl ribonucleotide
  modified_base 75: mod_base = OTHER; note = 2'-O-methyl ribonucleotide
  modified_base 76: mod_base = OTHER; note = 2'-O-methyl ribonucleotide
  modified_base 77: mod_base = OTHER; note = 2'-O-methyl ribonucleotide
  modified_base 78: mod_base = OTHER; note = 2'-O-methyl ribonucleotide
  modified_base 79: mod_base = OTHER; note = 2'-O-methyl ribonucleotide
  modified_base 80: mod_base = OTHER; note = 2'-O-methyl ribonucleotide
  modified_base 81: mod_base = OTHER; note = 2'-O-methyl ribonucleotide
  modified_base 83: mod_base = OTHER; note = 2'-O-methyl ribonucleotide
  modified_base 84: mod_base = OTHER; note = 2'-O-methyl ribonucleotide
  modified_base 85: mod_base = OTHER; note = 2'-O-methyl ribonucleotide
  modified_base 86: mod_base = OTHER; note = 2'-O-methyl ribonucleotide
  modified_base 87: mod_base = OTHER; note = 2'-O-methyl ribonucleotide
  modified_base 88: mod_base = OTHER; note = 2'-O-methyl ribonucleotide
  modified_base 89: mod_base = OTHER; note = 2'-O-methyl ribonucleotide
  modified_base 90: mod_base = OTHER; note = 2'-O-methyl ribonucleotide
  modified_base 91: mod_base = OTHER; note = 2'-O-methyl ribonucleotide
  modified_base 92: mod_base = OTHER; note = 2'-O-methyl ribonucleotide
  modified_base 93: mod_base = OTHER; note = 2'-O-methyl ribonucleotide
  modified_base 94: mod_base = OTHER; note = 2'-O-methyl ribonucleotide
  modified_base 95: mod_base = OTHER; note = 2'-O-methyl ribonucleotide
  modified_base 96: mod_base = OTHER; note = 2'-O-methyl ribonucleotide
  modified_base 97: mod_base = OTHER; note = 2'-O-methyl ribonucleotide
  modified_base 98: mod_base = OTHER; note = 2'-O-methyl ribonucleotide
  modified_base 99: mod_base = OTHER; note = 2'-O-methyl ribonucleotide
  modified_base 100: mod_base = OTHER; note = 2'-O-methyl ribonucleotide
  modified_base 1..4: mod_base = OTHER; note = phosphorothioate linkage
  modified_base 97..100: mod_base = OTHER; note = phosphorothioate linkage

SEQ ID NO: 2305 - RNA, 100 nt, synthetic construct; identical to SEQ ID NO: 372
  source 1..100: mol_type = other RNA
  modified_base 1: mod_base = OTHER; note = 2'-O-methyl ribonucleotide
  modified_base 2: mod_base = OTHER; note = 2'-O-methyl ribonucleotide
  modified_base 3: mod_base = OTHER; note = 2'-O-methyl ribonucleotide
  modified_base 21: mod_base = OTHER; note = 2'-O-methyl ribonucleotide
  modified_base 28: mod_base = OTHER; note = 2'-O-methyl ribonucleotide
  modified_base 29: mod_base = OTHER; note = 2'-O-methyl ribonucleotide
  modified_base 30: mod_base = OTHER; note = 2'-O-methyl ribonucleotide
  modified_base 31: mod_base = OTHER; note = 2'-O-methyl ribonucleotide
  modified_base 32: mod_base = OTHER; note = 2'-O-methyl ribonucleotide
  modified_base 33: mod_base = OTHER; note = 2'-O-methyl ribonucleotide
  modified_base 34: mod_base = OTHER; note = 2'-O-methyl ribonucleotide
  modified_base 35: mod_base = OTHER; note = 2'-O-methyl ribonucleotide
  modified_base 36: mod_base = OTHER; note = 2'-O-methyl ribonucleotide
  modified_base 37: mod_base = OTHER; note = 2'-O-methyl ribonucleotide
  modified_base 38: mod_base = OTHER; note = 2'-O-methyl ribonucleotide
  modified_base 39: mod_base = OTHER; note = 2'-O-methyl ribonucleotide
  modified_base 40: mod_base = OTHER; note = 2'-O-methyl ribonucleotide
  modified_base 41: mod_base = OTHER; note = 2'-O-methyl ribonucleotide
  modified_base 42: mod_base = OTHER; note = 2'-O-methyl ribonucleotide
  modified_base 46: mod_base = OTHER; note = 2'-O-methyl ribonucleotide
  modified_base 48: mod_base = OTHER; note = 2'-O-methyl ribonucleotide
  modified_base 50: mod_base = OTHER; note = 2'-O-methyl ribonucleotide
  modified_base 52: mod_base = OTHER; note = 2'-O-methyl ribonucleotide
  modified_base 53: mod_base = OTHER; note = 2'-O-methyl ribonucleotide
  modified_base 54: mod_base = OTHER; note = 2'-O-methyl ribonucleotide
  modified_base 55: mod_base = OTHER; note = 2'-O-methyl ribonucleotide
  modified_base 56: mod_base = OTHER; note = 2'-O-methyl ribonucleotide
  modified_base 57: mod_base = OTHER; note = 2'-O-methyl ribonucleotide
  modified_base 60: mod_base = OTHER; note = 2'-O-methyl ribonucleotide
  modified_base 61: mod_base = OTHER; note = 2'-O-methyl ribonucleotide
  modified_base 66: mod_base = OTHER; note = 2'-O-methyl ribonucleotide
  modified_base 67: mod_base = OTHER; note = 2'-O-methyl ribonucleotide
  modified_base 70: mod_base = OTHER; note = 2'-O-methyl ribonucleotide
  modified_base 71: mod_base = OTHER; note = 2'-O-methyl ribonucleotide
  modified_base 72: mod_base = OTHER; note = 2'-O-methyl ribonucleotide
  modified_base 73: mod_base = OTHER; note = 2'-O-methyl ribonucleotide
  modified_base 74: mod_base = OTHER; note = 2'-O-methyl ribonucleotide
  modified_base 75: mod_base = OTHER; note = 2'-O-methyl ribonucleotide
  modified_base 76: mod_base = OTHER; note = 2'-O-methyl ribonucleotide
  modified_base 77: mod_base = OTHER; note = 2'-O-methyl ribonucleotide
  modified_base 78: mod_base = OTHER; note = 2'-O-methyl ribonucleotide
  modified_base 79: mod_base = OTHER; note = 2'-O-methyl ribonucleotide
  modified_base 80: mod_base = OTHER; note = 2'-O-methyl ribonucleotide
  modified_base 81: mod_base = OTHER; note = 2'-O-methyl ribonucleotide
  modified_base 83: mod_base = OTHER; note = 2'-O-methyl ribonucleotide
  modified_base 84: mod_base = OTHER; note = 2'-O-methyl ribonucleotide
  modified_base 85: mod_base = OTHER; note = 2'-O-methyl ribonucleotide
  modified_base 86: mod_base = OTHER; note = 2'-O-methyl ribonucleotide
  modified_base 87: mod_base = OTHER; note = 2'-O-methyl ribonucleotide
  modified_base 88: mod_base = OTHER; note = 2'-O-methyl ribonucleotide
  modified_base 89: mod_base = OTHER; note = 2'-O-methyl ribonucleotide
  modified_base 90: mod_base = OTHER; note = 2'-O-methyl ribonucleotide
  modified_base 91: mod_base = OTHER; note = 2'-O-methyl ribonucleotide
  modified_base 92: mod_base = OTHER; note = 2'-O-methyl ribonucleotide
  modified_base 93: mod_base = OTHER; note = 2'-O-methyl ribonucleotide
  modified_base 94: mod_base = OTHER; note = 2'-O-methyl ribonucleotide
  modified_base 95: mod_base = OTHER; note = 2'-O-methyl ribonucleotide
  modified_base 96: mod_base = OTHER; note = 2'-O-methyl ribonucleotide
  modified_base 97: mod_base = OTHER; note = 2'-O-methyl ribonucleotide
  modified_base 98: mod_base = OTHER; note = 2'-O-methyl ribonucleotide
  modified_base 99: mod_base = OTHER; note = 2'-O-methyl ribonucleotide
  modified_base 100: mod_base = OTHER; note = 2'-O-methyl ribonucleotide
  modified_base 1..4: mod_base = OTHER; note = phosphorothioate linkage
  modified_base 97..100: mod_base = OTHER; note = phosphorothioate linkage

SEQ ID NO: 2306 - RNA, 100 nt, synthetic construct; identical to SEQ ID NO: 381
  source 1..100: mol_type = other RNA
  modified_base 1: mod_base = OTHER; note = 2'-O-methyl ribonucleotide
  modified_base 2: mod_base = OTHER; note = 2'-O-methyl ribonucleotide
  modified_base 3: mod_base = OTHER; note = 2'-O-methyl ribonucleotide
  modified_base 21: mod_base = OTHER; note = 2'-O-methyl ribonucleotide
  modified_base 28: mod_base = OTHER; note = 2'-O-methyl ribonucleotide
  modified_base 29: mod_base = OTHER; note = 2'-O-methyl ribonucleotide
  modified_base 30: mod_base = OTHER; note = 2'-O-methyl ribonucleotide
  modified_base 31: mod_base = OTHER; note = 2'-O-methyl ribonucleotide
  modified_base 32: mod_base = OTHER; note = 2'-O-methyl ribonucleotide
  modified_base 33: mod_base = OTHER; note = 2'-O-methyl ribonucleotide
  modified_base 34: mod_base = OTHER; note = 2'-O-methyl ribonucleotide
  modified_base 35: mod_base = OTHER; note = 2'-O-methyl ribonucleotide
  modified_base 36: mod_base = OTHER; note = 2'-O-methyl ribonucleotide
  modified_base 37: mod_base = OTHER; note = 2'-O-methyl ribonucleotide
  modified_base 38: mod_base = OTHER; note = 2'-O-methyl ribonucleotide
  modified_base 39: mod_base = OTHER; note = 2'-O-methyl ribonucleotide
  modified_base 40: mod_base = OTHER; note = 2'-O-methyl ribonucleotide
  modified_base 41: mod_base = OTHER; note = 2'-O-methyl ribonucleotide
  modified_base 42: mod_base = OTHER; note = 2'-O-methyl ribonucleotide
  modified_base 46: mod_base = OTHER; note = 2'-O-methyl ribonucleotide
  modified_base 48: mod_base = OTHER; note = 2'-O-methyl ribonucleotide
  modified_base 50: mod_base = OTHER; note = 2'-O-methyl ribonucleotide
  modified_base 52: mod_base = OTHER; note = 2'-O-methyl ribonucleotide
  modified_base 53: mod_base = OTHER; note = 2'-O-methyl ribonucleotide
  modified_base 54: mod_base = OTHER; note = 2'-O-methyl ribonucleotide
  modified_base 55: mod_base = OTHER; note = 2'-O-methyl ribonucleotide
  modified_base 56: mod_base = OTHER; note = 2'-O-methyl ribonucleotide
  modified_base 57: mod_base = OTHER; note = 2'-O-methyl ribonucleotide
  modified_base 60: mod_base = OTHER; note = 2'-O-methyl ribonucleotide
  modified_base 61: mod_base = OTHER; note = 2'-O-methyl ribonucleotide
  modified_base 66: mod_base = OTHER; note = 2'-O-methyl ribonucleotide
  modified_base 67: mod_base = OTHER; note = 2'-O-methyl ribonucleotide
  modified_base 70: mod_base = OTHER; note = 2'-O-methyl ribonucleotide
  modified_base 71: mod_base = OTHER; note = 2'-O-methyl ribonucleotide
  modified_base 72: mod_base = OTHER; note = 2'-O-methyl ribonucleotide
  modified_base 73: mod_base = OTHER; note = 2'-O-methyl ribonucleotide
  modified_base 74: mod_base = OTHER; note = 2'-O-methyl ribonucleotide
  modified_base 75: mod_base = OTHER; note = 2'-O-methyl ribonucleotide
  modified_base 76: mod_base = OTHER; note = 2'-O-methyl ribonucleotide
  modified_base 77: mod_base = OTHER; note = 2'-O-methyl ribonucleotide
  modified_base 78: mod_base = OTHER; note = 2'-O-methyl ribonucleotide
  modified_base 79: mod_base = OTHER; note = 2'-O-methyl ribonucleotide
  modified_base 80: mod_base = OTHER; note = 2'-O-methyl ribonucleotide
  modified_base 81: mod_base = OTHER; note = 2'-O-methyl ribonucleotide
  modified_base 83: mod_base = OTHER; note = 2'-O-methyl ribonucleotide
  modified_base 84: mod_base = OTHER; note = 2'-O-methyl ribonucleotide
  modified_base 85: mod_base = OTHER; note = 2'-O-methyl ribonucleotide
  modified_base 86: mod_base = OTHER; note = 2'-O-methyl ribonucleotide
  modified_base 87: mod_base = OTHER; note = 2'-O-methyl ribonucleotide
  modified_base 88: mod_base = OTHER; note = 2'-O-methyl ribonucleotide
  modified_base 89: mod_base = OTHER; note = 2'-O-methyl ribonucleotide
  modified_base 90: mod_base = OTHER; note = 2'-O-methyl ribonucleotide
  modified_base 91: mod_base = OTHER; note = 2'-O-methyl ribonucleotide
  modified_base 92: mod_base = OTHER; note = 2'-O-methyl ribonucleotide
  modified_base 93: mod_base = OTHER; note = 2'-O-methyl ribonucleotide
  modified_base 94: mod_base = OTHER; note = 2'-O-methyl ribonucleotide
  modified_base 95: mod_base = OTHER; note = 2'-O-methyl ribonucleotide
  modified_base 96: mod_base = OTHER; note = 2'-O-methyl ribonucleotide
  modified_base 97: mod_base = OTHER; note = 2'-O-methyl ribonucleotide
  modified_base 98: mod_base = OTHER; note = 2'-O-methyl ribonucleotide
  modified_base 99: mod_base = OTHER; note = 2'-O-methyl ribonucleotide
  modified_base 100: mod_base = OTHER; note = 2'-O-methyl ribonucleotide
  modified_base 1..4: mod_base = OTHER; note = phosphorothioate linkage
  modified_base 97..100: mod_base = OTHER; note = phosphorothioate linkage

SEQ ID NO: 2307 - RNA, 100 nt, synthetic construct; identical to SEQ ID NO: 382
  source 1..100: mol_type = other RNA
  modified_base 1: mod_base = OTHER; note = 2'-O-methyl ribonucleotide
  modified_base 2: mod_base = OTHER; note = 2'-O-methyl ribonucleotide
  modified_base 3: mod_base = OTHER; note = 2'-O-methyl ribonucleotide
  modified_base 21: mod_base = OTHER; note = 2'-O-methyl ribonucleotide
  modified_base 28: mod_base = OTHER; note = 2'-O-methyl ribonucleotide
  modified_base 29: mod_base = OTHER; note = 2'-O-methyl ribonucleotide
  modified_base 30: mod_base = OTHER; note = 2'-O-methyl ribonucleotide
  modified_base 31: mod_base = OTHER; note = 2'-O-methyl ribonucleotide
  modified_base 32: mod_base = OTHER; note = 2'-O-methyl ribonucleotide
  modified_base 33: mod_base = OTHER; note = 2'-O-methyl ribonucleotide
  modified_base 34: mod_base = OTHER; note = 2'-O-methyl ribonucleotide
  modified_base 35: mod_base = OTHER; note = 2'-O-methyl ribonucleotide
  modified_base 36: mod_base = OTHER; note = 2'-O-methyl ribonucleotide
  modified_base 37: mod_base = OTHER; note = 2'-O-methyl ribonucleotide
  modified_base 38: mod_base = OTHER; note = 2'-O-methyl ribonucleotide
  modified_base 39: mod_base = OTHER; note = 2'-O-methyl ribonucleotide
  modified_base 40: mod_base = OTHER; note = 2'-O-methyl ribonucleotide
  modified_base 41: mod_base = OTHER; note = 2'-O-methyl ribonucleotide
  modified_base 42: mod_base = OTHER; note = 2'-O-methyl ribonucleotide
  modified_base 46: mod_base = OTHER; note = 2'-O-methyl ribonucleotide
  modified_base 48: mod_base = OTHER; note = 2'-O-methyl ribonucleotide
  modified_base 50: mod_base = OTHER; note = 2'-O-methyl ribonucleotide
  modified_base 52: mod_base = OTHER; note = 2'-O-methyl ribonucleotide
  modified_base 53: mod_base = OTHER; note = 2'-O-methyl ribonucleotide
  modified_base 54: mod_base = OTHER; note = 2'-O-methyl ribonucleotide
  modified_base 55: mod_base = OTHER; note = 2'-O-methyl ribonucleotide
  modified_base 56: mod_base = OTHER; note = 2'-O-methyl ribonucleotide
  modified_base 57: mod_base = OTHER; note = 2'-O-methyl ribonucleotide
  modified_base 60: mod_base = OTHER; note = 2'-O-methyl ribonucleotide
  modified_base 61: mod_base = OTHER; note = 2'-O-methyl ribonucleotide
  modified_base 66: mod_base = OTHER; note = 2'-O-methyl ribonucleotide
  modified_base 67: mod_base = OTHER; note = 2'-O-methyl ribonucleotide
  modified_base 70: mod_base = OTHER; note = 2'-O-methyl ribonucleotide
  modified_base 71: mod_base = OTHER; note = 2'-O-methyl ribonucleotide
  modified_base 72: mod_base = OTHER; note = 2'-O-methyl ribonucleotide
  modified_base 73: mod_base = OTHER; note = 2'-O-methyl ribonucleotide
  modified_base 74: mod_base = OTHER; note = 2'-O-methyl ribonucleotide
  modified_base 75: mod_base = OTHER; note = 2'-O-methyl ribonucleotide
  modified_base 76: mod_base = OTHER; note = 2'-O-methyl ribonucleotide
  modified_base 77: mod_base = OTHER; note = 2'-O-methyl ribonucleotide
  modified_base 78: mod_base = OTHER; note = 2'-O-methyl ribonucleotide
  modified_base 79: mod_base = OTHER; note = 2'-O-methyl ribonucleotide
  modified_base 80: mod_base = OTHER; note = 2'-O-methyl ribonucleotide
  modified_base 81: mod_base = OTHER; note = 2'-O-methyl ribonucleotide
  modified_base 83: mod_base = OTHER; note = 2'-O-methyl ribonucleotide
  modified_base 84: mod_base = OTHER; note = 2'-O-methyl ribonucleotide
  modified_base 85: mod_base = OTHER; note = 2'-O-methyl ribonucleotide
  modified_base 86: mod_base = OTHER; note = 2'-O-methyl ribonucleotide
  modified_base 87: mod_base = OTHER; note = 2'-O-methyl ribonucleotide
  modified_base 88: mod_base = OTHER; note = 2'-O-methyl ribonucleotide
  modified_base 89: mod_base = OTHER; note = 2'-O-methyl ribonucleotide
  modified_base 90: mod_base = OTHER; note = 2'-O-methyl ribonucleotide
  modified_base 91: mod_base = OTHER; note = 2'-O-methyl ribonucleotide
  modified_base 92: mod_base = OTHER; note = 2'-O-methyl ribonucleotide
  modified_base 93: mod_base = OTHER; note = 2'-O-methyl ribonucleotide
  modified_base 94: mod_base = OTHER; note = 2'-O-methyl ribonucleotide
  modified_base 95: mod_base = OTHER; note = 2'-O-methyl ribonucleotide
  modified_base 96: mod_base = OTHER; note = 2'-O-methyl ribonucleotide
  modified_base 97: mod_base = OTHER; note = 2'-O-methyl ribonucleotide
  modified_base 98: mod_base = OTHER; note = 2'-O-methyl ribonucleotide
  modified_base 99: mod_base = OTHER; note = 2'-O-methyl ribonucleotide
  modified_base 100: mod_base = OTHER; note = 2'-O-methyl ribonucleotide
  modified_base 1..4: mod_base = OTHER; note = phosphorothioate linkage
  modified_base 97..100: mod_base = OTHER; note = phosphorothioate linkage

SEQ ID NO: 2308 - RNA, 100 nt, synthetic construct; identical to SEQ ID NO: 384
  source 1..100: mol_type = other RNA
  modified_base 1: mod_base = OTHER; note = 2'-O-methyl ribonucleotide
  modified_base 2: mod_base = OTHER; note = 2'-O-methyl ribonucleotide
  modified_base 3: mod_base = OTHER; note = 2'-O-methyl ribonucleotide
  modified_base 21: mod_base = OTHER; note = 2'-O-methyl ribonucleotide
  modified_base 28: mod_base = OTHER; note = 2'-O-methyl ribonucleotide
  modified_base 29: mod_base = OTHER; note = 2'-O-methyl ribonucleotide
  modified_base 30: mod_base = OTHER; note = 2'-O-methyl ribonucleotide
  modified_base 31: mod_base = OTHER; note = 2'-O-methyl ribonucleotide
  modified_base 32: mod_base = OTHER; note = 2'-O-methyl ribonucleotide
  modified_base 33: mod_base = OTHER; note = 2'-O-methyl ribonucleotide
  modified_base 34: mod_base = OTHER; note = 2'-O-methyl ribonucleotide
  modified_base 35: mod_base = OTHER; note = 2'-O-methyl ribonucleotide
  modified_base 36: mod_base = OTHER; note = 2'-O-methyl ribonucleotide
  modified_base 37: mod_base = OTHER; note = 2'-O-methyl ribonucleotide
  modified_base 38: mod_base = OTHER; note = 2'-O-methyl ribonucleotide
  modified_base 39: mod_base = OTHER; note = 2'-O-methyl ribonucleotide
  modified_base 40: mod_base = OTHER; note = 2'-O-methyl ribonucleotide
  modified_base 41: mod_base = OTHER; note = 2'-O-methyl ribonucleotide
  modified_base 42: mod_base = OTHER; note = 2'-O-methyl ribonucleotide
  modified_base 46: mod_base = OTHER; note = 2'-O-methyl ribonucleotide
  modified_base 48: mod_base = OTHER; note = 2'-O-methyl ribonucleotide
  modified_base 50: mod_base = OTHER; note = 2'-O-methyl ribonucleotide
  modified_base 52: mod_base = OTHER; note = 2'-O-methyl ribonucleotide
  modified_base 53: mod_base = OTHER; note = 2'-O-methyl ribonucleotide
  modified_base 54: mod_base = OTHER; note = 2'-O-methyl ribonucleotide
  modified_base 55: mod_base = OTHER; note = 2'-O-methyl ribonucleotide
  modified_base 56: mod_base = OTHER; note = 2'-O-methyl ribonucleotide
  modified_base 57: mod_base = OTHER; note = 2'-O-methyl ribonucleotide
  modified_base 60: mod_base = OTHER; note = 2'-O-methyl ribonucleotide
  modified_base 61: mod_base = OTHER; note = 2'-O-methyl ribonucleotide
  modified_base 66: mod_base = OTHER; note = 2'-O-methyl ribonucleotide
  modified_base 67: mod_base = OTHER; note = 2'-O-methyl ribonucleotide
  modified_base 70: mod_base = OTHER; note = 2'-O-methyl ribonucleotide
  modified_base 71: mod_base = OTHER; note = 2'-O-methyl ribonucleotide
  modified_base 72: mod_base = OTHER; note = 2'-O-methyl ribonucleotide
  modified_base 73: mod_base = OTHER; note = 2'-O-methyl ribonucleotide
  modified_base 74: mod_base = OTHER; note = 2'-O-methyl ribonucleotide
  modified_base 75: mod_base = OTHER; note = 2'-O-methyl ribonucleotide
  modified_base 76: mod_base = OTHER; note = 2'-O-methyl ribonucleotide
  modified_base 77: mod_base = OTHER; note = 2'-O-methyl ribonucleotide
  modified_base 78: mod_base = OTHER; note = 2'-O-methyl ribonucleotide
  modified_base 79: mod_base = OTHER; note = 2'-O-methyl ribonucleotide
  modified_base 80: mod_base = OTHER; note = 2'-O-methyl ribonucleotide
  modified_base 81: mod_base = OTHER; note = 2'-O-methyl ribonucleotide
  modified_base 83: mod_base = OTHER; note = 2'-O-methyl ribonucleotide
  modified_base 84: mod_base = OTHER; note = 2'-O-methyl ribonucleotide
  modified_base 85: mod_base = OTHER; note = 2'-O-methyl ribonucleotide
  modified_base 86: mod_base = OTHER; note = 2'-O-methyl ribonucleotide
  modified_base 87: mod_base = OTHER; note = 2'-O-methyl ribonucleotide
  modified_base 88: mod_base = OTHER; note = 2'-O-methyl ribonucleotide
  modified_base 89: mod_base = OTHER; note = 2'-O-methyl ribonucleotide
  modified_base 90: mod_base = OTHER; note = 2'-O-methyl ribonucleotide
  modified_base 91: mod_base = OTHER; note = 2'-O-methyl ribonucleotide
  modified_base 92: mod_base = OTHER; note = 2'-O-methyl ribonucleotide
  modified_base 93: mod_base = OTHER; note = 2'-O-methyl ribonucleotide
  modified_base 94: mod_base = OTHER; note = 2'-O-methyl ribonucleotide
  modified_base 95: mod_base = OTHER; note = 2'-O-methyl ribonucleotide
  modified_base 96: mod_base = OTHER; note = 2'-O-methyl ribonucleotide
  modified_base 97: mod_base = OTHER; note = 2'-O-methyl ribonucleotide
  modified_base 98: mod_base = OTHER; note = 2'-O-methyl ribonucleotide
  modified_base 99: mod_base = OTHER; note = 2'-O-methyl ribonucleotide
  modified_base 100: mod_base = OTHER; note = 2'-O-methyl ribonucleotide
  modified_base 1..4: mod_base = OTHER; note = phosphorothioate linkage
  modified_base 97..100: mod_base = OTHER; note = phosphorothioate linkage

SEQ ID NO: 2309 - RNA, 100 nt, synthetic construct; identical to SEQ ID NO: 390
  source 1..100: mol_type = other RNA
  modified_base 1: mod_base = OTHER; note = 2'-O-methyl ribonucleotide
  modified_base 2: mod_base = OTHER; note = 2'-O-methyl ribonucleotide
  modified_base 3: mod_base = OTHER; note = 2'-O-methyl ribonucleotide
  modified_base 21: mod_base = OTHER; note = 2'-O-methyl ribonucleotide
  modified_base 28: mod_base = OTHER; note = 2'-O-methyl ribonucleotide
  modified_base 29: mod_base = OTHER; note = 2'-O-methyl ribonucleotide
  modified_base 30: mod_base = OTHER; note = 2'-O-methyl ribonucleotide
  modified_base 31: mod_base = OTHER; note = 2'-O-methyl ribonucleotide
  modified_base 32: mod_base = OTHER; note = 2'-O-methyl ribonucleotide
  modified_base 33: mod_base = OTHER; note = 2'-O-methyl ribonucleotide
  modified_base 34: mod_base = OTHER; note = 2'-O-methyl ribonucleotide
  modified_base 35: mod_base = OTHER; note = 2'-O-methyl ribonucleotide
  modified_base 36: mod_base = OTHER; note = 2'-O-methyl ribonucleotide
  modified_base 37: mod_base = OTHER; note = 2'-O-methyl ribonucleotide
  modified_base 38: mod_base = OTHER; note = 2'-O-methyl ribonucleotide
  modified_base 39: mod_base = OTHER; note = 2'-O-methyl ribonucleotide
  modified_base 40: mod_base = OTHER; note = 2'-O-methyl ribonucleotide
  modified_base 41: mod_base = OTHER; note = 2'-O-methyl ribonucleotide
  modified_base 42: mod_base = OTHER; note = 2'-O-methyl ribonucleotide
  modified_base 46: mod_base = OTHER; note = 2'-O-methyl ribonucleotide
  modified_base 48: mod_base = OTHER; note = 2'-O-methyl ribonucleotide
  modified_base 50: mod_base = OTHER; note = 2'-O-methyl ribonucleotide
  modified_base 52: mod_base = OTHER; note = 2'-O-methyl ribonucleotide
  modified_base 53: mod_base = OTHER; note = 2'-O-methyl ribonucleotide
  modified_base 54: mod_base = OTHER; note = 2'-O-methyl ribonucleotide
  modified_base 55: mod_base = OTHER; note = 2'-O-methyl ribonucleotide
  modified_base 56: mod_base = OTHER; note = 2'-O-methyl ribonucleotide
  modified_base 57: mod_base = OTHER; note = 2'-O-methyl ribonucleotide
  modified_base 60: mod_base = OTHER; note = 2'-O-methyl ribonucleotide
  modified_base 61: mod_base = OTHER; note = 2'-O-methyl ribonucleotide
  modified_base 66: mod_base = OTHER; note = 2'-O-methyl ribonucleotide
  modified_base 67: mod_base = OTHER; note = 2'-O-methyl ribonucleotide
  modified_base 70: mod_base = OTHER; note = 2'-O-methyl ribonucleotide
  modified_base 71: mod_base = OTHER; note = 2'-O-methyl ribonucleotide
  modified_base 72: mod_base = OTHER; note = 2'-O-methyl ribonucleotide
  modified_base 73: mod_base = OTHER; note = 2'-O-methyl ribonucleotide
  modified_base 74: mod_base = OTHER; note = 2'-O-methyl ribonucleotide
  modified_base 75: mod_base = OTHER; note = 2'-O-methyl ribonucleotide
  modified_base 76: mod_base = OTHER; note = 2'-O-methyl ribonucleotide
  modified_base 77: mod_base = OTHER; note = 2'-O-methyl ribonucleotide
  modified_base 78: mod_base = OTHER; note = 2'-O-methyl ribonucleotide
  modified_base 79: mod_base = OTHER; note = 2'-O-methyl ribonucleotide
  modified_base 80: mod_base = OTHER; note = 2'-O-methyl ribonucleotide
  modified_base 81: mod_base = OTHER; note = 2'-O-methyl ribonucleotide
  modified_base 83: mod_base = OTHER; note = 2'-O-methyl ribonucleotide
  modified_base 84: mod_base = OTHER; note = 2'-O-methyl ribonucleotide
  modified_base 85: mod_base = OTHER; note = 2'-O-methyl ribonucleotide
  modified_base 86: mod_base = OTHER; note = 2'-O-methyl ribonucleotide
  modified_base 87: mod_base = OTHER; note = 2'-O-methyl ribonucleotide
  modified_base 88: mod_base = OTHER; note = 2'-O-methyl ribonucleotide
  modified_base 89: mod_base = OTHER; note = 2'-O-methyl ribonucleotide
  modified_base 90: mod_base = OTHER; note = 2'-O-methyl ribonucleotide
  modified_base 91: mod_base = OTHER; note = 2'-O-methyl ribonucleotide
  modified_base 92: mod_base = OTHER; note = 2'-O-methyl ribonucleotide
  modified_base 93: mod_base = OTHER; note = 2'-O-methyl ribonucleotide
  modified_base 94: mod_base = OTHER; note = 2'-O-methyl ribonucleotide
  modified_base 95: mod_base = OTHER; note = 2'-O-methyl ribonucleotide
  modified_base 96: mod_base = OTHER; note = 2'-O-methyl ribonucleotide
  modified_base 97: mod_base = OTHER; note = 2'-O-methyl ribonucleotide
  modified_base 98: mod_base = OTHER; note = 2'-O-methyl ribonucleotide
  modified_base 99: mod_base = OTHER; note = 2'-O-methyl ribonucleotide
  modified_base 100: mod_base = OTHER; note = 2'-O-methyl ribonucleotide
  modified_base 1..4: mod_base = OTHER; note = phosphorothioate linkage
  modified_base 97..100: mod_base = OTHER; note = phosphorothioate linkage

SEQ ID NO: 2310 - RNA, 100 nt, synthetic construct; identical to SEQ ID NO: 393
  source 1..100: mol_type = other RNA
  modified_base 1: mod_base = OTHER; note = 2'-O-methyl ribonucleotide
  modified_base 2: mod_base = OTHER; note = 2'-O-methyl ribonucleotide
  modified_base 3: mod_base = OTHER; note = 2'-O-methyl ribonucleotide
  modified_base 21: mod_base = OTHER; note = 2'-O-methyl ribonucleotide
  modified_base 28: mod_base = OTHER; note = 2'-O-methyl ribonucleotide
  modified_base 29: mod_base = OTHER; note = 2'-O-methyl ribonucleotide
  modified_base 30: mod_base = OTHER; note = 2'-O-methyl ribonucleotide
  modified_base 31: mod_base = OTHER; note = 2'-O-methyl ribonucleotide
  modified_base 32: mod_base = OTHER; note = 2'-O-methyl ribonucleotide
  modified_base 33: mod_base = OTHER; note = 2'-O-methyl ribonucleotide
  modified_base 34: mod_base = OTHER; note = 2'-O-methyl ribonucleotide
  modified_base 35: mod_base = OTHER; note = 2'-O-methyl ribonucleotide
  modified_base 36: mod_base = OTHER; note = 2'-O-methyl ribonucleotide
  modified_base 37: mod_base = OTHER; note = 2'-O-methyl ribonucleotide
  modified_base 38: mod_base = OTHER; note = 2'-O-methyl ribonucleotide
  modified_base 39: mod_base = OTHER; note = 2'-O-methyl ribonucleotide
  modified_base 40: mod_base = OTHER; note = 2'-O-methyl ribonucleotide
  modified_base 41: mod_base = OTHER; note = 2'-O-methyl ribonucleotide
  modified_base 42: mod_base = OTHER; note = 2'-O-methyl ribonucleotide
  modified_base 46: mod_base = OTHER; note = 2'-O-methyl ribonucleotide
  modified_base 48: mod_base = OTHER; note = 2'-O-methyl ribonucleotide
  modified_base 50: mod_base = OTHER; note = 2'-O-methyl ribonucleotide
  modified_base 52: mod_base = OTHER; note = 2'-O-methyl ribonucleotide
  modified_base 53: mod_base = OTHER; note = 2'-O-methyl ribonucleotide
  modified_base 54: mod_base = OTHER; note = 2'-O-methyl ribonucleotide
  modified_base 55: mod_base = OTHER; note = 2'-O-methyl ribonucleotide
  modified_base 56: mod_base = OTHER; note = 2'-O-methyl ribonucleotide
  modified_base 57: mod_base = OTHER; note = 2'-O-methyl ribonucleotide
  modified_base 60: mod_base = OTHER; note = 2'-O-methyl ribonucleotide
  modified_base 61: mod_base = OTHER; note = 2'-O-methyl ribonucleotide
  modified_base 66: mod_base = OTHER; note = 2'-O-methyl ribonucleotide
  modified_base 67: mod_base = OTHER; note = 2'-O-methyl ribonucleotide
  modified_base 70: mod_base = OTHER; note = 2'-O-methyl ribonucleotide
  modified_base 71: mod_base = OTHER; note = 2'-O-methyl ribonucleotide
  modified_base 72: mod_base = OTHER; note = 2'-O-methyl ribonucleotide
  modified_base 73: mod_base = OTHER; note = 2'-O-methyl ribonucleotide
  modified_base 74: mod_base = OTHER; note = 2'-O-methyl ribonucleotide
  modified_base 75: mod_base = OTHER; note = 2'-O-methyl ribonucleotide
  modified_base 76: mod_base = OTHER; note = 2'-O-methyl ribonucleotide
  modified_base 77: mod_base = OTHER; note = 2'-O-methyl ribonucleotide
  modified_base 78: mod_base = OTHER; note = 2'-O-methyl ribonucleotide
  modified_base 79: mod_base = OTHER; note = 2'-O-methyl ribonucleotide
  modified_base 80: mod_base = OTHER; note = 2'-O-methyl ribonucleotide
  modified_base 81: mod_base = OTHER; note = 2'-O-methyl ribonucleotide
  modified_base 83: mod_base = OTHER; note = 2'-O-methyl ribonucleotide
  modified_base 84: mod_base = OTHER; note = 2'-O-methyl ribonucleotide
  modified_base 85: mod_base = OTHER; note = 2'-O-methyl ribonucleotide
  modified_base 86: mod_base = OTHER; note = 2'-O-methyl ribonucleotide
  modified_base 87: mod_base = OTHER; note = 2'-O-methyl ribonucleotide
  modified_base 88: mod_base = OTHER; note = 2'-O-methyl ribonucleotide
  modified_base 89: mod_base = OTHER; note = 2'-O-methyl ribonucleotide
  modified_base 90: mod_base = OTHER; note = 2'-O-methyl ribonucleotide
  modified_base 91: mod_base = OTHER; note = 2'-O-methyl ribonucleotide
  modified_base 92: mod_base = OTHER; note = 2'-O-methyl ribonucleotide
  modified_base 93: mod_base = OTHER; note = 2'-O-methyl ribonucleotide
  modified_base 94: mod_base = OTHER; note = 2'-O-methyl ribonucleotide
  modified_base 95: mod_base = OTHER; note = 2'-O-methyl ribonucleotide
  modified_base 96: mod_base = OTHER; note = 2'-O-methyl ribonucleotide
  modified_base 97: mod_base = OTHER; note = 2'-O-methyl ribonucleotide
  modified_base 98: mod_base = OTHER; note = 2'-O-methyl ribonucleotide
  modified_base 99: mod_base = OTHER; note = 2'-O-methyl ribonucleotide
  modified_base 100: mod_base = OTHER; note = 2'-O-methyl ribonucleotide
  modified_base 1..4: mod_base = OTHER; note = phosphorothioate linkage
  modified_base 97..100: mod_base = OTHER; note = phosphorothioate linkage

SEQ ID NO: 2311 - RNA, 100 nt, synthetic construct; identical to SEQ ID NO: 395
  source 1..100: mol_type = other RNA
  modified_base 1: mod_base = OTHER; note = 2'-O-methyl ribonucleotide
  modified_base 2: mod_base = OTHER; note = 2'-O-methyl ribonucleotide
  modified_base 3: mod_base = OTHER; note = 2'-O-methyl ribonucleotide
  modified_base 21: mod_base = OTHER; note = 2'-O-methyl ribonucleotide
  modified_base 28: mod_base = OTHER; note = 2'-O-methyl ribonucleotide
  modified_base 29: mod_base = OTHER; note = 2'-O-methyl ribonucleotide
  modified_base 30: mod_base = OTHER; note = 2'-O-methyl ribonucleotide
  modified_base 31: mod_base = OTHER; note = 2'-O-methyl ribonucleotide
  modified_base 32: mod_base = OTHER; note = 2'-O-methyl ribonucleotide
  modified_base 33: mod_base = OTHER; note = 2'-O-methyl ribonucleotide
  modified_base 34: mod_base = OTHER; note = 2'-O-methyl ribonucleotide
  modified_base 35: mod_base = OTHER; note = 2'-O-methyl ribonucleotide
  modified_base 36: mod_base = OTHER; note = 2'-O-methyl ribonucleotide
  modified_base 37: mod_base = OTHER; note = 2'-O-methyl ribonucleotide
  modified_base 38: mod_base = OTHER; note = 2'-O-methyl ribonucleotide
  modified_base 39: mod_base = OTHER; note = 2'-O-methyl ribonucleotide
  modified_base 40: mod_base = OTHER; note = 2'-O-methyl ribonucleotide
  modified_base 41: mod_base = OTHER; note = 2'-O-methyl ribonucleotide
  modified_base 42: mod_base = OTHER; note = 2'-O-methyl ribonucleotide
  modified_base 46: mod_base = OTHER; note = 2'-O-methyl ribonucleotide
  modified_base 48: mod_base = OTHER; note = 2'-O-methyl ribonucleotide
  modified_base 50: mod_base = OTHER; note = 2'-O-methyl ribonucleotide
  modified_base 52: mod_base = OTHER; note = 2'-O-methyl ribonucleotide
  modified_base 53: mod_base = OTHER; note = 2'-O-methyl ribonucleotide
  modified_base 54: mod_base = OTHER; note = 2'-O-methyl ribonucleotide
  modified_base 55: mod_base = OTHER; note = 2'-O-methyl ribonucleotide
  modified_base 56: mod_base = OTHER; note = 2'-O-methyl ribonucleotide
  modified_base 57: mod_base = OTHER; note = 2'-O-methyl ribonucleotide
  modified_base 60: mod_base = OTHER; note = 2'-O-methyl ribonucleotide
  modified_base 61: mod_base = OTHER; note = 2'-O-methyl ribonucleotide
  modified_base 66: mod_base = OTHER; note = 2'-O-methyl ribonucleotide
  modified_base 67: mod_base = OTHER; note = 2'-O-methyl ribonucleotide
  modified_base 70: mod_base = OTHER; note = 2'-O-methyl ribonucleotide
  modified_base 71: mod_base = OTHER; note = 2'-O-methyl ribonucleotide
  modified_base 72: mod_base = OTHER; note = 2'-O-methyl ribonucleotide
  modified_base 73: mod_base = OTHER; note = 2'-O-methyl ribonucleotide
  modified_base 74: mod_base = OTHER; note = 2'-O-methyl ribonucleotide
  modified_base 75: mod_base = OTHER; note = 2'-O-methyl ribonucleotide
  modified_base 76: mod_base = OTHER; note = 2'-O-methyl ribonucleotide
  modified_base 77: mod_base = OTHER; note = 2'-O-methyl ribonucleotide
  modified_base 78: mod_base = OTHER; note = 2'-O-methyl ribonucleotide
  modified_base 79: mod_base = OTHER; note = 2'-O-methyl ribonucleotide
  modified_base 80: mod_base = OTHER; note = 2'-O-methyl ribonucleotide
  modified_base 81: mod_base = OTHER; note = 2'-O-methyl ribonucleotide
  modified_base 83: mod_base = OTHER; note = 2'-O-methyl ribonucleotide
  modified_base 84: mod_base = OTHER; note = 2'-O-methyl ribonucleotide
  modified_base 85: mod_base = OTHER; note = 2'-O-methyl ribonucleotide
  modified_base 86: mod_base = OTHER; note = 2'-O-methyl ribonucleotide
  modified_base 87: mod_base = OTHER; note = 2'-O-methyl ribonucleotide
  modified_base 88: mod_base = OTHER; note = 2'-O-methyl ribonucleotide
  modified_base 89: mod_base = OTHER; note = 2'-O-methyl ribonucleotide
  modified_base 90: mod_base = OTHER; note = 2'-O-methyl ribonucleotide
  modified_base 91: mod_base = OTHER; note = 2'-O-methyl ribonucleotide
  modified_base 92: mod_base = OTHER; note = 2'-O-methyl ribonucleotide
  modified_base 93: mod_base = OTHER; note = 2'-O-methyl ribonucleotide
  modified_base 94: mod_base = OTHER; note = 2'-O-methyl ribonucleotide
  modified_base 95: mod_base = OTHER; note = 2'-O-methyl ribonucleotide
  modified_base 96: mod_base = OTHER; note = 2'-O-methyl ribonucleotide
  modified_base 97: mod_base = OTHER; note = 2'-O-methyl ribonucleotide
  modified_base 98: mod_base = OTHER; note = 2'-O-methyl ribonucleotide
  modified_base 99: mod_base = OTHER; note = 2'-O-methyl ribonucleotide
  modified_base 100: mod_base = OTHER; note = 2'-O-methyl ribonucleotide
  modified_base 1..4: mod_base = OTHER; note = phosphorothioate linkage
  modified_base 97..100: mod_base = OTHER; note = phosphorothioate linkage

SEQ ID NO: 2312 - RNA, 100 nt, synthetic construct; identical to SEQ ID NO: 253
  source 1..100: mol_type = other RNA
  modified_base 1: mod_base = OTHER; note = 2'-O-methyl ribonucleotide
  modified_base 2: mod_base = OTHER; note = 2'-O-methyl ribonucleotide
  modified_base 3: mod_base = OTHER; note = 2'-O-methyl ribonucleotide
  modified_base 5: mod_base = OTHER; note = 2'-O-methyl ribonucleotide
  modified_base 21: mod_base = OTHER; note = 2'-O-methyl ribonucleotide
  modified_base 28: mod_base = OTHER; note = 2'-O-methyl ribonucleotide
  modified_base 29: mod_base = OTHER; note = 2'-O-methyl ribonucleotide
  modified_base 30: mod_base = OTHER; note = 2'-O-methyl ribonucleotide
  modified_base 31: mod_base = OTHER; note = 2'-O-methyl ribonucleotide
  modified_base 32: mod_base = OTHER; note = 2'-O-methyl ribonucleotide
  modified_base 33: mod_base = OTHER; note = 2'-O-methyl ribonucleotide
  modified_base 34: mod_base = OTHER; note = 2'-O-methyl ribonucleotide
  modified_base 35: mod_base = OTHER; note = 2'-O-methyl ribonucleotide
  modified_base 36: mod_base = OTHER; note = 2'-O-methyl ribonucleotide
  modified_base 37: mod_base = OTHER; note = 2'-O-methyl ribonucleotide
  modified_base 38: mod_base = OTHER; note = 2'-O-methyl ribonucleotide
  modified_base 39: mod_base = OTHER; note = 2'-O-methyl ribonucleotide
  modified_base 40: mod_base = OTHER; note = 2'-O-methyl ribonucleotide
  modified_base 41: mod_base = OTHER; note = 2'-O-methyl ribonucleotide
  modified_base 42: mod_base = OTHER; note = 2'-O-methyl ribonucleotide
  modified_base 46: mod_base = OTHER; note = 2'-O-methyl ribonucleotide
  modified_base 48: mod_base = OTHER; note = 2'-O-methyl ribonucleotide
  modified_base 50: mod_base = OTHER; note = 2'-O-methyl ribonucleotide
  modified_base 52: mod_base = OTHER; note = 2'-O-methyl ribonucleotide
  modified_base 53: mod_base = OTHER; note = 2'-O-methyl ribonucleotide
  modified_base 54: mod_base = OTHER; note = 2'-O-methyl ribonucleotide
  modified_base 55: mod_base = OTHER; note = 2'-O-methyl ribonucleotide
  modified_base 56: mod_base = OTHER; note = 2'-O-methyl ribonucleotide
  modified_base 57: mod_base = OTHER; note = 2'-O-methyl ribonucleotide
  modified_base 60: mod_base = OTHER; note = 2'-O-methyl ribonucleotide
  modified_base 61: mod_base = OTHER; note = 2'-O-methyl ribonucleotide
  modified_base 66: mod_base = OTHER; note = 2'-O-methyl ribonucleotide
  modified_base 67: mod_base = OTHER; note = 2'-O-methyl ribonucleotide
  modified_base 70: mod_base = OTHER; note = 2'-O-methyl ribonucleotide
  modified_base 71: mod_base = OTHER; note = 2'-O-methyl ribonucleotide
  modified_base 72: mod_base = OTHER; note = 2'-O-methyl ribonucleotide
  modified_base 73: mod_base = OTHER; note = 2'-O-methyl ribonucleotide
  modified_base 74: mod_base = OTHER; note = 2'-O-methyl ribonucleotide
  modified_base 75: mod_base = OTHER; note = 2'-O-methyl ribonucleotide
  modified_base 76: mod_base = OTHER; note = 2'-O-methyl ribonucleotide
  modified_base 77: mod_base = OTHER; note = 2'-O-methyl ribonucleotide
  modified_base 78: mod_base = OTHER; note = 2'-O-methyl ribonucleotide
  modified_base 79: mod_base = OTHER; note = 2'-O-methyl ribonucleotide
  modified_base 80: mod_base = OTHER; note = 2'-O-methyl ribonucleotide
  modified_base 81: mod_base = OTHER; note = 2'-O-methyl ribonucleotide
  modified_base 83: mod_base = OTHER; note = 2'-O-methyl ribonucleotide
  modified_base 84: mod_base = OTHER; note = 2'-O-methyl ribonucleotide
  modified_base 85: mod_base = OTHER; note = 2'-O-methyl ribonucleotide
  modified_base 86: mod_base = OTHER; note = 2'-O-methyl ribonucleotide
  modified_base 87: mod_base = OTHER; note = 2'-O-methyl ribonucleotide
  modified_base 88: mod_base = OTHER; note = 2'-O-methyl ribonucleotide
  modified_base 89: mod_base = OTHER; note = 2'-O-methyl ribonucleotide
  modified_base 90: mod_base = OTHER; note = 2'-O-methyl ribonucleotide
  modified_base 91: mod_base = OTHER; note = 2'-O-methyl ribonucleotide
  modified_base 92: mod_base = OTHER; note = 2'-O-methyl ribonucleotide
  modified_base 93: mod_base = OTHER; note = 2'-O-methyl ribonucleotide
  modified_base 94: mod_base = OTHER; note = 2'-O-methyl ribonucleotide
  modified_base 95: mod_base = OTHER; note = 2'-O-methyl ribonucleotide
  modified_base 96: mod_base = OTHER; note = 2'-O-methyl ribonucleotide
  modified_base 97: mod_base = OTHER; note = 2'-O-methyl ribonucleotide
  modified_base 98: mod_base = OTHER; note = 2'-O-methyl ribonucleotide
  modified_base 99: mod_base = OTHER; note = 2'-O-methyl ribonucleotide
  modified_base 100: mod_base = OTHER; note = 2'-O-methyl ribonucleotide
  modified_base 5: mod_base = OTHER; note = cytidine phosphonoacetate
  modified_base 1..4: mod_base = OTHER; note = phosphorothioate linkage
  modified_base 97..100: mod_base = OTHER; note = phosphorothioate linkage

SEQ ID NO: 2313 - RNA, 100 nt, synthetic construct; identical to SEQ ID NO: 253
  source 1..100: mol_type = other RNA
  modified_base 1: mod_base = OTHER; note = 2'-O-methyl ribonucleotide
  modified_base 2: mod_base = OTHER; note = 2'-O-methyl ribonucleotide
  modified_base 3: mod_base = OTHER; note = 2'-O-methyl ribonucleotide
  modified_base 11: mod_base = OTHER; note = 2'-O-methyl ribonucleotide
  modified_base 21: mod_base = OTHER; note = 2'-O-methyl ribonucleotide
  modified_base 28: mod_base = OTHER; note = 2'-O-methyl ribonucleotide
  modified_base 29: mod_base = OTHER; note = 2'-O-methyl ribonucleotide
  modified_base 30: mod_base = OTHER; note = 2'-O-methyl ribonucleotide
  modified_base 31: mod_base = OTHER; note = 2'-O-methyl ribonucleotide
  modified_base 32: mod_base = OTHER; note = 2'-O-methyl ribonucleotide
  modified_base 33: mod_base = OTHER; note = 2'-O-methyl ribonucleotide
  modified_base 34: mod_base = OTHER; note = 2'-O-methyl ribonucleotide
  modified_base 35: mod_base = OTHER; note = 2'-O-methyl ribonucleotide
  modified_base 36: mod_base = OTHER; note = 2'-O-methyl ribonucleotide
  modified_base 37: mod_base = OTHER; note = 2'-O-methyl ribonucleotide
  modified_base 38: mod_base = OTHER; note = 2'-O-methyl ribonucleotide
  modified_base 39: mod_base = OTHER; note = 2'-O-methyl ribonucleotide
  modified_base 40: mod_base = OTHER; note = 2'-O-methyl ribonucleotide
  modified_base 41: mod_base = OTHER; note = 2'-O-methyl ribonucleotide
  modified_base 42: mod_base = OTHER; note = 2'-O-methyl ribonucleotide
  modified_base 46: mod_base = OTHER; note = 2'-O-methyl ribonucleotide
  modified_base 48: mod_base = OTHER; note = 2'-O-methyl ribonucleotide
  modified_base 50: mod_base = OTHER; note = 2'-O-methyl ribonucleotide
  modified_base 52: mod_base = OTHER; note = 2'-O-methyl ribonucleotide
  modified_base 53: mod_base = OTHER; note = 2'-O-methyl ribonucleotide
  modified_base 54: mod_base = OTHER; note = 2'-O-methyl ribonucleotide
  modified_base 55: mod_base = OTHER; note = 2'-O-methyl ribonucleotide
  modified_base 56: mod_base = OTHER; note = 2'-O-methyl ribonucleotide
  modified_base 57: mod_base = OTHER; note = 2'-O-methyl ribonucleotide
  modified_base 60: mod_base = OTHER; note = 2'-O-methyl ribonucleotide
  modified_base 61: mod_base = OTHER; note = 2'-O-methyl ribonucleotide
  modified_base 66: mod_base = OTHER; note = 2'-O-methyl ribonucleotide
  modified_base 67: mod_base = OTHER; note = 2'-O-methyl ribonucleotide
  modified_base 70: mod_base = OTHER; note = 2'-O-methyl ribonucleotide
  modified_base 71: mod_base = OTHER; note = 2'-O-methyl ribonucleotide
  modified_base 72: mod_base = OTHER; note = 2'-O-methyl ribonucleotide
  modified_base 73: mod_base = OTHER; note = 2'-O-methyl ribonucleotide
  modified_base 74: mod_base = OTHER; note = 2'-O-methyl ribonucleotide
  modified_base 75: mod_base = OTHER; note = 2'-O-methyl ribonucleotide
  modified_base 76: mod_base = OTHER; note = 2'-O-methyl ribonucleotide
  modified_base 77: mod_base = OTHER; note = 2'-O-methyl ribonucleotide
  modified_base 78: mod_base = OTHER; note = 2'-O-methyl ribonucleotide
  modified_base 79: mod_base = OTHER; note = 2'-O-methyl ribonucleotide
  modified_base 80: mod_base = OTHER; note = 2'-O-methyl ribonucleotide
  modified_base 81: mod_base = OTHER; note = 2'-O-methyl ribonucleotide
  modified_base 83: mod_base = OTHER; note = 2'-O-methyl ribonucleotide
  modified_base 84: mod_base = OTHER; note = 2'-O-methyl ribonucleotide
  modified_base 85: mod_base = OTHER; note = 2'-O-methyl ribonucleotide
  modified_base 86: mod_base = OTHER; note = 2'-O-methyl ribonucleotide
  modified_base 87: mod_base = OTHER; note = 2'-O-methyl ribonucleotide
  modified_base 88: mod_base = OTHER; note = 2'-O-methyl ribonucleotide
  modified_base 89: mod_base = OTHER; note = 2'-O-methyl ribonucleotide
  modified_base 90: mod_base = OTHER; note = 2'-O-methyl ribonucleotide
  modified_base 91: mod_base = OTHER; note = 2'-O-methyl ribonucleotide
  modified_base 92: mod_base = OTHER; note = 2'-O-methyl ribonucleotide
  modified_base 93: mod_base = OTHER; note = 2'-O-methyl ribonucleotide
  modified_base 94: mod_base = OTHER; note = 2'-O-methyl ribonucleotide
  modified_base 95: mod_base = OTHER; note = 2'-O-methyl ribonucleotide
  modified_base 96: mod_base = OTHER; note = 2'-O-methyl ribonucleotide
  modified_base 97: mod_base = OTHER; note = 2'-O-methyl ribonucleotide
  modified_base 98: mod_base = OTHER; note = 2'-O-methyl ribonucleotide
  modified_base 99: mod_base = OTHER; note = 2'-O-methyl ribonucleotide
  modified_base 100: mod_base = OTHER; note = 2'-O-methyl ribonucleotide
  modified_base 11: mod_base = OTHER; note = uridine phosphonoacetate
  modified_base 1..4: mod_base = OTHER; note = phosphorothioate linkage
  modified_base 97..100: mod_base = OTHER; note = phosphorothioate linkage

SEQ ID NO: 2314 - RNA, 100 nt, synthetic construct; identical to SEQ ID NO: 421
  source 1..100: mol_type = other RNA
  modified_base 1: mod_base = OTHER; note = 2'-O-methyl ribonucleotide
  modified_base 2: mod_base = OTHER; note = 2'-O-methyl ribonucleotide
  modified_base 3: mod_base = OTHER; note = 2'-O-methyl ribonucleotide
  modified_base 21: mod_base = OTHER; note = 2'-O-methyl ribonucleotide
  modified_base 28: mod_base = OTHER; note = 2'-O-methyl ribonucleotide
  modified_base 29: mod_base = OTHER; note = 2'-O-methyl ribonucleotide
  modified_base 30: mod_base = OTHER; note = 2'-O-methyl ribonucleotide
  modified_base 31: mod_base = OTHER; note = 2'-O-methyl ribonucleotide
  modified_base 32: mod_base = OTHER; note = 2'-O-methyl ribonucleotide
  modified_base 33: mod_base = OTHER; note = 2'-O-methyl ribonucleotide
  modified_base 34: mod_base = OTHER; note = 2'-O-methyl ribonucleotide
  modified_base 35: mod_base = OTHER; note = 2'-O-methyl ribonucleotide
  modified_base 36: mod_base = OTHER; note = 2'-O-methyl ribonucleotide
  modified_base 37: mod_base = OTHER; note = 2'-O-methyl ribonucleotide
  modified_base 38: mod_base = OTHER; note = 2'-O-methyl ribonucleotide
  modified_base 39: mod_base = OTHER; note = 2'-O-methyl ribonucleotide
  modified_base 40: mod_base = OTHER; note = 2'-O-methyl ribonucleotide
  modified_base 41: mod_base = OTHER; note = 2'-O-methyl ribonucleotide
  modified_base 42: mod_base = OTHER; note = 2'-O-methyl ribonucleotide
  modified_base 46: mod_base = OTHER; note = 2'-O-methyl ribonucleotide
  modified_base 48: mod_base = OTHER; note = 2'-O-methyl ribonucleotide
  modified_base 50: mod_base = OTHER; note = 2'-O-methyl ribonucleotide
  modified_base 52: mod_base = OTHER; note = 2'-O-methyl ribonucleotide
  modified_base 53: mod_base = OTHER; note = 2'-O-methyl ribonucleotide
  modified_base 54: mod_base = OTHER; note = 2'-O-methyl ribonucleotide
  modified_base 55: mod_base = OTHER; note = 2'-O-methyl ribonucleotide
  modified_base 56: mod_base = OTHER; note = 2'-O-methyl ribonucleotide
  modified_base 57: mod_base = OTHER; note = 2'-O-methyl ribonucleotide
  modified_base 60: mod_base = OTHER; note = 2'-O-methyl ribonucleotide
  modified_base 61: mod_base = OTHER; note = 2'-O-methyl ribonucleotide
  modified_base 66: mod_base = OTHER; note = 2'-O-methyl ribonucleotide
  modified_base 67: mod_base = OTHER; note = 2'-O-methyl ribonucleotide
  modified_base 70: mod_base = OTHER; note = 2'-O-methyl ribonucleotide
  modified_base 71: mod_base = OTHER; note = 2'-O-methyl ribonucleotide
  modified_base 72: mod_base = OTHER; note = 2'-O-methyl ribonucleotide
  modified_base 73: mod_base = OTHER; note = 2'-O-methyl ribonucleotide
  modified_base 74: mod_base = OTHER; note = 2'-O-methyl ribonucleotide
  modified_base 75: mod_base = OTHER; note = 2'-O-methyl ribonucleotide
  modified_base 76: mod_base = OTHER; note = 2'-O-methyl ribonucleotide
  modified_base 77: mod_base = OTHER; note = 2'-O-methyl ribonucleotide
  modified_base 78: mod_base = OTHER; note = 2'-O-methyl ribonucleotide
  modified_base 79: mod_base = OTHER; note = 2'-O-methyl ribonucleotide
  modified_base 80: mod_base = OTHER; note = 2'-O-methyl ribonucleotide
  modified_base 81: mod_base = OTHER; note = 2'-O-methyl ribonucleotide
  modified_base 83: mod_base = OTHER; note = 2'-O-methyl ribonucleotide
  modified_base 84: mod_base = OTHER; note = 2'-O-methyl ribonucleotide
  modified_base 85: mod_base = OTHER; note = 2'-O-methyl ribonucleotide
  modified_base 86: mod_base = OTHER; note = 2'-O-methyl ribonucleotide
  modified_base 87: mod_base = OTHER; note = 2'-O-methyl ribonucleotide
  modified_base 88: mod_base = OTHER; note = 2'-O-methyl ribonucleotide
  modified_base 89: mod_base = OTHER; note = 2'-O-methyl ribonucleotide
  modified_base 90: mod_base = OTHER; note = 2'-O-methyl ribonucleotide
  modified_base 91: mod_base = OTHER; note = 2'-O-methyl ribonucleotide
  modified_base 92: mod_base = OTHER; note = 2'-O-methyl ribonucleotide
  modified_base 93: mod_base = OTHER; note = 2'-O-methyl ribonucleotide
  modified_base 94: mod_base = OTHER; note = 2'-O-methyl ribonucleotide
  modified_base 95: mod_base = OTHER; note = 2'-O-methyl ribonucleotide
  modified_base 96: mod_base = OTHER; note = 2'-O-methyl ribonucleotide
  modified_base 97: mod_base = OTHER; note = 2'-O-methyl ribonucleotide
  modified_base 98: mod_base = OTHER; note = 2'-O-methyl ribonucleotide
  modified_base 99: mod_base = OTHER; note = 2'-O-methyl ribonucleotide
  modified_base 100: mod_base = OTHER; note = 2'-O-methyl ribonucleotide
  modified_base 1..4: mod_base = OTHER; note = phosphorothioate linkage
  modified_base 97..100: mod_base = OTHER; note = phosphorothioate linkage

SEQ ID NO: 2315 - RNA, 100 nt, synthetic construct; identical to SEQ ID NO: 421
  source 1..100: mol_type = other RNA
  modified_base 1: mod_base = OTHER; note = 2'-O-methyl ribonucleotide
  modified_base 2: mod_base = OTHER; note = 2'-O-methyl ribonucleotide
  modified_base 3: mod_base = OTHER; note = 2'-O-methyl ribonucleotide
  modified_base 21: mod_base = OTHER; note = 2'-O-methyl ribonucleotide
  modified_base 28: mod_base = OTHER; note = 2'-O-methyl ribonucleotide
  modified_base 29: mod_base = OTHER; note = 2'-O-methyl ribonucleotide
  modified_base 30: mod_base = OTHER; note = 2'-O-methyl ribonucleotide
  modified_base 31: mod_base = OTHER; note = 2'-O-methyl ribonucleotide
  modified_base 32: mod_base = OTHER; note = 2'-O-methyl ribonucleotide
  modified_base 34: mod_base = OTHER; note = 2'-O-methyl ribonucleotide
  modified_base 35: mod_base = OTHER; note = 2'-O-methyl ribonucleotide
  modified_base 36: mod_base = OTHER; note = 2'-O-methyl ribonucleotide
  modified_base 37: mod_base = OTHER; note = 2'-O-methyl ribonucleotide
  modified_base 38: mod_base = OTHER; note = 2'-O-methyl ribonucleotide
  modified_base 39: mod_base = OTHER; note = 2'-O-methyl ribonucleotide
  modified_base 40: mod_base = OTHER; note = 2'-O-methyl ribonucleotide
  modified_base 41: mod_base = OTHER; note = 2'-O-methyl ribonucleotide
  modified_base 42: mod_base = OTHER; note = 2'-O-methyl ribonucleotide
  modified_base 46: mod_base = OTHER; note = 2'-O-methyl ribonucleotide
  modified_base 48: mod_base = OTHER; note = 2'-O-methyl ribonucleotide
  modified_base 50: mod_base = OTHER; note = 2'-O-methyl ribonucleotide
  modified_base 52: mod_base = OTHER; note = 2'-O-methyl ribonucleotide
  modified_base 53: mod_base = OTHER; note = 2'-O-methyl ribonucleotide
  modified_base 54: mod_base = OTHER; note = 2'-O-methyl ribonucleotide
  modified_base 55: mod_base = OTHER; note = 2'-O-methyl ribonucleotide
  modified_base 56: mod_base = OTHER; note = 2'-O-methyl ribonucleotide
  modified_base 57: mod_base = OTHER; note = 2'-O-methyl ribonucleotide
  modified_base 60: mod_base = OTHER; note = 2'-O-methyl ribonucleotide
  modified_base 61: mod_base = OTHER; note = 2'-O-methyl ribonucleotide
  modified_base 66: mod_base = OTHER; note = 2'-O-methyl ribonucleotide
  modified_base 67: mod_base = OTHER; note = 2'-O-methyl ribonucleotide
  modified_base 70: mod_base = OTHER; note = 2'-O-methyl ribonucleotide
  modified_base 71: mod_base = OTHER; note = 2'-O-methyl ribonucleotide
  modified_base 72: mod_base = OTHER; note = 2'-O-methyl ribonucleotide
  modified_base 74: mod_base = OTHER; note = 2'-O-methyl ribonucleotide
  modified_base 75: mod_base = OTHER; note = 2'-O-methyl ribonucleotide
  modified_base 76: mod_base = OTHER; note = 2'-O-methyl ribonucleotide
  modified_base 77: mod_base = OTHER; note = 2'-O-methyl ribonucleotide
  modified_base 78: mod_base = OTHER; note = 2'-O-methyl ribonucleotide
  modified_base 79: mod_base = OTHER; note = 2'-O-methyl ribonucleotide
  modified_base 80: mod_base = OTHER; note = 2'-O-methyl ribonucleotide
  modified_base 81: mod_base = OTHER; note = 2'-O-methyl ribonucleotide
  modified_base 83: mod_base = OTHER; note = 2'-O-methyl ribonucleotide
  modified_base 84: mod_base = OTHER; note = 2'-O-methyl ribonucleotide
  modified_base 85: mod_base = OTHER; note = 2'-O-methyl ribonucleotide
  modified_base 86: mod_base = OTHER; note = 2'-O-methyl ribonucleotide
  modified_base 87: mod_base = OTHER; note = 2'-O-methyl ribonucleotide
  modified_base 88: mod_base = OTHER; note = 2'-O-methyl ribonucleotide
  modified_base 89: mod_base = OTHER; note = 2'-O-methyl ribonucleotide
  modified_base 90: mod_base = OTHER; note = 2'-O-methyl ribonucleotide
  modified_base 91: mod_base = OTHER; note = 2'-O-methyl ribonucleotide
  modified_base 92: mod_base = OTHER; note = 2'-O-methyl ribonucleotide
  modified_base 93: mod_base = OTHER; note = 2'-O-methyl ribonucleotide
  modified_base 94: mod_base = OTHER; note = 2'-O-methyl ribonucleotide
  modified_base 95: mod_base = OTHER; note = 2'-O-methyl ribonucleotide
  modified_base 96: mod_base = OTHER; note = 2'-O-methyl ribonucleotide
  modified_base 97: mod_base = OTHER; note = 2'-O-methyl ribonucleotide
  modified_base 98: mod_base = OTHER; note = 2'-O-methyl ribonucleotide
  modified_base 99: mod_base = OTHER; note = 2'-O-methyl ribonucleotide
  modified_base 100: mod_base = OTHER; note = 2'-O-methyl ribonucleotide
  modified_base 1..4: mod_base = OTHER; note = phosphorothioate linkage
  modified_base 97..100: mod_base = OTHER; note = phosphorothioate linkage

SEQ ID NO: 2316 - RNA, 100 nt, synthetic construct; identical to SEQ ID NO: 421
  source 1..100: mol_type = other RNA
  modified_base 1: mod_base = OTHER; note = 2'-O-methyl ribonucleotide
  modified_base 2: mod_base = OTHER; note = 2'-O-methyl ribonucleotide
  modified_base 3: mod_base = OTHER; note = 2'-O-methyl ribonucleotide
  modified_base 98: mod_base = OTHER; note = 2'-O-methyl ribonucleotide
  modified_base 99: mod_base = OTHER; note = 2'-O-methyl ribonucleotide
  modified_base 100: mod_base = OTHER; note = 2'-O-methyl ribonucleotide
  modified_base 1..4: mod_base = OTHER; note = phosphorothioate linkage
  modified_base 97..100: mod_base = OTHER; note = phosphorothioate linkage

SEQ ID NO: 2317 - RNA, 100 nt, synthetic construct; identical to SEQ ID NO: 421
  source 1..100: mol_type = other RNA
  modified_base 1: mod_base = OTHER; note = 2'-O-methyl ribonucleotide
  modified_base 2: mod_base = OTHER; note = 2'-O-methyl ribonucleotide
  modified_base 3: mod_base = OTHER; note = 2'-O-methyl ribonucleotide
  modified_base 29: mod_base = OTHER; note = 2'-O-methyl ribonucleotide
  modified_base 30: mod_base = OTHER; note = 2'-O-methyl ribonucleotide
  modified_base 31: mod_base = OTHER; note = 2'-O-methyl ribonucleotide
  modified_base 32: mod_base = OTHER; note = 2'-O-methyl ribonucleotide
  modified_base 33: mod_base = OTHER; note = 2'-O-methyl ribonucleotide
  modified_base 34: mod_base = OTHER; note = 2'-O-methyl ribonucleotide
  modified_base 35: mod_base = OTHER; note = 2'-O-methyl ribonucleotide
  modified_base 36: mod_base = OTHER; note = 2'-O-methyl ribonucleotide
  modified_base 37: mod_base = OTHER; note = 2'-O-methyl ribonucleotide
  modified_base 38: mod_base = OTHER; note = 2'-O-methyl ribonucleotide
  modified_base 39: mod_base = OTHER; note = 2'-O-methyl ribonucleotide
  modified_base 40: mod_base = OTHER; note = 2'-O-methyl ribonucleotide
  modified_base 69: mod_base = OTHER; note = 2'-O-methyl ribonucleotide
  modified_base 70: mod_base = OTHER; note = 2'-O-methyl ribonucleotide
  modified_base 71: mod_base = OTHER; note = 2'-O-methyl ribonucleotide
  modified_base 72: mod_base = OTHER; note = 2'-O-methyl ribonucleotide
  modified_base 73: mod_base = OTHER; note = 2'-O-methyl ribonucleotide
  modified_base 74: mod_base = OTHER; note = 2'-O-methyl ribonucleotide
  modified_base 75: mod_base = OTHER; note = 2'-O-methyl ribonucleotide
  modified_base 76: mod_base = OTHER; note = 2'-O-methyl ribonucleotide
  modified_base 77: mod_base = OTHER; note = 2'-O-methyl ribonucleotide
  modified_base 78: mod_base = OTHER; note = 2'-O-methyl ribonucleotide
  modified_base 79: mod_base = OTHER; note = 2'-O-methyl ribonucleotide
  modified_base 80: mod_base = OTHER; note = 2'-O-methyl ribonucleotide
  modified_base 81: mod_base = OTHER; note = 2'-O-methyl ribonucleotide
  modified_base 82: mod_base = OTHER; note = 2'-O-methyl ribonucleotide
  modified_base 83: mod_base = OTHER; note = 2'-O-methyl ribonucleotide
  modified_base 84: mod_base = OTHER; note = 2'-O-methyl ribonucleotide
  modified_base 85: mod_base = OTHER; note = 2'-O-methyl ribonucleotide
  modified_base 86: mod_base = OTHER; note = 2'-O-methyl ribonucleotide
  modified_base 87: mod_base = OTHER; note = 2'-O-methyl ribonucleotide
  modified_base 88: mod_base = OTHER; note = 2'-O-methyl ribonucleotide
  modified_base 89: mod_base = OTHER; note = 2'-O-methyl ribonucleotide
  modified_base 90: mod_base = OTHER; note = 2'-O-methyl ribonucleotide
  modified_base 91: mod_base = OTHER; note = 2'-O-methyl ribonucleotide
  modified_base 92: mod_base = OTHER; note = 2'-O-methyl ribonucleotide
  modified_base 93: mod_base = OTHER; note = 2'-O-methyl ribonucleotide
  modified_base 94: mod_base = OTHER; note = 2'-O-methyl ribonucleotide
  modified_base 95: mod_base = OTHER; note = 2'-O-methyl ribonucleotide
  modified_base 96: mod_base = OTHER; note = 2'-O-methyl ribonucleotide
  modified_base 97: mod_base = OTHER; note = 2'-O-methyl ribonucleotide
  modified_base 98: mod_base = OTHER; note = 2'-O-methyl ribonucleotide
  modified_base 99: mod_base = OTHER; note = 2'-O-methyl ribonucleotide
  modified_base 100: mod_base = OTHER; note = 2'-O-methyl ribonucleotide
  modified_base 1..4: mod_base = OTHER; note = phosphorothioate linkage
  modified_base 97..100: mod_base = OTHER; note = phosphorothioate linkage

SEQ ID NO: 2318 - RNA, 100 nt, synthetic construct; identical to SEQ ID NO: 421
  source 1..100: mol_type = other RNA
  modified_base 1: mod_base = OTHER; note = 2'-O-methyl ribonucleotide
  modified_base 2: mod_base = OTHER; note = 2'-O-methyl ribonucleotide
  modified_base 3: mod_base = OTHER; note = 2'-O-methyl ribonucleotide
  modified_base 21: mod_base = OTHER; note = 2'-O-methyl ribonucleotide
  modified_base 28: mod_base = OTHER; note = 2'-O-methyl ribonucleotide
  modified_base 29: mod_base = OTHER; note = 2'-O-methyl ribonucleotide
  modified_base 30: mod_base = OTHER; note = 2'-O-methyl ribonucleotide
  modified_base 31: mod_base = OTHER; note = 2'-O-methyl ribonucleotide
  modified_base 32: mod_base = OTHER; note = 2'-O-methyl ribonucleotide
  modified_base 33: mod_base = OTHER; note = 2'-O-methyl ribonucleotide
  modified_base 34: mod_base = OTHER; note = 2'-O-methyl ribonucleotide
  modified_base 35: mod_base = OTHER; note = 2'-O-methyl ribonucleotide
  modified_base 36: mod_base = OTHER; note = 2'-O-methyl ribonucleotide
  modified_base 37: mod_base = OTHER; note = 2'-O-methyl ribonucleotide
  modified_base 38: mod_base = OTHER; note = 2'-O-methyl ribonucleotide
  modified_base 39: mod_base = OTHER; note = 2'-O-methyl ribonucleotide
  modified_base 40: mod_base = OTHER; note = 2'-O-methyl ribonucleotide
  modified_base 41: mod_base = OTHER; note = 2'-O-methyl ribonucleotide
  modified_base 42: mod_base = OTHER; note = 2'-O-methyl ribonucleotide
  modified_base 46: mod_base = OTHER; note = 2'-O-methyl ribonucleotide
  modified_base 48: mod_base = OTHER; note = 2'-O-methyl ribonucleotide
  modified_base 50: mod_base = OTHER; note = 2'-O-methyl ribonucleotide
  modified_base 52: mod_base = OTHER; note = 2'-O-methyl ribonucleotide
  modified_base 53: mod_base = OTHER; note = 2'-O-methyl ribonucleotide
  modified_base 54: mod_base = OTHER; note = 2'-O-methyl ribonucleotide
  modified_base 55: mod_base = OTHER; note = 2'-O-methyl ribonucleotide
  modified_base 56: mod_base = OTHER; note = 2'-O-methyl ribonucleotide
  modified_base 57: mod_base = OTHER; note = 2'-O-methyl ribonucleotide
  modified_base 61: mod_base = OTHER; note = 2'-O-methyl ribonucleotide
  modified_base 66: mod_base = OTHER; note = 2'-O-methyl ribonucleotide
  modified_base 67: mod_base = OTHER; note = 2'-O-methyl ribonucleotide
  modified_base 70: mod_base = OTHER; note = 2'-O-methyl ribonucleotide
  modified_base 71: mod_base = OTHER; note = 2'-O-methyl ribonucleotide
  modified_base 72: mod_base = OTHER; note = 2'-O-methyl ribonucleotide
  modified_base 73: mod_base = OTHER; note = 2'-O-methyl ribonucleotide
  modified_base 74: mod_base = OTHER; note = 2'-O-methyl ribonucleotide
  modified_base 75: mod_base = OTHER; note = 2'-O-methyl ribonucleotide
  modified_base 76: mod_base = OTHER; note = 2'-O-methyl ribonucleotide
  modified_base 77: mod_base = OTHER; note = 2'-O-methyl ribonucleotide
  modified_base 78: mod_base = OTHER; note = 2'-O-methyl ribonucleotide
  modified_base 79: mod_base = OTHER; note = 2'-O-methyl ribonucleotide
  modified_base 80: mod_base = OTHER; note = 2'-O-methyl ribonucleotide
  modified_base 81: mod_base = OTHER; note = 2'-O-methyl ribonucleotide
  modified_base 82: mod_base = OTHER; note = 2'-O-methyl ribonucleotide
  modified_base 83: mod_base = OTHER; note = 2'-O-methyl ribonucleotide
  modified_base 84: mod_base = OTHER; note = 2'-O-methyl ribonucleotide
  modified_base 85: mod_base = OTHER; note = 2'-O-methyl ribonucleotide
  modified_base 86: mod_base = OTHER; note = 2'-O-methyl ribonucleotide
  modified_base 87: mod_base = OTHER; note = 2'-O-methyl ribonucleotide
  modified_base 88: mod_base = OTHER; note = 2'-O-methyl ribonucleotide
  modified_base 89: mod_base = OTHER; note = 2'-O-methyl ribonucleotide
  modified_base 90: mod_base = OTHER; note = 2'-O-methyl ribonucleotide
  modified_base 91: mod_base = OTHER; note = 2'-O-methyl ribonucleotide
  modified_base 92: mod_base = OTHER; note = 2'-O-methyl ribonucleotide
  modified_base 93: mod_base = OTHER; note = 2'-O-methyl ribonucleotide
  modified_base 94: mod_base = OTHER; note = 2'-O-methyl ribonucleotide
  modified_base 95: mod_base = OTHER; note = 2'-O-methyl ribonucleotide
  modified_base 96: mod_base = OTHER; note = 2'-O-methyl ribonucleotide
  modified_base 97: mod_base = OTHER; note = 2'-O-methyl ribonucleotide
  modified_base 98: mod_base = OTHER; note = 2'-O-methyl ribonucleotide
  modified_base 99: mod_base = OTHER; note = 2'-O-methyl ribonucleotide
  modified_base 100: mod_base = OTHER; note = 2'-O-methyl ribonucleotide
  modified_base 1..4: mod_base = OTHER; note = phosphorothioate linkage
  modified_base 97..100: mod_base = OTHER; note = phosphorothioate linkage

SEQ ID NO: 2319 - RNA, 100 nt, synthetic construct; identical to SEQ ID NO: 421
  source 1..100: mol_type = other RNA
  modified_base 1: mod_base = OTHER; note = 2'-O-methyl ribonucleotide
  modified_base 2: mod_base = OTHER; note = 2'-O-methyl ribonucleotide
  modified_base 3: mod_base = OTHER; note = 2'-O-methyl ribonucleotide
  modified_base 21: mod_base = OTHER; note = 2'-O-methyl ribonucleotide
  modified_base 28: mod_base = OTHER; note = 2'-O-methyl ribonucleotide
  modified_base 29: mod_base = OTHER; note = 2'-O-methyl ribonucleotide
  modified_base 30: mod_base = OTHER; note = 2'-O-methyl ribonucleotide
  modified_base 31: mod_base = OTHER; note = 2'-O-methyl ribonucleotide
  modified_base 32: mod_base = OTHER; note = 2'-O-methyl ribonucleotide
  modified_base 33: mod_base = OTHER; note = 2'-O-methyl ribonucleotide
  modified_base 34: mod_base = OTHER; note = 2'-O-methyl ribonucleotide
  modified_base 35: mod_base = OTHER; note = 2'-O-methyl ribonucleotide
  modified_base 36: mod_base = OTHER; note = 2'-O-methyl ribonucleotide
  modified_base 37: mod_base = OTHER; note = 2'-O-methyl ribonucleotide
  modified_base 38: mod_base = OTHER; note = 2'-O-methyl ribonucleotide
  modified_base 39: mod_base = OTHER; note = 2'-O-methyl ribonucleotide
  modified_base 40: mod_base = OTHER; note = 2'-O-methyl ribonucleotide
  modified_base 41: mod_base = OTHER; note = 2'-O-methyl ribonucleotide
  modified_base 42: mod_base = OTHER; note = 2'-O-methyl ribonucleotide
  modified_base 46: mod_base = OTHER; note = 2'-O-methyl ribonucleotide
  modified_base 48: mod_base = OTHER; note = 2'-O-methyl ribonucleotide
  modified_base 50: mod_base = OTHER; note = 2'-O-methyl ribonucleotide
  modified_base 52: mod_base = OTHER; note = 2'-O-methyl ribonucleotide
  modified_base 53: mod_base = OTHER; note = 2'-O-methyl ribonucleotide
  modified_base 54: mod_base = OTHER; note = 2'-O-methyl ribonucleotide
  modified_base 55: mod_base = OTHER; note = 2'-O-methyl ribonucleotide
  modified_base 56: mod_base = OTHER; note = 2'-O-methyl ribonucleotide
  modified_base 57: mod_base = OTHER; note = 2'-O-methyl ribonucleotide
  modified_base 59: mod_base = OTHER; note = 2'-O-methyl ribonucleotide
  modified_base 61: mod_base = OTHER; note = 2'-O-methyl ribonucleotide
  modified_base 65: mod_base = OTHER; note = 2'-O-methyl ribonucleotide
  modified_base 66: mod_base = OTHER; note = 2'-O-methyl ribonucleotide
  modified_base 67: mod_base = OTHER; note = 2'-O-methyl ribonucleotide
  modified_base 70: mod_base = OTHER; note = 2'-O-methyl ribonucleotide
  modified_base 71: mod_base = OTHER; note = 2'-O-methyl ribonucleotide
  modified_base 72: mod_base = OTHER; note = 2'-O-methyl ribonucleotide
  modified_base 73: mod_base = OTHER; note = 2'-O-methyl ribonucleotide
  modified_base 74: mod_base = OTHER; note = 2'-O-methyl ribonucleotide
  modified_base 75: mod_base = OTHER; note = 2'-O-methyl ribonucleotide
  modified_base 76: mod_base = OTHER; note = 2'-O-methyl ribonucleotide
  modified_base 77: mod_base = OTHER; note = 2'-O-methyl ribonucleotide
  modified_base 78: mod_base = OTHER; note = 2'-O-methyl ribonucleotide
  modified_base 79: mod_base = OTHER; note = 2'-O-methyl ribonucleotide
  modified_base 80: mod_base = OTHER; note = 2'-O-methyl ribonucleotide
  modified_base 81: mod_base = OTHER; note = 2'-O-methyl ribonucleotide
  modified_base 82: mod_base = OTHER; note = 2'-O-methyl ribonucleotide
  modified_base 83: mod_base = OTHER; note = 2'-O-methyl ribonucleotide
  modified_base 84: mod_base = OTHER; note = 2'-O-methyl ribonucleotide
  modified_base 85: mod_base = OTHER; note = 2'-O-methyl ribonucleotide
  modified_base 86: mod_base = OTHER; note = 2'-O-methyl ribonucleotide
  modified_base 87: mod_base = OTHER; note = 2'-O-methyl ribonucleotide
  modified_base 88: mod_base = OTHER; note = 2'-O-methyl ribonucleotide
  modified_base 89: mod_base = OTHER; note = 2'-O-methyl ribonucleotide
  modified_base 90: mod_base = OTHER; note = 2'-O-methyl ribonucleotide
  modified_base 91: mod_base = OTHER; note = 2'-O-methyl ribonucleotide
  modified_base 92: mod_base = OTHER; note = 2'-O-methyl ribonucleotide
  modified_base 93: mod_base = OTHER; note = 2'-O-methyl ribonucleotide
  modified_base 94: mod_base = OTHER; note = 2'-O-methyl ribonucleotide
  modified_base 95: mod_base = OTHER; note = 2'-O-methyl ribonucleotide
  modified_base 96: mod_base = OTHER; note = 2'-O-methyl ribonucleotide
  modified_base 97: mod_base = OTHER; note = 2'-O-methyl ribonucleotide
  modified_base 98: mod_base = OTHER; note = 2'-O-methyl ribonucleotide
  modified_base 99: mod_base = OTHER; note = 2'-O-methyl ribonucleotide
  modified_base 100: mod_base = OTHER; note = 2'-O-methyl ribonucleotide
  modified_base 1..4: mod_base = OTHER; note = phosphorothioate linkage
  modified_base 97..100: mod_base = OTHER; note = phosphorothioate linkage

SEQ ID NO: 2320 - RNA, 100 nt, synthetic construct; identical to SEQ ID NO: 421
  source 1..100: mol_type = other RNA
  modified_base 1: mod_base = OTHER; note = 2'-O-methyl ribonucleotide
  modified_base 2: mod_base = OTHER; note = 2'-O-methyl ribonucleotide
  modified_base 3: mod_base = OTHER; note = 2'-O-methyl ribonucleotide
  modified_base 21: mod_base = OTHER; note = 2'-O-methyl ribonucleotide
  modified_base 25: mod_base = OTHER; note = 2'-O-methyl ribonucleotide
  modified_base 26: mod_base = OTHER; note = 2'-O-methyl ribonucleotide
  modified_base 27: mod_base = OTHER; note = 2'-O-methyl ribonucleotide
  modified_base 28: mod_base = OTHER; note = 2'-O-methyl ribonucleotide
  modified_base 29: mod_base = OTHER; note = 2'-O-methyl ribonucleotide
  modified_base 30: mod_base = OTHER; note = 2'-O-methyl ribonucleotide
  modified_base 31: mod_base = OTHER; note = 2'-O-methyl ribonucleotide
  modified_base 32: mod_base = OTHER; note = 2'-O-methyl ribonucleotide
  modified_base 33: mod_base = OTHER; note = 2'-O-methyl ribonucleotide
  modified_base 34: mod_base = OTHER; note = 2'-O-methyl ribonucleotide
  modified_base 35: mod_base = OTHER; note = 2'-O-methyl ribonucleotide
  modified_base 36: mod_base = OTHER; note = 2'-O-methyl ribonucleotide
  modified_base 37: mod_base = OTHER; note = 2'-O-methyl ribonucleotide
  modified_base 38: mod_base = OTHER; note = 2'-O-methyl ribonucleotide
  modified_base 39: mod_base = OTHER; note = 2'-O-methyl ribonucleotide
  modified_base 40: mod_base = OTHER; note = 2'-O-methyl ribonucleotide
  modified_base 41: mod_base = OTHER; note = 2'-O-methyl ribonucleotide
  modified_base 42: mod_base = OTHER; note = 2'-O-methyl ribonucleotide
  modified_base 46: mod_base = OTHER; note = 2'-O-methyl ribonucleotide
  modified_base 48: mod_base = OTHER; note = 2'-O-methyl ribonucleotide
  modified_base 50: mod_base = OTHER; note = 2'-O-methyl ribonucleotide
  modified_base 51: mod_base = OTHER; note = 2'-O-methyl ribonucleotide
  modified_base 52: mod_base = OTHER; note = 2'-O-methyl ribonucleotide
  modified_base 53: mod_base = OTHER; note = 2'-O-methyl ribonucleotide
  modified_base 54: mod_base = OTHER; note = 2'-O-methyl ribonucleotide
  modified_base 55: mod_base = OTHER; note = 2'-O-methyl ribonucleotide
  modified_base 56: mod_base = OTHER; note = 2'-O-methyl ribonucleotide
  modified_base 57: mod_base = OTHER; note = 2'-O-methyl ribonucleotide
  modified_base 59: mod_base = OTHER; note = 2'-O-methyl ribonucleotide
  modified_base 60: mod_base = OTHER; note = 2'-O-methyl ribonucleotide
  modified_base 61: mod_base = OTHER; note = 2'-O-methyl ribonucleotide
  modified_base 62: mod_base = OTHER; note = 2'-O-methyl ribonucleotide
  modified_base 65: mod_base = OTHER; note = 2'-O-methyl ribonucleotide
  modified_base 66: mod_base = OTHER; note = 2'-O-methyl ribonucleotide
  modified_base 67: mod_base = OTHER; note = 2'-O-methyl ribonucleotide
  modified_base 68: mod_base = OTHER; note = 2'-O-methyl ribonucleotide
  modified_base 69: mod_base = OTHER; note = 2'-O-methyl ribonucleotide
  modified_base 70: mod_base = OTHER; note = 2'-O-methyl ribonucleotide
  modified_base 71: mod_base = OTHER; note = 2'-O-methyl ribonucleotide
  modified_base 72: mod_base = OTHER; note = 2'-O-methyl ribonucleotide
  modified_base 73: mod_base = OTHER; note = 2'-O-methyl ribonucleotide
  modified_base 74: mod_base = OTHER; note = 2'-O-methyl ribonucleotide
  modified_base 75: mod_base = OTHER; note = 2'-O-methyl ribonucleotide
  modified_base 76: mod_base = OTHER; note = 2'-O-methyl ribonucleotide
  modified_base 77: mod_base = OTHER; note = 2'-O-methyl ribonucleotide
  modified_base 78: mod_base = OTHER; note = 2'-O-methyl ribonucleotide
  modified_base 79: mod_base = OTHER; note = 2'-O-methyl ribonucleotide
  modified_base 80: mod_base = OTHER; note = 2'-O-methyl ribonucleotide
  modified_base 81: mod_base = OTHER; note = 2'-O-methyl ribonucleotide
  modified_base 82: mod_base = OTHER; note = 2'-O-methyl ribonucleotide
  modified_base 83: mod_base = OTHER; note = 2'-O-methyl ribonucleotide
  modified_base 84: mod_base = OTHER; note = 2'-O-methyl ribonucleotide
  modified_base 85: mod_base = OTHER; note = 2'-O-methyl ribonucleotide
  modified_base 86: mod_base = OTHER; note = 2'-O-methyl ribonucleotide
  modified_base 87: mod_base = OTHER; note = 2'-O-methyl ribonucleotide
  modified_base 88: mod_base = OTHER; note = 2'-O-methyl ribonucleotide
  modified_base 89: mod_base = OTHER; note = 2'-O-methyl ribonucleotide
  modified_base 90: mod_base = OTHER; note = 2'-O-methyl ribonucleotide
  modified_base 91: mod_base = OTHER; note = 2'-O-methyl ribonucleotide
  modified_base 92: mod_base = OTHER; note = 2'-O-methyl ribonucleotide
  modified_base 93: mod_base = OTHER; note = 2'-O-methyl ribonucleotide
  modified_base 94: mod_base = OTHER; note = 2'-O-methyl ribonucleotide
  modified_base 95: mod_base = OTHER; note = 2'-O-methyl ribonucleotide
  modified_base 96: mod_base = OTHER; note = 2'-O-methyl ribonucleotide
  modified_base 97: mod_base = OTHER; note = 2'-O-methyl ribonucleotide
  modified_base 98: mod_base = OTHER; note = 2'-O-methyl ribonucleotide
  modified_base 99: mod_base = OTHER; note = 2'-O-methyl ribonucleotide
  modified_base 100: mod_base = OTHER; note = 2'-O-methyl ribonucleotide
  modified_base 1..4: mod_base = OTHER; note = phosphorothioate linkage
  modified_base 97..100: mod_base = OTHER; note = phosphorothioate linkage

SEQ ID NO: 2321 - RNA, 100 nt, synthetic construct; identical to SEQ ID NO: 422
  source 1..100: mol_type = other RNA
  modified_base 1: mod_base = OTHER; note = 2'-O-methyl ribonucleotide
  modified_base 2: mod_base = OTHER; note = 2'-O-methyl ribonucleotide
  modified_base 3: mod_base = OTHER; note = 2'-O-methyl ribonucleotide
  modified_base 21: mod_base = OTHER; note = 2'-O-methyl ribonucleotide
  modified_base 28: mod_base = OTHER; note = 2'-O-methyl ribonucleotide
  modified_base 29: mod_base = OTHER; note = 2'-O-methyl ribonucleotide
  modified_base 30: mod_base = OTHER; note = 2'-O-methyl ribonucleotide
  modified_base 31: mod_base = OTHER; note = 2'-O-methyl ribonucleotide
  modified_base 32: mod_base = OTHER; note = 2'-O-methyl ribonucleotide
  modified_base 33: mod_base = OTHER; note = 2'-O-methyl ribonucleotide
  modified_base 34: mod_base = OTHER; note = 2'-O-methyl ribonucleotide
  modified_base 35: mod_base = OTHER; note = 2'-O-methyl ribonucleotide
  modified_base 36: mod_base = OTHER; note = 2'-O-methyl ribonucleotide
  modified_base 37: mod_base = OTHER; note = 2'-O-methyl ribonucleotide
  modified_base 38: mod_base = OTHER; note = 2'-O-methyl ribonucleotide
  modified_base 39: mod_base = OTHER; note = 2'-O-methyl ribonucleotide
  modified_base 40: mod_base = OTHER; note = 2'-O-methyl ribonucleotide
  modified_base 41: mod_base = OTHER; note = 2'-O-methyl ribonucleotide
  modified_base 42: mod_base = OTHER; note = 2'-O-methyl ribonucleotide
  modified_base 46: mod_base = OTHER; note = 2'-O-methyl ribonucleotide
  modified_base 48: mod_base = OTHER; note = 2'-O-methyl ribonucleotide
  modified_base 50: mod_base = OTHER; note = 2'-O-methyl ribonucleotide
  modified_base 52: mod_base = OTHER; note = 2'-O-methyl ribonucleotide
  modified_base 53: mod_base = OTHER; note = 2'-O-methyl ribonucleotide
  modified_base 54: mod_base = OTHER; note = 2'-O-methyl ribonucleotide
  modified_base 55: mod_base = OTHER; note = 2'-O-methyl ribonucleotide
  modified_base 56: mod_base = OTHER; note = 2'-O-methyl ribonucleotide
  modified_base 57: mod_base = OTHER; note = 2'-O-methyl ribonucleotide
  modified_base 60: mod_base = OTHER; note = 2'-O-methyl ribonucleotide
  modified_base 61: mod_base = OTHER; note = 2'-O-methyl ribonucleotide
  modified_base 66: mod_base = OTHER; note = 2'-O-methyl ribonucleotide
  modified_base 67: mod_base = OTHER; note = 2'-O-methyl ribonucleotide
  modified_base 70: mod_base = OTHER; note = 2'-O-methyl ribonucleotide
  modified_base 71: mod_base = OTHER; note = 2'-O-methyl ribonucleotide
  modified_base 72: mod_base = OTHER; note = 2'-O-methyl ribonucleotide
  modified_base 73: mod_base = OTHER; note = 2'-O-methyl ribonucleotide
  modified_base 74: mod_base = OTHER; note = 2'-O-methyl ribonucleotide
  modified_base 75: mod_base = OTHER; note = 2'-O-methyl ribonucleotide
  modified_base 76: mod_base = OTHER; note = 2'-O-methyl ribonucleotide
  modified_base 77: mod_base = OTHER; note = 2'-O-methyl ribonucleotide
  modified_base 78: mod_base = OTHER; note = 2'-O-methyl ribonucleotide
  modified_base 79: mod_base = OTHER; note = 2'-O-methyl ribonucleotide
  modified_base 80: mod_base = OTHER; note = 2'-O-methyl ribonucleotide
  modified_base 81: mod_base = OTHER; note = 2'-O-methyl ribonucleotide
  modified_base 83: mod_base = OTHER; note = 2'-O-methyl ribonucleotide
  modified_base 84: mod_base = OTHER; note = 2'-O-methyl ribonucleotide
  modified_base 85: mod_base = OTHER; note = 2'-O-methyl ribonucleotide
  modified_base 86: mod_base = OTHER; note = 2'-O-methyl ribonucleotide
  modified_base 87: mod_base = OTHER; note = 2'-O-methyl ribonucleotide
  modified_base 88: mod_base = OTHER; note = 2'-O-methyl ribonucleotide
  modified_base 89: mod_base = OTHER; note = 2'-O-methyl ribonucleotide
  modified_base 90: mod_base = OTHER; note = 2'-O-methyl ribonucleotide
  modified_base 91: mod_base = OTHER; note = 2'-O-methyl ribonucleotide
  modified_base 92: mod_base = OTHER; note = 2'-O-methyl ribonucleotide
  modified_base 93: mod_base = OTHER; note = 2'-O-methyl ribonucleotide
  modified_base 94: mod_base = OTHER; note = 2'-O-methyl ribonucleotide
  modified_base 95: mod_base = OTHER; note = 2'-O-methyl ribonucleotide
  modified_base 96: mod_base = OTHER; note = 2'-O-methyl ribonucleotide
  modified_base 97: mod_base = OTHER; note = 2'-O-methyl ribonucleotide
  modified_base 98: mod_base = OTHER; note = 2'-O-methyl ribonucleotide
  modified_base 99: mod_base = OTHER; note = 2'-O-methyl ribonucleotide
  modified_base 100: mod_base = OTHER; note = 2'-O-methyl ribonucleotide
  modified_base 1..4: mod_base = OTHER; note = phosphorothioate linkage
  modified_base 97..100: mod_base = OTHER; note = phosphorothioate linkage

SEQ ID NO: 2322 - RNA, 100 nt, synthetic construct; identical to SEQ ID NO: 422
  source 1..100: mol_type = other RNA
  modified_base 1: mod_base = OTHER; note = 2'-O-methyl ribonucleotide
  modified_base 2: mod_base = OTHER; note = 2'-O-methyl ribonucleotide
  modified_base 3: mod_base = OTHER; note = 2'-O-methyl ribonucleotide
  modified_base 21: mod_base = OTHER; note = 2'-O-methyl ribonucleotide
  modified_base 28: mod_base = OTHER; note = 2'-O-methyl ribonucleotide
  modified_base 29: mod_base = OTHER; note = 2'-O-methyl ribonucleotide
  modified_base 30: mod_base = OTHER; note = 2'-O-methyl ribonucleotide
  modified_base 31: mod_base = OTHER; note = 2'-O-methyl ribonucleotide
  modified_base 32: mod_base = OTHER; note = 2'-O-methyl ribonucleotide
  modified_base 34: mod_base = OTHER; note = 2'-O-methyl ribonucleotide
  modified_base 35: mod_base = OTHER; note = 2'-O-methyl ribonucleotide
  modified_base 36: mod_base = OTHER; note = 2'-O-methyl ribonucleotide
  modified_base 37: mod_base = OTHER; note = 2'-O-methyl ribonucleotide
  modified_base 38: mod_base = OTHER; note = 2'-O-methyl ribonucleotide
  modified_base 39: mod_base = OTHER; note = 2'-O-methyl ribonucleotide
  modified_base 40: mod_base = OTHER; note = 2'-O-methyl ribonucleotide
  modified_base 41: mod_base = OTHER; note = 2'-O-methyl ribonucleotide
  modified_base 42: mod_base = OTHER; note = 2'-O-methyl ribonucleotide
  modified_base 46: mod_base = OTHER; note = 2'-O-methyl ribonucleotide
  modified_base 48: mod_base = OTHER; note = 2'-O-methyl ribonucleotide
  modified_base 50: mod_base = OTHER; note = 2'-O-methyl ribonucleotide
  modified_base 52: mod_base = OTHER; note = 2'-O-methyl ribonucleotide
  modified_base 53: mod_base = OTHER; note = 2'-O-methyl ribonucleotide
  modified_base 54: mod_base = OTHER; note = 2'-O-methyl ribonucleotide
  modified_base 55: mod_base = OTHER; note = 2'-O-methyl ribonucleotide
  modified_base 56: mod_base = OTHER; note = 2'-O-methyl ribonucleotide
  modified_base 57: mod_base = OTHER; note = 2'-O-methyl ribonucleotide
  modified_base 60: mod_base = OTHER; note = 2'-O-methyl ribonucleotide
  modified_base 61: mod_base = OTHER; note = 2'-O-methyl ribonucleotide
  modified_base 66: mod_base = OTHER; note = 2'-O-methyl ribonucleotide
  modified_base 67: mod_base = OTHER; note = 2'-O-methyl ribonucleotide
  modified_base 70: mod_base = OTHER; note = 2'-O-methyl ribonucleotide
  modified_base 71: mod_base = OTHER; note = 2'-O-methyl ribonucleotide
  modified_base 72: mod_base = OTHER; note = 2'-O-methyl ribonucleotide
  modified_base 74: mod_base = OTHER; note = 2'-O-methyl ribonucleotide
  modified_base 75: mod_base = OTHER; note = 2'-O-methyl ribonucleotide
  modified_base 76: mod_base = OTHER; note = 2'-O-methyl ribonucleotide
  modified_base 77: mod_base = OTHER; note = 2'-O-methyl ribonucleotide
  modified_base 78: mod_base = OTHER; note = 2'-O-methyl ribonucleotide
  modified_base 79: mod_base = OTHER; note = 2'-O-methyl ribonucleotide
  modified_base 80: mod_base = OTHER; note = 2'-O-methyl ribonucleotide
  modified_base 81: mod_base = OTHER; note = 2'-O-methyl ribonucleotide
  modified_base 83: mod_base = OTHER; note = 2'-O-methyl ribonucleotide
  modified_base 84: mod_base = OTHER; note = 2'-O-methyl ribonucleotide
  modified_base 85: mod_base = OTHER; note = 2'-O-methyl ribonucleotide
  modified_base 86: mod_base = OTHER; note = 2'-O-methyl ribonucleotide
  modified_base 87: mod_base = OTHER; note = 2'-O-methyl ribonucleotide
  modified_base 88: mod_base = OTHER; note = 2'-O-methyl ribonucleotide
  modified_base 89: mod_base = OTHER; note = 2'-O-methyl ribonucleotide
  modified_base 90: mod_base = OTHER; note = 2'-O-methyl ribonucleotide
  modified_base 91: mod_base = OTHER; note = 2'-O-methyl ribonucleotide
  modified_base 92: mod_base = OTHER; note = 2'-O-methyl ribonucleotide
  modified_base 93: mod_base = OTHER; note = 2'-O-methyl ribonucleotide
  modified_base 94: mod_base = OTHER; note = 2'-O-methyl ribonucleotide
  modified_base 95: mod_base = OTHER; note = 2'-O-methyl ribonucleotide
  modified_base 96: mod_base = OTHER; note = 2'-O-methyl ribonucleotide
  modified_base 97: mod_base = OTHER; note = 2'-O-methyl ribonucleotide
  modified_base 98: mod_base = OTHER; note = 2'-O-methyl ribonucleotide
  modified_base 99: mod_base = OTHER; note = 2'-O-methyl ribonucleotide
  modified_base 100: mod_base = OTHER; note = 2'-O-methyl ribonucleotide
  modified_base 1..4: mod_base = OTHER; note = phosphorothioate linkage
  modified_base 97..100: mod_base = OTHER; note = phosphorothioate linkage

SEQ ID NO: 2323 - RNA, 100 nt, synthetic construct; identical to SEQ ID NO: 422
  source 1..100: mol_type = other RNA
  modified_base 1: mod_base = OTHER; note = 2'-O-methyl ribonucleotide
  modified_base 2: mod_base = OTHER; note = 2'-O-methyl ribonucleotide
  modified_base 3: mod_base = OTHER; note = 2'-O-methyl ribonucleotide
  modified_base 29: mod_base = OTHER; note = 2'-O-methyl ribonucleotide
  modified_base 30: mod_base = OTHER; note = 2'-O-methyl ribonucleotide
  modified_base 31: mod_base = OTHER; note = 2'-O-methyl ribonucleotide
  modified_base 32: mod_base = OTHER; note = 2'-O-methyl ribonucleotide
  modified_base 33: mod_base = OTHER; note = 2'-O-methyl ribonucleotide
  modified_base 34: mod_base = OTHER; note = 2'-O-methyl ribonucleotide
  modified_base 35: mod_base = OTHER; note = 2'-O-methyl ribonucleotide
  modified_base 36: mod_base = OTHER; note = 2'-O-methyl ribonucleotide
  modified_base 37: mod_base = OTHER; note = 2'-O-methyl ribonucleotide
  modified_base 38: mod_base = OTHER; note = 2'-O-methyl ribonucleotide
  modified_base 39: mod_base = OTHER; note = 2'-O-methyl ribonucleotide
  modified_base 40: mod_base = OTHER; note = 2'-O-methyl ribonucleotide
  modified_base 69: mod_base = OTHER; note = 2'-O-methyl ribonucleotide
  modified_base 70: mod_base = OTHER; note = 2'-O-methyl ribonucleotide
  modified_base 71: mod_base = OTHER; note = 2'-O-methyl ribonucleotide
  modified_base 72: mod_base = OTHER; note = 2'-O-methyl ribonucleotide
  modified_base 73: mod_base = OTHER; note = 2'-O-methyl ribonucleotide
  modified_base 74: mod_base = OTHER; note = 2'-O-methyl ribonucleotide
  modified_base 75: mod_base = OTHER; note = 2'-O-methyl ribonucleotide
  modified_base 76: mod_base = OTHER; note = 2'-O-methyl ribonucleotide
  modified_base 77: mod_base = OTHER; note = 2'-O-methyl ribonucleotide
  modified_base 78: mod_base = OTHER; note = 2'-O-methyl ribonucleotide
  modified_base 79: mod_base = OTHER; note = 2'-O-methyl ribonucleotide
  modified_base 80: mod_base = OTHER; note = 2'-O-methyl ribonucleotide
  modified_base 81: mod_base = OTHER; note = 2'-O-methyl ribonucleotide
  modified_base 82: mod_base = OTHER; note = 2'-O-methyl ribonucleotide
  modified_base 83: mod_base = OTHER; note = 2'-O-methyl ribonucleotide
  modified_base 84: mod_base = OTHER; note = 2'-O-methyl ribonucleotide
  modified_base 85: mod_base = OTHER; note = 2'-O-methyl ribonucleotide
  modified_base 86: mod_base = OTHER; note = 2'-O-methyl ribonucleotide
  modified_base 87: mod_base = OTHER; note = 2'-O-methyl ribonucleotide
  modified_base 88: mod_base = OTHER; note = 2'-O-methyl ribonucleotide
  modified_base 89: mod_base = OTHER; note = 2'-O-methyl ribonucleotide
  modified_base 90: mod_base = OTHER; note = 2'-O-methyl ribonucleotide
  modified_base 91: mod_base = OTHER; note = 2'-O-methyl ribonucleotide
  modified_base 92: mod_base = OTHER; note = 2'-O-methyl ribonucleotide
  modified_base 93: mod_base = OTHER; note = 2'-O-methyl ribonucleotide
  modified_base 94: mod_base = OTHER; note = 2'-O-methyl ribonucleotide
  modified_base 95: mod_base = OTHER; note = 2'-O-methyl ribonucleotide
  modified_base 96: mod_base = OTHER; note = 2'-O-methyl ribonucleotide
  modified_base 97: mod_base = OTHER; note = 2'-O-methyl ribonucleotide
  modified_base 98: mod_base = OTHER; note = 2'-O-methyl ribonucleotide
  modified_base 99: mod_base = OTHER; note = 2'-O-methyl ribonucleotide
  modified_base 100: mod_base = OTHER; note = 2'-O-methyl ribonucleotide
  modified_base 1..4: mod_base = OTHER; note = phosphorothioate linkage
  modified_base 97..100: mod_base = OTHER; note = phosphorothioate linkage

SEQ ID NO: 2324 - RNA, 100 nt, synthetic construct; identical to SEQ ID NO: 422
  source 1..100: mol_type = other RNA
  modified_base 1: mod_base = OTHER; note = 2'-O-methyl ribonucleotide
  modified_base 2: mod_base = OTHER; note = 2'-O-methyl ribonucleotide
  modified_base 3: mod_base = OTHER; note = 2'-O-methyl ribonucleotide
  modified_base 98: mod_base = OTHER; note = 2'-O-methyl ribonucleotide
  modified_base 99: mod_base = OTHER; note = 2'-O-methyl ribonucleotide
  modified_base 100: mod_base = OTHER; note = 2'-O-methyl ribonucleotide
  modified_base 1..4: mod_base = OTHER; note = phosphorothioate linkage
  modified_base 97..100: mod_base = OTHER; note = phosphorothioate linkage

SEQ ID NO: 2325 - RNA, 99 nt, synthetic construct; identical to SEQ ID NO: 442
  source 1..99: mol_type = other RNA
  modified_base 1: mod_base = OTHER; note = 2'-O-methyl ribonucleotide
  modified_base 2: mod_base = OTHER; note = 2'-O-methyl ribonucleotide
  modified_base 3: mod_base = OTHER; note = 2'-O-methyl ribonucleotide
  modified_base 97: mod_base = OTHER; note = 2'-O-methyl ribonucleotide
  modified_base 98: mod_base = OTHER; note = 2'-O-methyl ribonucleotide
  modified_base 99: mod_base = OTHER; note = 2'-O-methyl ribonucleotide
  modified_base 1..4: mod_base = OTHER; note = phosphorothioate linkage
  modified_base 96..99: mod_base = OTHER; note = phosphorothioate linkage

SEQ ID NO: 2326 - RNA, 98 nt, synthetic construct; identical to SEQ ID NO: 443
  source 1..98: mol_type = other RNA
  modified_base 1: mod_base = OTHER; note = 2'-O-methyl ribonucleotide
  modified_base 2: mod_base = OTHER; note = 2'-O-methyl ribonucleotide
  modified_base 96: mod_base = OTHER; note = 2'-O-methyl ribonucleotide
  modified_base 97: mod_base = OTHER; note = 2'-O-methyl ribonucleotide
  modified_base 98: mod_base = OTHER; note = 2'-O-methyl ribonucleotide
  modified_base 1..3: mod_base = OTHER; note = phosphorothioate linkage
  modified_base 95..98: mod_base = OTHER; note = phosphorothioate linkage

SEQ ID NO: 2327 - RNA, 97 nt, synthetic construct; identical to SEQ ID NO: 444
  source 1..97: mol_type = other RNA
  modified_base 1: mod_base = OTHER; note = 2'-O-methyl ribonucleotide
  modified_base 2: mod_base = OTHER; note = 2'-O-methyl ribonucleotide
  modified_base 95: mod_base = OTHER; note = 2'-O-methyl ribonucleotide
  modified_base 96: mod_base = OTHER; note = 2'-O-methyl ribonucleotide
  modified_base 97: mod_base = OTHER; note = 2'-O-methyl ribonucleotide
  modified_base 1..3: mod_base = OTHER; note = phosphorothioate linkage
  modified_base 94..97: mod_base = OTHER; note = phosphorothioate linkage

SEQ ID NO: 2328 - RNA, 97 nt, synthetic construct; identical to SEQ ID NO: 444
  source 1..97: mol_type = other RNA
  modified_base 1: mod_base = OTHER; note = 2'-O-methyl ribonucleotide
  modified_base 95: mod_base = OTHER; note = 2'-O-methyl ribonucleotide
  modified_base 96: mod_base = OTHER; note = 2'-O-methyl ribonucleotide
  modified_base 97: mod_base = OTHER; note = 2'-O-methyl ribonucleotide
  modified_base 1..3: mod_base = OTHER; note = phosphorothioate linkage
  modified_base 94..97: mod_base = OTHER; note = phosphorothioate linkage

SEQ ID NO: 2329 - RNA, 103 nt, synthetic construct; identical to SEQ ID NO: 447
  source 1..103: mol_type = other RNA
  modified_base 1: mod_base = OTHER; note = 2'-O-methyl ribonucleotide
  modified_base 2: mod_base = OTHER; note = 2'-O-methyl ribonucleotide
  modified_base 3: mod_base = OTHER; note = 2'-O-methyl ribonucleotide
  modified_base 21: mod_base = OTHER; note = 2'-O-methyl ribonucleotide
  modified_base 28: mod_base = OTHER; note = 2'-O-methyl ribonucleotide
  modified_base 29: mod_base = OTHER; note = 2'-O-methyl ribonucleotide
  modified_base 30: mod_base = OTHER; note = 2'-O-methyl ribonucleotide
  modified_base 31: mod_base = OTHER; note = 2'-O-methyl ribonucleotide
  modified_base 32: mod_base = OTHER; note = 2'-O-methyl ribonucleotide
  modified_base 33: mod_base = OTHER; note = 2'-O-methyl ribonucleotide
  modified_base 34: mod_base = OTHER; note = 2'-O-methyl ribonucleotide
  modified_base 35: mod_base = OTHER; note = 2'-O-methyl ribonucleotide
  modified_base 36: mod_base = OTHER; note = 2'-O-methyl ribonucleotide
  modified_base 37: mod_base = OTHER; note = 2'-O-methyl ribonucleotide
  modified_base 38: mod_base = OTHER; note = 2'-O-methyl ribonucleotide
  modified_base 39: mod_base = OTHER; note = 2'-O-methyl ribonucleotide
  modified_base 40: mod_base = OTHER; note = 2'-O-methyl ribonucleotide
  modified_base 41: mod_base = OTHER; note = 2'-O-methyl ribonucleotide
  modified_base 42: mod_base = OTHER; note = 2'-O-methyl ribonucleotide
  modified_base 46: mod_base = OTHER; note = 2'-O-methyl ribonucleotide
  modified_base 48: mod_base = OTHER; note = 2'-O-methyl ribonucleotide
  modified_base 50: mod_base = OTHER; note = 2'-O-methyl ribonucleotide
  modified_base 52: mod_base = OTHER; note = 2'-O-methyl ribonucleotide
  modified_base 53: mod_base = OTHER; note = 2'-O-methyl ribonucleotide
  modified_base 54: mod_base = OTHER; note = 2'-O-methyl ribonucleotide
  modified_base 55: mod_base = OTHER; note = 2'-O-methyl ribonucleotide
  modified_base 56: mod_base = OTHER; note = 2'-O-methyl ribonucleotide
  modified_base 57: mod_base = OTHER; note = 2'-O-methyl ribonucleotide
  modified_base 61: mod_base = OTHER; note = 2'-O-methyl ribonucleotide
  modified_base 66: mod_base = OTHER; note = 2'-O-methyl ribonucleotide
  modified_base 67: mod_base = OTHER; note = 2'-O-methyl ribonucleotide
  modified_base 70: mod_base = OTHER; note = 2'-O-methyl ribonucleotide
  modified_base 71: mod_base = OTHER; note = 2'-O-methyl ribonucleotide
  modified_base 72: mod_base = OTHER; note = 2'-O-methyl ribonucleotide
  modified_base 73: mod_base = OTHER; note = 2'-O-methyl ribonucleotide
  modified_base 74: mod_base = OTHER; note = 2'-O-methyl ribonucleotide
  modified_base 75: mod_base = OTHER; note = 2'-O-methyl ribonucleotide
  modified_base 76: mod_base = OTHER; note = 2'-O-methyl ribonucleotide
  modified_base 77: mod_base = OTHER; note = 2'-O-methyl ribonucleotide
  modified_base 78: mod_base = OTHER; note = 2'-O-methyl ribonucleotide
  modified_base 79: mod_base = OTHER; note = 2'-O-methyl ribonucleotide
  modified_base 80: mod_base = OTHER; note = 2'-O-methyl ribonucleotide
  modified_base 81: mod_base = OTHER; note = 2'-O-methyl ribonucleotide
  modified_base 82: mod_base = OTHER; note = 2'-O-methyl ribonucleotide
  modified_base 83: mod_base = OTHER; note = 2'-O-methyl ribonucleotide
  modified_base 84: mod_base = OTHER; note = 2'-O-methyl ribonucleotide
  modified_base 85: mod_base = OTHER; note = 2'-O-methyl ribonucleotide
  modified_base 86: mod_base = OTHER; note = 2'-O-methyl ribonucleotide
  modified_base 87: mod_base = OTHER; note = 2'-O-methyl ribonucleotide
  modified_base 88: mod_base = OTHER; note = 2'-O-methyl ribonucleotide
  modified_base 89: mod_base = OTHER; note = 2'-O-methyl ribonucleotide
  modified_base 90: mod_base = OTHER; note = 2'-O-methyl ribonucleotide
  modified_base 91: mod_base = OTHER; note = 2'-O-methyl ribonucleotide
  modified_base 92: mod_base = OTHER; note = 2'-O-methyl ribonucleotide
  modified_base 93: mod_base = OTHER; note = 2'-O-methyl ribonucleotide
  modified_base 94: mod_base = OTHER; note = 2'-O-methyl ribonucleotide
  modified_base 95: mod_base = OTHER; note = 2'-O-methyl ribonucleotide
  modified_base 96: mod_base = OTHER; note = 2'-O-methyl ribonucleotide
  modified_base 97: mod_base = OTHER; note = 2'-O-methyl ribonucleotide
  modified_base 98: mod_base = OTHER; note = 2'-O-methyl ribonucleotide
  modified_base 99: mod_base = OTHER; note = 2'-O-methyl ribonucleotide
  modified_base 100: mod_base = OTHER; note = 2'-O-methyl ribonucleotide
  modified_base 101: mod_base = OTHER; note = 2'-O-methyl ribonucleotide
  modified_base 102: mod_base = OTHER; note = 2'-O-methyl ribonucleotide
  modified_base 103: mod_base = OTHER; note = 2'-O-methyl ribonucleotide
  modified_base 1..4: mod_base = OTHER; note = phosphorothioate linkage
  modified_base 97..100: mod_base = OTHER; note = phosphorothioate linkage

SEQ ID NO: 2330 - RNA, 103 nt, synthetic construct; identical to SEQ ID NO: 447
  source 1..103: mol_type = other RNA
  modified_base 1: mod_base = OTHER; note = 2'-O-methyl ribonucleotide
  modified_base 2: mod_base = OTHER; note = 2'-O-methyl ribonucleotide
  modified_base 3: mod_base = OTHER; note = 2'-O-methyl ribonucleotide
  modified_base 21: mod_base = OTHER; note = 2'-O-methyl ribonucleotide
  modified_base 28: mod_base = OTHER; note = 2'-O-methyl ribonucleotide
  modified_base 29: mod_base = OTHER; note = 2'-O-methyl ribonucleotide
  modified_base 30: mod_base = OTHER; note = 2'-O-methyl ribonucleotide
  modified_base 31: mod_base = OTHER; note = 2'-O-methyl ribonucleotide
  modified_base 32: mod_base = OTHER; note = 2'-O-methyl ribonucleotide
  modified_base 33: mod_base = OTHER; note = 2'-O-methyl ribonucleotide
  modified_base 34: mod_base = OTHER; note = 2'-O-methyl ribonucleotide
  modified_base 35: mod_base = OTHER; note = 2'-O-methyl ribonucleotide
  modified_base 36: mod_base = OTHER; note = 2'-O-methyl ribonucleotide
  modified_base 37: mod_base = OTHER; note = 2'-O-methyl ribonucleotide
  modified_base 38: mod_base = OTHER; note = 2'-O-methyl ribonucleotide
  modified_base 39: mod_base = OTHER; note = 2'-O-methyl ribonucleotide
  modified_base 40: mod_base = OTHER; note = 2'-O-methyl ribonucleotide
  modified_base 41: mod_base = OTHER; note = 2'-O-methyl ribonucleotide
  modified_base 42: mod_base = OTHER; note = 2'-O-methyl ribonucleotide
  modified_base 46: mod_base = OTHER; note = 2'-O-methyl ribonucleotide
  modified_base 48: mod_base = OTHER; note = 2'-O-methyl ribonucleotide
  modified_base 50: mod_base = OTHER; note = 2'-O-methyl ribonucleotide
  modified_base 52: mod_base = OTHER; note = 2'-O-methyl ribonucleotide
  modified_base 53: mod_base = OTHER; note = 2'-O-methyl ribonucleotide
  modified_base 54: mod_base = OTHER; note = 2'-O-methyl ribonucleotide
  modified_base 55: mod_base = OTHER; note = 2'-O-methyl ribonucleotide
  modified_base 56: mod_base = OTHER; note = 2'-O-methyl ribonucleotide
  modified_base 57: mod_base = OTHER; note = 2'-O-methyl ribonucleotide
  modified_base 59: mod_base = OTHER; note = 2'-O-methyl ribonucleotide
  modified_base 61: mod_base = OTHER; note = 2'-O-methyl ribonucleotide
  modified_base 65: mod_base = OTHER; note = 2'-O-methyl ribonucleotide
  modified_base 66: mod_base = OTHER; note = 2'-O-methyl ribonucleotide
  modified_base 67: mod_base = OTHER; note = 2'-O-methyl ribonucleotide
  modified_base 70: mod_base = OTHER; note = 2'-O-methyl ribonucleotide
  modified_base 71: mod_base = OTHER; note = 2'-O-methyl ribonucleotide
  modified_base 72: mod_base = OTHER; note = 2'-O-methyl ribonucleotide
  modified_base 73: mod_base = OTHER; note = 2'-O-methyl ribonucleotide
  modified_base 74: mod_base = OTHER; note = 2'-O-methyl ribonucleotide
  modified_base 75: mod_base = OTHER; note = 2'-O-methyl ribonucleotide
  modified_base 76: mod_base = OTHER; note = 2'-O-methyl ribonucleotide
  modified_base 77: mod_base = OTHER; note = 2'-O-methyl ribonucleotide
  modified_base 78: mod_base = OTHER; note = 2'-O-methyl ribonucleotide
  modified_base 79: mod_base = OTHER; note = 2'-O-methyl ribonucleotide
  modified_base 80: mod_base = OTHER; note = 2'-O-methyl ribonucleotide
  modified_base 81: mod_base = OTHER; note = 2'-O-methyl ribonucleotide
  modified_base 82: mod_base = OTHER; note = 2'-O-methyl ribonucleotide
  modified_base 83: mod_base = OTHER; note = 2'-O-methyl ribonucleotide
  modified_base 84: mod_base = OTHER; note = 2'-O-methyl ribonucleotide
  modified_base 85: mod_base = OTHER; note = 2'-O-methyl ribonucleotide
  modified_base 86: mod_base = OTHER; note = 2'-O-methyl ribonucleotide
  modified_base 87: mod_base = OTHER; note = 2'-O-methyl ribonucleotide
  modified_base 88: mod_base = OTHER; note = 2'-O-methyl ribonucleotide
  modified_base 89: mod_base = OTHER; note = 2'-O-methyl ribonucleotide
  modified_base 90: mod_base = OTHER; note = 2'-O-methyl ribonucleotide
  modified_base 91: mod_base = OTHER; note = 2'-O-methyl ribonucleotide
  modified_base 92: mod_base = OTHER; note = 2'-O-methyl ribonucleotide
  modified_base 93: mod_base = OTHER; note = 2'-O-methyl ribonucleotide
  modified_base 94: mod_base = OTHER; note = 2'-O-methyl ribonucleotide
  modified_base 95: mod_base = OTHER; note = 2'-O-methyl ribonucleotide
  modified_base 96: mod_base = OTHER; note = 2'-O-methyl ribonucleotide
  modified_base 97: mod_base = OTHER; note = 2'-O-methyl ribonucleotide
  modified_base 98: mod_base = OTHER; note = 2'-O-methyl ribonucleotide
  modified_base 99: mod_base = OTHER; note = 2'-O-methyl ribonucleotide
  modified_base 100: mod_base = OTHER; note = 2'-O-methyl ribonucleotide
  modified_base 101: mod_base = OTHER; note = 2'-O-methyl ribonucleotide
  modified_base 102: mod_base = OTHER; note = 2'-O-methyl ribonucleotide
  modified_base 103: mod_base = OTHER; note = 2'-O-methyl ribonucleotide
  modified_base 1..4: mod_base = OTHER; note = phosphorothioate linkage
  modified_base 97..100: mod_base = OTHER; note = phosphorothioate linkage

SEQ ID NO: 2331 - RNA, 103 nt, synthetic construct; identical to SEQ ID NO: 447
  source 1..103: mol_type = other RNA
  modified_base 1: mod_base = OTHER; note = 2'-O-methyl ribonucleotide
  modified_base 2: mod_base = OTHER; note = 2'-O-methyl ribonucleotide
  modified_base 3: mod_base = OTHER; note = 2'-O-methyl ribonucleotide
  modified_base 21: mod_base = OTHER; note = 2'-O-methyl ribonucleotide
  modified_base 25: mod_base = OTHER; note = 2'-O-methyl ribonucleotide
  modified_base 26: mod_base = OTHER; note = 2'-O-methyl ribonucleotide
  modified_base 27: mod_base = OTHER; note = 2'-O-methyl ribonucleotide
  modified_base 28: mod_base = OTHER; note = 2'-O-methyl ribonucleotide
  modified_base 29: mod_base = OTHER; note = 2'-O-methyl ribonucleotide
  modified_base 30: mod_base = OTHER; note = 2'-O-methyl ribonucleotide
  modified_base 31: mod_base = OTHER; note = 2'-O-methyl ribonucleotide
  modified_base 32: mod_base = OTHER; note = 2'-O-methyl ribonucleotide
  modified_base 33: mod_base = OTHER; note = 2'-O-methyl ribonucleotide
  modified_base 34: mod_base = OTHER; note = 2'-O-methyl ribonucleotide
  modified_base 35: mod_base = OTHER; note = 2'-O-methyl ribonucleotide
  modified_base 36: mod_base = OTHER; note = 2'-O-methyl ribonucleotide
  modified_base 37: mod_base = OTHER; note = 2'-O-methyl ribonucleotide
  modified_base 38: mod_base = OTHER; note = 2'-O-methyl ribonucleotide
  modified_base 39: mod_base = OTHER; note = 2'-O-methyl ribonucleotide
  modified_base 40: mod_base = OTHER; note = 2'-O-methyl ribonucleotide
  modified_base 41: mod_base = OTHER; note = 2'-O-methyl ribonucleotide
  modified_base 42: mod_base = OTHER; note = 2'-O-methyl ribonucleotide
  modified_base 46: mod_base = OTHER; note = 2'-O-methyl ribonucleotide
  modified_base 48: mod_base = OTHER; note = 2'-O-methyl ribonucleotide
  modified_base 50: mod_base = OTHER; note = 2'-O-methyl ribonucleotide
  modified_base 51: mod_base = OTHER; note = 2'-O-methyl ribonucleotide
  modified_base 52: mod_base = OTHER; note = 2'-O-methyl ribonucleotide
  modified_base 53: mod_base = OTHER; note = 2'-O-methyl ribonucleotide
  modified_base 54: mod_base = OTHER; note = 2'-O-methyl ribonucleotide
  modified_base 55: mod_base = OTHER; note = 2'-O-methyl ribonucleotide
  modified_base 56: mod_base = OTHER; note = 2'-O-methyl ribonucleotide
  modified_base 57: mod_base = OTHER; note = 2'-O-methyl ribonucleotide
  modified_base 59: mod_base = OTHER; note = 2'-O-methyl ribonucleotide
  modified_base 60: mod_base = OTHER; note = 2'-O-methyl ribonucleotide
  modified_base 61: mod_base = OTHER; note = 2'-O-methyl ribonucleotide
  modified_base 62: mod_base = OTHER; note = 2'-O-methyl ribonucleotide
  modified_base 65: mod_base = OTHER; note = 2'-O-methyl ribonucleotide
  modified_base 66: mod_base = OTHER; note = 2'-O-methyl ribonucleotide
  modified_base 67: mod_base = OTHER; note = 2'-O-methyl ribonucleotide
  modified_base 68: mod_base = OTHER; note = 2'-O-methyl ribonucleotide
  modified_base 69: mod_base = OTHER; note = 2'-O-methyl ribonucleotide
  modified_base 70: mod_base = OTHER; note = 2'-O-methyl ribonucleotide
  modified_base 71: mod_base = OTHER; note = 2'-O-methyl ribonucleotide
  modified_base 72: mod_base = OTHER; note = 2'-O-methyl ribonucleotide
  modified_base 73: mod_base = OTHER; note = 2'-O-methyl ribonucleotide
  modified_base 74: mod_base = OTHER; note = 2'-O-methyl ribonucleotide
  modified_base 75: mod_base = OTHER; note = 2'-O-methyl ribonucleotide
  modified_base 76: mod_base = OTHER; note = 2'-O-methyl ribonucleotide
  modified_base 77: mod_base = OTHER; note = 2'-O-methyl ribonucleotide
  modified_base 78: mod_base = OTHER; note = 2'-O-methyl ribonucleotide
  modified_base 79: mod_base = OTHER; note = 2'-O-methyl ribonucleotide
  modified_base 80: mod_base = OTHER; note = 2'-O-methyl ribonucleotide
  modified_base 81: mod_base = OTHER; note = 2'-O-methyl ribonucleotide
  modified_base 82: mod_base = OTHER; note = 2'-O-methyl ribonucleotide
  modified_base 83: mod_base = OTHER; note = 2'-O-methyl ribonucleotide
  modified_base 84: mod_base = OTHER; note = 2'-O-methyl ribonucleotide
  modified_base 85: mod_base = OTHER; note = 2'-O-methyl ribonucleotide
  modified_base 86: mod_base = OTHER; note = 2'-O-methyl ribonucleotide
  modified_base 87: mod_base = OTHER; note = 2'-O-methyl ribonucleotide
  modified_base 88: mod_base = OTHER; note = 2'-O-methyl ribonucleotide
  modified_base 89: mod_base = OTHER; note = 2'-O-methyl ribonucleotide
  modified_base 90: mod_base = OTHER; note = 2'-O-methyl ribonucleotide
  modified_base 91: mod_base = OTHER; note = 2'-O-methyl ribonucleotide
  modified_base 92: mod_base = OTHER; note = 2'-O-methyl ribonucleotide
  modified_base 93: mod_base = OTHER; note = 2'-O-methyl ribonucleotide
  modified_base 94: mod_base = OTHER; note = 2'-O-methyl ribonucleotide
  modified_base 95: mod_base = OTHER; note = 2'-O-methyl ribonucleotide
  modified_base 96: mod_base = OTHER; note = 2'-O-methyl ribonucleotide
  modified_base 97: mod_base = OTHER; note = 2'-O-methyl ribonucleotide
  modified_base 98: mod_base = OTHER; note = 2'-O-methyl ribonucleotide
  modified_base 99: mod_base = OTHER; note = 2'-O-methyl ribonucleotide
  modified_base 100: mod_base = OTHER; note = 2'-O-methyl ribonucleotide
  modified_base 101: mod_base = OTHER; note = 2'-O-methyl ribonucleotide
  modified_base 102: mod_base = OTHER; note = 2'-O-methyl ribonucleotide
  modified_base 103: mod_base = OTHER; note = 2'-O-methyl ribonucleotide
  modified_base 1..4: mod_base = OTHER; note = phosphorothioate linkage
  modified_base 97..100: mod_base = OTHER; note = phosphorothioate linkage

SEQ ID NO: 2332 - RNA, 103 nt, synthetic construct; identical to SEQ ID NO: 447
  source 1..103: mol_type = other RNA
  modified_base 1: mod_base = OTHER; note = 2'-O-methyl ribonucleotide
  modified_base 2: mod_base = OTHER; note = 2'-O-methyl ribonucleotide
  modified_base 3: mod_base = OTHER; note = 2'-O-methyl ribonucleotide
  modified_base 21: mod_base = OTHER; note = 2'-O-methyl ribonucleotide
  modified_base 28: mod_base = OTHER; note = 2'-O-methyl ribonucleotide
  modified_base 29: mod_base = OTHER; note = 2'-O-methyl ribonucleotide
  modified_base 30: mod_base = OTHER; note = 2'-O-methyl ribonucleotide
  modified_base 31: mod_base = OTHER; note = 2'-O-methyl ribonucleotide
  modified_base 32: mod_base = OTHER; note = 2'-O-methyl ribonucleotide
  modified_base 33: mod_base = OTHER; note = 2'-O-methyl ribonucleotide
  modified_base 34: mod_base = OTHER; note = 2'-O-methyl ribonucleotide
  modified_base 35: mod_base = OTHER; note = 2'-O-methyl ribonucleotide
  modified_base 36: mod_base = OTHER; note = 2'-O-methyl ribonucleotide
  modified_base 37: mod_base = OTHER; note = 2'-O-methyl ribonucleotide
  modified_base 38: mod_base = OTHER; note = 2'-O-methyl ribonucleotide
  modified_base 39: mod_base = OTHER; note = 2'-O-methyl ribonucleotide
  modified_base 40: mod_base = OTHER; note = 2'-O-methyl ribonucleotide
  modified_base 41: mod_base = OTHER; note = 2'-O-methyl ribonucleotide
  modified_base 42: mod_base = OTHER; note = 2'-O-methyl ribonucleotide
  modified_base 46: mod_base = OTHER; note = 2'-O-methyl ribonucleotide
  modified_base 48: mod_base = OTHER; note = 2'-O-methyl ribonucleotide
  modified_base 50: mod_base = OTHER; note = 2'-O-methyl ribonucleotide
  modified_base 52: mod_base = OTHER; note = 2'-O-methyl ribonucleotide
  modified_base 53: mod_base = OTHER; note = 2'-O-methyl ribonucleotide
  modified_base 54: mod_base = OTHER; note = 2'-O-methyl ribonucleotide
  modified_base 55: mod_base = OTHER; note = 2'-O-methyl ribonucleotide
  modified_base 56: mod_base = OTHER; note = 2'-O-methyl ribonucleotide
  modified_base 57: mod_base = OTHER; note = 2'-O-methyl ribonucleotide
  modified_base 60: mod_base = OTHER; note = 2'-O-methyl ribonucleotide
  modified_base 61: mod_base = OTHER; note = 2'-O-methyl ribonucleotide
  modified_base 66: mod_base = OTHER; note = 2'-O-methyl ribonucleotide
  modified_base 67: mod_base = OTHER; note = 2'-O-methyl ribonucleotide
  modified_base 70: mod_base = OTHER; note = 2'-O-methyl ribonucleotide
  modified_base 71: mod_base = OTHER; note = 2'-O-methyl ribonucleotide
  modified_base 72: mod_base = OTHER; note = 2'-O-methyl ribonucleotide
  modified_base 73: mod_base = OTHER; note = 2'-O-methyl ribonucleotide
  modified_base 74: mod_base = OTHER; note = 2'-O-methyl ribonucleotide
  modified_base 75: mod_base = OTHER; note = 2'-O-methyl ribonucleotide
  modified_base 76: mod_base = OTHER; note = 2'-O-methyl ribonucleotide
  modified_base 77: mod_base = OTHER; note = 2'-O-methyl ribonucleotide
  modified_base 78: mod_base = OTHER; note = 2'-O-methyl ribonucleotide
  modified_base 79: mod_base = OTHER; note = 2'-O-methyl ribonucleotide
  modified_base 80: mod_base = OTHER; note = 2'-O-methyl ribonucleotide
  modified_base 81: mod_base = OTHER; note = 2'-O-methyl ribonucleotide
  modified_base 83: mod_base = OTHER; note = 2'-O-methyl ribonucleotide
  modified_base 84: mod_base = OTHER; note = 2'-O-methyl ribonucleotide
  modified_base 85: mod_base = OTHER; note = 2'-O-methyl ribonucleotide
  modified_base 86: mod_base = OTHER; note = 2'-O-methyl ribonucleotide
  modified_base 87: mod_base = OTHER; note = 2'-O-methyl ribonucleotide
  modified_base 88: mod_base = OTHER; note = 2'-O-methyl ribonucleotide
  modified_base 89: mod_base = OTHER; note = 2'-O-methyl ribonucleotide
  modified_base 90: mod_base = OTHER; note = 2'-O-methyl ribonucleotide
  modified_base 91: mod_base = OTHER; note = 2'-O-methyl ribonucleotide
  modified_base 92: mod_base = OTHER; note = 2'-O-methyl ribonucleotide
  modified_base 93: mod_base = OTHER; note = 2'-O-methyl ribonucleotide
  modified_base 94: mod_base = OTHER; note = 2'-O-methyl ribonucleotide
  modified_base 95: mod_base = OTHER; note = 2'-O-methyl ribonucleotide
  modified_base 96: mod_base = OTHER; note = 2'-O-methyl ribonucleotide
  modified_base 97: mod_base = OTHER; note = 2'-O-methyl ribonucleotide
  modified_base 98: mod_base = OTHER; note = 2'-O-methyl ribonucleotide
  modified_base 99: mod_base = OTHER; note = 2'-O-methyl ribonucleotide
  modified_base 100: mod_base = OTHER; note = 2'-O-methyl ribonucleotide
  modified_base 101: mod_base = OTHER; note = 2'-O-methyl ribonucleotide
  modified_base 102: mod_base = OTHER; note = 2'-O-methyl ribonucleotide
  modified_base 103: mod_base = OTHER; note = 2'-O-methyl ribonucleotide
  modified_base 1..4: mod_base = OTHER; note = phosphorothioate linkage
  modified_base 97..100: mod_base = OTHER; note = phosphorothioate linkage

SEQ ID NO: 2333 - RNA, 103 nt, synthetic construct; identical to SEQ ID NO: 447
  source 1..103: mol_type = other RNA
  modified_base 1: mod_base = OTHER; note = 2'-O-methyl ribonucleotide
  modified_base 2: mod_base = OTHER; note = 2'-O-methyl ribonucleotide
  modified_base 3: mod_base = OTHER; note = 2'-O-methyl ribonucleotide
  modified_base 21: mod_base = OTHER; note = 2'-O-methyl ribonucleotide
  modified_base 28: mod_base = OTHER; note = 2'-O-methyl ribonucleotide
  modified_base 29: mod_base = OTHER; note = 2'-O-methyl ribonucleotide
  modified_base 30: mod_base = OTHER; note = 2'-O-methyl ribonucleotide
  modified_base 31: mod_base = OTHER; note = 2'-O-methyl ribonucleotide
  modified_base 32: mod_base = OTHER; note = 2'-O-methyl ribonucleotide
  modified_base 34: mod_base = OTHER; note = 2'-O-methyl ribonucleotide
  modified_base 35: mod_base = OTHER; note = 2'-O-methyl ribonucleotide
  modified_base 36: mod_base = OTHER; note = 2'-O-methyl ribonucleotide
  modified_base 37: mod_base = OTHER; note = 2'-O-methyl ribonucleotide
  modified_base 38: mod_base = OTHER; note = 2'-O-methyl ribonucleotide
  modified_base 39: mod_base = OTHER; note = 2'-O-methyl ribonucleotide
  modified_base 40: mod_base = OTHER; note = 2'-O-methyl ribonucleotide
  modified_base 41: mod_base = OTHER; note = 2'-O-methyl ribonucleotide
  modified_base 42: mod_base = OTHER; note = 2'-O-methyl ribonucleotide
  modified_base 46: mod_base = OTHER; note = 2'-O-methyl ribonucleotide
  modified_base 48: mod_base = OTHER; note = 2'-O-methyl ribonucleotide
  modified_base 50: mod_base = OTHER; note = 2'-O-methyl ribonucleotide
  modified_base 52: mod_base = OTHER; note = 2'-O-methyl ribonucleotide
  modified_base 53: mod_base = OTHER; note = 2'-O-methyl ribonucleotide
  modified_base 54: mod_base = OTHER; note = 2'-O-methyl ribonucleotide
  modified_base 55: mod_base = OTHER; note = 2'-O-methyl ribonucleotide
  modified_base 56: mod_base = OTHER; note = 2'-O-methyl ribonucleotide
  modified_base 57: mod_base = OTHER; note = 2'-O-methyl ribonucleotide
  modified_base 60: mod_base = OTHER; note = 2'-O-methyl ribonucleotide
  modified_base 61: mod_base = OTHER; note = 2'-O-methyl ribonucleotide
  modified_base 66: mod_base = OTHER; note = 2'-O-methyl ribonucleotide
  modified_base 67: mod_base = OTHER; note = 2'-O-methyl ribonucleotide
  modified_base 70: mod_base = OTHER; note = 2'-O-methyl ribonucleotide
  modified_base 71: mod_base = OTHER; note = 2'-O-methyl ribonucleotide
  modified_base 72: mod_base = OTHER; note = 2'-O-methyl ribonucleotide
  modified_base 74: mod_base = OTHER; note = 2'-O-methyl ribonucleotide
  modified_base 75: mod_base = OTHER; note = 2'-O-methyl ribonucleotide
  modified_base 76: mod_base = OTHER; note = 2'-O-methyl ribonucleotide
  modified_base 77: mod_base = OTHER; note = 2'-O-methyl ribonucleotide
  modified_base 78: mod_base = OTHER; note = 2'-O-methyl ribonucleotide
  modified_base 79: mod_base = OTHER; note = 2'-O-methyl ribonucleotide
  modified_base 80: mod_base = OTHER; note = 2'-O-methyl ribonucleotide
  modified_base 81: mod_base = OTHER; note = 2'-O-methyl ribonucleotide
  modified_base 83: mod_base = OTHER; note = 2'-O-methyl ribonucleotide
  modified_base 84: mod_base = OTHER; note = 2'-O-methyl ribonucleotide
  modified_base 85: mod_base = OTHER; note = 2'-O-methyl ribonucleotide
  modified_base 86: mod_base = OTHER; note = 2'-O-methyl ribonucleotide
  modified_base 87: mod_base = OTHER; note = 2'-O-methyl ribonucleotide
  modified_base 88: mod_base = OTHER; note = 2'-O-methyl ribonucleotide
  modified_base 89: mod_base = OTHER; note = 2'-O-methyl ribonucleotide
  modified_base 90: mod_base = OTHER; note = 2'-O-methyl ribonucleotide
  modified_base 91: mod_base = OTHER; note = 2'-O-methyl ribonucleotide
  modified_base 92: mod_base = OTHER; note = 2'-O-methyl ribonucleotide
  modified_base 93: mod_base = OTHER; note = 2'-O-methyl ribonucleotide
  modified_base 94: mod_base = OTHER; note = 2'-O-methyl ribonucleotide
  modified_base 95: mod_base = OTHER; note = 2'-O-methyl ribonucleotide
  modified_base 96: mod_base = OTHER; note = 2'-O-methyl ribonucleotide
  modified_base 97: mod_base = OTHER; note = 2'-O-methyl ribonucleotide
  modified_base 98: mod_base = OTHER; note = 2'-O-methyl ribonucleotide
  modified_base 99: mod_base = OTHER; note = 2'-O-methyl ribonucleotide
  modified_base 100: mod_base = OTHER; note = 2'-O-methyl ribonucleotide
  modified_base 101: mod_base = OTHER; note = 2'-O-methyl ribonucleotide
  modified_base 103: mod_base = OTHER; note = 2'-O-methyl ribonucleotide
  modified_base 1..4: mod_base = OTHER; note = phosphorothioate linkage
  modified_base 97..100: mod_base = OTHER; note = phosphorothioate linkage

SEQ ID NO: 2334 - RNA, 103 nt, synthetic construct; identical to SEQ ID NO: 447
  source 1..103: mol_type = other RNA
  modified_base 1: mod_base = OTHER; note = 2'-O-methyl ribonucleotide
  modified_base 2: mod_base = OTHER; note = 2'-O-methyl ribonucleotide
  modified_base 3: mod_base = OTHER; note = 2'-O-methyl ribonucleotide
  modified_base 21: mod_base = OTHER; note = 2'-O-methyl ribonucleotide
  modified_base 28: mod_base = OTHER; note = 2'-O-methyl ribonucleotide
  modified_base 29: mod_base = OTHER; note = 2'-O-methyl ribonucleotide
  modified_base 30: mod_base = OTHER; note = 2'-O-methyl ribonucleotide
  modified_base 31: mod_base = OTHER; note = 2'-O-methyl ribonucleotide
  modified_base 32: mod_base = OTHER; note = 2'-O-methyl ribonucleotide
  modified_base 33: mod_base = OTHER; note = 2'-O-methyl ribonucleotide
  modified_base 34: mod_base = OTHER; note = 2'-O-methyl ribonucleotide
  modified_base 35: mod_base = OTHER; note = 2'-O-methyl ribonucleotide
  modified_base 36: mod_base = OTHER; note = 2'-O-methyl ribonucleotide
  modified_base 37: mod_base = OTHER; note = 2'-O-methyl ribonucleotide
  modified_base 38: mod_base = OTHER; note = 2'-O-methyl ribonucleotide
  modified_base 39: mod_base = OTHER; note = 2'-O-methyl ribonucleotide
  modified_base 40: mod_base = OTHER; note = 2'-O-methyl ribonucleotide
  modified_base 41: mod_base = OTHER; note = 2'-O-methyl ribonucleotide
  modified_base 42: mod_base = OTHER; note = 2'-O-methyl ribonucleotide
  modified_base 46: mod_base = OTHER; note = 2'-O-methyl ribonucleotide
  modified_base 48: mod_base = OTHER; note = 2'-O-methyl ribonucleotide
  modified_base 50: mod_base = OTHER; note = 2'-O-methyl ribonucleotide
  modified_base 52: mod_base = OTHER; note = 2'-O-methyl ribonucleotide
  modified_base 53: mod_base = OTHER; note = 2'-O-methyl ribonucleotide
  modified_base 54: mod_base = OTHER; note = 2'-O-methyl ribonucleotide
  modified_base 55: mod_base = OTHER; note = 2'-O-methyl ribonucleotide
  modified_base 56: mod_base = OTHER; note = 2'-O-methyl ribonucleotide
  modified_base 57: mod_base = OTHER; note = 2'-O-methyl ribonucleotide
  modified_base 61: mod_base = OTHER; note = 2'-O-methyl ribonucleotide
  modified_base 66: mod_base = OTHER; note = 2'-O-methyl ribonucleotide
  modified_base 67: mod_base = OTHER; note = 2'-O-methyl ribonucleotide
  modified_base 70: mod_base = OTHER; note = 2'-O-methyl ribonucleotide
  modified_base 71: mod_base = OTHER; note = 2'-O-methyl ribonucleotide
  modified_base 72: mod_base = OTHER; note = 2'-O-methyl ribonucleotide
  modified_base 73: mod_base = OTHER; note = 2'-O-methyl ribonucleotide
  modified_base 74: mod_base = OTHER; note = 2'-O-methyl ribonucleotide
  modified_base 75: mod_base = OTHER; note = 2'-O-methyl ribonucleotide
  modified_base 76: mod_base = OTHER; note = 2'-O-methyl ribonucleotide
  modified_base 77: mod_base = OTHER; note = 2'-O-methyl ribonucleotide
  modified_base 78: mod_base = OTHER; note = 2'-O-methyl ribonucleotide
  modified_base 79: mod_base = OTHER; note = 2'-O-methyl ribonucleotide
  modified_base 80: mod_base = OTHER; note = 2'-O-methyl ribonucleotide
  modified_base 81: mod_base = OTHER; note = 2'-O-methyl ribonucleotide
  modified_base 82: mod_base = OTHER; note = 2'-O-methyl ribonucleotide
  modified_base 83: mod_base = OTHER; note = 2'-O-methyl ribonucleotide
  modified_base 84: mod_base = OTHER; note = 2'-O-methyl ribonucleotide
  modified_base 85: mod_base = OTHER; note = 2'-O-methyl ribonucleotide
  modified_base 86: mod_base = OTHER; note = 2'-O-methyl ribonucleotide
  modified_base 87: mod_base = OTHER; note = 2'-O-methyl ribonucleotide
  modified_base 88: mod_base = OTHER; note = 2'-O-methyl ribonucleotide
  modified_base 89: mod_base = OTHER; note = 2'-O-methyl ribonucleotide
  modified_base 90: mod_base = OTHER; note = 2'-O-methyl ribonucleotide
  modified_base 91: mod_base = OTHER; note = 2'-O-methyl ribonucleotide
  modified_base 92: mod_base = OTHER; note = 2'-O-methyl ribonucleotide
  modified_base 93: mod_base = OTHER; note = 2'-O-methyl ribonucleotide
  modified_base 94: mod_base = OTHER; note = 2'-O-methyl ribonucleotide
  modified_base 95: mod_base = OTHER; note = 2'-O-methyl ribonucleotide
  modified_base 96: mod_base = OTHER; note = 2'-O-methyl ribonucleotide
  modified_base 97: mod_base = OTHER; note = 2'-O-methyl ribonucleotide
  modified_base 98: mod_base = OTHER; note = 2'-O-methyl ribonucleotide
  modified_base 99: mod_base = OTHER; note = 2'-O-methyl ribonucleotide
  modified_base 100: mod_base = OTHER; note = 2'-O-methyl ribonucleotide
  modified_base 101: mod_base = OTHER; note = 2'-O-methyl ribonucleotide
  modified_base 103: mod_base = OTHER; note = 2'-O-methyl ribonucleotide
  modified_base 1..4: mod_base = OTHER; note = phosphorothioate linkage
  modified_base 97..100: mod_base = OTHER; note = phosphorothioate linkage

SEQ ID NO: 2335 - RNA, 103 nt, synthetic construct; identical to SEQ ID NO: 447
  source 1..103: mol_type = other RNA
  modified_base 1: mod_base = OTHER; note = 2'-O-methyl ribonucleotide
  modified_base 2: mod_base = OTHER; note = 2'-O-methyl ribonucleotide
  modified_base 3: mod_base = OTHER; note = 2'-O-methyl ribonucleotide
  modified_base 21: mod_base = OTHER; note = 2'-O-methyl ribonucleotide
  modified_base 28: mod_base = OTHER; note = 2'-O-methyl ribonucleotide
  modified_base 29: mod_base = OTHER; note = 2'-O-methyl ribonucleotide
  modified_base 30: mod_base = OTHER; note = 2'-O-methyl ribonucleotide
  modified_base 31: mod_base = OTHER; note = 2'-O-methyl ribonucleotide
  modified_base 32: mod_base = OTHER; note = 2'-O-methyl ribonucleotide
  modified_base 33: mod_base = OTHER; note = 2'-O-methyl ribonucleotide
  modified_base 34: mod_base = OTHER; note = 2'-O-methyl ribonucleotide
  modified_base 35: mod_base = OTHER; note = 2'-O-methyl ribonucleotide
  modified_base 36: mod_base = OTHER; note = 2'-O-methyl ribonucleotide
  modified_base 37: mod_base = OTHER; note = 2'-O-methyl ribonucleotide
  modified_base 38: mod_base = OTHER; note = 2'-O-methyl ribonucleotide
  modified_base 39: mod_base = OTHER; note = 2'-O-methyl ribonucleotide
  modified_base 40: mod_base = OTHER; note = 2'-O-methyl ribonucleotide
  modified_base 41: mod_base = OTHER; note = 2'-O-methyl ribonucleotide
  modified_base 42: mod_base = OTHER; note = 2'-O-methyl ribonucleotide
  modified_base 46: mod_base = OTHER; note = 2'-O-methyl ribonucleotide
  modified_base 48: mod_base = OTHER; note = 2'-O-methyl ribonucleotide
  modified_base 50: mod_base = OTHER; note = 2'-O-methyl ribonucleotide
  modified_base 52: mod_base = OTHER; note = 2'-O-methyl ribonucleotide
  modified_base 53: mod_base = OTHER; note = 2'-O-methyl ribonucleotide
  modified_base 54: mod_base = OTHER; note = 2'-O-methyl ribonucleotide
  modified_base 55: mod_base = OTHER; note = 2'-O-methyl ribonucleotide
  modified_base 56: mod_base = OTHER; note = 2'-O-methyl ribonucleotide
  modified_base 57: mod_base = OTHER; note = 2'-O-methyl ribonucleotide
  modified_base 59: mod_base = OTHER; note = 2'-O-methyl ribonucleotide
  modified_base 61: mod_base = OTHER; note = 2'-O-methyl ribonucleotide
  modified_base 65: mod_base = OTHER; note = 2'-O-methyl ribonucleotide
  modified_base 66: mod_base = OTHER; note = 2'-O-methyl ribonucleotide
  modified_base 67: mod_base = OTHER; note = 2'-O-methyl ribonucleotide
  modified_base 70: mod_base = OTHER; note = 2'-O-methyl ribonucleotide
  modified_base 71: mod_base = OTHER; note = 2'-O-methyl ribonucleotide
  modified_base 72: mod_base = OTHER; note = 2'-O-methyl ribonucleotide
  modified_base 73: mod_base = OTHER; note = 2'-O-methyl ribonucleotide
  modified_base 74: mod_base = OTHER; note = 2'-O-methyl ribonucleotide
  modified_base 75: mod_base = OTHER; note = 2'-O-methyl ribonucleotide
  modified_base 76: mod_base = OTHER; note = 2'-O-methyl ribonucleotide
  modified_base 77: mod_base = OTHER; note = 2'-O-methyl ribonucleotide
  modified_base 78: mod_base = OTHER; note = 2'-O-methyl ribonucleotide
  modified_base 79: mod_base = OTHER; note = 2'-O-methyl ribonucleotide
  modified_base 80: mod_base = OTHER; note = 2'-O-methyl ribonucleotide
  modified_base 81: mod_base = OTHER; note = 2'-O-methyl ribonucleotide
  modified_base 82: mod_base = OTHER; note = 2'-O-methyl ribonucleotide
  modified_base 83: mod_base = OTHER; note = 2'-O-methyl ribonucleotide
  modified_base 84: mod_base = OTHER; note = 2'-O-methyl ribonucleotide
  modified_base 85: mod_base = OTHER; note = 2'-O-methyl ribonucleotide
  modified_base 86: mod_base = OTHER; note = 2'-O-methyl ribonucleotide
  modified_base 87: mod_base = OTHER; note = 2'-O-methyl ribonucleotide
  modified_base 88: mod_base = OTHER; note = 2'-O-methyl ribonucleotide
  modified_base 89: mod_base = OTHER; note = 2'-O-methyl ribonucleotide
  modified_base 90: mod_base = OTHER; note = 2'-O-methyl ribonucleotide
  modified_base 91: mod_base = OTHER; note = 2'-O-methyl ribonucleotide
  modified_base 92: mod_base = OTHER; note = 2'-O-methyl ribonucleotide
  modified_base 93: mod_base = OTHER; note = 2'-O-methyl ribonucleotide
  modified_base 94: mod_base = OTHER; note = 2'-O-methyl ribonucleotide
  modified_base 95: mod_base = OTHER; note = 2'-O-methyl ribonucleotide
  modified_base 96: mod_base = OTHER; note = 2'-O-methyl ribonucleotide
  modified_base 97: mod_base = OTHER; note = 2'-O-methyl ribonucleotide
  modified_base 98: mod_base = OTHER; note = 2'-O-methyl ribonucleotide
  modified_base 99: mod_base = OTHER; note = 2'-O-methyl ribonucleotide
  modified_base 100: mod_base = OTHER; note = 2'-O-methyl ribonucleotide
  modified_base 101: mod_base = OTHER; note = 2'-O-methyl ribonucleotide
  modified_base 103: mod_base = OTHER; note = 2'-O-methyl ribonucleotide
  modified_base 1..4: mod_base = OTHER; note = phosphorothioate linkage
  modified_base 97..100: mod_base = OTHER; note = phosphorothioate linkage

SEQ ID NO: 2336 - RNA, 103 nt, synthetic construct; identical to SEQ ID NO: 447
  source 1..103: mol_type = other RNA
  modified_base 1: mod_base = OTHER; note = 2'-O-methyl ribonucleotide
  modified_base 2: mod_base = OTHER; note = 2'-O-methyl ribonucleotide
  modified_base 3: mod_base = OTHER; note = 2'-O-methyl ribonucleotide
  modified_base 21: mod_base = OTHER; note = 2'-O-methyl ribonucleotide
  modified_base 25: mod_base = OTHER; note = 2'-O-methyl ribonucleotide
  modified_base 26: mod_base = OTHER; note = 2'-O-methyl ribonucleotide
  modified_base 27: mod_base = OTHER; note = 2'-O-methyl ribonucleotide
  modified_base 28: mod_base = OTHER; note = 2'-O-methyl ribonucleotide
  modified_base 29: mod_base = OTHER; note = 2'-O-methyl ribonucleotide
  modified_base 30: mod_base = OTHER; note = 2'-O-methyl ribonucleotide
  modified_base 31: mod_base = OTHER; note = 2'-O-methyl ribonucleotide
  modified_base 32: mod_base = OTHER; note = 2'-O-methyl ribonucleotide
  modified_base 33: mod_base = OTHER; note = 2'-O-methyl ribonucleotide
  modified_base 34: mod_base = OTHER; note = 2'-O-methyl ribonucleotide
  modified_base 35: mod_base = OTHER; note = 2'-O-methyl ribonucleotide
  modified_base 36: mod_base = OTHER; note = 2'-O-methyl ribonucleotide
  modified_base 37: mod_base = OTHER; note = 2'-O-methyl ribonucleotide
  modified_base 38: mod_base = OTHER; note = 2'-O-methyl ribonucleotide
  modified_base 39: mod_base = OTHER; note = 2'-O-methyl ribonucleotide
  modified_base 40: mod_base = OTHER; note = 2'-O-methyl ribonucleotide
  modified_base 41: mod_base = OTHER; note = 2'-O-methyl ribonucleotide
  modified_base 42: mod_base = OTHER; note = 2'-O-methyl ribonucleotide
  modified_base 46: mod_base = OTHER; note = 2'-O-methyl ribonucleotide
  modified_base 48: mod_base = OTHER; note = 2'-O-methyl ribonucleotide
  modified_base 50: mod_base = OTHER; note = 2'-O-methyl ribonucleotide
  modified_base 51: mod_base = OTHER; note = 2'-O-methyl ribonucleotide
  modified_base 52: mod_base = OTHER; note = 2'-O-methyl ribonucleotide
  modified_base 53: mod_base = OTHER; note = 2'-O-methyl ribonucleotide
  modified_base 54: mod_base = OTHER; note = 2'-O-methyl ribonucleotide
  modified_base 55: mod_base = OTHER; note = 2'-O-methyl ribonucleotide
  modified_base 56: mod_base = OTHER; note = 2'-O-methyl ribonucleotide
  modified_base 57: mod_base = OTHER; note = 2'-O-methyl ribonucleotide
  modified_base 59: mod_base = OTHER; note = 2'-O-methyl ribonucleotide
  modified_base 60: mod_base = OTHER; note = 2'-O-methyl ribonucleotide
  modified_base 61: mod_base = OTHER; note = 2'-O-methyl ribonucleotide
  modified_base 62: mod_base = OTHER; note = 2'-O-methyl ribonucleotide
  modified_base 65: mod_base = OTHER; note = 2'-O-methyl ribonucleotide
  modified_base 66: mod_base = OTHER; note = 2'-O-methyl ribonucleotide
  modified_base 67: mod_base = OTHER; note = 2'-O-methyl ribonucleotide
  modified_base 68: mod_base = OTHER; note = 2'-O-methyl ribonucleotide
  modified_base 69: mod_base = OTHER; note = 2'-O-methyl ribonucleotide
  modified_base 70: mod_base = OTHER; note = 2'-O-methyl ribonucleotide
  modified_base 71: mod_base = OTHER; note = 2'-O-methyl ribonucleotide
  modified_base 72: mod_base = OTHER; note = 2'-O-methyl ribonucleotide
  modified_base 73: mod_base = OTHER; note = 2'-O-methyl ribonucleotide
  modified_base 74: mod_base = OTHER; note = 2'-O-methyl ribonucleotide
  modified_base 75: mod_base = OTHER; note = 2'-O-methyl ribonucleotide
  modified_base 76: mod_base = OTHER; note = 2'-O-methyl ribonucleotide
  modified_base 77: mod_base = OTHER; note = 2'-O-methyl ribonucleotide
  modified_base 78: mod_base = OTHER; note = 2'-O-methyl ribonucleotide
  modified_base 79: mod_base = OTHER; note = 2'-O-methyl ribonucleotide
  modified_base 80: mod_base = OTHER; note = 2'-O-methyl ribonucleotide
  modified_base 81: mod_base = OTHER; note = 2'-O-methyl ribonucleotide
  modified_base 82: mod_base = OTHER; note = 2'-O-methyl ribonucleotide
  modified_base 83: mod_base = OTHER; note = 2'-O-methyl ribonucleotide
  modified_base 84: mod_base = OTHER; note = 2'-O-methyl ribonucleotide
  modified_base 85: mod_base = OTHER; note = 2'-O-methyl ribonucleotide
  modified_base 86: mod_base = OTHER; note = 2'-O-methyl ribonucleotide
  modified_base 87: mod_base = OTHER; note = 2'-O-methyl ribonucleotide
  modified_base 88: mod_base = OTHER; note = 2'-O-methyl ribonucleotide
  modified_base 89: mod_base = OTHER; note = 2'-O-methyl ribonucleotide
  modified_base 90: mod_base = OTHER; note = 2'-O-methyl ribonucleotide
  modified_base 91: mod_base = OTHER; note = 2'-O-methyl ribonucleotide
  modified_base 92: mod_base = OTHER; note = 2'-O-methyl ribonucleotide
  modified_base 93: mod_base = OTHER; note = 2'-O-methyl ribonucleotide
  modified_base 94: mod_base = OTHER; note = 2'-O-methyl ribonucleotide
  modified_base 95: mod_base = OTHER; note = 2'-O-methyl ribonucleotide
  modified_base 96: mod_base = OTHER; note = 2'-O-methyl ribonucleotide
  modified_base 97: mod_base = OTHER; note = 2'-O-methyl ribonucleotide
  modified_base 98: mod_base = OTHER; note = 2'-O-methyl ribonucleotide
  modified_base 99: mod_base = OTHER; note = 2'-O-methyl ribonucleotide
  modified_base 100: mod_base = OTHER; note = 2'-O-methyl ribonucleotide
  modified_base 101: mod_base = OTHER; note = 2'-O-methyl ribonucleotide
  modified_base 103: mod_base = OTHER; note = 2'-O-methyl ribonucleotide
  modified_base 1..4: mod_base = OTHER; note = phosphorothioate linkage
  modified_base 97..100: mod_base = OTHER; note = phosphorothioate linkage

SEQ ID NO: 2337 - RNA, 103 nt, synthetic construct; identical to SEQ ID NO: 447
  source 1..103: mol_type = other RNA
  modified_base 1: mod_base = OTHER; note = 2'-O-methyl ribonucleotide
  modified_base 2: mod_base = OTHER; note = 2'-O-methyl ribonucleotide
  modified_base 3: mod_base = OTHER; note = 2'-O-methyl ribonucleotide
  modified_base 21: mod_base = OTHER; note = 2'-O-methyl ribonucleotide
  modified_base 28: mod_base = OTHER; note = 2'-O-methyl ribonucleotide
  modified_base 29: mod_base = OTHER; note = 2'-O-methyl ribonucleotide
  modified_base 30: mod_base = OTHER; note = 2'-O-methyl ribonucleotide
  modified_base 31: mod_base = OTHER; note = 2'-O-methyl ribonucleotide
  modified_base 32: mod_base = OTHER; note = 2'-O-methyl ribonucleotide
  modified_base 33: mod_base = OTHER; note = 2'-O-methyl ribonucleotide
  modified_base 34: mod_base = OTHER; note = 2'-O-methyl ribonucleotide
  modified_base 35: mod_base = OTHER; note = 2'-O-methyl ribonucleotide
  modified_base 36: mod_base = OTHER; note = 2'-O-methyl ribonucleotide
  modified_base 37: mod_base = OTHER; note = 2'-O-methyl ribonucleotide
  modified_base 38: mod_base = OTHER; note = 2'-O-methyl ribonucleotide
  modified_base 39: mod_base = OTHER; note = 2'-O-methyl ribonucleotide
  modified_base 40: mod_base = OTHER; note = 2'-O-methyl ribonucleotide
  modified_base 41: mod_base = OTHER; note = 2'-O-methyl ribonucleotide
  modified_base 42: mod_base = OTHER; note = 2'-O-methyl ribonucleotide
  modified_base 46: mod_base = OTHER; note = 2'-O-methyl ribonucleotide
  modified_base 48: mod_base = OTHER; note = 2'-O-methyl ribonucleotide
  modified_base 50: mod_base = OTHER; note = 2'-O-methyl ribonucleotide
  modified_base 52: mod_base = OTHER; note = 2'-O-methyl ribonucleotide
  modified_base 53: mod_base = OTHER; note = 2'-O-methyl ribonucleotide
  modified_base 54: mod_base = OTHER; note = 2'-O-methyl ribonucleotide
  modified_base 55: mod_base = OTHER; note = 2'-O-methyl ribonucleotide
  modified_base 56: mod_base = OTHER; note = 2'-O-methyl ribonucleotide
  modified_base 57: mod_base = OTHER; note = 2'-O-methyl ribonucleotide
  modified_base 60: mod_base = OTHER; note = 2'-O-methyl ribonucleotide
  modified_base 61: mod_base = OTHER; note = 2'-O-methyl ribonucleotide
  modified_base 66: mod_base = OTHER; note = 2'-O-methyl ribonucleotide
  modified_base 67: mod_base = OTHER; note = 2'-O-methyl ribonucleotide
  modified_base 70: mod_base = OTHER; note = 2'-O-methyl ribonucleotide
  modified_base 71: mod_base = OTHER; note = 2'-O-methyl ribonucleotide
  modified_base 72: mod_base = OTHER; note = 2'-O-methyl ribonucleotide
  modified_base 73: mod_base = OTHER; note = 2'-O-methyl ribonucleotide
  modified_base 74: mod_base = OTHER; note = 2'-O-methyl ribonucleotide
  modified_base 75: mod_base = OTHER; note = 2'-O-methyl ribonucleotide
  modified_base 76: mod_base = OTHER; note = 2'-O-methyl ribonucleotide
  modified_base 77: mod_base = OTHER; note = 2'-O-methyl ribonucleotide
  modified_base 78: mod_base = OTHER; note = 2'-O-methyl ribonucleotide
  modified_base 79: mod_base = OTHER; note = 2'-O-methyl ribonucleotide
  modified_base 80: mod_base = OTHER; note = 2'-O-methyl ribonucleotide
  modified_base 81: mod_base = OTHER; note = 2'-O-methyl ribonucleotide
  modified_base 83: mod_base = OTHER; note = 2'-O-methyl ribonucleotide
  modified_base 84: mod_base = OTHER; note = 2'-O-methyl ribonucleotide
  modified_base 85: mod_base = OTHER; note = 2'-O-methyl ribonucleotide
  modified_base 86: mod_base = OTHER; note = 2'-O-methyl ribonucleotide
  modified_base 87: mod_base = OTHER; note = 2'-O-methyl ribonucleotide
  modified_base 88: mod_base = OTHER; note = 2'-O-methyl ribonucleotide
  modified_base 89: mod_base = OTHER; note = 2'-O-methyl ribonucleotide
  modified_base 90: mod_base = OTHER; note = 2'-O-methyl ribonucleotide
  modified_base 91: mod_base = OTHER; note = 2'-O-methyl ribonucleotide
  modified_base 92: mod_base = OTHER; note = 2'-O-methyl ribonucleotide
  modified_base 93: mod_base = OTHER; note = 2'-O-methyl ribonucleotide
  modified_base 94: mod_base = OTHER; note = 2'-O-methyl ribonucleotide
  modified_base 95: mod_base = OTHER; note = 2'-O-methyl ribonucleotide
  modified_base 96: mod_base = OTHER; note = 2'-O-methyl ribonucleotide
  modified_base 97: mod_base = OTHER; note = 2'-O-methyl ribonucleotide
  modified_base 98: mod_base = OTHER; note = 2'-O-methyl ribonucleotide
  modified_base 99: mod_base = OTHER; note = 2'-O-methyl ribonucleotide
  modified_base 100: mod_base = OTHER; note = 2'-O-methyl ribonucleotide
  modified_base 101: mod_base = OTHER; note = 2'-O-methyl ribonucleotide
  modified_base 103: mod_base = OTHER; note = 2'-O-methyl ribonucleotide
  modified_base 1..4: mod_base = OTHER; note = phosphorothioate linkage
  modified_base 97..100: mod_base = OTHER; note = phosphorothioate linkage

SEQ ID NO: 2338 - RNA, 103 nt, synthetic construct; identical to SEQ ID NO: 447
  source 1..103: mol_type = other RNA
  modified_base 1: mod_base = OTHER; note = 2'-O-methyl ribonucleotide
  modified_base 2: mod_base = OTHER; note = 2'-O-methyl ribonucleotide
  modified_base 3: mod_base = OTHER; note = 2'-O-methyl ribonucleotide
  modified_base 21: mod_base = OTHER; note = 2'-O-methyl ribonucleotide
  modified_base 28: mod_base = OTHER; note = 2'-O-methyl ribonucleotide
  modified_base 29: mod_base = OTHER; note = 2'-O-methyl ribonucleotide
  modified_base 30: mod_base = OTHER; note = 2'-O-methyl ribonucleotide
  modified_base 31: mod_base = OTHER; note = 2'-O-methyl ribonucleotide
  modified_base 32: mod_base = OTHER; note = 2'-O-methyl ribonucleotide
  modified_base 34: mod_base = OTHER; note = 2'-O-methyl ribonucleotide
  modified_base 35: mod_base = OTHER; note = 2'-O-methyl ribonucleotide
  modified_base 36: mod_base = OTHER; note = 2'-O-methyl ribonucleotide
  modified_base 37: mod_base = OTHER; note = 2'-O-methyl ribonucleotide
  modified_base 38: mod_base = OTHER; note = 2'-O-methyl ribonucleotide
  modified_base 39: mod_base = OTHER; note = 2'-O-methyl ribonucleotide
  modified_base 40: mod_base = OTHER; note = 2'-O-methyl ribonucleotide
  modified_base 41: mod_base = OTHER; note = 2'-O-methyl ribonucleotide
  modified_base 42: mod_base = OTHER; note = 2'-O-methyl ribonucleotide
  modified_base 46: mod_base = OTHER; note = 2'-O-methyl ribonucleotide
  modified_base 48: mod_base = OTHER; note = 2'-O-methyl ribonucleotide
  modified_base 50: mod_base = OTHER; note = 2'-O-methyl ribonucleotide
  modified_base 52: mod_base = OTHER; note = 2'-O-methyl ribonucleotide
  modified_base 53: mod_base = OTHER; note = 2'-O-methyl ribonucleotide
  modified_base 54: mod_base = OTHER; note = 2'-O-methyl ribonucleotide
  modified_base 55: mod_base = OTHER; note = 2'-O-methyl ribonucleotide
  modified_base 56: mod_base = OTHER; note = 2'-O-methyl ribonucleotide
  modified_base 57: mod_base = OTHER; note = 2'-O-methyl ribonucleotide
  modified_base 60: mod_base = OTHER; note = 2'-O-methyl ribonucleotide
  modified_base 61: mod_base = OTHER; note = 2'-O-methyl ribonucleotide
  modified_base 66: mod_base = OTHER; note = 2'-O-methyl ribonucleotide
  modified_base 67: mod_base = OTHER; note = 2'-O-methyl ribonucleotide
  modified_base 70: mod_base = OTHER; note = 2'-O-methyl ribonucleotide
  modified_base 71: mod_base = OTHER; note = 2'-O-methyl ribonucleotide
  modified_base 72: mod_base = OTHER; note = 2'-O-methyl ribonucleotide
  modified_base 74: mod_base = OTHER; note = 2'-O-methyl ribonucleotide
  modified_base 75: mod_base = OTHER; note = 2'-O-methyl ribonucleotide
  modified_base 76: mod_base = OTHER; note = 2'-O-methyl ribonucleotide
  modified_base 77: mod_base = OTHER; note = 2'-O-methyl ribonucleotide
  modified_base 78: mod_base = OTHER; note = 2'-O-methyl ribonucleotide
  modified_base 79: mod_base = OTHER; note = 2'-O-methyl ribonucleotide
  modified_base 80: mod_base = OTHER; note = 2'-O-methyl ribonucleotide
  modified_base 81: mod_base = OTHER; note = 2'-O-methyl ribonucleotide
  modified_base 83: mod_base = OTHER; note = 2'-O-methyl ribonucleotide
  modified_base 84: mod_base = OTHER; note = 2'-O-methyl ribonucleotide
  modified_base 85: mod_base = OTHER; note = 2'-O-methyl ribonucleotide
  modified_base 86: mod_base = OTHER; note = 2'-O-methyl ribonucleotide
  modified_base 87: mod_base = OTHER; note = 2'-O-methyl ribonucleotide
  modified_base 88: mod_base = OTHER; note = 2'-O-methyl ribonucleotide
  modified_base 89: mod_base = OTHER; note = 2'-O-methyl ribonucleotide
  modified_base 90: mod_base = OTHER; note = 2'-O-methyl ribonucleotide
  modified_base 91: mod_base = OTHER; note = 2'-O-methyl ribonucleotide
  modified_base 92: mod_base = OTHER; note = 2'-O-methyl ribonucleotide
  modified_base 93: mod_base = OTHER; note = 2'-O-methyl ribonucleotide
  modified_base 94: mod_base = OTHER; note = 2'-O-methyl ribonucleotide
  modified_base 95: mod_base = OTHER; note = 2'-O-methyl ribonucleotide
  modified_base 96: mod_base = OTHER; note = 2'-O-methyl ribonucleotide
  modified_base 97: mod_base = OTHER; note = 2'-O-methyl ribonucleotide
  modified_base 98: mod_base = OTHER; note = 2'-O-methyl ribonucleotide
  modified_base 99: mod_base = OTHER; note = 2'-O-methyl ribonucleotide
  modified_base 100: mod_base = OTHER; note = 2'-O-methyl ribonucleotide
  modified_base 101: mod_base = OTHER; note = 2'-O-methyl ribonucleotide
  modified_base 103: mod_base = OTHER; note = 2'-O-methyl ribonucleotide
  modified_base 1..4: mod_base = OTHER; note = phosphorothioate linkage
  modified_base 45..46: mod_base = OTHER; note = phosphorothioate linkage
  modified_base 97..100: mod_base = OTHER; note = phosphorothioate linkage

SEQ ID NO: 2339 - RNA, 103 nt, synthetic construct; identical to SEQ ID NO: 447
  source 1..103: mol_type = other RNA
  modified_base 1: mod_base = OTHER; note = 2'-O-methyl ribonucleotide
  modified_base 2: mod_base = OTHER; note = 2'-O-methyl ribonucleotide
  modified_base 3: mod_base = OTHER; note = 2'-O-methyl ribonucleotide
  modified_base 21: mod_base = OTHER; note = 2'-O-methyl ribonucleotide
  modified_base 28: mod_base = OTHER; note = 2'-O-methyl ribonucleotide
  modified_base 29: mod_base = OTHER; note = 2'-O-methyl ribonucleotide
  modified_base 30: mod_base = OTHER; note = 2'-O-methyl ribonucleotide
  modified_base 31: mod_base = OTHER; note = 2'-O-methyl ribonucleotide
  modified_base 32: mod_base = OTHER; note = 2'-O-methyl ribonucleotide
  modified_base 34: mod_base = OTHER; note = 2'-O-methyl ribonucleotide
  modified_base 35: mod_base = OTHER; note = 2'-O-methyl ribonucleotide
  modified_base 36: mod_base = OTHER; note = 2'-O-methyl ribonucleotide
  modified_base 37: mod_base = OTHER; note = 2'-O-methyl ribonucleotide
  modified_base 38: mod_base = OTHER; note = 2'-O-methyl ribonucleotide
  modified_base 39: mod_base = OTHER; note = 2'-O-methyl ribonucleotide
  modified_base 40: mod_base = OTHER; note = 2'-O-methyl ribonucleotide
  modified_base 41: mod_base = OTHER; note = 2'-O-methyl ribonucleotide
  modified_base 42: mod_base = OTHER; note = 2'-O-methyl ribonucleotide
  modified_base 46: mod_base = OTHER; note = 2'-O-methyl ribonucleotide
  modified_base 48: mod_base = OTHER; note = 2'-O-methyl ribonucleotide
  modified_base 50: mod_base = OTHER; note = 2'-O-methyl ribonucleotide
  modified_base 52: mod_base = OTHER; note = 2'-O-methyl ribonucleotide
  modified_base 53: mod_base = OTHER; note = 2'-O-methyl ribonucleotide
  modified_base 54: mod_base = OTHER; note = 2'-O-methyl ribonucleotide
  modified_base 55: mod_base = OTHER; note = 2'-O-methyl ribonucleotide
  modified_base 56: mod_base = OTHER; note = 2'-O-methyl ribonucleotide
  modified_base 57: mod_base = OTHER; note = 2'-O-methyl ribonucleotide
  modified_base 60: mod_base = OTHER; note = 2'-O-methyl ribonucleotide
  modified_base 61: mod_base = OTHER; note = 2'-O-methyl ribonucleotide
  modified_base 66: mod_base = OTHER; note = 2'-O-methyl ribonucleotide
  modified_base 67: mod_base = OTHER; note = 2'-O-methyl ribonucleotide
  modified_base 70: mod_base = OTHER; note = 2'-O-methyl ribonucleotide
  modified_base 71: mod_base = OTHER; note = 2'-O-methyl ribonucleotide
  modified_base 72: mod_base = OTHER; note = 2'-O-methyl ribonucleotide
  modified_base 74: mod_base = OTHER; note = 2'-O-methyl ribonucleotide
  modified_base 75: mod_base = OTHER; note = 2'-O-methyl ribonucleotide
  modified_base 76: mod_base = OTHER; note = 2'-O-methyl ribonucleotide
  modified_base 77: mod_base = OTHER; note = 2'-O-methyl ribonucleotide
  modified_base 78: mod_base = OTHER; note = 2'-O-methyl ribonucleotide
  modified_base 79: mod_base = OTHER; note = 2'-O-methyl ribonucleotide
  modified_base 80: mod_base = OTHER; note = 2'-O-methyl ribonucleotide
  modified_base 81: mod_base = OTHER; note = 2'-O-methyl ribonucleotide
  modified_base 83: mod_base = OTHER; note = 2'-O-methyl ribonucleotide
  modified_base 84: mod_base = OTHER; note = 2'-O-methyl ribonucleotide
  modified_base 85: mod_base = OTHER; note = 2'-O-methyl ribonucleotide
  modified_base 86: mod_base = OTHER; note = 2'-O-methyl ribonucleotide
  modified_base 87: mod_base = OTHER; note = 2'-O-methyl ribonucleotide
  modified_base 88: mod_base = OTHER; note = 2'-O-methyl ribonucleotide
  modified_base 89: mod_base = OTHER; note = 2'-O-methyl ribonucleotide
  modified_base 90: mod_base = OTHER; note = 2'-O-methyl ribonucleotide
  modified_base 91: mod_base = OTHER; note = 2'-O-methyl ribonucleotide
  modified_base 92: mod_base = OTHER; note = 2'-O-methyl ribonucleotide
  modified_base 93: mod_base = OTHER; note = 2'-O-methyl ribonucleotide
  modified_base 94: mod_base = OTHER; note = 2'-O-methyl ribonucleotide
  modified_base 95: mod_base = OTHER; note = 2'-O-methyl ribonucleotide
  modified_base 96: mod_base = OTHER; note = 2'-O-methyl ribonucleotide
  modified_base 97: mod_base = OTHER; note = 2'-O-methyl ribonucleotide
  modified_base 98: mod_base = OTHER; note = 2'-O-methyl ribonucleotide
  modified_base 99: mod_base = OTHER; note = 2'-O-methyl ribonucleotide
  modified_base 100: mod_base = OTHER; note = 2'-O-methyl ribonucleotide
  modified_base 101: mod_base = OTHER; note = 2'-O-methyl ribonucleotide
  modified_base 103: mod_base = OTHER; note = 2'-O-methyl ribonucleotide
  modified_base 1..4: mod_base = OTHER; note = phosphorothioate linkage
  modified_base 64..65: mod_base = OTHER; note = phosphorothioate linkage
  modified_base 97..100: mod_base = OTHER; note = phosphorothioate linkage

SEQ ID NO: 2340 - RNA, 100 nt, synthetic construct; identical to SEQ ID NO: 452
  source 1..100: mol_type = other RNA
  modified_base 1: mod_base = OTHER; note = 2'-O-methyl ribonucleotide
  modified_base 2: mod_base = OTHER; note = 2'-O-methyl ribonucleotide
  modified_base 3: mod_base = OTHER; note = 2'-O-methyl ribonucleotide
  modified_base 29: mod_base = OTHER; note = 2'-O-methyl ribonucleotide
  modified_base 30: mod_base = OTHER; note = 2'-O-methyl ribonucleotide
  modified_base 31: mod_base = OTHER; note = 2'-O-methyl ribonucleotide
  modified_base 32: mod_base = OTHER; note = 2'-O-methyl ribonucleotide
  modified_base 33: mod_base = OTHER; note = 2'-O-methyl ribonucleotide
  modified_base 34: mod_base = OTHER; note = 2'-O-methyl ribonucleotide
  modified_base 35: mod_base = OTHER; note = 2'-O-methyl ribonucleotide
  modified_base 36: mod_base = OTHER; note = 2'-O-methyl ribonucleotide
  modified_base 37: mod_base = OTHER; note = 2'-O-methyl ribonucleotide
  modified_base 38: mod_base = OTHER; note = 2'-O-methyl ribonucleotide
  modified_base 39: mod_base = OTHER; note = 2'-O-methyl ribonucleotide
  modified_base 40: mod_base = OTHER; note = 2'-O-methyl ribonucleotide
  modified_base 69: mod_base = OTHER; note = 2'-O-methyl ribonucleotide
  modified_base 70: mod_base = OTHER; note = 2'-O-methyl ribonucleotide
  modified_base 71: mod_base = OTHER; note = 2'-O-methyl ribonucleotide
  modified_base 72: mod_base = OTHER; note = 2'-O-methyl ribonucleotide
  modified_base 73: mod_base = OTHER; note = 2'-O-methyl ribonucleotide
  modified_base 74: mod_base = OTHER; note = 2'-O-methyl ribonucleotide
  modified_base 75: mod_base = OTHER; note = 2'-O-methyl ribonucleotide
  modified_base 76: mod_base = OTHER; note = 2'-O-methyl ribonucleotide
  modified_base 77: mod_base = OTHER; note = 2'-O-methyl ribonucleotide
  modified_base 78: mod_base = OTHER; note = 2'-O-methyl ribonucleotide
  modified_base 79: mod_base = OTHER; note = 2'-O-methyl ribonucleotide
  modified_base 80: mod_base = OTHER; note = 2'-O-methyl ribonucleotide
  modified_base 81: mod_base = OTHER; note = 2'-O-methyl ribonucleotide
  modified_base 82: mod_base = OTHER; note = 2'-O-methyl ribonucleotide
  modified_base 83: mod_base = OTHER; note = 2'-O-methyl ribonucleotide
  modified_base 84: mod_base = OTHER; note = 2'-O-methyl ribonucleotide
  modified_base 85: mod_base = OTHER; note = 2'-O-methyl ribonucleotide
  modified_base 86: mod_base = OTHER; note = 2'-O-methyl ribonucleotide
  modified_base 87: mod_base = OTHER; note = 2'-O-methyl ribonucleotide
  modified_base 88: mod_base = OTHER; note = 2'-O-methyl ribonucleotide
  modified_base 89: mod_base = OTHER; note = 2'-O-methyl ribonucleotide
  modified_base 90: mod_base = OTHER; note = 2'-O-methyl ribonucleotide
  modified_base 91: mod_base = OTHER; note = 2'-O-methyl ribonucleotide
  modified_base 92: mod_base = OTHER; note = 2'-O-methyl ribonucleotide
  modified_base 93: mod_base = OTHER; note = 2'-O-methyl ribonucleotide
  modified_base 94: mod_base = OTHER; note = 2'-O-methyl ribonucleotide
  modified_base 95: mod_base = OTHER; note = 2'-O-methyl ribonucleotide
  modified_base 96: mod_base = OTHER; note = 2'-O-methyl ribonucleotide
  modified_base 97: mod_base = OTHER; note = 2'-O-methyl ribonucleotide
  modified_base 98: mod_base = OTHER; note = 2'-O-methyl ribonucleotide
  modified_base 99: mod_base = OTHER; note = 2'-O-methyl ribonucleotide
  modified_base 100: mod_base = OTHER; note = 2'-O-methyl ribonucleotide
  modified_base 1..4: mod_base = OTHER; note = phosphorothioate linkage
  modified_base 97..100: mod_base = OTHER; note = phosphorothioate linkage

SEQ ID NO: 2341 - RNA, 100 nt, synthetic construct; identical to SEQ ID NO: 1622
  source 1..100: mol_type = other RNA
  modified_base 1: mod_base = OTHER; note = 2'-O-methyl ribonucleotide
  modified_base 2: mod_base = OTHER; note = 2'-O-methyl ribonucleotide
  modified_base 3: mod_base = OTHER; note = 2'-O-methyl ribonucleotide
  modified_base 21: mod_base = OTHER; note = 2'-O-methyl ribonucleotide
  modified_base 28: mod_base = OTHER; note = 2'-O-methyl ribonucleotide
  modified_base 29: mod_base = OTHER; note = 2'-O-methyl ribonucleotide
  modified_base 30: mod_base = OTHER; note = 2'-O-methyl ribonucleotide
  modified_base 31: mod_base = OTHER; note = 2'-O-methyl ribonucleotide
  modified_base 32: mod_base = OTHER; note = 2'-O-methyl ribonucleotide
  modified_base 33: mod_base = OTHER; note = 2'-O-methyl ribonucleotide
  modified_base 34: mod_base = OTHER; note = 2'-O-methyl ribonucleotide
  modified_base 35: mod_base = OTHER; note = 2'-O-methyl ribonucleotide
  modified_base 36: mod_base = OTHER; note = 2'-O-methyl ribonucleotide
  modified_base 37: mod_base = OTHER; note = 2'-O-methyl ribonucleotide
  modified_base 38: mod_base = OTHER; note = 2'-O-methyl ribonucleotide
  modified_base 39: mod_base = OTHER; note = 2'-O-methyl ribonucleotide
  modified_base 40: mod_base = OTHER; note = 2'-O-methyl ribonucleotide
  modified_base 41: mod_base = OTHER; note = 2'-O-methyl ribonucleotide
  modified_base 42: mod_base = OTHER; note = 2'-O-methyl ribonucleotide
  modified_base 46: mod_base = OTHER; note = 2'-O-methyl ribonucleotide
  modified_base 48: mod_base = OTHER; note = 2'-O-methyl ribonucleotide
  modified_base 50: mod_base = OTHER; note = 2'-O-methyl ribonucleotide
  modified_base 52: mod_base = OTHER; note = 2'-O-methyl ribonucleotide
  modified_base 53: mod_base = OTHER; note = 2'-O-methyl ribonucleotide
  modified_base 54: mod_base = OTHER; note = 2'-O-methyl ribonucleotide
  modified_base 55: mod_base = OTHER; note = 2'-O-methyl ribonucleotide
  modified_base 56: mod_base = OTHER; note = 2'-O-methyl ribonucleotide
  modified_base 57: mod_base = OTHER; note = 2'-O-methyl ribonucleotide
  modified_base 60: mod_base = OTHER; note = 2'-O-methyl ribonucleotide
  modified_base 61: mod_base = OTHER; note = 2'-O-methyl ribonucleotide
  modified_base 66: mod_base = OTHER; note = 2'-O-methyl ribonucleotide
  modified_base 67: mod_base = OTHER; note = 2'-O-methyl ribonucleotide
  modified_base 70: mod_base = OTHER; note = 2'-O-methyl ribonucleotide
  modified_base 71: mod_base = OTHER; note = 2'-O-methyl ribonucleotide
  modified_base 72: mod_base = OTHER; note = 2'-O-methyl ribonucleotide
  modified_base 73: mod_base = OTHER; note = 2'-O-methyl ribonucleotide
  modified_base 74: mod_base = OTHER; note = 2'-O-methyl ribonucleotide
  modified_base 75: mod_base = OTHER; note = 2'-O-methyl ribonucleotide
  modified_base 76: mod_base = OTHER; note = 2'-O-methyl ribonucleotide
  modified_base 77: mod_base = OTHER; note = 2'-O-methyl ribonucleotide
  modified_base 78: mod_base = OTHER; note = 2'-O-methyl ribonucleotide
  modified_base 79: mod_base = OTHER; note = 2'-O-methyl ribonucleotide
  modified_base 80: mod_base = OTHER; note = 2'-O-methyl ribonucleotide
  modified_base 81: mod_base = OTHER; note = 2'-O-methyl ribonucleotide
  modified_base 83: mod_base = OTHER; note = 2'-O-methyl ribonucleotide
  modified_base 84: mod_base = OTHER; note = 2'-O-methyl ribonucleotide
  modified_base 85: mod_base = OTHER; note = 2'-O-methyl ribonucleotide
  modified_base 86: mod_base = OTHER; note = 2'-O-methyl ribonucleotide
  modified_base 87: mod_base = OTHER; note = 2'-O-methyl ribonucleotide
  modified_base 88: mod_base = OTHER; note = 2'-O-methyl ribonucleotide
  modified_base 89: mod_base = OTHER; note = 2'-O-methyl ribonucleotide
  modified_base 90: mod_base = OTHER; note = 2'-O-methyl ribonucleotide
  modified_base 91: mod_base = OTHER; note = 2'-O-methyl ribonucleotide
  modified_base 92: mod_base = OTHER; note = 2'-O-methyl ribonucleotide
  modified_base 93: mod_base = OTHER; note = 2'-O-methyl ribonucleotide
  modified_base 94: mod_base = OTHER; note = 2'-O-methyl ribonucleotide
  modified_base 95: mod_base = OTHER; note = 2'-O-methyl ribonucleotide
  modified_base 96: mod_base = OTHER; note = 2'-O-methyl ribonucleotide
  modified_base 97: mod_base = OTHER; note = 2'-O-methyl ribonucleotide
  modified_base 98: mod_base = OTHER; note = 2'-O-methyl ribonucleotide
  modified_base 99: mod_base = OTHER; note = 2'-O-methyl ribonucleotide
  modified_base 100: mod_base = OTHER; note = 2'-O-methyl ribonucleotide
  modified_base 1: mod_base = OTHER; note = inosine
  modified_base 1..4: mod_base = OTHER; note = phosphorothioate linkage
  modified_base 97..100: mod_base = OTHER; note = phosphorothioate linkage

SEQ ID NO: 2342 - RNA, 99 nt, synthetic construct; identical to SEQ ID NO: 1623
  source 1..99: mol_type = other RNA
  modified_base 1: mod_base = OTHER; note = 2'-O-methyl ribonucleotide
  modified_base 2: mod_base = OTHER; note = 2'-O-methyl ribonucleotide
  modified_base 20: mod_base = OTHER; note = 2'-O-methyl ribonucleotide
  modified_base 27: mod_base = OTHER; note = 2'-O-methyl ribonucleotide
  modified_base 28: mod_base = OTHER; note = 2'-O-methyl ribonucleotide
  modified_base 29: mod_base = OTHER; note = 2'-O-methyl ribonucleotide
  modified_base 30: mod_base = OTHER; note = 2'-O-methyl ribonucleotide
  modified_base 31: mod_base = OTHER; note = 2'-O-methyl ribonucleotide
  modified_base 32: mod_base = OTHER; note = 2'-O-methyl ribonucleotide
  modified_base 33: mod_base = OTHER; note = 2'-O-methyl ribonucleotide
  modified_base 34: mod_base = OTHER; note = 2'-O-methyl ribonucleotide
  modified_base 35: mod_base = OTHER; note = 2'-O-methyl ribonucleotide
  modified_base 36: mod_base = OTHER; note = 2'-O-methyl ribonucleotide
  modified_base 37: mod_base = OTHER; note = 2'-O-methyl ribonucleotide
  modified_base 38: mod_base = OTHER; note = 2'-O-methyl ribonucleotide
  modified_base 39: mod_base = OTHER; note = 2'-O-methyl ribonucleotide
  modified_base 40: mod_base = OTHER; note = 2'-O-methyl ribonucleotide
  modified_base 41: mod_base = OTHER; note = 2'-O-methyl ribonucleotide
  modified_base 45: mod_base = OTHER; note = 2'-O-methyl ribonucleotide
  modified_base 47: mod_base = OTHER; note = 2'-O-methyl ribonucleotide
  modified_base 49: mod_base = OTHER; note = 2'-O-methyl ribonucleotide
  modified_base 51: mod_base = OTHER; note = 2'-O-methyl ribonucleotide
  modified_base 52: mod_base = OTHER; note = 2'-O-methyl ribonucleotide
  modified_base 53: mod_base = OTHER; note = 2'-O-methyl ribonucleotide
  modified_base 54: mod_base = OTHER; note = 2'-O-methyl ribonucleotide
  modified_base 55: mod_base = OTHER; note = 2'-O-methyl ribonucleotide
  modified_base 56: mod_base = OTHER; note = 2'-O-methyl ribonucleotide
  modified_base 59: mod_base = OTHER; note = 2'-O-methyl ribonucleotide
  modified_base 60: mod_base = OTHER; note = 2'-O-methyl ribonucleotide
  modified_base 65: mod_base = OTHER; note = 2'-O-methyl ribonucleotide
  modified_base 66: mod_base = OTHER; note = 2'-O-methyl ribonucleotide
  modified_base 69: mod_base = OTHER; note = 2'-O-methyl ribonucleotide
  modified_base 70: mod_base = OTHER; note = 2'-O-methyl ribonucleotide
  modified_base 71: mod_base = OTHER; note = 2'-O-methyl ribonucleotide
  modified_base 72: mod_base = OTHER; note = 2'-O-methyl ribonucleotide
  modified_base 73: mod_base = OTHER; note = 2'-O-methyl ribonucleotide
  modified_base 74: mod_base = OTHER; note = 2'-O-methyl ribonucleotide
  modified_base 75: mod_base = OTHER; note = 2'-O-methyl ribonucleotide
  modified_base 76: mod_base = OTHER; note = 2'-O-methyl ribonucleotide
  modified_base 77: mod_base = OTHER; note = 2'-O-methyl ribonucleotide
  modified_base 78: mod_base = OTHER; note = 2'-O-methyl ribonucleotide
  modified_base 79: mod_base = OTHER; note = 2'-O-methyl ribonucleotide
  modified_base 80: mod_base = OTHER; note = 2'-O-methyl ribonucleotide
  modified_base 82: mod_base = OTHER; note = 2'-O-methyl ribonucleotide
  modified_base 83: mod_base = OTHER; note = 2'-O-methyl ribonucleotide
  modified_base 84: mod_base = OTHER; note = 2'-O-methyl ribonucleotide
  modified_base 85: mod_base = OTHER; note = 2'-O-methyl ribonucleotide
  modified_base 86: mod_base = OTHER; note = 2'-O-methyl ribonucleotide
  modified_base 87: mod_base = OTHER; note = 2'-O-methyl ribonucleotide
  modified_base 88: mod_base = OTHER; note = 2'-O-methyl ribonucleotide
  modified_base 89: mod_base = OTHER; note = 2'-O-methyl ribonucleotide
  modified_base 90: mod_base = OTHER; note = 2'-O-methyl ribonucleotide
  modified_base 91: mod_base = OTHER; note = 2'-O-methyl ribonucleotide
  modified_base 92: mod_base = OTHER; note = 2'-O-methyl ribonucleotide
  modified_base 93: mod_base = OTHER; note = 2'-O-methyl ribonucleotide
  modified_base 94: mod_base = OTHER; note = 2'-O-methyl ribonucleotide
  modified_base 95: mod_base = OTHER; note = 2'-O-methyl ribonucleotide
  modified_base 96: mod_base = OTHER; note = 2'-O-methyl ribonucleotide
  modified_base 97: mod_base = OTHER; note = 2'-O-methyl ribonucleotide
  modified_base 98: mod_base = OTHER; note = 2'-O-methyl ribonucleotide
  modified_base 99: mod_base = OTHER; note = 2'-O-methyl ribonucleotide
  modified_base 1..3: mod_base = OTHER; note = phosphorothioate linkage
  modified_base 96..99: mod_base = OTHER; note = phosphorothioate linkage

SEQ ID NO: 2343 - RNA, 103 nt, synthetic construct; identical to SEQ ID NO: 1643
  source 1..103: mol_type = other RNA
  modified_base 1: mod_base = OTHER; note = 2'-O-methyl ribonucleotide
  modified_base 2: mod_base = OTHER; note = 2'-O-methyl ribonucleotide
  modified_base 3: mod_base = OTHER; note = 2'-O-methyl ribonucleotide
  modified_base 21: mod_base = OTHER; note = 2'-O-methyl ribonucleotide
  modified_base 28: mod_base = OTHER; note = 2'-O-methyl ribonucleotide
  modified_base 29: mod_base = OTHER; note = 2'-O-methyl ribonucleotide
  modified_base 30: mod_base = OTHER; note = 2'-O-methyl ribonucleotide
  modified_base 31: mod_base = OTHER; note = 2'-O-methyl ribonucleotide
  modified_base 32: mod_base = OTHER; note = 2'-O-methyl ribonucleotide
  modified_base 34: mod_base = OTHER; note = 2'-O-methyl ribonucleotide
  modified_base 35: mod_base = OTHER; note = 2'-O-methyl ribonucleotide
  modified_base 36: mod_base = OTHER; note = 2'-O-methyl ribonucleotide
  modified_base 37: mod_base = OTHER; note = 2'-O-methyl ribonucleotide
  modified_base 38: mod_base = OTHER; note = 2'-O-methyl ribonucleotide
  modified_base 39: mod_base = OTHER; note = 2'-O-methyl ribonucleotide
  modified_base 40: mod_base = OTHER; note = 2'-O-methyl ribonucleotide
  modified_base 41: mod_base = OTHER; note = 2'-O-methyl ribonucleotide
  modified_base 42: mod_base = OTHER; note = 2'-O-methyl ribonucleotide
  modified_base 46: mod_base = OTHER; note = 2'-O-methyl ribonucleotide
  modified_base 48: mod_base = OTHER; note = 2'-O-methyl ribonucleotide
  modified_base 50: mod_base = OTHER; note = 2'-O-methyl ribonucleotide
  modified_base 52: mod_base = OTHER; note = 2'-O-methyl ribonucleotide
  modified_base 53: mod_base = OTHER; note = 2'-O-methyl ribonucleotide
  modified_base 54: mod_base = OTHER; note = 2'-O-methyl ribonucleotide
  modified_base 57: mod_base = OTHER; note = 2'-O-methyl ribonucleotide
  modified_base 61: mod_base = OTHER; note = 2'-O-methyl ribonucleotide
  modified_base 66: mod_base = OTHER; note = 2'-O-methyl ribonucleotide
  modified_base 67: mod_base = OTHER; note = 2'-O-methyl ribonucleotide
  modified_base 70: mod_base = OTHER; note = 2'-O-methyl ribonucleotide
  modified_base 71: mod_base = OTHER; note = 2'-O-methyl ribonucleotide
  modified_base 72: mod_base = OTHER; note = 2'-O-methyl ribonucleotide
  modified_base 74: mod_base = OTHER; note = 2'-O-methyl ribonucleotide
  modified_base 75: mod_base = OTHER; note = 2'-O-methyl ribonucleotide
  modified_base 76: mod_base = OTHER; note = 2'-O-methyl ribonucleotide
  modified_base 77: mod_base = OTHER; note = 2'-O-methyl ribonucleotide
  modified_base 78: mod_base = OTHER; note = 2'-O-methyl ribonucleotide
  modified_base 79: mod_base = OTHER; note = 2'-O-methyl ribonucleotide
  modified_base 80: mod_base = OTHER; note = 2'-O-methyl ribonucleotide
  modified_base 82: mod_base = OTHER; note = 2'-O-methyl ribonucleotide
  modified_base 83: mod_base = OTHER; note = 2'-O-methyl ribonucleotide
  modified_base 84: mod_base = OTHER; note = 2'-O-methyl ribonucleotide
  modified_base 85: mod_base = OTHER; note = 2'-O-methyl ribonucleotide
  modified_base 86: mod_base = OTHER; note = 2'-O-methyl ribonucleotide
  modified_base 87: mod_base = OTHER; note = 2'-O-methyl ribonucleotide
  modified_base 89: mod_base = OTHER; note = 2'-O-methyl ribonucleotide
  modified_base 92: mod_base = OTHER; note = 2'-O-methyl ribonucleotide
  modified_base 93: mod_base = OTHER; note = 2'-O-methyl ribonucleotide
  modified_base 94: mod_base = OTHER; note = 2'-O-methyl ribonucleotide
  modified_base 95: mod_base = OTHER; note = 2'-O-methyl ribonucleotide
  modified_base 96: mod_base = OTHER; note = 2'-O-methyl ribonucleotide
  modified_base 97: mod_base = OTHER; note = 2'-O-methyl ribonucleotide
  modified_base 98: mod_base = OTHER; note = 2'-O-methyl ribonucleotide
  modified_base 99: mod_base = OTHER; note = 2'-O-methyl ribonucleotide
  modified_base 100: mod_base = OTHER; note = 2'-O-methyl ribonucleotide
  modified_base 1..4: mod_base = OTHER; note = phosphorothioate linkage
  modified_base 97..100: mod_base = OTHER; note = phosphorothioate linkage

SEQ ID NO: 2344 - RNA, 103 nt, synthetic construct; identical to SEQ ID NO: 1643
  source 1..103: mol_type = other RNA
  modified_base 1: mod_base = OTHER; note = 2'-O-methyl ribonucleotide
  modified_base 2: mod_base = OTHER; note = 2'-O-methyl ribonucleotide
  modified_base 3: mod_base = OTHER; note = 2'-O-methyl ribonucleotide
  modified_base 21: mod_base = OTHER; note = 2'-O-methyl ribonucleotide
  modified_base 28: mod_base = OTHER; note = 2'-O-methyl ribonucleotide
  modified_base 29: mod_base = OTHER; note = 2'-O-methyl ribonucleotide
  modified_base 30: mod_base = OTHER; note = 2'-O-methyl ribonucleotide
  modified_base 31: mod_base = OTHER; note = 2'-O-methyl ribonucleotide
  modified_base 32: mod_base = OTHER; note = 2'-O-methyl ribonucleotide
  modified_base 33: mod_base = OTHER; note = 2'-O-methyl ribonucleotide
  modified_base 34: mod_base = OTHER; note = 2'-O-methyl ribonucleotide
  modified_base 35: mod_base = OTHER; note = 2'-O-methyl ribonucleotide
  modified_base 36: mod_base = OTHER; note = 2'-O-methyl ribonucleotide
  modified_base 37: mod_base = OTHER; note = 2'-O-methyl ribonucleotide
  modified_base 38: mod_base = OTHER; note = 2'-O-methyl ribonucleotide
  modified_base 39: mod_base = OTHER; note = 2'-O-methyl ribonucleotide
  modified_base 40: mod_base = OTHER; note = 2'-O-methyl ribonucleotide
  modified_base 41: mod_base = OTHER; note = 2'-O-methyl ribonucleotide
  modified_base 42: mod_base = OTHER; note = 2'-O-methyl ribonucleotide
  modified_base 46: mod_base = OTHER; note = 2'-O-methyl ribonucleotide
  modified_base 48: mod_base = OTHER; note = 2'-O-methyl ribonucleotide
  modified_base 50: mod_base = OTHER; note = 2'-O-methyl ribonucleotide
  modified_base 52: mod_base = OTHER; note = 2'-O-methyl ribonucleotide
  modified_base 53: mod_base = OTHER; note = 2'-O-methyl ribonucleotide
  modified_base 54: mod_base = OTHER; note = 2'-O-methyl ribonucleotide
  modified_base 55: mod_base = OTHER; note = 2'-O-methyl ribonucleotide
  modified_base 56: mod_base = OTHER; note = 2'-O-methyl ribonucleotide
  modified_base 57: mod_base = OTHER; note = 2'-O-methyl ribonucleotide
  modified_base 60: mod_base = OTHER; note = 2'-O-methyl ribonucleotide
  modified_base 61: mod_base = OTHER; note = 2'-O-methyl ribonucleotide
  modified_base 66: mod_base = OTHER; note = 2'-O-methyl ribonucleotide
  modified_base 67: mod_base = OTHER; note = 2'-O-methyl ribonucleotide
  modified_base 70: mod_base = OTHER; note = 2'-O-methyl ribonucleotide
  modified_base 71: mod_base = OTHER; note = 2'-O-methyl ribonucleotide
  modified_base 72: mod_base = OTHER; note = 2'-O-methyl ribonucleotide
  modified_base 73: mod_base = OTHER; note = 2'-O-methyl ribonucleotide
  modified_base 74: mod_base = OTHER; note = 2'-O-methyl ribonucleotide
  modified_base 75: mod_base = OTHER; note = 2'-O-methyl ribonucleotide
  modified_base 76: mod_base = OTHER; note = 2'-O-methyl ribonucleotide
  modified_base 77: mod_base = OTHER; note = 2'-O-methyl ribonucleotide
  modified_base 78: mod_base = OTHER; note = 2'-O-methyl ribonucleotide
  modified_base 79: mod_base = OTHER; note = 2'-O-methyl ribonucleotide
  modified_base 80: mod_base = OTHER; note = 2'-O-methyl ribonucleotide
  modified_base 81: mod_base = OTHER; note = 2'-O-methyl ribonucleotide
  modified_base 83: mod_base = OTHER; note = 2'-O-methyl ribonucleotide
  modified_base 84: mod_base = OTHER; note = 2'-O-methyl ribonucleotide
  modified_base 85: mod_base = OTHER; note = 2'-O-methyl ribonucleotide
  modified_base 86: mod_base = OTHER; note = 2'-O-methyl ribonucleotide
  modified_base 87: mod_base = OTHER; note = 2'-O-methyl ribonucleotide
  modified_base 88: mod_base = OTHER; note = 2'-O-methyl ribonucleotide
  modified_base 89: mod_base = OTHER; note = 2'-O-methyl ribonucleotide
  modified_base 90: mod_base = OTHER; note = 2'-O-methyl ribonucleotide
  modified_base 91: mod_base = OTHER; note = 2'-O-methyl ribonucleotide
  modified_base 92: mod_base = OTHER; note = 2'-O-methyl ribonucleotide
  modified_base 93: mod_base = OTHER; note = 2'-O-methyl ribonucleotide
  modified_base 94: mod_base = OTHER; note = 2'-O-methyl ribonucleotide
  modified_base 95: mod_base = OTHER; note = 2'-O-methyl ribonucleotide
  modified_base 96: mod_base = OTHER; note = 2'-O-methyl ribonucleotide
  modified_base 97: mod_base = OTHER; note = 2'-O-methyl ribonucleotide
  modified_base 98: mod_base = OTHER; note = 2'-O-methyl ribonucleotide
  modified_base 99: mod_base = OTHER; note = 2'-O-methyl ribonucleotide
  modified_base 100: mod_base = OTHER; note = 2'-O-methyl ribonucleotide
  modified_base 1..4: mod_base = OTHER; note = phosphorothioate linkage
  modified_base 97..100: mod_base = OTHER; note = phosphorothioate linkage

SEQ ID NO: 2345 - RNA, 103 nt, synthetic construct; identical to SEQ ID NO: 1643
  source 1..103: mol_type = other RNA
  modified_base 1: mod_base = OTHER; note = 2'-O-methyl ribonucleotide
  modified_base 2: mod_base = OTHER; note = 2'-O-methyl ribonucleotide
  modified_base 3: mod_base = OTHER; note = 2'-O-methyl ribonucleotide
  modified_base 21: mod_base = OTHER; note = 2'-O-methyl ribonucleotide
  modified_base 28: mod_base = OTHER; note = 2'-O-methyl ribonucleotide
  modified_base 29: mod_base = OTHER; note = 2'-O-methyl ribonucleotide
  modified_base 30: mod_base = OTHER; note = 2'-O-methyl ribonucleotide
  modified_base 31: mod_base = OTHER; note = 2'-O-methyl ribonucleotide
  modified_base 32: mod_base = OTHER; note = 2'-O-methyl ribonucleotide
  modified_base 34: mod_base = OTHER; note = 2'-O-methyl ribonucleotide
  modified_base 35: mod_base = OTHER; note = 2'-O-methyl ribonucleotide
  modified_base 36: mod_base = OTHER; note = 2'-O-methyl ribonucleotide
  modified_base 37: mod_base = OTHER; note = 2'-O-methyl ribonucleotide
  modified_base 38: mod_base = OTHER; note = 2'-O-methyl ribonucleotide
  modified_base 39: mod_base = OTHER; note = 2'-O-methyl ribonucleotide
  modified_base 40: mod_base = OTHER; note = 2'-O-methyl ribonucleotide
  modified_base 41: mod_base = OTHER; note = 2'-O-methyl ribonucleotide
  modified_base 42: mod_base = OTHER; note = 2'-O-methyl ribonucleotide
  modified_base 46: mod_base = OTHER; note = 2'-O-methyl ribonucleotide
  modified_base 48: mod_base = OTHER; note = 2'-O-methyl ribonucleotide
  modified_base 50: mod_base = OTHER; note = 2'-O-methyl ribonucleotide
  modified_base 52: mod_base = OTHER; note = 2'-O-methyl ribonucleotide
  modified_base 53: mod_base = OTHER; note = 2'-O-methyl ribonucleotide
  modified_base 54: mod_base = OTHER; note = 2'-O-methyl ribonucleotide
  modified_base 55: mod_base = OTHER; note = 2'-O-methyl ribonucleotide
  modified_base 56: mod_base = OTHER; note = 2'-O-methyl ribonucleotide
  modified_base 57: mod_base = OTHER; note = 2'-O-methyl ribonucleotide
  modified_base 60: mod_base = OTHER; note = 2'-O-methyl ribonucleotide
  modified_base 61: mod_base = OTHER; note = 2'-O-methyl ribonucleotide
  modified_base 66: mod_base = OTHER; note = 2'-O-methyl ribonucleotide
  modified_base 67: mod_base = OTHER; note = 2'-O-methyl ribonucleotide
  modified_base 70: mod_base = OTHER; note = 2'-O-methyl ribonucleotide
  modified_base 71: mod_base = OTHER; note = 2'-O-methyl ribonucleotide
  modified_base 72: mod_base = OTHER; note = 2'-O-methyl ribonucleotide
  modified_base 74: mod_base = OTHER; note = 2'-O-methyl ribonucleotide
  modified_base 75: mod_base = OTHER; note = 2'-O-methyl ribonucleotide
  modified_base 76: mod_base = OTHER; note = 2'-O-methyl ribonucleotide
  modified_base 77: mod_base = OTHER; note = 2'-O-methyl ribonucleotide
  modified_base 78: mod_base = OTHER; note = 2'-O-methyl ribonucleotide
  modified_base 79: mod_base = OTHER; note = 2'-O-methyl ribonucleotide
  modified_base 80: mod_base = OTHER; note = 2'-O-methyl ribonucleotide
  modified_base 81: mod_base = OTHER; note = 2'-O-methyl ribonucleotide
  modified_base 83: mod_base = OTHER; note = 2'-O-methyl ribonucleotide
  modified_base 84: mod_base = OTHER; note = 2'-O-methyl ribonucleotide
  modified_base 85: mod_base = OTHER; note = 2'-O-methyl ribonucleotide
  modified_base 86: mod_base = OTHER; note = 2'-O-methyl ribonucleotide
  modified_base 87: mod_base = OTHER; note = 2'-O-methyl ribonucleotide
  modified_base 88: mod_base = OTHER; note = 2'-O-methyl ribonucleotide
  modified_base 89: mod_base = OTHER; note = 2'-O-methyl ribonucleotide
  modified_base 90: mod_base = OTHER; note = 2'-O-methyl ribonucleotide
  modified_base 91: mod_base = OTHER; note = 2'-O-methyl ribonucleotide
  modified_base 92: mod_base = OTHER; note = 2'-O-methyl ribonucleotide
  modified_base 93: mod_base = OTHER; note = 2'-O-methyl ribonucleotide
  modified_base 94: mod_base = OTHER; note = 2'-O-methyl ribonucleotide
  modified_base 95: mod_base = OTHER; note = 2'-O-methyl ribonucleotide
  modified_base 96: mod_base = OTHER; note = 2'-O-methyl ribonucleotide
  modified_base 97: mod_base = OTHER; note = 2'-O-methyl ribonucleotide
  modified_base 98: mod_base = OTHER; note = 2'-O-methyl ribonucleotide
  modified_base 99: mod_base = OTHER; note = 2'-O-methyl ribonucleotide
  modified_base 100: mod_base = OTHER; note = 2'-O-methyl ribonucleotide
  modified_base 1..4: mod_base = OTHER; note = phosphorothioate linkage
  modified_base 97..100: mod_base = OTHER; note = phosphorothioate linkage

SEQ ID NO: 2346 - RNA, 103 nt, synthetic construct; identical to SEQ ID NO: 1643
  source 1..103: mol_type = other RNA
  modified_base 1: mod_base = OTHER; note = 2'-O-methyl ribonucleotide
  modified_base 2: mod_base = OTHER; note = 2'-O-methyl ribonucleotide
  modified_base 3: mod_base = OTHER; note = 2'-O-methyl ribonucleotide
  modified_base 21: mod_base = OTHER; note = 2'-O-methyl ribonucleotide
  modified_base 28: mod_base = OTHER; note = 2'-O-methyl ribonucleotide
  modified_base 29: mod_base = OTHER; note = 2'-O-methyl ribonucleotide
  modified_base 30: mod_base = OTHER; note = 2'-O-methyl ribonucleotide
  modified_base 31: mod_base = OTHER; note = 2'-O-methyl ribonucleotide
  modified_base 32: mod_base = OTHER; note = 2'-O-methyl ribonucleotide
  modified_base 34: mod_base = OTHER; note = 2'-O-methyl ribonucleotide
  modified_base 35: mod_base = OTHER; note = 2'-O-methyl ribonucleotide
  modified_base 36: mod_base = OTHER; note = 2'-O-methyl ribonucleotide
  modified_base 37: mod_base = OTHER; note = 2'-O-methyl ribonucleotide
  modified_base 38: mod_base = OTHER; note = 2'-O-methyl ribonucleotide
  modified_base 39: mod_base = OTHER; note = 2'-O-methyl ribonucleotide
  modified_base 40: mod_base = OTHER; note = 2'-O-methyl ribonucleotide
  modified_base 41: mod_base = OTHER; note = 2'-O-methyl ribonucleotide
  modified_base 42: mod_base = OTHER; note = 2'-O-methyl ribonucleotide
  modified_base 46: mod_base = OTHER; note = 2'-O-methyl ribonucleotide
  modified_base 48: mod_base = OTHER; note = 2'-O-methyl ribonucleotide
  modified_base 50: mod_base = OTHER; note = 2'-O-methyl ribonucleotide
  modified_base 52: mod_base = OTHER; note = 2'-O-methyl ribonucleotide
  modified_base 53: mod_base = OTHER; note = 2'-O-methyl ribonucleotide
  modified_base 54: mod_base = OTHER; note = 2'-O-methyl ribonucleotide
  modified_base 57: mod_base = OTHER; note = 2'-O-methyl ribonucleotide
  modified_base 61: mod_base = OTHER; note = 2'-O-methyl ribonucleotide
  modified_base 66: mod_base = OTHER; note = 2'-O-methyl ribonucleotide
  modified_base 67: mod_base = OTHER; note = 2'-O-methyl ribonucleotide
  modified_base 70: mod_base = OTHER; note = 2'-O-methyl ribonucleotide
  modified_base 71: mod_base = OTHER; note = 2'-O-methyl ribonucleotide
  modified_base 72: mod_base = OTHER; note = 2'-O-methyl ribonucleotide
  modified_base 74: mod_base = OTHER; note = 2'-O-methyl ribonucleotide
  modified_base 75: mod_base = OTHER; note = 2'-O-methyl ribonucleotide
  modified_base 76: mod_base = OTHER; note = 2'-O-methyl ribonucleotide
  modified_base 77: mod_base = OTHER; note = 2'-O-methyl ribonucleotide
  modified_base 78: mod_base = OTHER; note = 2'-O-methyl ribonucleotide
  modified_base 79: mod_base = OTHER; note = 2'-O-methyl ribonucleotide
  modified_base 80: mod_base = OTHER; note = 2'-O-methyl ribonucleotide
  modified_base 82: mod_base = OTHER; note = 2'-O-methyl ribonucleotide
  modified_base 83: mod_base = OTHER; note = 2'-O-methyl ribonucleotide
  modified_base 84: mod_base = OTHER; note = 2'-O-methyl ribonucleotide
  modified_base 85: mod_base = OTHER; note = 2'-O-methyl ribonucleotide
  modified_base 86: mod_base = OTHER; note = 2'-O-methyl ribonucleotide
  modified_base 87: mod_base = OTHER; note = 2'-O-methyl ribonucleotide
  modified_base 89: mod_base = OTHER; note = 2'-O-methyl ribonucleotide
  modified_base 92: mod_base = OTHER; note = 2'-O-methyl ribonucleotide
  modified_base 93: mod_base = OTHER; note = 2'-O-methyl ribonucleotide
  modified_base 94: mod_base = OTHER; note = 2'-O-methyl ribonucleotide
  modified_base 95: mod_base = OTHER; note = 2'-O-methyl ribonucleotide
  modified_base 96: mod_base = OTHER; note = 2'-O-methyl ribonucleotide
  modified_base 97: mod_base = OTHER; note = 2'-O-methyl ribonucleotide
  modified_base 98: mod_base = OTHER; note = 2'-O-methyl ribonucleotide
  modified_base 99: mod_base = OTHER; note = 2'-O-methyl ribonucleotide
  modified_base 100: mod_base = OTHER; note = 2'-O-methyl ribonucleotide
  modified_base 1..4: mod_base = OTHER; note = phosphorothioate linkage
  modified_base 98..100: mod_base = OTHER; note = phosphorothioate linkage

SEQ ID NO: 2347 - RNA, 103 nt, synthetic construct; identical to SEQ ID NO: 1643
  source 1..103: mol_type = other RNA
  modified_base 1: mod_base = OTHER; note = 2'-O-methyl ribonucleotide
  modified_base 2: mod_base = OTHER; note = 2'-O-methyl ribonucleotide
  modified_base 3: mod_base = OTHER; note = 2'-O-methyl ribonucleotide
  modified_base 21: mod_base = OTHER; note = 2'-O-methyl ribonucleotide
  modified_base 28: mod_base = OTHER; note = 2'-O-methyl ribonucleotide
  modified_base 29: mod_base = OTHER; note = 2'-O-methyl ribonucleotide
  modified_base 30: mod_base = OTHER; note = 2'-O-methyl ribonucleotide
  modified_base 31: mod_base = OTHER; note = 2'-O-methyl ribonucleotide
  modified_base 32: mod_base = OTHER; note = 2'-O-methyl ribonucleotide
  modified_base 33: mod_base = OTHER; note = 2'-O-methyl ribonucleotide
  modified_base 34: mod_base = OTHER; note = 2'-O-methyl ribonucleotide
  modified_base 35: mod_base = OTHER; note = 2'-O-methyl ribonucleotide
  modified_base 36: mod_base = OTHER; note = 2'-O-methyl ribonucleotide
  modified_base 37: mod_base = OTHER; note = 2'-O-methyl ribonucleotide
  modified_base 38: mod_base = OTHER; note = 2'-O-methyl ribonucleotide
  modified_base 39: mod_base = OTHER; note = 2'-O-methyl ribonucleotide
  modified_base 40: mod_base = OTHER; note = 2'-O-methyl ribonucleotide
  modified_base 41: mod_base = OTHER; note = 2'-O-methyl ribonucleotide
  modified_base 42: mod_base = OTHER; note = 2'-O-methyl ribonucleotide
  modified_base 46: mod_base = OTHER; note = 2'-O-methyl ribonucleotide
  modified_base 48: mod_base = OTHER; note = 2'-O-methyl ribonucleotide
  modified_base 50: mod_base = OTHER; note = 2'-O-methyl ribonucleotide
  modified_base 52: mod_base = OTHER; note = 2'-O-methyl ribonucleotide
  modified_base 53: mod_base = OTHER; note = 2'-O-methyl ribonucleotide
  modified_base 54: mod_base = OTHER; note = 2'-O-methyl ribonucleotide
  modified_base 55: mod_base = OTHER; note = 2'-O-methyl ribonucleotide
  modified_base 56: mod_base = OTHER; note = 2'-O-methyl ribonucleotide
  modified_base 57: mod_base = OTHER; note = 2'-O-methyl ribonucleotide
  modified_base 60: mod_base = OTHER; note = 2'-O-methyl ribonucleotide
  modified_base 61: mod_base = OTHER; note = 2'-O-methyl ribonucleotide
  modified_base 66: mod_base = OTHER; note = 2'-O-methyl ribonucleotide
  modified_base 67: mod_base = OTHER; note = 2'-O-methyl ribonucleotide
  modified_base 70: mod_base = OTHER; note = 2'-O-methyl ribonucleotide
  modified_base 71: mod_base = OTHER; note = 2'-O-methyl ribonucleotide
  modified_base 72: mod_base = OTHER; note = 2'-O-methyl ribonucleotide
  modified_base 73: mod_base = OTHER; note = 2'-O-methyl ribonucleotide
  modified_base 74: mod_base = OTHER; note = 2'-O-methyl ribonucleotide
  modified_base 75: mod_base = OTHER; note = 2'-O-methyl ribonucleotide
  modified_base 76: mod_base = OTHER; note = 2'-O-methyl ribonucleotide
  modified_base 77: mod_base = OTHER; note = 2'-O-methyl ribonucleotide
  modified_base 78: mod_base = OTHER; note = 2'-O-methyl ribonucleotide
  modified_base 79: mod_base = OTHER; note = 2'-O-methyl ribonucleotide
  modified_base 80: mod_base = OTHER; note = 2'-O-methyl ribonucleotide
  modified_base 81: mod_base = OTHER; note = 2'-O-methyl ribonucleotide
  modified_base 83: mod_base = OTHER; note = 2'-O-methyl ribonucleotide
  modified_base 84: mod_base = OTHER; note = 2'-O-methyl ribonucleotide
  modified_base 85: mod_base = OTHER; note = 2'-O-methyl ribonucleotide
  modified_base 86: mod_base = OTHER; note = 2'-O-methyl ribonucleotide
  modified_base 87: mod_base = OTHER; note = 2'-O-methyl ribonucleotide
  modified_base 88: mod_base = OTHER; note = 2'-O-methyl ribonucleotide
  modified_base 89: mod_base = OTHER; note = 2'-O-methyl ribonucleotide
  modified_base 90: mod_base = OTHER; note = 2'-O-methyl ribonucleotide
  modified_base 91: mod_base = OTHER; note = 2'-O-methyl ribonucleotide
  modified_base 92: mod_base = OTHER; note = 2'-O-methyl ribonucleotide
  modified_base 93: mod_base = OTHER; note = 2'-O-methyl ribonucleotide
  modified_base 94: mod_base = OTHER; note = 2'-O-methyl ribonucleotide
  modified_base 95: mod_base = OTHER; note = 2'-O-methyl ribonucleotide
  modified_base 96: mod_base = OTHER; note = 2'-O-methyl ribonucleotide
  modified_base 97: mod_base = OTHER; note = 2'-O-methyl ribonucleotide
  modified_base 98: mod_base = OTHER; note = 2'-O-methyl ribonucleotide
  modified_base 99: mod_base = OTHER; note = 2'-O-methyl ribonucleotide
  modified_base 100: mod_base = OTHER; note = 2'-O-methyl ribonucleotide
  modified_base 1..4: mod_base = OTHER; note = phosphorothioate linkage
  modified_base 98..100: mod_base = OTHER; note = phosphorothioate linkage

SEQ ID NO: 2348 - RNA, 103 nt, synthetic construct; identical to SEQ ID NO: 1643
  source 1..103: mol_type = other RNA
  modified_base 1: mod_base = OTHER; note = 2'-O-methyl ribonucleotide
  modified_base 2: mod_base = OTHER; note = 2'-O-methyl ribonucleotide
  modified_base 3: mod_base = OTHER; note = 2'-O-methyl ribonucleotide
  modified_base 21: mod_base = OTHER; note = 2'-O-methyl ribonucleotide
  modified_base 28: mod_base = OTHER; note = 2'-O-methyl ribonucleotide
  modified_base 29: mod_base = OTHER; note = 2'-O-methyl ribonucleotide
  modified_base 30: mod_base = OTHER; note = 2'-O-methyl ribonucleotide
  modified_base 31: mod_base = OTHER; note = 2'-O-methyl ribonucleotide
  modified_base 32: mod_base = OTHER; note = 2'-O-methyl ribonucleotide
  modified_base 34: mod_base = OTHER; note = 2'-O-methyl ribonucleotide
  modified_base 35: mod_base = OTHER; note = 2'-O-methyl ribonucleotide
  modified_base 36: mod_base = OTHER; note = 2'-O-methyl ribonucleotide
  modified_base 37: mod_base = OTHER; note = 2'-O-methyl ribonucleotide
  modified_base 38: mod_base = OTHER; note = 2'-O-methyl ribonucleotide
  modified_base 39: mod_base = OTHER; note = 2'-O-methyl ribonucleotide
  modified_base 40: mod_base = OTHER; note = 2'-O-methyl ribonucleotide
  modified_base 41: mod_base = OTHER; note = 2'-O-methyl ribonucleotide
  modified_base 42: mod_base = OTHER; note = 2'-O-methyl ribonucleotide
  modified_base 46: mod_base = OTHER; note = 2'-O-methyl ribonucleotide
  modified_base 48: mod_base = OTHER; note = 2'-O-methyl ribonucleotide
  modified_base 50: mod_base = OTHER; note = 2'-O-methyl ribonucleotide
  modified_base 52: mod_base = OTHER; note = 2'-O-methyl ribonucleotide
  modified_base 53: mod_base = OTHER; note = 2'-O-methyl ribonucleotide
  modified_base 54: mod_base = OTHER; note = 2'-O-methyl ribonucleotide
  modified_base 55: mod_base = OTHER; note = 2'-O-methyl ribonucleotide
  modified_base 56: mod_base = OTHER; note = 2'-O-methyl ribonucleotide
  modified_base 57: mod_base = OTHER; note = 2'-O-methyl ribonucleotide
  modified_base 60: mod_base = OTHER; note = 2'-O-methyl ribonucleotide
  modified_base 61: mod_base = OTHER; note = 2'-O-methyl ribonucleotide
  modified_base 66: mod_base = OTHER; note = 2'-O-methyl ribonucleotide
  modified_base 67: mod_base = OTHER; note = 2'-O-methyl ribonucleotide
  modified_base 70: mod_base = OTHER; note = 2'-O-methyl ribonucleotide
  modified_base 71: mod_base = OTHER; note = 2'-O-methyl ribonucleotide
  modified_base 72: mod_base = OTHER; note = 2'-O-methyl ribonucleotide
  modified_base 74: mod_base = OTHER; note = 2'-O-methyl ribonucleotide
  modified_base 75: mod_base = OTHER; note = 2'-O-methyl ribonucleotide
  modified_base 76: mod_base = OTHER; note = 2'-O-methyl ribonucleotide
  modified_base 77: mod_base = OTHER; note = 2'-O-methyl ribonucleotide
  modified_base 78: mod_base = OTHER; note = 2'-O-methyl ribonucleotide
  modified_base 79: mod_base = OTHER; note = 2'-O-methyl ribonucleotide
  modified_base 80: mod_base = OTHER; note = 2'-O-methyl ribonucleotide
  modified_base 81: mod_base = OTHER; note = 2'-O-methyl ribonucleotide
  modified_base 83: mod_base = OTHER; note = 2'-O-methyl ribonucleotide
  modified_base 84: mod_base = OTHER; note = 2'-O-methyl ribonucleotide
  modified_base 85: mod_base = OTHER; note = 2'-O-methyl ribonucleotide
  modified_base 86: mod_base = OTHER; note = 2'-O-methyl ribonucleotide
  modified_base 87: mod_base = OTHER; note = 2'-O-methyl ribonucleotide
  modified_base 88: mod_base = OTHER; note = 2'-O-methyl ribonucleotide
  modified_base 89: mod_base = OTHER; note = 2'-O-methyl ribonucleotide
  modified_base 90: mod_base = OTHER; note = 2'-O-methyl ribonucleotide
  modified_base 91: mod_base = OTHER; note = 2'-O-methyl ribonucleotide
  modified_base 92: mod_base = OTHER; note = 2'-O-methyl ribonucleotide
  modified_base 93: mod_base = OTHER; note = 2'-O-methyl ribonucleotide
  modified_base 94: mod_base = OTHER; note = 2'-O-methyl ribonucleotide
  modified_base 95: mod_base = OTHER; note = 2'-O-methyl ribonucleotide
  modified_base 96: mod_base = OTHER; note = 2'-O-methyl ribonucleotide
  modified_base 97: mod_base = OTHER; note = 2'-O-methyl ribonucleotide
  modified_base 98: mod_base = OTHER; note = 2'-O-methyl ribonucleotide
  modified_base 99: mod_base = OTHER; note = 2'-O-methyl ribonucleotide
  modified_base 100: mod_base = OTHER; note = 2'-O-methyl ribonucleotide
  modified_base 1..4: mod_base = OTHER; note = phosphorothioate linkage
  modified_base 98..100: mod_base = OTHER; note = phosphorothioate linkage

SEQ ID NO: 2349 - RNA, 103 nt, synthetic construct; identical to SEQ ID NO: 1643
  source 1..103: mol_type = other RNA
  modified_base 1: mod_base = OTHER; note = 2'-O-methyl ribonucleotide
  modified_base 2: mod_base = OTHER; note = 2'-O-methyl ribonucleotide
  modified_base 3: mod_base = OTHER; note = 2'-O-methyl ribonucleotide
  modified_base 21: mod_base = OTHER; note = 2'-O-methyl ribonucleotide
  modified_base 28: mod_base = OTHER; note = 2'-O-methyl ribonucleotide
  modified_base 29: mod_base = OTHER; note = 2'-O-methyl ribonucleotide
  modified_base 30: mod_base = OTHER; note = 2'-O-methyl ribonucleotide
  modified_base 31: mod_base = OTHER; note = 2'-O-methyl ribonucleotide
  modified_base 32: mod_base = OTHER; note = 2'-O-methyl ribonucleotide
  modified_base 34: mod_base = OTHER; note = 2'-O-methyl ribonucleotide
  modified_base 35: mod_base = OTHER; note = 2'-O-methyl ribonucleotide
  modified_base 36: mod_base = OTHER; note = 2'-O-methyl ribonucleotide
  modified_base 37: mod_base = OTHER; note = 2'-O-methyl ribonucleotide
  modified_base 38: mod_base = OTHER; note = 2'-O-methyl ribonucleotide
  modified_base 39: mod_base = OTHER; note = 2'-O-methyl ribonucleotide
  modified_base 40: mod_base = OTHER; note = 2'-O-methyl ribonucleotide
  modified_base 41: mod_base = OTHER; note = 2'-O-methyl ribonucleotide
  modified_base 42: mod_base = OTHER; note = 2'-O-methyl ribonucleotide
  modified_base 46: mod_base = OTHER; note = 2'-O-methyl ribonucleotide
  modified_base 48: mod_base = OTHER; note = 2'-O-methyl ribonucleotide
  modified_base 50: mod_base = OTHER; note = 2'-O-methyl ribonucleotide
  modified_base 52: mod_base = OTHER; note = 2'-O-methyl ribonucleotide
  modified_base 53: mod_base = OTHER; note = 2'-O-methyl ribonucleotide
  modified_base 54: mod_base = OTHER; note = 2'-O-methyl ribonucleotide
  modified_base 55: mod_base = OTHER; note = 2'-O-methyl ribonucleotide
  modified_base 56: mod_base = OTHER; note = 2'-O-methyl ribonucleotide
  modified_base 57: mod_base = OTHER; note = 2'-O-methyl ribonucleotide
  modified_base 60: mod_base = OTHER; note = 2'-O-methyl ribonucleotide
  modified_base 61: mod_base = OTHER; note = 2'-O-methyl ribonucleotide
  modified_base 66: mod_base = OTHER; note = 2'-O-methyl ribonucleotide
  modified_base 67: mod_base = OTHER; note = 2'-O-methyl ribonucleotide
  modified_base 70: mod_base = OTHER; note = 2'-O-methyl ribonucleotide
  modified_base 71: mod_base = OTHER; note = 2'-O-methyl ribonucleotide
  modified_base 72: mod_base = OTHER; note = 2'-O-methyl ribonucleotide
  modified_base 74: mod_base = OTHER; note = 2'-O-methyl ribonucleotide
  modified_base 75: mod_base = OTHER; note = 2'-O-methyl ribonucleotide
  modified_base 76: mod_base = OTHER; note = 2'-O-methyl ribonucleotide
  modified_base 77: mod_base = OTHER; note = 2'-O-methyl ribonucleotide
  modified_base 78: mod_base = OTHER; note = 2'-O-methyl ribonucleotide
  modified_base 79: mod_base = OTHER; note = 2'-O-methyl ribonucleotide
  modified_base 80: mod_base = OTHER; note = 2'-O-methyl ribonucleotide
  modified_base 81: mod_base = OTHER; note = 2'-O-methyl ribonucleotide
  modified_base 83: mod_base = OTHER; note = 2'-O-methyl ribonucleotide
  modified_base 84: mod_base = OTHER; note = 2'-O-methyl ribonucleotide
  modified_base 85: mod_base = OTHER; note = 2'-O-methyl ribonucleotide
  modified_base 86: mod_base = OTHER; note = 2'-O-methyl ribonucleotide
  modified_base 87: mod_base = OTHER; note = 2'-O-methyl ribonucleotide
  modified_base 88: mod_base = OTHER; note = 2'-O-methyl ribonucleotide
  modified_base 89: mod_base = OTHER; note = 2'-O-methyl ribonucleotide
  modified_base 90: mod_base = OTHER; note = 2'-O-methyl ribonucleotide
  modified_base 91: mod_base = OTHER; note = 2'-O-methyl ribonucleotide
  modified_base 92: mod_base = OTHER; note = 2'-O-methyl ribonucleotide
  modified_base 93: mod_base = OTHER; note = 2'-O-methyl ribonucleotide
  modified_base 94: mod_base = OTHER; note = 2'-O-methyl ribonucleotide
  modified_base 95: mod_base = OTHER; note = 2'-O-methyl ribonucleotide
  modified_base 96: mod_base = OTHER; note = 2'-O-methyl ribonucleotide
  modified_base 97: mod_base = OTHER; note = 2'-O-methyl ribonucleotide
  modified_base 98: mod_base = OTHER; note = 2'-O-methyl ribonucleotide
  modified_base 99: mod_base = OTHER; note = 2'-O-methyl ribonucleotide
  modified_base 100: mod_base = OTHER; note = 2'-O-methyl ribonucleotide
  modified_base 101: mod_base = OTHER; note = 2'-O-methyl ribonucleotide
  modified_base 103: mod_base = OTHER; note = 2'-O-methyl ribonucleotide
  modified_base 1..4: mod_base = OTHER; note = phosphorothioate linkage
  modified_base 45..46: mod_base = OTHER; note = phosphorothioate linkage
  modified_base 64..65: mod_base = OTHER; note = phosphorothioate linkage
  modified_base 98..100: mod_base = OTHER; note = phosphorothioate linkage

SEQ ID NO: 2350 - RNA, 103 nt, synthetic construct; identical to SEQ ID NO: 1643
  source 1..103: mol_type = other RNA
  modified_base 1: mod_base = OTHER; note = 2'-O-methyl ribonucleotide
  modified_base 2: mod_base = OTHER; note = 2'-O-methyl ribonucleotide
  modified_base 3: mod_base = OTHER; note = 2'-O-methyl ribonucleotide
  modified_base 21: mod_base = OTHER; note = 2'-O-methyl ribonucleotide
  modified_base 28: mod_base = OTHER; note = 2'-O-methyl ribonucleotide
  modified_base 29: mod_base = OTHER; note = 2'-O-methyl ribonucleotide
  modified_base 30: mod_base = OTHER; note = 2'-O-methyl ribonucleotide
  modified_base 31: mod_base = OTHER; note = 2'-O-methyl ribonucleotide
  modified_base 32: mod_base = OTHER; note = 2'-O-methyl ribonucleotide
  modified_base 34: mod_base = OTHER; note = 2'-O-methyl ribonucleotide
  modified_base 35: mod_base = OTHER; note = 2'-O-methyl ribonucleotide
  modified_base 36: mod_base = OTHER; note = 2'-O-methyl ribonucleotide
  modified_base 37: mod_base = OTHER; note = 2'-O-methyl ribonucleotide
  modified_base 38: mod_base = OTHER; note = 2'-O-methyl ribonucleotide
  modified_base 39: mod_base = OTHER; note = 2'-O-methyl ribonucleotide
  modified_base 40: mod_base = OTHER; note = 2'-O-methyl ribonucleotide
  modified_base 41: mod_base = OTHER; note = 2'-O-methyl ribonucleotide
  modified_base 42: mod_base = OTHER; note = 2'-O-methyl ribonucleotide
  modified_base 46: mod_base = OTHER; note = 2'-O-methyl ribonucleotide
  modified_base 48: mod_base = OTHER; note = 2'-O-methyl ribonucleotide
  modified_base 50: mod_base = OTHER; note = 2'-O-methyl ribonucleotide
  modified_base 52: mod_base = OTHER; note = 2'-O-methyl ribonucleotide
  modified_base 53: mod_base = OTHER; note = 2'-O-methyl ribonucleotide
  modified_base 54: mod_base = OTHER; note = 2'-O-methyl ribonucleotide
  modified_base 57: mod_base = OTHER; note = 2'-O-methyl ribonucleotide
  modified_base 61: mod_base = OTHER; note = 2'-O-methyl ribonucleotide
  modified_base 66: mod_base = OTHER; note = 2'-O-methyl ribonucleotide
  modified_base 67: mod_base = OTHER; note = 2'-O-methyl ribonucleotide
  modified_base 70: mod_base = OTHER; note = 2'-O-methyl ribonucleotide
  modified_base 71: mod_base = OTHER; note = 2'-O-methyl ribonucleotide
  modified_base 72: mod_base = OTHER; note = 2'-O-methyl ribonucleotide
  modified_base 74: mod_base = OTHER; note = 2'-O-methyl ribonucleotide
  modified_base 75: mod_base = OTHER; note = 2'-O-methyl ribonucleotide
  modified_base 76: mod_base = OTHER; note = 2'-O-methyl ribonucleotide
  modified_base 77: mod_base = OTHER; note = 2'-O-methyl ribonucleotide
  modified_base 78: mod_base = OTHER; note = 2'-O-methyl ribonucleotide
  modified_base 79: mod_base = OTHER; note = 2'-O-methyl ribonucleotide
  modified_base 80: mod_base = OTHER; note = 2'-O-methyl ribonucleotide
  modified_base 82: mod_base = OTHER; note = 2'-O-methyl ribonucleotide
  modified_base 83: mod_base = OTHER; note = 2'-O-methyl ribonucleotide
  modified_base 84: mod_base = OTHER; note = 2'-O-methyl ribonucleotide
  modified_base 85: mod_base = OTHER; note = 2'-O-methyl ribonucleotide
  modified_base 86: mod_base = OTHER; note = 2'-O-methyl ribonucleotide
  modified_base 87: mod_base = OTHER; note = 2'-O-methyl ribonucleotide
  modified_base 89: mod_base = OTHER; note = 2'-O-methyl ribonucleotide
  modified_base 92: mod_base = OTHER; note = 2'-O-methyl ribonucleotide
  modified_base 93: mod_base = OTHER; note = 2'-O-methyl ribonucleotide
  modified_base 94: mod_base = OTHER; note = 2'-O-methyl ribonucleotide
  modified_base 95: mod_base = OTHER; note = 2'-O-methyl ribonucleotide
  modified_base 96: mod_base = OTHER; note = 2'-O-methyl ribonucleotide
  modified_base 97: mod_base = OTHER; note = 2'-O-methyl ribonucleotide
  modified_base 98: mod_base = OTHER; note = 2'-O-methyl ribonucleotide
  modified_base 99: mod_base = OTHER; note = 2'-O-methyl ribonucleotide
  modified_base 100: mod_base = OTHER; note = 2'-O-methyl ribonucleotide
  modified_base 1..4: mod_base = OTHER; note = phosphorothioate linkage
  modified_base 45..46: mod_base = OTHER; note = phosphorothioate linkage
  modified_base 64..65: mod_base = OTHER; note = phosphorothioate linkage
  modified_base 98..100: mod_base = OTHER; note = phosphorothioate linkage

SEQ ID NO: 2351 - RNA, 103 nt, synthetic construct; identical to SEQ ID NO: 1643
  source 1..103: mol_type = other RNA
  modified_base 1: mod_base = OTHER; note = 2'-O-methyl ribonucleotide
  modified_base 2: mod_base = OTHER; note = 2'-O-methyl ribonucleotide
  modified_base 3: mod_base = OTHER; note = 2'-O-methyl ribonucleotide
  modified_base 21: mod_base = OTHER; note = 2'-O-methyl ribonucleotide
  modified_base 28: mod_base = OTHER; note = 2'-O-methyl ribonucleotide
  modified_base 29: mod_base = OTHER; note = 2'-O-methyl ribonucleotide
  modified_base 30: mod_base = OTHER; note = 2'-O-methyl ribonucleotide
  modified_base 31: mod_base = OTHER; note = 2'-O-methyl ribonucleotide
  modified_base 32: mod_base = OTHER; note = 2'-O-methyl ribonucleotide
  modified_base 33: mod_base = OTHER; note = 2'-O-methyl ribonucleotide
  modified_base 34: mod_base = OTHER; note = 2'-O-methyl ribonucleotide
  modified_base 35: mod_base = OTHER; note = 2'-O-methyl ribonucleotide
  modified_base 36: mod_base = OTHER; note = 2'-O-methyl ribonucleotide
  modified_base 37: mod_base = OTHER; note = 2'-O-methyl ribonucleotide
  modified_base 38: mod_base = OTHER; note = 2'-O-methyl ribonucleotide
  modified_base 39: mod_base = OTHER; note = 2'-O-methyl ribonucleotide
  modified_base 40: mod_base = OTHER; note = 2'-O-methyl ribonucleotide
  modified_base 41: mod_base = OTHER; note = 2'-O-methyl ribonucleotide
  modified_base 42: mod_base = OTHER; note = 2'-O-methyl ribonucleotide
  modified_base 46: mod_base = OTHER; note = 2'-O-methyl ribonucleotide
  modified_base 48: mod_base = OTHER; note = 2'-O-methyl ribonucleotide
  modified_base 50: mod_base = OTHER; note = 2'-O-methyl ribonucleotide
  modified_base 52: mod_base = OTHER; note = 2'-O-methyl ribonucleotide
  modified_base 53: mod_base = OTHER; note = 2'-O-methyl ribonucleotide
  modified_base 54: mod_base = OTHER; note = 2'-O-methyl ribonucleotide
  modified_base 55: mod_base = OTHER; note = 2'-O-methyl ribonucleotide
  modified_base 56: mod_base = OTHER; note = 2'-O-methyl ribonucleotide
  modified_base 57: mod_base = OTHER; note = 2'-O-methyl ribonucleotide
  modified_base 60: mod_base = OTHER; note = 2'-O-methyl ribonucleotide
  modified_base 61: mod_base = OTHER; note = 2'-O-methyl ribonucleotide
  modified_base 66: mod_base = OTHER; note = 2'-O-methyl ribonucleotide
  modified_base 67: mod_base = OTHER; note = 2'-O-methyl ribonucleotide
  modified_base 70: mod_base = OTHER; note = 2'-O-methyl ribonucleotide
  modified_base 71: mod_base = OTHER; note = 2'-O-methyl ribonucleotide
  modified_base 72: mod_base = OTHER; note = 2'-O-methyl ribonucleotide
  modified_base 73: mod_base = OTHER; note = 2'-O-methyl ribonucleotide
  modified_base 74: mod_base = OTHER; note = 2'-O-methyl ribonucleotide
  modified_base 75: mod_base = OTHER; note = 2'-O-methyl ribonucleotide
  modified_base 76: mod_base = OTHER; note = 2'-O-methyl ribonucleotide
  modified_base 77: mod_base = OTHER; note = 2'-O-methyl ribonucleotide
  modified_base 78: mod_base = OTHER; note = 2'-O-methyl ribonucleotide
  modified_base 79: mod_base = OTHER; note = 2'-O-methyl ribonucleotide
  modified_base 80: mod_base = OTHER; note = 2'-O-methyl ribonucleotide
  modified_base 81: mod_base = OTHER; note = 2'-O-methyl ribonucleotide
  modified_base 83: mod_base = OTHER; note = 2'-O-methyl ribonucleotide
  modified_base 84: mod_base = OTHER; note = 2'-O-methyl ribonucleotide
  modified_base 85: mod_base = OTHER; note = 2'-O-methyl ribonucleotide
  modified_base 86: mod_base = OTHER; note = 2'-O-methyl ribonucleotide
  modified_base 87: mod_base = OTHER; note = 2'-O-methyl ribonucleotide
  modified_base 88: mod_base = OTHER; note = 2'-O-methyl ribonucleotide
  modified_base 89: mod_base = OTHER; note = 2'-O-methyl ribonucleotide
  modified_base 90: mod_base = OTHER; note = 2'-O-methyl ribonucleotide
  modified_base 91: mod_base = OTHER; note = 2'-O-methyl ribonucleotide
  modified_base 92: mod_base = OTHER; note = 2'-O-methyl ribonucleotide
  modified_base 93: mod_base = OTHER; note = 2'-O-methyl ribonucleotide
  modified_base 94: mod_base = OTHER; note = 2'-O-methyl ribonucleotide
  modified_base 95: mod_base = OTHER; note = 2'-O-methyl ribonucleotide
  modified_base 96: mod_base = OTHER; note = 2'-O-methyl ribonucleotide
  modified_base 97: mod_base = OTHER; note = 2'-O-methyl ribonucleotide
  modified_base 98: mod_base = OTHER; note = 2'-O-methyl ribonucleotide
  modified_base 99: mod_base = OTHER; note = 2'-O-methyl ribonucleotide
  modified_base 100: mod_base = OTHER; note = 2'-O-methyl ribonucleotide
  modified_base 1..4: mod_base = OTHER; note = phosphorothioate linkage
  modified_base 45..46: mod_base = OTHER; note = phosphorothioate linkage
  modified_base 64..65: mod_base = OTHER; note = phosphorothioate linkage
  modified_base 98..100: mod_base = OTHER; note = phosphorothioate linkage

SEQ ID NO: 2352 - RNA, 103 nt, synthetic construct; identical to SEQ ID NO: 1643
  source 1..103: mol_type = other RNA
  modified_base 1: mod_base = OTHER; note = 2'-O-methyl ribonucleotide
  modified_base 2: mod_base = OTHER; note = 2'-O-methyl ribonucleotide
  modified_base 3: mod_base = OTHER; note = 2'-O-methyl ribonucleotide
  modified_base 21: mod_base = OTHER; note = 2'-O-methyl ribonucleotide
  modified_base 28: mod_base = OTHER; note = 2'-O-methyl ribonucleotide
  modified_base 29: mod_base = OTHER; note = 2'-O-methyl ribonucleotide
  modified_base 30: mod_base = OTHER; note = 2'-O-methyl ribonucleotide
  modified_base 31: mod_base = OTHER; note = 2'-O-methyl ribonucleotide
  modified_base 32: mod_base = OTHER; note = 2'-O-methyl ribonucleotide
  modified_base 34: mod_base = OTHER; note = 2'-O-methyl ribonucleotide
  modified_base 35: mod_base = OTHER; note = 2'-O-methyl ribonucleotide
  modified_base 36: mod_base = OTHER; note = 2'-O-methyl ribonucleotide
  modified_base 37: mod_base = OTHER; note = 2'-O-methyl ribonucleotide
  modified_base 38: mod_base = OTHER; note = 2'-O-methyl ribonucleotide
  modified_base 39: mod_base = OTHER; note = 2'-O-methyl ribonucleotide
  modified_base 40: mod_base = OTHER; note = 2'-O-methyl ribonucleotide
  modified_base 41: mod_base = OTHER; note = 2'-O-methyl ribonucleotide
  modified_base 42: mod_base = OTHER; note = 2'-O-methyl ribonucleotide
  modified_base 46: mod_base = OTHER; note = 2'-O-methyl ribonucleotide
  modified_base 48: mod_base = OTHER; note = 2'-O-methyl ribonucleotide
  modified_base 50: mod_base = OTHER; note = 2'-O-methyl ribonucleotide
  modified_base 52: mod_base = OTHER; note = 2'-O-methyl ribonucleotide
  modified_base 53: mod_base = OTHER; note = 2'-O-methyl ribonucleotide
  modified_base 54: mod_base = OTHER; note = 2'-O-methyl ribonucleotide
  modified_base 55: mod_base = OTHER; note = 2'-O-methyl ribonucleotide
  modified_base 56: mod_base = OTHER; note = 2'-O-methyl ribonucleotide
  modified_base 57: mod_base = OTHER; note = 2'-O-methyl ribonucleotide
  modified_base 60: mod_base = OTHER; note = 2'-O-methyl ribonucleotide
  modified_base 61: mod_base = OTHER; note = 2'-O-methyl ribonucleotide
  modified_base 66: mod_base = OTHER; note = 2'-O-methyl ribonucleotide
  modified_base 67: mod_base = OTHER; note = 2'-O-methyl ribonucleotide
  modified_base 70: mod_base = OTHER; note = 2'-O-methyl ribonucleotide
  modified_base 71: mod_base = OTHER; note = 2'-O-methyl ribonucleotide
  modified_base 72: mod_base = OTHER; note = 2'-O-methyl ribonucleotide
  modified_base 74: mod_base = OTHER; note = 2'-O-methyl ribonucleotide
  modified_base 75: mod_base = OTHER; note = 2'-O-methyl ribonucleotide
  modified_base 76: mod_base = OTHER; note = 2'-O-methyl ribonucleotide
  modified_base 77: mod_base = OTHER; note = 2'-O-methyl ribonucleotide
  modified_base 78: mod_base = OTHER; note = 2'-O-methyl ribonucleotide
  modified_base 79: mod_base = OTHER; note = 2'-O-methyl ribonucleotide
  modified_base 80: mod_base = OTHER; note = 2'-O-methyl ribonucleotide
  modified_base 81: mod_base = OTHER; note = 2'-O-methyl ribonucleotide
  modified_base 83: mod_base = OTHER; note = 2'-O-methyl ribonucleotide
  modified_base 84: mod_base = OTHER; note = 2'-O-methyl ribonucleotide
  modified_base 85: mod_base = OTHER; note = 2'-O-methyl ribonucleotide
  modified_base 86: mod_base = OTHER; note = 2'-O-methyl ribonucleotide
  modified_base 87: mod_base = OTHER; note = 2'-O-methyl ribonucleotide
  modified_base 88: mod_base = OTHER; note = 2'-O-methyl ribonucleotide
  modified_base 89: mod_base = OTHER; note = 2'-O-methyl ribonucleotide
  modified_base 90: mod_base = OTHER; note = 2'-O-methyl ribonucleotide
  modified_base 91: mod_base = OTHER; note = 2'-O-methyl ribonucleotide
  modified_base 92: mod_base = OTHER; note = 2'-O-methyl ribonucleotide
  modified_base 93: mod_base = OTHER; note = 2'-O-methyl ribonucleotide
  modified_base 94: mod_base = OTHER; note = 2'-O-methyl ribonucleotide
  modified_base 95: mod_base = OTHER; note = 2'-O-methyl ribonucleotide
  modified_base 96: mod_base = OTHER; note = 2'-O-methyl ribonucleotide
  modified_base 97: mod_base = OTHER; note = 2'-O-methyl ribonucleotide
  modified_base 98: mod_base = OTHER; note = 2'-O-methyl ribonucleotide
  modified_base 99: mod_base = OTHER; note = 2'-O-methyl ribonucleotide
  modified_base 100: mod_base = OTHER; note = 2'-O-methyl ribonucleotide
  modified_base 1..4: mod_base = OTHER; note = phosphorothioate linkage
  modified_base 45..46: mod_base = OTHER; note = phosphorothioate linkage
  modified_base 64..65: mod_base = OTHER; note = phosphorothioate linkage
  modified_base 98..100: mod_base = OTHER; note = phosphorothioate linkage

SEQ ID NO: 2353 - RNA, 103 nt, synthetic construct; identical to SEQ ID NO: 1643
  source 1..103: mol_type = other RNA
  modified_base 1: mod_base = OTHER; note = 2'-O-methyl ribonucleotide
  modified_base 2: mod_base = OTHER; note = 2'-O-methyl ribonucleotide
  modified_base 3: mod_base = OTHER; note = 2'-O-methyl ribonucleotide
  modified_base 21: mod_base = OTHER; note = 2'-O-methyl ribonucleotide
  modified_base 28: mod_base = OTHER; note = 2'-O-methyl ribonucleotide
  modified_base 29: mod_base = OTHER; note = 2'-O-methyl ribonucleotide
  modified_base 30: mod_base = OTHER; note = 2'-O-methyl ribonucleotide
  modified_base 31: mod_base = OTHER; note = 2'-O-methyl ribonucleotide
  modified_base 32: mod_base = OTHER; note = 2'-O-methyl ribonucleotide
  modified_base 34: mod_base = OTHER; note = 2'-O-methyl ribonucleotide
  modified_base 35: mod_base = OTHER; note = 2'-O-methyl ribonucleotide
  modified_base 36: mod_base = OTHER; note = 2'-O-methyl ribonucleotide
  modified_base 37: mod_base = OTHER; note = 2'-O-methyl ribonucleotide
  modified_base 38: mod_base = OTHER; note = 2'-O-methyl ribonucleotide
  modified_base 39: mod_base = OTHER; note = 2'-O-methyl ribonucleotide
  modified_base 40: mod_base = OTHER; note = 2'-O-methyl ribonucleotide
  modified_base 41: mod_base = OTHER; note = 2'-O-methyl ribonucleotide
  modified_base 42: mod_base = OTHER; note = 2'-O-methyl ribonucleotide
  modified_base 46: mod_base = OTHER; note = 2'-O-methyl ribonucleotide
  modified_base 48: mod_base = OTHER; note = 2'-O-methyl ribonucleotide
  modified_base 50: mod_base = OTHER; note = 2'-O-methyl ribonucleotide
  modified_base 52: mod_base = OTHER; note = 2'-O-methyl ribonucleotide
  modified_base 53: mod_base = OTHER; note = 2'-O-methyl ribonucleotide
  modified_base 54: mod_base = OTHER; note = 2'-O-methyl ribonucleotide
  modified_base 55: mod_base = OTHER; note = 2'-O-methyl ribonucleotide
  modified_base 56: mod_base = OTHER; note = 2'-O-methyl ribonucleotide
  modified_base 57: mod_base = OTHER; note = 2'-O-methyl ribonucleotide
  modified_base 60: mod_base = OTHER; note = 2'-O-methyl ribonucleotide
  modified_base 61: mod_base = OTHER; note = 2'-O-methyl ribonucleotide
  modified_base 66: mod_base = OTHER; note = 2'-O-methyl ribonucleotide
  modified_base 67: mod_base = OTHER; note = 2'-O-methyl ribonucleotide
  modified_base 70: mod_base = OTHER; note = 2'-O-methyl ribonucleotide
  modified_base 71: mod_base = OTHER; note = 2'-O-methyl ribonucleotide
  modified_base 72: mod_base = OTHER; note = 2'-O-methyl ribonucleotide
  modified_base 74: mod_base = OTHER; note = 2'-O-methyl ribonucleotide
  modified_base 75: mod_base = OTHER; note = 2'-O-methyl ribonucleotide
  modified_base 76: mod_base = OTHER; note = 2'-O-methyl ribonucleotide
  modified_base 77: mod_base = OTHER; note = 2'-O-methyl ribonucleotide
  modified_base 78: mod_base = OTHER; note = 2'-O-methyl ribonucleotide
  modified_base 79: mod_base = OTHER; note = 2'-O-methyl ribonucleotide
  modified_base 80: mod_base = OTHER; note = 2'-O-methyl ribonucleotide
  modified_base 81: mod_base = OTHER; note = 2'-O-methyl ribonucleotide
  modified_base 83: mod_base = OTHER; note = 2'-O-methyl ribonucleotide
  modified_base 84: mod_base = OTHER; note = 2'-O-methyl ribonucleotide
  modified_base 85: mod_base = OTHER; note = 2'-O-methyl ribonucleotide
  modified_base 86: mod_base = OTHER; note = 2'-O-methyl ribonucleotide
  modified_base 87: mod_base = OTHER; note = 2'-O-methyl ribonucleotide
  modified_base 88: mod_base = OTHER; note = 2'-O-methyl ribonucleotide
  modified_base 89: mod_base = OTHER; note = 2'-O-methyl ribonucleotide
  modified_base 90: mod_base = OTHER; note = 2'-O-methyl ribonucleotide
  modified_base 91: mod_base = OTHER; note = 2'-O-methyl ribonucleotide
  modified_base 92: mod_base = OTHER; note = 2'-O-methyl ribonucleotide
  modified_base 93: mod_base = OTHER; note = 2'-O-methyl ribonucleotide
  modified_base 94: mod_base = OTHER; note = 2'-O-methyl ribonucleotide
  modified_base 95: mod_base = OTHER; note = 2'-O-methyl ribonucleotide
  modified_base 96: mod_base = OTHER; note = 2'-O-methyl ribonucleotide
  modified_base 97: mod_base = OTHER; note = 2'-O-methyl ribonucleotide
  modified_base 98: mod_base = OTHER; note = 2'-O-methyl ribonucleotide
  modified_base 99: mod_base = OTHER; note = 2'-O-methyl ribonucleotide
  modified_base 100: mod_base = OTHER; note = 2'-O-methyl ribonucleotide
  modified_base 101: mod_base = OTHER; note = 2'-O-methyl ribonucleotide
  modified_base 103: mod_base = OTHER; note = 2'-O-methyl ribonucleotide
  modified_base 1..4: mod_base = OTHER; note = phosphorothioate linkage
  modified_base 45..46: mod_base = OTHER; note = phosphorothioate linkage
  modified_base 98..100: mod_base = OTHER; note = phosphorothioate linkage

SEQ ID NO: 2354 - RNA, 103 nt, synthetic construct; identical to SEQ ID NO: 1643
  source 1..103: mol_type = other RNA
  modified_base 1: mod_base = OTHER; note = 2'-O-methyl ribonucleotide
  modified_base 2: mod_base = OTHER; note = 2'-O-methyl ribonucleotide
  modified_base 3: mod_base = OTHER; note = 2'-O-methyl ribonucleotide
  modified_base 21: mod_base = OTHER; note = 2'-O-methyl ribonucleotide
  modified_base 28: mod_base = OTHER; note = 2'-O-methyl ribonucleotide
  modified_base 29: mod_base = OTHER; note = 2'-O-methyl ribonucleotide
  modified_base 30: mod_base = OTHER; note = 2'-O-methyl ribonucleotide
  modified_base 31: mod_base = OTHER; note = 2'-O-methyl ribonucleotide
  modified_base 32: mod_base = OTHER; note = 2'-O-methyl ribonucleotide
  modified_base 34: mod_base = OTHER; note = 2'-O-methyl ribonucleotide
  modified_base 35: mod_base = OTHER; note = 2'-O-methyl ribonucleotide
  modified_base 36: mod_base = OTHER; note = 2'-O-methyl ribonucleotide
  modified_base 37: mod_base = OTHER; note = 2'-O-methyl ribonucleotide
  modified_base 38: mod_base = OTHER; note = 2'-O-methyl ribonucleotide
  modified_base 39: mod_base = OTHER; note = 2'-O-methyl ribonucleotide
  modified_base 40: mod_base = OTHER; note = 2'-O-methyl ribonucleotide
  modified_base 41: mod_base = OTHER; note = 2'-O-methyl ribonucleotide
  modified_base 42: mod_base = OTHER; note = 2'-O-methyl ribonucleotide
  modified_base 46: mod_base = OTHER; note = 2'-O-methyl ribonucleotide
  modified_base 48: mod_base = OTHER; note = 2'-O-methyl ribonucleotide
  modified_base 50: mod_base = OTHER; note = 2'-O-methyl ribonucleotide
  modified_base 52: mod_base = OTHER; note = 2'-O-methyl ribonucleotide
  modified_base 53: mod_base = OTHER; note = 2'-O-methyl ribonucleotide
  modified_base 54: mod_base = OTHER; note = 2'-O-methyl ribonucleotide
  modified_base 57: mod_base = OTHER; note = 2'-O-methyl ribonucleotide
  modified_base 61: mod_base = OTHER; note = 2'-O-methyl ribonucleotide
  modified_base 66: mod_base = OTHER; note = 2'-O-methyl ribonucleotide
  modified_base 67: mod_base = OTHER; note = 2'-O-methyl ribonucleotide
  modified_base 70: mod_base = OTHER; note = 2'-O-methyl ribonucleotide
  modified_base 71: mod_base = OTHER; note = 2'-O-methyl ribonucleotide
  modified_base 72: mod_base = OTHER; note = 2'-O-methyl ribonucleotide
  modified_base 74: mod_base = OTHER; note = 2'-O-methyl ribonucleotide
  modified_base 75: mod_base = OTHER; note = 2'-O-methyl ribonucleotide
  modified_base 76: mod_base = OTHER; note = 2'-O-methyl ribonucleotide
  modified_base 77: mod_base = OTHER; note = 2'-O-methyl ribonucleotide
  modified_base 78: mod_base = OTHER; note = 2'-O-methyl ribonucleotide
  modified_base 79: mod_base = OTHER; note = 2'-O-methyl ribonucleotide
  modified_base 80: mod_base = OTHER; note = 2'-O-methyl ribonucleotide
  modified_base 82: mod_base = OTHER; note = 2'-O-methyl ribonucleotide
  modified_base 83: mod_base = OTHER; note = 2'-O-methyl ribonucleotide
  modified_base 84: mod_base = OTHER; note = 2'-O-methyl ribonucleotide
  modified_base 85: mod_base = OTHER; note = 2'-O-methyl ribonucleotide
  modified_base 86: mod_base = OTHER; note = 2'-O-methyl ribonucleotide
  modified_base 87: mod_base = OTHER; note = 2'-O-methyl ribonucleotide
  modified_base 89: mod_base = OTHER; note = 2'-O-methyl ribonucleotide
  modified_base 92: mod_base = OTHER; note = 2'-O-methyl ribonucleotide
  modified_base 93: mod_base = OTHER; note = 2'-O-methyl ribonucleotide
  modified_base 94: mod_base = OTHER; note = 2'-O-methyl ribonucleotide
  modified_base 95: mod_base = OTHER; note = 2'-O-methyl ribonucleotide
  modified_base 96: mod_base = OTHER; note = 2'-O-methyl ribonucleotide
  modified_base 97: mod_base = OTHER; note = 2'-O-methyl ribonucleotide
  modified_base 98: mod_base = OTHER; note = 2'-O-methyl ribonucleotide
  modified_base 99: mod_base = OTHER; note = 2'-O-methyl ribonucleotide
  modified_base 100: mod_base = OTHER; note = 2'-O-methyl ribonucleotide
  modified_base 1..4: mod_base = OTHER; note = phosphorothioate linkage
  modified_base 45..46: mod_base = OTHER; note = phosphorothioate linkage
  modified_base 98..100: mod_base = OTHER; note = phosphorothioate linkage

SEQ ID NO: 2355 - RNA, 103 nt, synthetic construct; identical to SEQ ID NO: 1643
  source 1..103: mol_type = other RNA
  modified_base 1: mod_base = OTHER; note = 2'-O-methyl ribonucleotide
  modified_base 2: mod_base = OTHER; note = 2'-O-methyl ribonucleotide
  modified_base 3: mod_base = OTHER; note = 2'-O-methyl ribonucleotide
  modified_base 21: mod_base = OTHER; note = 2'-O-methyl ribonucleotide
  modified_base 28: mod_base = OTHER; note = 2'-O-methyl ribonucleotide
  modified_base 29: mod_base = OTHER; note = 2'-O-methyl ribonucleotide
  modified_base 30: mod_base = OTHER; note = 2'-O-methyl ribonucleotide
  modified_base 31: mod_base = OTHER; note = 2'-O-methyl ribonucleotide
  modified_base 32: mod_base = OTHER; note = 2'-O-methyl ribonucleotide
  modified_base 33: mod_base = OTHER; note = 2'-O-methyl ribonucleotide
  modified_base 34: mod_base = OTHER; note = 2'-O-methyl ribonucleotide
  modified_base 35: mod_base = OTHER; note = 2'-O-methyl ribonucleotide
  modified_base 36: mod_base = OTHER; note = 2'-O-methyl ribonucleotide
  modified_base 37: mod_base = OTHER; note = 2'-O-methyl ribonucleotide
  modified_base 38: mod_base = OTHER; note = 2'-O-methyl ribonucleotide
  modified_base 39: mod_base = OTHER; note = 2'-O-methyl ribonucleotide
  modified_base 40: mod_base = OTHER; note = 2'-O-methyl ribonucleotide
  modified_base 41: mod_base = OTHER; note = 2'-O-methyl ribonucleotide
  modified_base 42: mod_base = OTHER; note = 2'-O-methyl ribonucleotide
  modified_base 46: mod_base = OTHER; note = 2'-O-methyl ribonucleotide
  modified_base 48: mod_base = OTHER; note = 2'-O-methyl ribonucleotide
  modified_base 50: mod_base = OTHER; note = 2'-O-methyl ribonucleotide
  modified_base 52: mod_base = OTHER; note = 2'-O-methyl ribonucleotide
  modified_base 53: mod_base = OTHER; note = 2'-O-methyl ribonucleotide
  modified_base 54: mod_base = OTHER; note = 2'-O-methyl ribonucleotide
  modified_base 55: mod_base = OTHER; note = 2'-O-methyl ribonucleotide
  modified_base 56: mod_base = OTHER; note = 2'-O-methyl ribonucleotide
  modified_base 57: mod_base = OTHER; note = 2'-O-methyl ribonucleotide
  modified_base 60: mod_base = OTHER; note = 2'-O-methyl ribonucleotide
  modified_base 61: mod_base = OTHER; note = 2'-O-methyl ribonucleotide
  modified_base 66: mod_base = OTHER; note = 2'-O-methyl ribonucleotide
  modified_base 67: mod_base = OTHER; note = 2'-O-methyl ribonucleotide
  modified_base 70: mod_base = OTHER; note = 2'-O-methyl ribonucleotide
  modified_base 71: mod_base = OTHER; note = 2'-O-methyl ribonucleotide
  modified_base 72: mod_base = OTHER; note = 2'-O-methyl ribonucleotide
  modified_base 73: mod_base = OTHER; note = 2'-O-methyl ribonucleotide
  modified_base 74: mod_base = OTHER; note = 2'-O-methyl ribonucleotide
  modified_base 75: mod_base = OTHER; note = 2'-O-methyl ribonucleotide
  modified_base 76: mod_base = OTHER; note = 2'-O-methyl ribonucleotide
  modified_base 77: mod_base = OTHER; note = 2'-O-methyl ribonucleotide
  modified_base 78: mod_base = OTHER; note = 2'-O-methyl ribonucleotide
  modified_base 79: mod_base = OTHER; note = 2'-O-methyl ribonucleotide
  modified_base 80: mod_base = OTHER; note = 2'-O-methyl ribonucleotide
  modified_base 81: mod_base = OTHER; note = 2'-O-methyl ribonucleotide
  modified_base 83: mod_base = OTHER; note = 2'-O-methyl ribonucleotide
  modified_base 84: mod_base = OTHER; note = 2'-O-methyl ribonucleotide
  modified_base 85: mod_base = OTHER; note = 2'-O-methyl ribonucleotide
  modified_base 86: mod_base = OTHER; note = 2'-O-methyl ribonucleotide
  modified_base 87: mod_base = OTHER; note = 2'-O-methyl ribonucleotide
  modified_base 88: mod_base = OTHER; note = 2'-O-methyl ribonucleotide
  modified_base 89: mod_base = OTHER; note = 2'-O-methyl ribonucleotide
  modified_base 90: mod_base = OTHER; note = 2'-O-methyl ribonucleotide
  modified_base 91: mod_base = OTHER; note = 2'-O-methyl ribonucleotide
  modified_base 92: mod_base = OTHER; note = 2'-O-methyl ribonucleotide
  modified_base 93: mod_base = OTHER; note = 2'-O-methyl ribonucleotide
  modified_base 94: mod_base = OTHER; note = 2'-O-methyl ribonucleotide
  modified_base 95: mod_base = OTHER; note = 2'-O-methyl ribonucleotide
  modified_base 96: mod_base = OTHER; note = 2'-O-methyl ribonucleotide
  modified_base 97: mod_base = OTHER; note = 2'-O-methyl ribonucleotide
  modified_base 98: mod_base = OTHER; note = 2'-O-methyl ribonucleotide
  modified_base 99: mod_base = OTHER; note = 2'-O-methyl ribonucleotide
  modified_base 100: mod_base = OTHER; note = 2'-O-methyl ribonucleotide
  modified_base 1..4: mod_base = OTHER; note = phosphorothioate linkage
  modified_base 45..46: mod_base = OTHER; note = phosphorothioate linkage
  modified_base 98..100: mod_base = OTHER; note = phosphorothioate linkage

SEQ ID NO: 2356 - RNA, 103 nt, synthetic construct; identical to SEQ ID NO: 1643
  source 1..103: mol_type = other RNA
  modified_base 1: mod_base = OTHER; note = 2'-O-methyl ribonucleotide
  modified_base 2: mod_base = OTHER; note = 2'-O-methyl ribonucleotide
  modified_base 3: mod_base = OTHER; note = 2'-O-methyl ribonucleotide
  modified_base 21: mod_base = OTHER; note = 2'-O-methyl ribonucleotide
  modified_base 28: mod_base = OTHER; note = 2'-O-methyl ribonucleotide
  modified_base 29: mod_base = OTHER; note = 2'-O-methyl ribonucleotide
  modified_base 30: mod_base = OTHER; note = 2'-O-methyl ribonucleotide
  modified_base 31: mod_base = OTHER; note = 2'-O-methyl ribonucleotide
  modified_base 32: mod_base = OTHER; note = 2'-O-methyl ribonucleotide
  modified_base 34: mod_base = OTHER; note = 2'-O-methyl ribonucleotide
  modified_base 35: mod_base = OTHER; note = 2'-O-methyl ribonucleotide
  modified_base 36: mod_base = OTHER; note = 2'-O-methyl ribonucleotide
  modified_base 37: mod_base = OTHER; note = 2'-O-methyl ribonucleotide
  modified_base 38: mod_base = OTHER; note = 2'-O-methyl ribonucleotide
  modified_base 39: mod_base = OTHER; note = 2'-O-methyl ribonucleotide
  modified_base 40: mod_base = OTHER; note = 2'-O-methyl ribonucleotide
  modified_base 41: mod_base = OTHER; note = 2'-O-methyl ribonucleotide
  modified_base 42: mod_base = OTHER; note = 2'-O-methyl ribonucleotide
  modified_base 46: mod_base = OTHER; note = 2'-O-methyl ribonucleotide
  modified_base 48: mod_base = OTHER; note = 2'-O-methyl ribonucleotide
  modified_base 50: mod_base = OTHER; note = 2'-O-methyl ribonucleotide
  modified_base 52: mod_base = OTHER; note = 2'-O-methyl ribonucleotide
  modified_base 53: mod_base = OTHER; note = 2'-O-methyl ribonucleotide
  modified_base 54: mod_base = OTHER; note = 2'-O-methyl ribonucleotide
  modified_base 55: mod_base = OTHER; note = 2'-O-methyl ribonucleotide
  modified_base 56: mod_base = OTHER; note = 2'-O-methyl ribonucleotide
  modified_base 57: mod_base = OTHER; note = 2'-O-methyl ribonucleotide
  modified_base 60: mod_base = OTHER; note = 2'-O-methyl ribonucleotide
  modified_base 61: mod_base = OTHER; note = 2'-O-methyl ribonucleotide
  modified_base 66: mod_base = OTHER; note = 2'-O-methyl ribonucleotide
  modified_base 67: mod_base = OTHER; note = 2'-O-methyl ribonucleotide
  modified_base 70: mod_base = OTHER; note = 2'-O-methyl ribonucleotide
  modified_base 71: mod_base = OTHER; note = 2'-O-methyl ribonucleotide
  modified_base 72: mod_base = OTHER; note = 2'-O-methyl ribonucleotide
  modified_base 74: mod_base = OTHER; note = 2'-O-methyl ribonucleotide
  modified_base 75: mod_base = OTHER; note = 2'-O-methyl ribonucleotide
  modified_base 76: mod_base = OTHER; note = 2'-O-methyl ribonucleotide
  modified_base 77: mod_base = OTHER; note = 2'-O-methyl ribonucleotide
  modified_base 78: mod_base = OTHER; note = 2'-O-methyl ribonucleotide
  modified_base 79: mod_base = OTHER; note = 2'-O-methyl ribonucleotide
  modified_base 80: mod_base = OTHER; note = 2'-O-methyl ribonucleotide
  modified_base 81: mod_base = OTHER; note = 2'-O-methyl ribonucleotide
  modified_base 83: mod_base = OTHER; note = 2'-O-methyl ribonucleotide
  modified_base 84: mod_base = OTHER; note = 2'-O-methyl ribonucleotide
  modified_base 85: mod_base = OTHER; note = 2'-O-methyl ribonucleotide
  modified_base 86: mod_base = OTHER; note = 2'-O-methyl ribonucleotide
  modified_base 87: mod_base = OTHER; note = 2'-O-methyl ribonucleotide
  modified_base 88: mod_base = OTHER; note = 2'-O-methyl ribonucleotide
  modified_base 89: mod_base = OTHER; note = 2'-O-methyl ribonucleotide
  modified_base 90: mod_base = OTHER; note = 2'-O-methyl ribonucleotide
  modified_base 91: mod_base = OTHER; note = 2'-O-methyl ribonucleotide
  modified_base 92: mod_base = OTHER; note = 2'-O-methyl ribonucleotide
  modified_base 93: mod_base = OTHER; note = 2'-O-methyl ribonucleotide
  modified_base 94: mod_base = OTHER; note = 2'-O-methyl ribonucleotide
  modified_base 95: mod_base = OTHER; note = 2'-O-methyl ribonucleotide
  modified_base 96: mod_base = OTHER; note = 2'-O-methyl ribonucleotide
  modified_base 97: mod_base = OTHER; note = 2'-O-methyl ribonucleotide
  modified_base 98: mod_base = OTHER; note = 2'-O-methyl ribonucleotide
  modified_base 99: mod_base = OTHER; note = 2'-O-methyl ribonucleotide
  modified_base 100: mod_base = OTHER; note = 2'-O-methyl ribonucleotide
  modified_base 1..4: mod_base = OTHER; note = phosphorothioate linkage
  modified_base 45..46: mod_base = OTHER; note = phosphorothioate linkage
  modified_base 98..100: mod_base = OTHER; note = phosphorothioate linkage

SEQ ID NO: 2357 - RNA, 103 nt, synthetic construct; identical to SEQ ID NO: 1643
  source 1..103: mol_type = other RNA
  modified_base 1: mod_base = OTHER; note = 2'-O-methyl ribonucleotide
  modified_base 2: mod_base = OTHER; note = 2'-O-methyl ribonucleotide
  modified_base 3: mod_base = OTHER; note = 2'-O-methyl ribonucleotide
  modified_base 21: mod_base = OTHER; note = 2'-O-methyl ribonucleotide
  modified_base 28: mod_base = OTHER; note = 2'-O-methyl ribonucleotide
  modified_base 29: mod_base = OTHER; note = 2'-O-methyl ribonucleotide
  modified_base 30: mod_base = OTHER; note = 2'-O-methyl ribonucleotide
  modified_base 31: mod_base = OTHER; note = 2'-O-methyl ribonucleotide
  modified_base 32: mod_base = OTHER; note = 2'-O-methyl ribonucleotide
  modified_base 34: mod_base = OTHER; note = 2'-O-methyl ribonucleotide
  modified_base 35: mod_base = OTHER; note = 2'-O-methyl ribonucleotide
  modified_base 36: mod_base = OTHER; note = 2'-O-methyl ribonucleotide
  modified_base 37: mod_base = OTHER; note = 2'-O-methyl ribonucleotide
  modified_base 38: mod_base = OTHER; note = 2'-O-methyl ribonucleotide
  modified_base 39: mod_base = OTHER; note = 2'-O-methyl ribonucleotide
  modified_base 40: mod_base = OTHER; note = 2'-O-methyl ribonucleotide
  modified_base 41: mod_base = OTHER; note = 2'-O-methyl ribonucleotide
  modified_base 42: mod_base = OTHER; note = 2'-O-methyl ribonucleotide
  modified_base 46: mod_base = OTHER; note = 2'-O-methyl ribonucleotide
  modified_base 48: mod_base = OTHER; note = 2'-O-methyl ribonucleotide
  modified_base 50: mod_base = OTHER; note = 2'-O-methyl ribonucleotide
  modified_base 52: mod_base = OTHER; note = 2'-O-methyl ribonucleotide
  modified_base 53: mod_base = OTHER; note = 2'-O-methyl ribonucleotide
  modified_base 54: mod_base = OTHER; note = 2'-O-methyl ribonucleotide
  modified_base 55: mod_base = OTHER; note = 2'-O-methyl ribonucleotide
  modified_base 56: mod_base = OTHER; note = 2'-O-methyl ribonucleotide
  modified_base 57: mod_base = OTHER; note = 2'-O-methyl ribonucleotide
  modified_base 60: mod_base = OTHER; note = 2'-O-methyl ribonucleotide
  modified_base 61: mod_base = OTHER; note = 2'-O-methyl ribonucleotide
  modified_base 66: mod_base = OTHER; note = 2'-O-methyl ribonucleotide
  modified_base 67: mod_base = OTHER; note = 2'-O-methyl ribonucleotide
  modified_base 70: mod_base = OTHER; note = 2'-O-methyl ribonucleotide
  modified_base 71: mod_base = OTHER; note = 2'-O-methyl ribonucleotide
  modified_base 72: mod_base = OTHER; note = 2'-O-methyl ribonucleotide
  modified_base 74: mod_base = OTHER; note = 2'-O-methyl ribonucleotide
  modified_base 75: mod_base = OTHER; note = 2'-O-methyl ribonucleotide
  modified_base 76: mod_base = OTHER; note = 2'-O-methyl ribonucleotide
  modified_base 77: mod_base = OTHER; note = 2'-O-methyl ribonucleotide
  modified_base 78: mod_base = OTHER; note = 2'-O-methyl ribonucleotide
  modified_base 79: mod_base = OTHER; note = 2'-O-methyl ribonucleotide
  modified_base 80: mod_base = OTHER; note = 2'-O-methyl ribonucleotide
  modified_base 81: mod_base = OTHER; note = 2'-O-methyl ribonucleotide
  modified_base 83: mod_base = OTHER; note = 2'-O-methyl ribonucleotide
  modified_base 84: mod_base = OTHER; note = 2'-O-methyl ribonucleotide
  modified_base 85: mod_base = OTHER; note = 2'-O-methyl ribonucleotide
  modified_base 86: mod_base = OTHER; note = 2'-O-methyl ribonucleotide
  modified_base 87: mod_base = OTHER; note = 2'-O-methyl ribonucleotide
  modified_base 88: mod_base = OTHER; note = 2'-O-methyl ribonucleotide
  modified_base 89: mod_base = OTHER; note = 2'-O-methyl ribonucleotide
  modified_base 90: mod_base = OTHER; note = 2'-O-methyl ribonucleotide
  modified_base 91: mod_base = OTHER; note = 2'-O-methyl ribonucleotide
  modified_base 92: mod_base = OTHER; note = 2'-O-methyl ribonucleotide
  modified_base 93: mod_base = OTHER; note = 2'-O-methyl ribonucleotide
  modified_base 94: mod_base = OTHER; note = 2'-O-methyl ribonucleotide
  modified_base 95: mod_base = OTHER; note = 2'-O-methyl ribonucleotide
  modified_base 96: mod_base = OTHER; note = 2'-O-methyl ribonucleotide
  modified_base 97: mod_base = OTHER; note = 2'-O-methyl ribonucleotide
  modified_base 98: mod_base = OTHER; note = 2'-O-methyl ribonucleotide
  modified_base 99: mod_base = OTHER; note = 2'-O-methyl ribonucleotide
  modified_base 100: mod_base = OTHER; note = 2'-O-methyl ribonucleotide
  modified_base 101: mod_base = OTHER; note = 2'-O-methyl ribonucleotide
  modified_base 103: mod_base = OTHER; note = 2'-O-methyl ribonucleotide
  modified_base 1..4: mod_base = OTHER; note = phosphorothioate linkage
  modified_base 64..65: mod_base = OTHER; note = phosphorothioate linkage
  modified_base 98..100: mod_base = OTHER; note = phosphorothioate linkage

SEQ ID NO: 2358 - RNA, 103 nt, synthetic construct; identical to SEQ ID NO: 1643
  source 1..103: mol_type = other RNA
  modified_base 1: mod_base = OTHER; note = 2'-O-methyl ribonucleotide
  modified_base 2: mod_base = OTHER; note = 2'-O-methyl ribonucleotide
  modified_base 3: mod_base = OTHER; note = 2'-O-methyl ribonucleotide
  modified_base 21: mod_base = OTHER; note = 2'-O-methyl ribonucleotide
  modified_base 28: mod_base = OTHER; note = 2'-O-methyl ribonucleotide
  modified_base 29: mod_base = OTHER; note = 2'-O-methyl ribonucleotide
  modified_base 30: mod_base = OTHER; note = 2'-O-methyl ribonucleotide
  modified_base 31: mod_base = OTHER; note = 2'-O-methyl ribonucleotide
  modified_base 32: mod_base = OTHER; note = 2'-O-methyl ribonucleotide
  modified_base 34: mod_base = OTHER; note = 2'-O-methyl ribonucleotide
  modified_base 35: mod_base = OTHER; note = 2'-O-methyl ribonucleotide
  modified_base 36: mod_base = OTHER; note = 2'-O-methyl ribonucleotide
  modified_base 37: mod_base = OTHER; note = 2'-O-methyl ribonucleotide
  modified_base 38: mod_base = OTHER; note = 2'-O-methyl ribonucleotide
  modified_base 39: mod_base = OTHER; note = 2'-O-methyl ribonucleotide
  modified_base 40: mod_base = OTHER; note = 2'-O-methyl ribonucleotide
  modified_base 41: mod_base = OTHER; note = 2'-O-methyl ribonucleotide
  modified_base 42: mod_base = OTHER; note = 2'-O-methyl ribonucleotide
  modified_base 46: mod_base = OTHER; note = 2'-O-methyl ribonucleotide
  modified_base 48: mod_base = OTHER; note = 2'-O-methyl ribonucleotide
  modified_base 50: mod_base = OTHER; note = 2'-O-methyl ribonucleotide
  modified_base 52: mod_base = OTHER; note = 2'-O-methyl ribonucleotide
  modified_base 53: mod_base = OTHER; note = 2'-O-methyl ribonucleotide
  modified_base 54: mod_base = OTHER; note = 2'-O-methyl ribonucleotide
  modified_base 57: mod_base = OTHER; note = 2'-O-methyl ribonucleotide
  modified_base 61: mod_base = OTHER; note = 2'-O-methyl ribonucleotide
  modified_base 66: mod_base = OTHER; note = 2'-O-methyl ribonucleotide
  modified_base 67: mod_base = OTHER; note = 2'-O-methyl ribonucleotide
  modified_base 70: mod_base = OTHER; note = 2'-O-methyl ribonucleotide
  modified_base 71: mod_base = OTHER; note = 2'-O-methyl ribonucleotide
  modified_base 72: mod_base = OTHER; note = 2'-O-methyl ribonucleotide
  modified_base 74: mod_base = OTHER; note = 2'-O-methyl ribonucleotide
  modified_base 75: mod_base = OTHER; note = 2'-O-methyl ribonucleotide
  modified_base 76: mod_base = OTHER; note = 2'-O-methyl ribonucleotide
  modified_base 77: mod_base = OTHER; note = 2'-O-methyl ribonucleotide
  modified_base 78: mod_base = OTHER; note = 2'-O-methyl ribonucleotide
  modified_base 79: mod_base = OTHER; note = 2'-O-methyl ribonucleotide
  modified_base 80: mod_base = OTHER; note = 2'-O-methyl ribonucleotide
  modified_base 82: mod_base = OTHER; note = 2'-O-methyl ribonucleotide
  modified_base 83: mod_base = OTHER; note = 2'-O-methyl ribonucleotide
  modified_base 84: mod_base = OTHER; note = 2'-O-methyl ribonucleotide
  modified_base 85: mod_base = OTHER; note = 2'-O-methyl ribonucleotide
  modified_base 86: mod_base = OTHER; note = 2'-O-methyl ribonucleotide
  modified_base 87: mod_base = OTHER; note = 2'-O-methyl ribonucleotide
  modified_base 89: mod_base = OTHER; note = 2'-O-methyl ribonucleotide
  modified_base 92: mod_base = OTHER; note = 2'-O-methyl ribonucleotide
  modified_base 93: mod_base = OTHER; note = 2'-O-methyl ribonucleotide
  modified_base 94: mod_base = OTHER; note = 2'-O-methyl ribonucleotide
  modified_base 95: mod_base = OTHER; note = 2'-O-methyl ribonucleotide
  modified_base 96: mod_base = OTHER; note = 2'-O-methyl ribonucleotide
  modified_base 97: mod_base = OTHER; note = 2'-O-methyl ribonucleotide
  modified_base 98: mod_base = OTHER; note = 2'-O-methyl ribonucleotide
  modified_base 99: mod_base = OTHER; note = 2'-O-methyl ribonucleotide
  modified_base 100: mod_base = OTHER; note = 2'-O-methyl ribonucleotide
  modified_base 1..4: mod_base = OTHER; note = phosphorothioate linkage
  modified_base 64..65: mod_base = OTHER; note = phosphorothioate linkage
  modified_base 98..100: mod_base = OTHER; note = phosphorothioate linkage

SEQ ID NO: 2359 - RNA, 103 nt, synthetic construct; identical to SEQ ID NO: 1643
  source 1..103: mol_type = other RNA
  modified_base 1: mod_base = OTHER; note = 2'-O-methyl ribonucleotide
  modified_base 2: mod_base = OTHER; note = 2'-O-methyl ribonucleotide
  modified_base 3: mod_base = OTHER; note = 2'-O-methyl ribonucleotide
  modified_base 21: mod_base = OTHER; note = 2'-O-methyl ribonucleotide
  modified_base 28: mod_base = OTHER; note = 2'-O-methyl ribonucleotide
  modified_base 29: mod_base = OTHER; note = 2'-O-methyl ribonucleotide
  modified_base 30: mod_base = OTHER; note = 2'-O-methyl ribonucleotide
  modified_base 31: mod_base = OTHER; note = 2'-O-methyl ribonucleotide
  modified_base 32: mod_base = OTHER; note = 2'-O-methyl ribonucleotide
  modified_base 33: mod_base = OTHER; note = 2'-O-methyl ribonucleotide
  modified_base 34: mod_base = OTHER; note = 2'-O-methyl ribonucleotide
  modified_base 35: mod_base = OTHER; note = 2'-O-methyl ribonucleotide
  modified_base 36: mod_base = OTHER; note = 2'-O-methyl ribonucleotide
  modified_base 37: mod_base = OTHER; note = 2'-O-methyl ribonucleotide
  modified_base 38: mod_base = OTHER; note = 2'-O-methyl ribonucleotide
  modified_base 39: mod_base = OTHER; note = 2'-O-methyl ribonucleotide
  modified_base 40: mod_base = OTHER; note = 2'-O-methyl ribonucleotide
  modified_base 41: mod_base = OTHER; note = 2'-O-methyl ribonucleotide
  modified_base 42: mod_base = OTHER; note = 2'-O-methyl ribonucleotide
  modified_base 46: mod_base = OTHER; note = 2'-O-methyl ribonucleotide
  modified_base 48: mod_base = OTHER; note = 2'-O-methyl ribonucleotide
  modified_base 50: mod_base = OTHER; note = 2'-O-methyl ribonucleotide
  modified_base 52: mod_base = OTHER; note = 2'-O-methyl ribonucleotide
  modified_base 53: mod_base = OTHER; note = 2'-O-methyl ribonucleotide
  modified_base 54: mod_base = OTHER; note = 2'-O-methyl ribonucleotide
  modified_base 55: mod_base = OTHER; note = 2'-O-methyl ribonucleotide
  modified_base 56: mod_base = OTHER; note = 2'-O-methyl ribonucleotide
  modified_base 57: mod_base = OTHER; note = 2'-O-methyl ribonucleotide
  modified_base 60: mod_base = OTHER; note = 2'-O-methyl ribonucleotide
  modified_base 61: mod_base = OTHER; note = 2'-O-methyl ribonucleotide
  modified_base 66: mod_base = OTHER; note = 2'-O-methyl ribonucleotide
  modified_base 67: mod_base = OTHER; note = 2'-O-methyl ribonucleotide
  modified_base 70: mod_base = OTHER; note = 2'-O-methyl ribonucleotide
  modified_base 71: mod_base = OTHER; note = 2'-O-methyl ribonucleotide
  modified_base 72: mod_base = OTHER; note = 2'-O-methyl ribonucleotide
  modified_base 73: mod_base = OTHER; note = 2'-O-methyl ribonucleotide
  modified_base 74: mod_base = OTHER; note = 2'-O-methyl ribonucleotide
  modified_base 75: mod_base = OTHER; note = 2'-O-methyl ribonucleotide
  modified_base 76: mod_base = OTHER; note = 2'-O-methyl ribonucleotide
  modified_base 77: mod_base = OTHER; note = 2'-O-methyl ribonucleotide
  modified_base 78: mod_base = OTHER; note = 2'-O-methyl ribonucleotide
  modified_base 79: mod_base = OTHER; note = 2'-O-methyl ribonucleotide
  modified_base 80: mod_base = OTHER; note = 2'-O-methyl ribonucleotide
  modified_base 81: mod_base = OTHER; note = 2'-O-methyl ribonucleotide
  modified_base 83: mod_base = OTHER; note = 2'-O-methyl ribonucleotide
  modified_base 84: mod_base = OTHER; note = 2'-O-methyl ribonucleotide
  modified_base 85: mod_base = OTHER; note = 2'-O-methyl ribonucleotide
  modified_base 86: mod_base = OTHER; note = 2'-O-methyl ribonucleotide
  modified_base 87: mod_base = OTHER; note = 2'-O-methyl ribonucleotide
  modified_base 88: mod_base = OTHER; note = 2'-O-methyl ribonucleotide
  modified_base 89: mod_base = OTHER; note = 2'-O-methyl ribonucleotide
  modified_base 90: mod_base = OTHER; note = 2'-O-methyl ribonucleotide
  modified_base 91: mod_base = OTHER; note = 2'-O-methyl ribonucleotide
  modified_base 92: mod_base = OTHER; note = 2'-O-methyl ribonucleotide
  modified_base 93: mod_base = OTHER; note = 2'-O-methyl ribonucleotide
  modified_base 94: mod_base = OTHER; note = 2'-O-methyl ribonucleotide
  modified_base 95: mod_base = OTHER; note = 2'-O-methyl ribonucleotide
  modified_base 96: mod_base = OTHER; note = 2'-O-methyl ribonucleotide
  modified_base 97: mod_base = OTHER; note = 2'-O-methyl ribonucleotide
  modified_base 98: mod_base = OTHER; note = 2'-O-methyl ribonucleotide
  modified_base 99: mod_base = OTHER; note = 2'-O-methyl ribonucleotide
  modified_base 100: mod_base = OTHER; note = 2'-O-methyl ribonucleotide
  modified_base 1..4: mod_base = OTHER; note = phosphorothioate linkage
  modified_base 64..65: mod_base = OTHER; note = phosphorothioate linkage
  modified_base 98..100: mod_base = OTHER; note = phosphorothioate linkage

SEQ ID NO: 2360 - RNA, 103 nt, synthetic construct; identical to SEQ ID NO: 1643
  source 1..103: mol_type = other RNA
  modified_base 1: mod_base = OTHER; note = 2'-O-methyl ribonucleotide
  modified_base 2: mod_base = OTHER; note = 2'-O-methyl ribonucleotide
  modified_base 3: mod_base = OTHER; note = 2'-O-methyl ribonucleotide
  modified_base 21: mod_base = OTHER; note = 2'-O-methyl ribonucleotide
  modified_base 28: mod_base = OTHER; note = 2'-O-methyl ribonucleotide
  modified_base 29: mod_base = OTHER; note = 2'-O-methyl ribonucleotide
  modified_base 30: mod_base = OTHER; note = 2'-O-methyl ribonucleotide
  modified_base 31: mod_base = OTHER; note = 2'-O-methyl ribonucleotide
  modified_base 32: mod_base = OTHER; note = 2'-O-methyl ribonucleotide
  modified_base 34: mod_base = OTHER; note = 2'-O-methyl ribonucleotide
  modified_base 35: mod_base = OTHER; note = 2'-O-methyl ribonucleotide
  modified_base 36: mod_base = OTHER; note = 2'-O-methyl ribonucleotide
  modified_base 37: mod_base = OTHER; note = 2'-O-methyl ribonucleotide
  modified_base 38: mod_base = OTHER; note = 2'-O-methyl ribonucleotide
  modified_base 39: mod_base = OTHER; note = 2'-O-methyl ribonucleotide
  modified_base 40: mod_base = OTHER; note = 2'-O-methyl ribonucleotide
  modified_base 41: mod_base = OTHER; note = 2'-O-methyl ribonucleotide
  modified_base 42: mod_base = OTHER; note = 2'-O-methyl ribonucleotide
  modified_base 46: mod_base = OTHER; note = 2'-O-methyl ribonucleotide
  modified_base 48: mod_base = OTHER; note = 2'-O-methyl ribonucleotide
  modified_base 50: mod_base = OTHER; note = 2'-O-methyl ribonucleotide
  modified_base 52: mod_base = OTHER; note = 2'-O-methyl ribonucleotide
  modified_base 53: mod_base = OTHER; note = 2'-O-methyl ribonucleotide
  modified_base 54: mod_base = OTHER; note = 2'-O-methyl ribonucleotide
  modified_base 55: mod_base = OTHER; note = 2'-O-methyl ribonucleotide
  modified_base 56: mod_base = OTHER; note = 2'-O-methyl ribonucleotide
  modified_base 57: mod_base = OTHER; note = 2'-O-methyl ribonucleotide
  modified_base 60: mod_base = OTHER; note = 2'-O-methyl ribonucleotide
  modified_base 61: mod_base = OTHER; note = 2'-O-methyl ribonucleotide
  modified_base 66: mod_base = OTHER; note = 2'-O-methyl ribonucleotide
  modified_base 67: mod_base = OTHER; note = 2'-O-methyl ribonucleotide
  modified_base 70: mod_base = OTHER; note = 2'-O-methyl ribonucleotide
  modified_base 71: mod_base = OTHER; note = 2'-O-methyl ribonucleotide
  modified_base 72: mod_base = OTHER; note = 2'-O-methyl ribonucleotide
  modified_base 74: mod_base = OTHER; note = 2'-O-methyl ribonucleotide
  modified_base 75: mod_base = OTHER; note = 2'-O-methyl ribonucleotide
  modified_base 76: mod_base = OTHER; note = 2'-O-methyl ribonucleotide
  modified_base 77: mod_base = OTHER; note = 2'-O-methyl ribonucleotide
  modified_base 78: mod_base = OTHER; note = 2'-O-methyl ribonucleotide
  modified_base 79: mod_base = OTHER; note = 2'-O-methyl ribonucleotide
  modified_base 80: mod_base = OTHER; note = 2'-O-methyl ribonucleotide
  modified_base 81: mod_base = OTHER; note = 2'-O-methyl ribonucleotide
  modified_base 83: mod_base = OTHER; note = 2'-O-methyl ribonucleotide
  modified_base 84: mod_base = OTHER; note = 2'-O-methyl ribonucleotide
  modified_base 85: mod_base = OTHER; note = 2'-O-methyl ribonucleotide
  modified_base 86: mod_base = OTHER; note = 2'-O-methyl ribonucleotide
  modified_base 87: mod_base = OTHER; note = 2'-O-methyl ribonucleotide
  modified_base 88: mod_base = OTHER; note = 2'-O-methyl ribonucleotide
  modified_base 89: mod_base = OTHER; note = 2'-O-methyl ribonucleotide
  modified_base 90: mod_base = OTHER; note = 2'-O-methyl ribonucleotide
  modified_base 91: mod_base = OTHER; note = 2'-O-methyl ribonucleotide
  modified_base 92: mod_base = OTHER; note = 2'-O-methyl ribonucleotide
  modified_base 93: mod_base = OTHER; note = 2'-O-methyl ribonucleotide
  modified_base 94: mod_base = OTHER; note = 2'-O-methyl ribonucleotide
  modified_base 95: mod_base = OTHER; note = 2'-O-methyl ribonucleotide
  modified_base 96: mod_base = OTHER; note = 2'-O-methyl ribonucleotide
  modified_base 97: mod_base = OTHER; note = 2'-O-methyl ribonucleotide
  modified_base 98: mod_base = OTHER; note = 2'-O-methyl ribonucleotide
  modified_base 99: mod_base = OTHER; note = 2'-O-methyl ribonucleotide
  modified_base 100: mod_base = OTHER; note = 2'-O-methyl ribonucleotide
  modified_base 1..4: mod_base = OTHER; note = phosphorothioate linkage
  modified_base 64..65: mod_base = OTHER; note = phosphorothioate linkage
  modified_base 98..100: mod_base = OTHER; note = phosphorothioate linkage

SEQ ID NO: 2361 - RNA, 99 nt, synthetic construct; identical to SEQ ID NO: 442
  source 1..99: mol_type = other RNA
  modified_base 1: mod_base = OTHER; note = 2'-O-methyl ribonucleotide
  modified_base 2: mod_base = OTHER; note = 2'-O-methyl ribonucleotide
  modified_base 97: mod_base = OTHER; note = 2'-O-methyl ribonucleotide
  modified_base 98: mod_base = OTHER; note = 2'-O-methyl ribonucleotide
  modified_base 99: mod_base = OTHER; note = 2'-O-methyl ribonucleotide
  modified_base 1..3: mod_base = OTHER; note = phosphorothioate linkage
  modified_base 96..99: mod_base = OTHER; note = phosphorothioate linkage

SEQ ID NO: 2362 - RNA, 100 nt, synthetic construct; identical to SEQ ID NO: 55
  source 1..100: mol_type = other RNA
  modified_base 1: mod_base = OTHER; note = 2'-O-methyl ribonucleotide
  modified_base 2: mod_base = OTHER; note = 2'-O-methyl ribonucleotide
  modified_base 3: mod_base = OTHER; note = 2'-O-methyl ribonucleotide
  modified_base 21: mod_base = OTHER; note = 2'-O-methyl ribonucleotide
  modified_base 28: mod_base = OTHER; note = 2'-O-methyl ribonucleotide
  modified_base 29: mod_base = OTHER; note = 2'-O-methyl ribonucleotide
  modified_base 30: mod_base = OTHER; note = 2'-O-methyl ribonucleotide
  modified_base 31: mod_base = OTHER; note = 2'-O-methyl ribonucleotide
  modified_base 32: mod_base = OTHER; note = 2'-O-methyl ribonucleotide
  modified_base 33: mod_base = OTHER; note = 2'-O-methyl ribonucleotide
  modified_base 34: mod_base = OTHER; note = 2'-O-methyl ribonucleotide
  modified_base 35: mod_base = OTHER; note = 2'-O-methyl ribonucleotide
  modified_base 36: mod_base = OTHER; note = 2'-O-methyl ribonucleotide
  modified_base 37: mod_base = OTHER; note = 2'-O-methyl ribonucleotide
  modified_base 38: mod_base = OTHER; note = 2'-O-methyl ribonucleotide
  modified_base 39: mod_base = OTHER; note = 2'-O-methyl ribonucleotide
  modified_base 40: mod_base = OTHER; note = 2'-O-methyl ribonucleotide
  modified_base 41: mod_base = OTHER; note = 2'-O-methyl ribonucleotide
  modified_base 42: mod_base = OTHER; note = 2'-O-methyl ribonucleotide
  modified_base 46: mod_base = OTHER; note = 2'-O-methyl ribonucleotide
  modified_base 48: mod_base = OTHER; note = 2'-O-methyl ribonucleotide
  modified_base 50: mod_base = OTHER; note = 2'-O-methyl ribonucleotide
  modified_base 52: mod_base = OTHER; note = 2'-O-methyl ribonucleotide
  modified_base 53: mod_base = OTHER; note = 2'-O-methyl ribonucleotide
  modified_base 54: mod_base = OTHER; note = 2'-O-methyl ribonucleotide
  modified_base 55: mod_base = OTHER; note = 2'-O-methyl ribonucleotide
  modified_base 56: mod_base = OTHER; note = 2'-O-methyl ribonucleotide
  modified_base 57: mod_base = OTHER; note = 2'-O-methyl ribonucleotide
  modified_base 60: mod_base = OTHER; note = 2'-O-methyl ribonucleotide
  modified_base 61: mod_base = OTHER; note = 2'-O-methyl ribonucleotide
  modified_base 66: mod_base = OTHER; note = 2'-O-methyl ribonucleotide
  modified_base 67: mod_base = OTHER; note = 2'-O-methyl ribonucleotide
  modified_base 70: mod_base = OTHER; note = 2'-O-methyl ribonucleotide
  modified_base 71: mod_base = OTHER; note = 2'-O-methyl ribonucleotide
  modified_base 72: mod_base = OTHER; note = 2'-O-methyl ribonucleotide
  modified_base 74: mod_base = OTHER; note = 2'-O-methyl ribonucleotide
  modified_base 75: mod_base = OTHER; note = 2'-O-methyl ribonucleotide
  modified_base 76: mod_base = OTHER; note = 2'-O-methyl ribonucleotide
  modified_base 77: mod_base = OTHER; note = 2'-O-methyl ribonucleotide
  modified_base 78: mod_base = OTHER; note = 2'-O-methyl ribonucleotide
  modified_base 79: mod_base = OTHER; note = 2'-O-methyl ribonucleotide
  modified_base 80: mod_base = OTHER; note = 2'-O-methyl ribonucleotide
  modified_base 82: mod_base = OTHER; note = 2'-O-methyl ribonucleotide
  modified_base 83: mod_base = OTHER; note = 2'-O-methyl ribonucleotide
  modified_base 84: mod_base = OTHER; note = 2'-O-methyl ribonucleotide
  modified_base 85: mod_base = OTHER; note = 2'-O-methyl ribonucleotide
  modified_base 86: mod_base = OTHER; note = 2'-O-methyl ribonucleotide
  modified_base 87: mod_base = OTHER; note = 2'-O-methyl ribonucleotide
  modified_base 89: mod_base = OTHER; note = 2'-O-methyl ribonucleotide
  modified_base 92: mod_base = OTHER; note = 2'-O-methyl ribonucleotide
  modified_base 93: mod_base = OTHER; note = 2'-O-methyl ribonucleotide
  modified_base 94: mod_base = OTHER; note = 2'-O-methyl ribonucleotide
  modified_base 95: mod_base = OTHER; note = 2'-O-methyl ribonucleotide
  modified_base 96: mod_base = OTHER; note = 2'-O-methyl ribonucleotide
  modified_base 97: mod_base = OTHER; note = 2'-O-methyl ribonucleotide
  modified_base 98: mod_base = OTHER; note = 2'-O-methyl ribonucleotide
  modified_base 99: mod_base = OTHER; note = 2'-O-methyl ribonucleotide
  modified_base 100: mod_base = OTHER; note = 2'-O-methyl ribonucleotide
  modified_base 1..4: mod_base = OTHER; note = phosphorothioate linkage
  modified_base 25..26: mod_base = OTHER; note = phosphorothioate linkage
  modified_base 98..100: mod_base = OTHER; note = phosphorothioate linkage

SEQ ID NO: 2363 - RNA, 100 nt, synthetic construct; identical to SEQ ID NO: 55
  source 1..100: mol_type = other RNA
  modified_base 1: mod_base = OTHER; note = 2'-O-methyl ribonucleotide
  modified_base 2: mod_base = OTHER; note = 2'-O-methyl ribonucleotide
  modified_base 3: mod_base = OTHER; note = 2'-O-methyl ribonucleotide
  modified_base 21: mod_base = OTHER; note = 2'-O-methyl ribonucleotide
  modified_base 28: mod_base = OTHER; note = 2'-O-methyl ribonucleotide
  modified_base 29: mod_base = OTHER; note = 2'-O-methyl ribonucleotide
  modified_base 30: mod_base = OTHER; note = 2'-O-methyl ribonucleotide
  modified_base 31: mod_base = OTHER; note = 2'-O-methyl ribonucleotide
  modified_base 32: mod_base = OTHER; note = 2'-O-methyl ribonucleotide
  modified_base 34: mod_base = OTHER; note = 2'-O-methyl ribonucleotide
  modified_base 35: mod_base = OTHER; note = 2'-O-methyl ribonucleotide
  modified_base 36: mod_base = OTHER; note = 2'-O-methyl ribonucleotide
  modified_base 37: mod_base = OTHER; note = 2'-O-methyl ribonucleotide
  modified_base 38: mod_base = OTHER; note = 2'-O-methyl ribonucleotide
  modified_base 39: mod_base = OTHER; note = 2'-O-methyl ribonucleotide
  modified_base 40: mod_base = OTHER; note = 2'-O-methyl ribonucleotide
  modified_base 41: mod_base = OTHER; note = 2'-O-methyl ribonucleotide
  modified_base 42: mod_base = OTHER; note = 2'-O-methyl ribonucleotide
  modified_base 46: mod_base = OTHER; note = 2'-O-methyl ribonucleotide
  modified_base 48: mod_base = OTHER; note = 2'-O-methyl ribonucleotide
  modified_base 50: mod_base = OTHER; note = 2'-O-methyl ribonucleotide
  modified_base 52: mod_base = OTHER; note = 2'-O-methyl ribonucleotide
  modified_base 53: mod_base = OTHER; note = 2'-O-methyl ribonucleotide
  modified_base 54: mod_base = OTHER; note = 2'-O-methyl ribonucleotide
  modified_base 57: mod_base = OTHER; note = 2'-O-methyl ribonucleotide
  modified_base 61: mod_base = OTHER; note = 2'-O-methyl ribonucleotide
  modified_base 66: mod_base = OTHER; note = 2'-O-methyl ribonucleotide
  modified_base 67: mod_base = OTHER; note = 2'-O-methyl ribonucleotide
  modified_base 70: mod_base = OTHER; note = 2'-O-methyl ribonucleotide
  modified_base 71: mod_base = OTHER; note = 2'-O-methyl ribonucleotide
  modified_base 72: mod_base = OTHER; note = 2'-O-methyl ribonucleotide
  modified_base 73: mod_base = OTHER; note = 2'-O-methyl ribonucleotide
  modified_base 74: mod_base = OTHER; note = 2'-O-methyl ribonucleotide
  modified_base 75: mod_base = OTHER; note = 2'-O-methyl ribonucleotide
  modified_base 76: mod_base = OTHER; note = 2'-O-methyl ribonucleotide
  modified_base 77: mod_base = OTHER; note = 2'-O-methyl ribonucleotide
  modified_base 78: mod_base = OTHER; note = 2'-O-methyl ribonucleotide
  modified_base 79: mod_base = OTHER; note = 2'-O-methyl ribonucleotide
  modified_base 80: mod_base = OTHER; note = 2'-O-methyl ribonucleotide
  modified_base 82: mod_base = OTHER; note = 2'-O-methyl ribonucleotide
  modified_base 83: mod_base = OTHER; note = 2'-O-methyl ribonucleotide
  modified_base 84: mod_base = OTHER; note = 2'-O-methyl ribonucleotide
  modified_base 85: mod_base = OTHER; note = 2'-O-methyl ribonucleotide
  modified_base 86: mod_base = OTHER; note = 2'-O-methyl ribonucleotide
  modified_base 87: mod_base = OTHER; note = 2'-O-methyl ribonucleotide
  modified_base 89: mod_base = OTHER; note = 2'-O-methyl ribonucleotide
  modified_base 91: mod_base = OTHER; note = 2'-O-methyl ribonucleotide
  modified_base 92: mod_base = OTHER; note = 2'-O-methyl ribonucleotide
  modified_base 93: mod_base = OTHER; note = 2'-O-methyl ribonucleotide
  modified_base 94: mod_base = OTHER; note = 2'-O-methyl ribonucleotide
  modified_base 95: mod_base = OTHER; note = 2'-O-methyl ribonucleotide
  modified_base 96: mod_base = OTHER; note = 2'-O-methyl ribonucleotide
  modified_base 97: mod_base = OTHER; note = 2'-O-methyl ribonucleotide
  modified_base 98: mod_base = OTHER; note = 2'-O-methyl ribonucleotide
  modified_base 99: mod_base = OTHER; note = 2'-O-methyl ribonucleotide
  modified_base 100: mod_base = OTHER; note = 2'-O-methyl ribonucleotide
  modified_base 1..4: mod_base = OTHER; note = phosphorothioate linkage
  modified_base 25..26: mod_base = OTHER; note = phosphorothioate linkage
  modified_base 98..100: mod_base = OTHER; note = phosphorothioate linkage

SEQ ID NO: 2364 - RNA, 100 nt, synthetic construct; identical to SEQ ID NO: 55
  source 1..100: mol_type = other RNA
  modified_base 1: mod_base = OTHER; note = 2'-O-methyl ribonucleotide
  modified_base 2: mod_base = OTHER; note = 2'-O-methyl ribonucleotide
  modified_base 3: mod_base = OTHER; note = 2'-O-methyl ribonucleotide
  modified_base 21: mod_base = OTHER; note = 2'-O-methyl ribonucleotide
  modified_base 28: mod_base = OTHER; note = 2'-O-methyl ribonucleotide
  modified_base 29: mod_base = OTHER; note = 2'-O-methyl ribonucleotide
  modified_base 30: mod_base = OTHER; note = 2'-O-methyl ribonucleotide
  modified_base 31: mod_base = OTHER; note = 2'-O-methyl ribonucleotide
  modified_base 32: mod_base = OTHER; note = 2'-O-methyl ribonucleotide
  modified_base 34: mod_base = OTHER; note = 2'-O-methyl ribonucleotide
  modified_base 35: mod_base = OTHER; note = 2'-O-methyl ribonucleotide
  modified_base 36: mod_base = OTHER; note = 2'-O-methyl ribonucleotide
  modified_base 37: mod_base = OTHER; note = 2'-O-methyl ribonucleotide
  modified_base 38: mod_base = OTHER; note = 2'-O-methyl ribonucleotide
  modified_base 39: mod_base = OTHER; note = 2'-O-methyl ribonucleotide
  modified_base 40: mod_base = OTHER; note = 2'-O-methyl ribonucleotide
  modified_base 41: mod_base = OTHER; note = 2'-O-methyl ribonucleotide
  modified_base 42: mod_base = OTHER; note = 2'-O-methyl ribonucleotide
  modified_base 46: mod_base = OTHER; note = 2'-O-methyl ribonucleotide
  modified_base 48: mod_base = OTHER; note = 2'-O-methyl ribonucleotide
  modified_base 50: mod_base = OTHER; note = 2'-O-methyl ribonucleotide
  modified_base 52: mod_base = OTHER; note = 2'-O-methyl ribonucleotide
  modified_base 53: mod_base = OTHER; note = 2'-O-methyl ribonucleotide
  modified_base 54: mod_base = OTHER; note = 2'-O-methyl ribonucleotide
  modified_base 55: mod_base = OTHER; note = 2'-O-methyl ribonucleotide
  modified_base 56: mod_base = OTHER; note = 2'-O-methyl ribonucleotide
  modified_base 57: mod_base = OTHER; note = 2'-O-methyl ribonucleotide
  modified_base 60: mod_base = OTHER; note = 2'-O-methyl ribonucleotide
  modified_base 61: mod_base = OTHER; note = 2'-O-methyl ribonucleotide
  modified_base 66: mod_base = OTHER; note = 2'-O-methyl ribonucleotide
  modified_base 67: mod_base = OTHER; note = 2'-O-methyl ribonucleotide
  modified_base 70: mod_base = OTHER; note = 2'-O-methyl ribonucleotide
  modified_base 71: mod_base = OTHER; note = 2'-O-methyl ribonucleotide
  modified_base 72: mod_base = OTHER; note = 2'-O-methyl ribonucleotide
  modified_base 74: mod_base = OTHER; note = 2'-O-methyl ribonucleotide
  modified_base 75: mod_base = OTHER; note = 2'-O-methyl ribonucleotide
  modified_base 76: mod_base = OTHER; note = 2'-O-methyl ribonucleotide
  modified_base 77: mod_base = OTHER; note = 2'-O-methyl ribonucleotide
  modified_base 78: mod_base = OTHER; note = 2'-O-methyl ribonucleotide
  modified_base 79: mod_base = OTHER; note = 2'-O-methyl ribonucleotide
  modified_base 80: mod_base = OTHER; note = 2'-O-methyl ribonucleotide
  modified_base 82: mod_base = OTHER; note = 2'-O-methyl ribonucleotide
  modified_base 83: mod_base = OTHER; note = 2'-O-methyl ribonucleotide
  modified_base 84: mod_base = OTHER; note = 2'-O-methyl ribonucleotide
  modified_base 85: mod_base = OTHER; note = 2'-O-methyl ribonucleotide
  modified_base 86: mod_base = OTHER; note = 2'-O-methyl ribonucleotide
  modified_base 87: mod_base = OTHER; note = 2'-O-methyl ribonucleotide
  modified_base 89: mod_base = OTHER; note = 2'-O-methyl ribonucleotide
  modified_base 92: mod_base = OTHER; note = 2'-O-methyl ribonucleotide
  modified_base 93: mod_base = OTHER; note = 2'-O-methyl ribonucleotide
  modified_base 94: mod_base = OTHER; note = 2'-O-methyl ribonucleotide
  modified_base 95: mod_base = OTHER; note = 2'-O-methyl ribonucleotide
  modified_base 96: mod_base = OTHER; note = 2'-O-methyl ribonucleotide
  modified_base 97: mod_base = OTHER; note = 2'-O-methyl ribonucleotide
  modified_base 98: mod_base = OTHER; note = 2'-O-methyl ribonucleotide
  modified_base 99: mod_base = OTHER; note = 2'-O-methyl ribonucleotide
  modified_base 100: mod_base = OTHER; note = 2'-O-methyl ribonucleotide
  modified_base 1..4: mod_base = OTHER; note = phosphorothioate linkage
  modified_base 25..26: mod_base = OTHER; note = phosphorothioate linkage
  modified_base 98..100: mod_base = OTHER; note = phosphorothioate linkage

SEQ ID NO: 2365 - RNA, 100 nt, synthetic construct; identical to SEQ ID NO: 421
  source 1..100: mol_type = other RNA
  modified_base 1: mod_base = OTHER; note = 2'-O-methyl ribonucleotide
  modified_base 2: mod_base = OTHER; note = 2'-O-methyl ribonucleotide
  modified_base 3: mod_base = OTHER; note = 2'-O-methyl ribonucleotide
  modified_base 21: mod_base = OTHER; note = 2'-O-methyl ribonucleotide
  modified_base 28: mod_base = OTHER; note = 2'-O-methyl ribonucleotide
  modified_base 29: mod_base = OTHER; note = 2'-O-methyl ribonucleotide
  modified_base 30: mod_base = OTHER; note = 2'-O-methyl ribonucleotide
  modified_base 31: mod_base = OTHER; note = 2'-O-methyl ribonucleotide
  modified_base 32: mod_base = OTHER; note = 2'-O-methyl ribonucleotide
  modified_base 33: mod_base = OTHER; note = 2'-O-methyl ribonucleotide
  modified_base 34: mod_base = OTHER; note = 2'-O-methyl ribonucleotide
  modified_base 35: mod_base = OTHER; note = 2'-O-methyl ribonucleotide
  modified_base 36: mod_base = OTHER; note = 2'-O-methyl ribonucleotide
  modified_base 37: mod_base = OTHER; note = 2'-O-methyl ribonucleotide
  modified_base 38: mod_base = OTHER; note = 2'-O-methyl ribonucleotide
  modified_base 39: mod_base = OTHER; note = 2'-O-methyl ribonucleotide
  modified_base 40: mod_base = OTHER; note = 2'-O-methyl ribonucleotide
  modified_base 41: mod_base = OTHER; note = 2'-O-methyl ribonucleotide
  modified_base 42: mod_base = OTHER; note = 2'-O-methyl ribonucleotide
  modified_base 46: mod_base = OTHER; note = 2'-O-methyl ribonucleotide
  modified_base 48: mod_base = OTHER; note = 2'-O-methyl ribonucleotide
  modified_base 50: mod_base = OTHER; note = 2'-O-methyl ribonucleotide
  modified_base 52: mod_base = OTHER; note = 2'-O-methyl ribonucleotide
  modified_base 53: mod_base = OTHER; note = 2'-O-methyl ribonucleotide
  modified_base 54: mod_base = OTHER; note = 2'-O-methyl ribonucleotide
  modified_base 55: mod_base = OTHER; note = 2'-O-methyl ribonucleotide
  modified_base 56: mod_base = OTHER; note = 2'-O-methyl ribonucleotide
  modified_base 57: mod_base = OTHER; note = 2'-O-methyl ribonucleotide
  modified_base 60: mod_base = OTHER; note = 2'-O-methyl ribonucleotide
  modified_base 61: mod_base = OTHER; note = 2'-O-methyl ribonucleotide
  modified_base 66: mod_base = OTHER; note = 2'-O-methyl ribonucleotide
  modified_base 67: mod_base = OTHER; note = 2'-O-methyl ribonucleotide
  modified_base 70: mod_base = OTHER; note = 2'-O-methyl ribonucleotide
  modified_base 71: mod_base = OTHER; note = 2'-O-methyl ribonucleotide
  modified_base 72: mod_base = OTHER; note = 2'-O-methyl ribonucleotide
  modified_base 73: mod_base = OTHER; note = 2'-O-methyl ribonucleotide
  modified_base 74: mod_base = OTHER; note = 2'-O-methyl ribonucleotide
  modified_base 75: mod_base = OTHER; note = 2'-O-methyl ribonucleotide
  modified_base 76: mod_base = OTHER; note = 2'-O-methyl ribonucleotide
  modified_base 77: mod_base = OTHER; note = 2'-O-methyl ribonucleotide
  modified_base 78: mod_base = OTHER; note = 2'-O-methyl ribonucleotide
  modified_base 79: mod_base = OTHER; note = 2'-O-methyl ribonucleotide
  modified_base 80: mod_base = OTHER; note = 2'-O-methyl ribonucleotide
  modified_base 81: mod_base = OTHER; note = 2'-O-methyl ribonucleotide
  modified_base 83: mod_base = OTHER; note = 2'-O-methyl ribonucleotide
  modified_base 84: mod_base = OTHER; note = 2'-O-methyl ribonucleotide
  modified_base 85: mod_base = OTHER; note = 2'-O-methyl ribonucleotide
  modified_base 86: mod_base = OTHER; note = 2'-O-methyl ribonucleotide
  modified_base 87: mod_base = OTHER; note = 2'-O-methyl ribonucleotide
  modified_base 88: mod_base = OTHER; note = 2'-O-methyl ribonucleotide
  modified_base 89: mod_base = OTHER; note = 2'-O-methyl ribonucleotide
  modified_base 90: mod_base = OTHER; note = 2'-O-methyl ribonucleotide
  modified_base 91: mod_base = OTHER; note = 2'-O-methyl ribonucleotide
  modified_base 92: mod_base = OTHER; note = 2'-O-methyl ribonucleotide
  modified_base 93: mod_base = OTHER; note = 2'-O-methyl ribonucleotide
  modified_base 94: mod_base = OTHER; note = 2'-O-methyl ribonucleotide
  modified_base 95: mod_base = OTHER; note = 2'-O-methyl ribonucleotide
  modified_base 96: mod_base = OTHER; note = 2'-O-methyl ribonucleotide
  modified_base 97: mod_base = OTHER; note = 2'-O-methyl ribonucleotide
  modified_base 98: mod_base = OTHER; note = 2'-O-methyl ribonucleotide
  modified_base 99: mod_base = OTHER; note = 2'-O-methyl ribonucleotide
  modified_base 100: mod_base = OTHER; note = 2'-O-methyl ribonucleotide
  modified_base 1..4: mod_base = OTHER; note = phosphorothioate linkage
  modified_base 45..46: mod_base = OTHER; note = phosphorothioate linkage
  modified_base 64..65: mod_base = OTHER; note = phosphorothioate linkage
  modified_base 98..100: mod_base = OTHER; note = phosphorothioate linkage

SEQ ID NO: 2366 - RNA, 100 nt, synthetic construct; identical to SEQ ID NO: 421
  source 1..100: mol_type = other RNA
  modified_base 1: mod_base = OTHER; note = 2'-O-methyl ribonucleotide
  modified_base 2: mod_base = OTHER; note = 2'-O-methyl ribonucleotide
  modified_base 3: mod_base = OTHER; note = 2'-O-methyl ribonucleotide
  modified_base 21: mod_base = OTHER; note = 2'-O-methyl ribonucleotide
  modified_base 28: mod_base = OTHER; note = 2'-O-methyl ribonucleotide
  modified_base 29: mod_base = OTHER; note = 2'-O-methyl ribonucleotide
  modified_base 30: mod_base = OTHER; note = 2'-O-methyl ribonucleotide
  modified_base 31: mod_base = OTHER; note = 2'-O-methyl ribonucleotide
  modified_base 32: mod_base = OTHER; note = 2'-O-methyl ribonucleotide
  modified_base 34: mod_base = OTHER; note = 2'-O-methyl ribonucleotide
  modified_base 35: mod_base = OTHER; note = 2'-O-methyl ribonucleotide
  modified_base 36: mod_base = OTHER; note = 2'-O-methyl ribonucleotide
  modified_base 37: mod_base = OTHER; note = 2'-O-methyl ribonucleotide
  modified_base 38: mod_base = OTHER; note = 2'-O-methyl ribonucleotide
  modified_base 39: mod_base = OTHER; note = 2'-O-methyl ribonucleotide
  modified_base 40: mod_base = OTHER; note = 2'-O-methyl ribonucleotide
  modified_base 41: mod_base = OTHER; note = 2'-O-methyl ribonucleotide
  modified_base 42: mod_base = OTHER; note = 2'-O-methyl ribonucleotide
  modified_base 46: mod_base = OTHER; note = 2'-O-methyl ribonucleotide
  modified_base 48: mod_base = OTHER; note = 2'-O-methyl ribonucleotide
  modified_base 50: mod_base = OTHER; note = 2'-O-methyl ribonucleotide
  modified_base 52: mod_base = OTHER; note = 2'-O-methyl ribonucleotide
  modified_base 53: mod_base = OTHER; note = 2'-O-methyl ribonucleotide
  modified_base 54: mod_base = OTHER; note = 2'-O-methyl ribonucleotide
  modified_base 55: mod_base = OTHER; note = 2'-O-methyl ribonucleotide
  modified_base 56: mod_base = OTHER; note = 2'-O-methyl ribonucleotide
  modified_base 57: mod_base = OTHER; note = 2'-O-methyl ribonucleotide
  modified_base 60: mod_base = OTHER; note = 2'-O-methyl ribonucleotide
  modified_base 61: mod_base = OTHER; note = 2'-O-methyl ribonucleotide
  modified_base 66: mod_base = OTHER; note = 2'-O-methyl ribonucleotide
  modified_base 67: mod_base = OTHER; note = 2'-O-methyl ribonucleotide
  modified_base 70: mod_base = OTHER; note = 2'-O-methyl ribonucleotide
  modified_base 71: mod_base = OTHER; note = 2'-O-methyl ribonucleotide
  modified_base 72: mod_base = OTHER; note = 2'-O-methyl ribonucleotide
  modified_base 74: mod_base = OTHER; note = 2'-O-methyl ribonucleotide
  modified_base 75: mod_base = OTHER; note = 2'-O-methyl ribonucleotide
  modified_base 76: mod_base = OTHER; note = 2'-O-methyl ribonucleotide
  modified_base 77: mod_base = OTHER; note = 2'-O-methyl ribonucleotide
  modified_base 78: mod_base = OTHER; note = 2'-O-methyl ribonucleotide
  modified_base 79: mod_base = OTHER; note = 2'-O-methyl ribonucleotide
  modified_base 80: mod_base = OTHER; note = 2'-O-methyl ribonucleotide
  modified_base 81: mod_base = OTHER; note = 2'-O-methyl ribonucleotide
  modified_base 83: mod_base = OTHER; note = 2'-O-methyl ribonucleotide
  modified_base 84: mod_base = OTHER; note = 2'-O-methyl ribonucleotide
  modified_base 85: mod_base = OTHER; note = 2'-O-methyl ribonucleotide
  modified_base 86: mod_base = OTHER; note = 2'-O-methyl ribonucleotide
  modified_base 87: mod_base = OTHER; note = 2'-O-methyl ribonucleotide
  modified_base 88: mod_base = OTHER; note = 2'-O-methyl ribonucleotide
  modified_base 89: mod_base = OTHER; note = 2'-O-methyl ribonucleotide
  modified_base 90: mod_base = OTHER; note = 2'-O-methyl ribonucleotide
  modified_base 91: mod_base = OTHER; note = 2'-O-methyl ribonucleotide
  modified_base 92: mod_base = OTHER; note = 2'-O-methyl ribonucleotide
  modified_base 93: mod_base = OTHER; note = 2'-O-methyl ribonucleotide
  modified_base 94: mod_base = OTHER; note = 2'-O-methyl ribonucleotide
  modified_base 95: mod_base = OTHER; note = 2'-O-methyl ribonucleotide
  modified_base 96: mod_base = OTHER; note = 2'-O-methyl ribonucleotide
  modified_base 97: mod_base = OTHER; note = 2'-O-methyl ribonucleotide
  modified_base 98: mod_base = OTHER; note = 2'-O-methyl ribonucleotide
  modified_base 99: mod_base = OTHER; note = 2'-O-methyl ribonucleotide
  modified_base 100: mod_base = OTHER; note = 2'-O-methyl ribonucleotide
  modified_base 1..4: mod_base = OTHER; note = phosphorothioate linkage
  modified_base 45..46: mod_base = OTHER; note = phosphorothioate linkage
  modified_base 64..65: mod_base = OTHER; note = phosphorothioate linkage
  modified_base 98..100: mod_base = OTHER; note = phosphorothioate linkage

SEQ ID NO: 2367 - RNA, 100 nt, synthetic construct; identical to SEQ ID NO: 422
  source 1..100: mol_type = other RNA
  modified_base 1: mod_base = OTHER; note = 2'-O-methyl ribonucleotide
  modified_base 2: mod_base = OTHER; note = 2'-O-methyl ribonucleotide
  modified_base 3: mod_base = OTHER; note = 2'-O-methyl ribonucleotide
  modified_base 21: mod_base = OTHER; note = 2'-O-methyl ribonucleotide
  modified_base 28: mod_base = OTHER; note = 2'-O-methyl ribonucleotide
  modified_base 29: mod_base = OTHER; note = 2'-O-methyl ribonucleotide
  modified_base 30: mod_base = OTHER; note = 2'-O-methyl ribonucleotide
  modified_base 31: mod_base = OTHER; note = 2'-O-methyl ribonucleotide
  modified_base 32: mod_base = OTHER; note = 2'-O-methyl ribonucleotide
  modified_base 33: mod_base = OTHER; note = 2'-O-methyl ribonucleotide
  modified_base 34: mod_base = OTHER; note = 2'-O-methyl ribonucleotide
  modified_base 35: mod_base = OTHER; note = 2'-O-methyl ribonucleotide
  modified_base 36: mod_base = OTHER; note = 2'-O-methyl ribonucleotide
  modified_base 37: mod_base = OTHER; note = 2'-O-methyl ribonucleotide
  modified_base 38: mod_base = OTHER; note = 2'-O-methyl ribonucleotide
  modified_base 39: mod_base = OTHER; note = 2'-O-methyl ribonucleotide
  modified_base 40: mod_base = OTHER; note = 2'-O-methyl ribonucleotide
  modified_base 41: mod_base = OTHER; note = 2'-O-methyl ribonucleotide
  modified_base 42: mod_base = OTHER; note = 2'-O-methyl ribonucleotide
  modified_base 46: mod_base = OTHER; note = 2'-O-methyl ribonucleotide
  modified_base 48: mod_base = OTHER; note = 2'-O-methyl ribonucleotide
  modified_base 50: mod_base = OTHER; note = 2'-O-methyl ribonucleotide
  modified_base 52: mod_base = OTHER; note = 2'-O-methyl ribonucleotide
  modified_base 53: mod_base = OTHER; note = 2'-O-methyl ribonucleotide
  modified_base 54: mod_base = OTHER; note = 2'-O-methyl ribonucleotide
  modified_base 55: mod_base = OTHER; note = 2'-O-methyl ribonucleotide
  modified_base 56: mod_base = OTHER; note = 2'-O-methyl ribonucleotide
  modified_base 57: mod_base = OTHER; note = 2'-O-methyl ribonucleotide
  modified_base 60: mod_base = OTHER; note = 2'-O-methyl ribonucleotide
  modified_base 61: mod_base = OTHER; note = 2'-O-methyl ribonucleotide
  modified_base 66: mod_base = OTHER; note = 2'-O-methyl ribonucleotide
  modified_base 67: mod_base = OTHER; note = 2'-O-methyl ribonucleotide
  modified_base 70: mod_base = OTHER; note = 2'-O-methyl ribonucleotide
  modified_base 71: mod_base = OTHER; note = 2'-O-methyl ribonucleotide
  modified_base 72: mod_base = OTHER; note = 2'-O-methyl ribonucleotide
  modified_base 73: mod_base = OTHER; note = 2'-O-methyl ribonucleotide
  modified_base 74: mod_base = OTHER; note = 2'-O-methyl ribonucleotide
  modified_base 75: mod_base = OTHER; note = 2'-O-methyl ribonucleotide
  modified_base 76: mod_base = OTHER; note = 2'-O-methyl ribonucleotide
  modified_base 77: mod_base = OTHER; note = 2'-O-methyl ribonucleotide
  modified_base 78: mod_base = OTHER; note = 2'-O-methyl ribonucleotide
  modified_base 79: mod_base = OTHER; note = 2'-O-methyl ribonucleotide
  modified_base 80: mod_base = OTHER; note = 2'-O-methyl ribonucleotide
  modified_base 81: mod_base = OTHER; note = 2'-O-methyl ribonucleotide
  modified_base 83: mod_base = OTHER; note = 2'-O-methyl ribonucleotide
  modified_base 84: mod_base = OTHER; note = 2'-O-methyl ribonucleotide
  modified_base 85: mod_base = OTHER; note = 2'-O-methyl ribonucleotide
  modified_base 86: mod_base = OTHER; note = 2'-O-methyl ribonucleotide
  modified_base 87: mod_base = OTHER; note = 2'-O-methyl ribonucleotide
  modified_base 88: mod_base = OTHER; note = 2'-O-methyl ribonucleotide
  modified_base 89: mod_base = OTHER; note = 2'-O-methyl ribonucleotide
  modified_base 90: mod_base = OTHER; note = 2'-O-methyl ribonucleotide
  modified_base 91: mod_base = OTHER; note = 2'-O-methyl ribonucleotide
  modified_base 92: mod_base = OTHER; note = 2'-O-methyl ribonucleotide
  modified_base 93: mod_base = OTHER; note = 2'-O-methyl ribonucleotide
  modified_base 94: mod_base = OTHER; note = 2'-O-methyl ribonucleotide
  modified_base 95: mod_base = OTHER; note = 2'-O-methyl ribonucleotide
  modified_base 96: mod_base = OTHER; note = 2'-O-methyl ribonucleotide
  modified_base 97: mod_base = OTHER; note = 2'-O-methyl ribonucleotide
  modified_base 98: mod_base = OTHER; note = 2'-O-methyl ribonucleotide
  modified_base 99: mod_base = OTHER; note = 2'-O-methyl ribonucleotide
  modified_base 100: mod_base = OTHER; note = 2'-O-methyl ribonucleotide
  modified_base 1..4: mod_base = OTHER; note = phosphorothioate linkage
  modified_base 45..46: mod_base = OTHER; note = phosphorothioate linkage
  modified_base 64..65: mod_base = OTHER; note = phosphorothioate linkage
  modified_base 98..100: mod_base = OTHER; note = phosphorothioate linkage

SEQ ID NO: 2368 - RNA, 100 nt, synthetic construct; identical to SEQ ID NO: 422
  source 1..100: mol_type = other RNA
  modified_base 1: mod_base = OTHER; note = 2'-O-methyl ribonucleotide
  modified_base 2: mod_base = OTHER; note = 2'-O-methyl ribonucleotide
  modified_base 3: mod_base = OTHER; note = 2'-O-methyl ribonucleotide
  modified_base 21: mod_base = OTHER; note = 2'-O-methyl ribonucleotide
  modified_base 28: mod_base = OTHER; note = 2'-O-methyl ribonucleotide
  modified_base 29: mod_base = OTHER; note = 2'-O-methyl ribonucleotide
  modified_base 30: mod_base = OTHER; note = 2'-O-methyl ribonucleotide
  modified_base 31: mod_base = OTHER; note = 2'-O-methyl ribonucleotide
  modified_base 32: mod_base = OTHER; note = 2'-O-methyl ribonucleotide
  modified_base 34: mod_base = OTHER; note = 2'-O-methyl ribonucleotide
  modified_base 35: mod_base = OTHER; note = 2'-O-methyl ribonucleotide
  modified_base 36: mod_base = OTHER; note = 2'-O-methyl ribonucleotide
  modified_base 37: mod_base = OTHER; note = 2'-O-methyl ribonucleotide
  modified_base 38: mod_base = OTHER; note = 2'-O-methyl ribonucleotide
  modified_base 39: mod_base = OTHER; note = 2'-O-methyl ribonucleotide
  modified_base 40: mod_base = OTHER; note = 2'-O-methyl ribonucleotide
  modified_base 41: mod_base = OTHER; note = 2'-O-methyl ribonucleotide
  modified_base 42: mod_base = OTHER; note = 2'-O-methyl ribonucleotide
  modified_base 46: mod_base = OTHER; note = 2'-O-methyl ribonucleotide
  modified_base 48: mod_base = OTHER; note = 2'-O-methyl ribonucleotide
  modified_base 50: mod_base = OTHER; note = 2'-O-methyl ribonucleotide
  modified_base 52: mod_base = OTHER; note = 2'-O-methyl ribonucleotide
  modified_base 53: mod_base = OTHER; note = 2'-O-methyl ribonucleotide
  modified_base 54: mod_base = OTHER; note = 2'-O-methyl ribonucleotide
  modified_base 55: mod_base = OTHER; note = 2'-O-methyl ribonucleotide
  modified_base 56: mod_base = OTHER; note = 2'-O-methyl ribonucleotide
  modified_base 57: mod_base = OTHER; note = 2'-O-methyl ribonucleotide
  modified_base 60: mod_base = OTHER; note = 2'-O-methyl ribonucleotide
  modified_base 61: mod_base = OTHER; note = 2'-O-methyl ribonucleotide
  modified_base 66: mod_base = OTHER; note = 2'-O-methyl ribonucleotide
  modified_base 67: mod_base = OTHER; note = 2'-O-methyl ribonucleotide
  modified_base 70: mod_base = OTHER; note = 2'-O-methyl ribonucleotide
  modified_base 71: mod_base = OTHER; note = 2'-O-methyl ribonucleotide
  modified_base 72: mod_base = OTHER; note = 2'-O-methyl ribonucleotide
  modified_base 74: mod_base = OTHER; note = 2'-O-methyl ribonucleotide
  modified_base 75: mod_base = OTHER; note = 2'-O-methyl ribonucleotide
  modified_base 76: mod_base = OTHER; note = 2'-O-methyl ribonucleotide
  modified_base 77: mod_base = OTHER; note = 2'-O-methyl ribonucleotide
  modified_base 78: mod_base = OTHER; note = 2'-O-methyl ribonucleotide
  modified_base 79: mod_base = OTHER; note = 2'-O-methyl ribonucleotide
  modified_base 80: mod_base = OTHER; note = 2'-O-methyl ribonucleotide
  modified_base 81: mod_base = OTHER; note = 2'-O-methyl ribonucleotide
  modified_base 83: mod_base = OTHER; note = 2'-O-methyl ribonucleotide
  modified_base 84: mod_base = OTHER; note = 2'-O-methyl ribonucleotide
  modified_base 85: mod_base = OTHER; note = 2'-O-methyl ribonucleotide
  modified_base 86: mod_base = OTHER; note = 2'-O-methyl ribonucleotide
  modified_base 87: mod_base = OTHER; note = 2'-O-methyl ribonucleotide
  modified_base 88: mod_base = OTHER; note = 2'-O-methyl ribonucleotide
  modified_base 89: mod_base = OTHER; note = 2'-O-methyl ribonucleotide
  modified_base 90: mod_base = OTHER; note = 2'-O-methyl ribonucleotide
  modified_base 91: mod_base = OTHER; note = 2'-O-methyl ribonucleotide
  modified_base 92: mod_base = OTHER; note = 2'-O-methyl ribonucleotide
  modified_base 93: mod_base = OTHER; note = 2'-O-methyl ribonucleotide
  modified_base 94: mod_base = OTHER; note = 2'-O-methyl ribonucleotide
  modified_base 95: mod_base = OTHER; note = 2'-O-methyl ribonucleotide
  modified_base 96: mod_base = OTHER; note = 2'-O-methyl ribonucleotide
  modified_base 97: mod_base = OTHER; note = 2'-O-methyl ribonucleotide
  modified_base 98: mod_base = OTHER; note = 2'-O-methyl ribonucleotide
  modified_base 99: mod_base = OTHER; note = 2'-O-methyl ribonucleotide
  modified_base 100: mod_base = OTHER; note = 2'-O-methyl ribonucleotide
  modified_base 1..4: mod_base = OTHER; note = phosphorothioate linkage
  modified_base 45..46: mod_base = OTHER; note = phosphorothioate linkage
  modified_base 64..65: mod_base = OTHER; note = phosphorothioate linkage
  modified_base 98..100: mod_base = OTHER; note = phosphorothioate linkage

SEQ ID NO: 2369 - RNA, 100 nt, synthetic construct; identical to SEQ ID NO: 55
  source 1..100: mol_type = other RNA
  modified_base 1: mod_base = OTHER; note = 2'-O-methyl ribonucleotide
  modified_base 2: mod_base = OTHER; note = 2'-O-methyl ribonucleotide
  modified_base 3: mod_base = OTHER; note = 2'-O-methyl ribonucleotide
  modified_base 21: mod_base = OTHER; note = 2'-O-methyl ribonucleotide
  modified_base 28: mod_base = OTHER; note = 2'-O-methyl ribonucleotide
  modified_base 29: mod_base = OTHER; note = 2'-O-methyl ribonucleotide
  modified_base 30: mod_base = OTHER; note = 2'-O-methyl ribonucleotide
  modified_base 31: mod_base = OTHER; note = 2'-O-methyl ribonucleotide
  modified_base 32: mod_base = OTHER; note = 2'-O-methyl ribonucleotide
  modified_base 33: mod_base = OTHER; note = 2'-O-methyl ribonucleotide
  modified_base 34: mod_base = OTHER; note = 2'-O-methyl ribonucleotide
  modified_base 35: mod_base = OTHER; note = 2'-O-methyl ribonucleotide
  modified_base 36: mod_base = OTHER; note = 2'-O-methyl ribonucleotide
  modified_base 37: mod_base = OTHER; note = 2'-O-methyl ribonucleotide
  modified_base 38: mod_base = OTHER; note = 2'-O-methyl ribonucleotide
  modified_base 39: mod_base = OTHER; note = 2'-O-methyl ribonucleotide
  modified_base 40: mod_base = OTHER; note = 2'-O-methyl ribonucleotide
  modified_base 41: mod_base = OTHER; note = 2'-O-methyl ribonucleotide
  modified_base 42: mod_base = OTHER; note = 2'-O-methyl ribonucleotide
  modified_base 46: mod_base = OTHER; note = 2'-O-methyl ribonucleotide
  modified_base 48: mod_base = OTHER; note = 2'-O-methyl ribonucleotide
  modified_base 50: mod_base = OTHER; note = 2'-O-methyl ribonucleotide
  modified_base 52: mod_base = OTHER; note = 2'-O-methyl ribonucleotide
  modified_base 53: mod_base = OTHER; note = 2'-O-methyl ribonucleotide
  modified_base 54: mod_base = OTHER; note = 2'-O-methyl ribonucleotide
  modified_base 57: mod_base = OTHER; note = 2'-O-methyl ribonucleotide
  modified_base 61: mod_base = OTHER; note = 2'-O-methyl ribonucleotide
  modified_base 66: mod_base = OTHER; note = 2'-O-methyl ribonucleotide
  modified_base 67: mod_base = OTHER; note = 2'-O-methyl ribonucleotide
  modified_base 70: mod_base = OTHER; note = 2'-O-methyl ribonucleotide
  modified_base 71: mod_base = OTHER; note = 2'-O-methyl ribonucleotide
  modified_base 72: mod_base = OTHER; note = 2'-O-methyl ribonucleotide
  modified_base 74: mod_base = OTHER; note = 2'-O-methyl ribonucleotide
  modified_base 75: mod_base = OTHER; note = 2'-O-methyl ribonucleotide
  modified_base 76: mod_base = OTHER; note = 2'-O-methyl ribonucleotide
  modified_base 77: mod_base = OTHER; note = 2'-O-methyl ribonucleotide
  modified_base 78: mod_base = OTHER; note = 2'-O-methyl ribonucleotide
  modified_base 79: mod_base = OTHER; note = 2'-O-methyl ribonucleotide
  modified_base 80: mod_base = OTHER; note = 2'-O-methyl ribonucleotide
  modified_base 82: mod_base = OTHER; note = 2'-O-methyl ribonucleotide
  modified_base 83: mod_base = OTHER; note = 2'-O-methyl ribonucleotide
  modified_base 84: mod_base = OTHER; note = 2'-O-methyl ribonucleotide
  modified_base 85: mod_base = OTHER; note = 2'-O-methyl ribonucleotide
  modified_base 86: mod_base = OTHER; note = 2'-O-methyl ribonucleotide
  modified_base 87: mod_base = OTHER; note = 2'-O-methyl ribonucleotide
  modified_base 89: mod_base = OTHER; note = 2'-O-methyl ribonucleotide
  modified_base 92: mod_base = OTHER; note = 2'-O-methyl ribonucleotide
  modified_base 93: mod_base = OTHER; note = 2'-O-methyl ribonucleotide
  modified_base 94: mod_base = OTHER; note = 2'-O-methyl ribonucleotide
  modified_base 95: mod_base = OTHER; note = 2'-O-methyl ribonucleotide
  modified_base 96: mod_base = OTHER; note = 2'-O-methyl ribonucleotide
  modified_base 97: mod_base = OTHER; note = 2'-O-methyl ribonucleotide
  modified_base 98: mod_base = OTHER; note = 2'-O-methyl ribonucleotide
  modified_base 99: mod_base = OTHER; note = 2'-O-methyl ribonucleotide
  modified_base 100: mod_base = OTHER; note = 2'-O-methyl ribonucleotide
  modified_base 1..4: mod_base = OTHER; note = phosphorothioate linkage
  modified_base 45..46: mod_base = OTHER; note = phosphorothioate linkage
  modified_base 64..65: mod_base = OTHER; note = phosphorothioate linkage
  modified_base 98..100: mod_base = OTHER; note = phosphorothioate linkage

SEQ ID NO: 2370 - RNA, 100 nt, synthetic construct; identical to SEQ ID NO: 55
  source 1..100: mol_type = other RNA
  modified_base 1: mod_base = OTHER; note = 2'-O-methyl ribonucleotide
  modified_base 2: mod_base = OTHER; note = 2'-O-methyl ribonucleotide
  modified_base 3: mod_base = OTHER; note = 2'-O-methyl ribonucleotide
  modified_base 21: mod_base = OTHER; note = 2'-O-methyl ribonucleotide
  modified_base 28: mod_base = OTHER; note = 2'-O-methyl ribonucleotide
  modified_base 29: mod_base = OTHER; note = 2'-O-methyl ribonucleotide
  modified_base 30: mod_base = OTHER; note = 2'-O-methyl ribonucleotide
  modified_base 31: mod_base = OTHER; note = 2'-O-methyl ribonucleotide
  modified_base 32: mod_base = OTHER; note = 2'-O-methyl ribonucleotide
  modified_base 33: mod_base = OTHER; note = 2'-O-methyl ribonucleotide
  modified_base 34: mod_base = OTHER; note = 2'-O-methyl ribonucleotide
  modified_base 35: mod_base = OTHER; note = 2'-O-methyl ribonucleotide
  modified_base 36: mod_base = OTHER; note = 2'-O-methyl ribonucleotide
  modified_base 37: mod_base = OTHER; note = 2'-O-methyl ribonucleotide
  modified_base 38: mod_base = OTHER; note = 2'-O-methyl ribonucleotide
  modified_base 39: mod_base = OTHER; note = 2'-O-methyl ribonucleotide
  modified_base 40: mod_base = OTHER; note = 2'-O-methyl ribonucleotide
  modified_base 41: mod_base = OTHER; note = 2'-O-methyl ribonucleotide
  modified_base 42: mod_base = OTHER; note = 2'-O-methyl ribonucleotide
  modified_base 46: mod_base = OTHER; note = 2'-O-methyl ribonucleotide
  modified_base 48: mod_base = OTHER; note = 2'-O-methyl ribonucleotide
  modified_base 50: mod_base = OTHER; note = 2'-O-methyl ribonucleotide
  modified_base 52: mod_base = OTHER; note = 2'-O-methyl ribonucleotide
  modified_base 53: mod_base = OTHER; note = 2'-O-methyl ribonucleotide
  modified_base 54: mod_base = OTHER; note = 2'-O-methyl ribonucleotide
  modified_base 55: mod_base = OTHER; note = 2'-O-methyl ribonucleotide
  modified_base 56: mod_base = OTHER; note = 2'-O-methyl ribonucleotide
  modified_base 57: mod_base = OTHER; note = 2'-O-methyl ribonucleotide
  modified_base 60: mod_base = OTHER; note = 2'-O-methyl ribonucleotide
  modified_base 61: mod_base = OTHER; note = 2'-O-methyl ribonucleotide
  modified_base 66: mod_base = OTHER; note = 2'-O-methyl ribonucleotide
  modified_base 67: mod_base = OTHER; note = 2'-O-methyl ribonucleotide
  modified_base 70: mod_base = OTHER; note = 2'-O-methyl ribonucleotide
  modified_base 71: mod_base = OTHER; note = 2'-O-methyl ribonucleotide
  modified_base 72: mod_base = OTHER; note = 2'-O-methyl ribonucleotide
  modified_base 74: mod_base = OTHER; note = 2'-O-methyl ribonucleotide
  modified_base 75: mod_base = OTHER; note = 2'-O-methyl ribonucleotide
  modified_base 76: mod_base = OTHER; note = 2'-O-methyl ribonucleotide
  modified_base 77: mod_base = OTHER; note = 2'-O-methyl ribonucleotide
  modified_base 78: mod_base = OTHER; note = 2'-O-methyl ribonucleotide
  modified_base 79: mod_base = OTHER; note = 2'-O-methyl ribonucleotide
  modified_base 80: mod_base = OTHER; note = 2'-O-methyl ribonucleotide
  modified_base 82: mod_base = OTHER; note = 2'-O-methyl ribonucleotide
  modified_base 83: mod_base = OTHER; note = 2'-O-methyl ribonucleotide
  modified_base 84: mod_base = OTHER; note = 2'-O-methyl ribonucleotide
  modified_base 85: mod_base = OTHER; note = 2'-O-methyl ribonucleotide
  modified_base 86: mod_base = OTHER; note = 2'-O-methyl ribonucleotide
  modified_base 87: mod_base = OTHER; note = 2'-O-methyl ribonucleotide
  modified_base 89: mod_base = OTHER; note = 2'-O-methyl ribonucleotide
  modified_base 92: mod_base = OTHER; note = 2'-O-methyl ribonucleotide
  modified_base 93: mod_base = OTHER; note = 2'-O-methyl ribonucleotide
  modified_base 94: mod_base = OTHER; note = 2'-O-methyl ribonucleotide
  modified_base 95: mod_base = OTHER; note = 2'-O-methyl ribonucleotide
  modified_base 96: mod_base = OTHER; note = 2'-O-methyl ribonucleotide
  modified_base 97: mod_base = OTHER; note = 2'-O-methyl ribonucleotide
  modified_base 98: mod_base = OTHER; note = 2'-O-methyl ribonucleotide
  modified_base 99: mod_base = OTHER; note = 2'-O-methyl ribonucleotide
  modified_base 100: mod_base = OTHER; note = 2'-O-methyl ribonucleotide
  modified_base 1..4: mod_base = OTHER; note = phosphorothioate linkage
  modified_base 45..46: mod_base = OTHER; note = phosphorothioate linkage
  modified_base 64..65: mod_base = OTHER; note = phosphorothioate linkage
  modified_base 98..100: mod_base = OTHER; note = phosphorothioate linkage

SEQ ID NO: 2371 - RNA, 100 nt, synthetic construct; identical to SEQ ID NO: 55
  source 1..100: mol_type = other RNA
  modified_base 1: mod_base = OTHER; note = 2'-O-methyl ribonucleotide
  modified_base 2: mod_base = OTHER; note = 2'-O-methyl ribonucleotide
  modified_base 3: mod_base = OTHER; note = 2'-O-methyl ribonucleotide
  modified_base 21: mod_base = OTHER; note = 2'-O-methyl ribonucleotide
  modified_base 28: mod_base = OTHER; note = 2'-O-methyl ribonucleotide
  modified_base 29: mod_base = OTHER; note = 2'-O-methyl ribonucleotide
  modified_base 30: mod_base = OTHER; note = 2'-O-methyl ribonucleotide
  modified_base 31: mod_base = OTHER; note = 2'-O-methyl ribonucleotide
  modified_base 32: mod_base = OTHER; note = 2'-O-methyl ribonucleotide
  modified_base 33: mod_base = OTHER; note = 2'-O-methyl ribonucleotide
  modified_base 34: mod_base = OTHER; note = 2'-O-methyl ribonucleotide
  modified_base 35: mod_base = OTHER; note = 2'-O-methyl ribonucleotide
  modified_base 36: mod_base = OTHER; note = 2'-O-methyl ribonucleotide
  modified_base 37: mod_base = OTHER; note = 2'-O-methyl ribonucleotide
  modified_base 38: mod_base = OTHER; note = 2'-O-methyl ribonucleotide
  modified_base 39: mod_base = OTHER; note = 2'-O-methyl ribonucleotide
  modified_base 40: mod_base = OTHER; note = 2'-O-methyl ribonucleotide
  modified_base 41: mod_base = OTHER; note = 2'-O-methyl ribonucleotide
  modified_base 42: mod_base = OTHER; note = 2'-O-methyl ribonucleotide
  modified_base 46: mod_base = OTHER; note = 2'-O-methyl ribonucleotide
  modified_base 48: mod_base = OTHER; note = 2'-O-methyl ribonucleotide
  modified_base 50: mod_base = OTHER; note = 2'-O-methyl ribonucleotide
  modified_base 52: mod_base = OTHER; note = 2'-O-methyl ribonucleotide
  modified_base 53: mod_base = OTHER; note = 2'-O-methyl ribonucleotide
  modified_base 54: mod_base = OTHER; note = 2'-O-methyl ribonucleotide
  modified_base 57: mod_base = OTHER; note = 2'-O-methyl ribonucleotide
  modified_base 61: mod_base = OTHER; note = 2'-O-methyl ribonucleotide
  modified_base 66: mod_base = OTHER; note = 2'-O-methyl ribonucleotide
  modified_base 67: mod_base = OTHER; note = 2'-O-methyl ribonucleotide
  modified_base 70: mod_base = OTHER; note = 2'-O-methyl ribonucleotide
  modified_base 71: mod_base = OTHER; note = 2'-O-methyl ribonucleotide
  modified_base 72: mod_base = OTHER; note = 2'-O-methyl ribonucleotide
  modified_base 73: mod_base = OTHER; note = 2'-O-methyl ribonucleotide
  modified_base 74: mod_base = OTHER; note = 2'-O-methyl ribonucleotide
  modified_base 75: mod_base = OTHER; note = 2'-O-methyl ribonucleotide
  modified_base 76: mod_base = OTHER; note = 2'-O-methyl ribonucleotide
  modified_base 77: mod_base = OTHER; note = 2'-O-methyl ribonucleotide
  modified_base 78: mod_base = OTHER; note = 2'-O-methyl ribonucleotide
  modified_base 79: mod_base = OTHER; note = 2'-O-methyl ribonucleotide
  modified_base 80: mod_base = OTHER; note = 2'-O-methyl ribonucleotide
  modified_base 82: mod_base = OTHER; note = 2'-O-methyl ribonucleotide
  modified_base 83: mod_base = OTHER; note = 2'-O-methyl ribonucleotide
  modified_base 84: mod_base = OTHER; note = 2'-O-methyl ribonucleotide
  modified_base 85: mod_base = OTHER; note = 2'-O-methyl ribonucleotide
  modified_base 86: mod_base = OTHER; note = 2'-O-methyl ribonucleotide
  modified_base 87: mod_base = OTHER; note = 2'-O-methyl ribonucleotide
  modified_base 89: mod_base = OTHER; note = 2'-O-methyl ribonucleotide
  modified_base 92: mod_base = OTHER; note = 2'-O-methyl ribonucleotide
  modified_base 93: mod_base = OTHER; note = 2'-O-methyl ribonucleotide
  modified_base 94: mod_base = OTHER; note = 2'-O-methyl ribonucleotide
  modified_base 95: mod_base = OTHER; note = 2'-O-methyl ribonucleotide
  modified_base 96: mod_base = OTHER; note = 2'-O-methyl ribonucleotide
  modified_base 97: mod_base = OTHER; note = 2'-O-methyl ribonucleotide
  modified_base 98: mod_base = OTHER; note = 2'-O-methyl ribonucleotide
  modified_base 99: mod_base = OTHER; note = 2'-O-methyl ribonucleotide
  modified_base 100: mod_base = OTHER; note = 2'-O-methyl ribonucleotide
  modified_base 1..4: mod_base = OTHER; note = phosphorothioate linkage
  modified_base 45..46: mod_base = OTHER; note = phosphorothioate linkage
  modified_base 64..65: mod_base = OTHER; note = phosphorothioate linkage
  modified_base 98..100: mod_base = OTHER; note = phosphorothioate linkage

SEQ ID NO: 2372 - RNA, 100 nt, synthetic construct; identical to SEQ ID NO: 55
  source 1..100: mol_type = other RNA
  modified_base 1: mod_base = OTHER; note = 2'-O-methyl ribonucleotide
  modified_base 2: mod_base = OTHER; note = 2'-O-methyl ribonucleotide
  modified_base 3: mod_base = OTHER; note = 2'-O-methyl ribonucleotide
  modified_base 21: mod_base = OTHER; note = 2'-O-methyl ribonucleotide
  modified_base 28: mod_base = OTHER; note = 2'-O-methyl ribonucleotide
  modified_base 29: mod_base = OTHER; note = 2'-O-methyl ribonucleotide
  modified_base 30: mod_base = OTHER; note = 2'-O-methyl ribonucleotide
  modified_base 31: mod_base = OTHER; note = 2'-O-methyl ribonucleotide
  modified_base 32: mod_base = OTHER; note = 2'-O-methyl ribonucleotide
  modified_base 34: mod_base = OTHER; note = 2'-O-methyl ribonucleotide
  modified_base 35: mod_base = OTHER; note = 2'-O-methyl ribonucleotide
  modified_base 36: mod_base = OTHER; note = 2'-O-methyl ribonucleotide
  modified_base 37: mod_base = OTHER; note = 2'-O-methyl ribonucleotide
  modified_base 38: mod_base = OTHER; note = 2'-O-methyl ribonucleotide
  modified_base 39: mod_base = OTHER; note = 2'-O-methyl ribonucleotide
  modified_base 40: mod_base = OTHER; note = 2'-O-methyl ribonucleotide
  modified_base 41: mod_base = OTHER; note = 2'-O-methyl ribonucleotide
  modified_base 42: mod_base = OTHER; note = 2'-O-methyl ribonucleotide
  modified_base 46: mod_base = OTHER; note = 2'-O-methyl ribonucleotide
  modified_base 48: mod_base = OTHER; note = 2'-O-methyl ribonucleotide
  modified_base 50: mod_base = OTHER; note = 2'-O-methyl ribonucleotide
  modified_base 52: mod_base = OTHER; note = 2'-O-methyl ribonucleotide
  modified_base 53: mod_base = OTHER; note = 2'-O-methyl ribonucleotide
  modified_base 54: mod_base = OTHER; note = 2'-O-methyl ribonucleotide
  modified_base 57: mod_base = OTHER; note = 2'-O-methyl ribonucleotide
  modified_base 61: mod_base = OTHER; note = 2'-O-methyl ribonucleotide
  modified_base 66: mod_base = OTHER; note = 2'-O-methyl ribonucleotide
  modified_base 67: mod_base = OTHER; note = 2'-O-methyl ribonucleotide
  modified_base 70: mod_base = OTHER; note = 2'-O-methyl ribonucleotide
  modified_base 71: mod_base = OTHER; note = 2'-O-methyl ribonucleotide
  modified_base 72: mod_base = OTHER; note = 2'-O-methyl ribonucleotide
  modified_base 73: mod_base = OTHER; note = 2'-O-methyl ribonucleotide
  modified_base 74: mod_base = OTHER; note = 2'-O-methyl ribonucleotide
  modified_base 75: mod_base = OTHER; note = 2'-O-methyl ribonucleotide
  modified_base 76: mod_base = OTHER; note = 2'-O-methyl ribonucleotide
  modified_base 77: mod_base = OTHER; note = 2'-O-methyl ribonucleotide
  modified_base 78: mod_base = OTHER; note = 2'-O-methyl ribonucleotide
  modified_base 79: mod_base = OTHER; note = 2'-O-methyl ribonucleotide
  modified_base 80: mod_base = OTHER; note = 2'-O-methyl ribonucleotide
  modified_base 82: mod_base = OTHER; note = 2'-O-methyl ribonucleotide
  modified_base 83: mod_base = OTHER; note = 2'-O-methyl ribonucleotide
  modified_base 84: mod_base = OTHER; note = 2'-O-methyl ribonucleotide
  modified_base 85: mod_base = OTHER; note = 2'-O-methyl ribonucleotide
  modified_base 86: mod_base = OTHER; note = 2'-O-methyl ribonucleotide
  modified_base 87: mod_base = OTHER; note = 2'-O-methyl ribonucleotide
  modified_base 89: mod_base = OTHER; note = 2'-O-methyl ribonucleotide
  modified_base 92: mod_base = OTHER; note = 2'-O-methyl ribonucleotide
  modified_base 93: mod_base = OTHER; note = 2'-O-methyl ribonucleotide
  modified_base 94: mod_base = OTHER; note = 2'-O-methyl ribonucleotide
  modified_base 95: mod_base = OTHER; note = 2'-O-methyl ribonucleotide
  modified_base 96: mod_base = OTHER; note = 2'-O-methyl ribonucleotide
  modified_base 97: mod_base = OTHER; note = 2'-O-methyl ribonucleotide
  modified_base 98: mod_base = OTHER; note = 2'-O-methyl ribonucleotide
  modified_base 99: mod_base = OTHER; note = 2'-O-methyl ribonucleotide
  modified_base 100: mod_base = OTHER; note = 2'-O-methyl ribonucleotide
  modified_base 1..4: mod_base = OTHER; note = phosphorothioate linkage
  modified_base 45..46: mod_base = OTHER; note = phosphorothioate linkage
  modified_base 64..65: mod_base = OTHER; note = phosphorothioate linkage
  modified_base 98..100: mod_base = OTHER; note = phosphorothioate linkage

SEQ ID NO: 2373 - RNA, 100 nt, synthetic construct; identical to SEQ ID NO: 55
  source 1..100: mol_type = other RNA
  modified_base 1: mod_base = OTHER; note = 2'-O-methyl ribonucleotide
  modified_base 2: mod_base = OTHER; note = 2'-O-methyl ribonucleotide
  modified_base 3: mod_base = OTHER; note = 2'-O-methyl ribonucleotide
  modified_base 21: mod_base = OTHER; note = 2'-O-methyl ribonucleotide
  modified_base 28: mod_base = OTHER; note = 2'-O-methyl ribonucleotide
  modified_base 29: mod_base = OTHER; note = 2'-O-methyl ribonucleotide
  modified_base 30: mod_base = OTHER; note = 2'-O-methyl ribonucleotide
  modified_base 31: mod_base = OTHER; note = 2'-O-methyl ribonucleotide
  modified_base 32: mod_base = OTHER; note = 2'-O-methyl ribonucleotide
  modified_base 34: mod_base = OTHER; note = 2'-O-methyl ribonucleotide
  modified_base 35: mod_base = OTHER; note = 2'-O-methyl ribonucleotide
  modified_base 36: mod_base = OTHER; note = 2'-O-methyl ribonucleotide
  modified_base 37: mod_base = OTHER; note = 2'-O-methyl ribonucleotide
  modified_base 38: mod_base = OTHER; note = 2'-O-methyl ribonucleotide
  modified_base 39: mod_base = OTHER; note = 2'-O-methyl ribonucleotide
  modified_base 40: mod_base = OTHER; note = 2'-O-methyl ribonucleotide
  modified_base 41: mod_base = OTHER; note = 2'-O-methyl ribonucleotide
  modified_base 42: mod_base = OTHER; note = 2'-O-methyl ribonucleotide
  modified_base 46: mod_base = OTHER; note = 2'-O-methyl ribonucleotide
  modified_base 48: mod_base = OTHER; note = 2'-O-methyl ribonucleotide
  modified_base 50: mod_base = OTHER; note = 2'-O-methyl ribonucleotide
  modified_base 52: mod_base = OTHER; note = 2'-O-methyl ribonucleotide
  modified_base 53: mod_base = OTHER; note = 2'-O-methyl ribonucleotide
  modified_base 54: mod_base = OTHER; note = 2'-O-methyl ribonucleotide
  modified_base 57: mod_base = OTHER; note = 2'-O-methyl ribonucleotide
  modified_base 61: mod_base = OTHER; note = 2'-O-methyl ribonucleotide
  modified_base 66: mod_base = OTHER; note = 2'-O-methyl ribonucleotide
  modified_base 67: mod_base = OTHER; note = 2'-O-methyl ribonucleotide
  modified_base 70: mod_base = OTHER; note = 2'-O-methyl ribonucleotide
  modified_base 71: mod_base = OTHER; note = 2'-O-methyl ribonucleotide
  modified_base 72: mod_base = OTHER; note = 2'-O-methyl ribonucleotide
  modified_base 73: mod_base = OTHER; note = 2'-O-methyl ribonucleotide
  modified_base 74: mod_base = OTHER; note = 2'-O-methyl ribonucleotide
  modified_base 75: mod_base = OTHER; note = 2'-O-methyl ribonucleotide
  modified_base 76: mod_base = OTHER; note = 2'-O-methyl ribonucleotide
  modified_base 77: mod_base = OTHER; note = 2'-O-methyl ribonucleotide
  modified_base 78: mod_base = OTHER; note = 2'-O-methyl ribonucleotide
  modified_base 79: mod_base = OTHER; note = 2'-O-methyl ribonucleotide
  modified_base 80: mod_base = OTHER; note = 2'-O-methyl ribonucleotide
  modified_base 82: mod_base = OTHER; note = 2'-O-methyl ribonucleotide
  modified_base 83: mod_base = OTHER; note = 2'-O-methyl ribonucleotide
  modified_base 84: mod_base = OTHER; note = 2'-O-methyl ribonucleotide
  modified_base 85: mod_base = OTHER; note = 2'-O-methyl ribonucleotide
  modified_base 86: mod_base = OTHER; note = 2'-O-methyl ribonucleotide
  modified_base 87: mod_base = OTHER; note = 2'-O-methyl ribonucleotide
  modified_base 89: mod_base = OTHER; note = 2'-O-methyl ribonucleotide
  modified_base 91: mod_base = OTHER; note = 2'-O-methyl ribonucleotide
  modified_base 92: mod_base = OTHER; note = 2'-O-methyl ribonucleotide
  modified_base 93: mod_base = OTHER; note = 2'-O-methyl ribonucleotide
  modified_base 94: mod_base = OTHER; note = 2'-O-methyl ribonucleotide
  modified_base 95: mod_base = OTHER; note = 2'-O-methyl ribonucleotide
  modified_base 96: mod_base = OTHER; note = 2'-O-methyl ribonucleotide
  modified_base 97: mod_base = OTHER; note = 2'-O-methyl ribonucleotide
  modified_base 98: mod_base = OTHER; note = 2'-O-methyl ribonucleotide
  modified_base 99: mod_base = OTHER; note = 2'-O-methyl ribonucleotide
  modified_base 100: mod_base = OTHER; note = 2'-O-methyl ribonucleotide
  modified_base 1..4: mod_base = OTHER; note = phosphorothioate linkage
  modified_base 45..46: mod_base = OTHER; note = phosphorothioate linkage
  modified_base 64..65: mod_base = OTHER; note = phosphorothioate linkage
  modified_base 98..100: mod_base = OTHER; note = phosphorothioate linkage

SEQ ID NO: 2374 - RNA, 100 nt, synthetic construct; identical to SEQ ID NO: 55
  source 1..100: mol_type = other RNA
  modified_base 1: mod_base = OTHER; note = 2'-O-methyl ribonucleotide
  modified_base 2: mod_base = OTHER; note = 2'-O-methyl ribonucleotide
  modified_base 3: mod_base = OTHER; note = 2'-O-methyl ribonucleotide
  modified_base 21: mod_base = OTHER; note = 2'-O-methyl ribonucleotide
  modified_base 28: mod_base = OTHER; note = 2'-O-methyl ribonucleotide
  modified_base 29: mod_base = OTHER; note = 2'-O-methyl ribonucleotide
  modified_base 30: mod_base = OTHER; note = 2'-O-methyl ribonucleotide
  modified_base 31: mod_base = OTHER; note = 2'-O-methyl ribonucleotide
  modified_base 32: mod_base = OTHER; note = 2'-O-methyl ribonucleotide
  modified_base 34: mod_base = OTHER; note = 2'-O-methyl ribonucleotide
  modified_base 35: mod_base = OTHER; note = 2'-O-methyl ribonucleotide
  modified_base 36: mod_base = OTHER; note = 2'-O-methyl ribonucleotide
  modified_base 37: mod_base = OTHER; note = 2'-O-methyl ribonucleotide
  modified_base 38: mod_base = OTHER; note = 2'-O-methyl ribonucleotide
  modified_base 39: mod_base = OTHER; note = 2'-O-methyl ribonucleotide
  modified_base 40: mod_base = OTHER; note = 2'-O-methyl ribonucleotide
  modified_base 41: mod_base = OTHER; note = 2'-O-methyl ribonucleotide
  modified_base 42: mod_base = OTHER; note = 2'-O-methyl ribonucleotide
  modified_base 46: mod_base = OTHER; note = 2'-O-methyl ribonucleotide
  modified_base 48: mod_base = OTHER; note = 2'-O-methyl ribonucleotide
  modified_base 50: mod_base = OTHER; note = 2'-O-methyl ribonucleotide
  modified_base 52: mod_base = OTHER; note = 2'-O-methyl ribonucleotide
  modified_base 53: mod_base = OTHER; note = 2'-O-methyl ribonucleotide
  modified_base 54: mod_base = OTHER; note = 2'-O-methyl ribonucleotide
  modified_base 55: mod_base = OTHER; note = 2'-O-methyl ribonucleotide
  modified_base 56: mod_base = OTHER; note = 2'-O-methyl ribonucleotide
  modified_base 57: mod_base = OTHER; note = 2'-O-methyl ribonucleotide
  modified_base 60: mod_base = OTHER; note = 2'-O-methyl ribonucleotide
  modified_base 61: mod_base = OTHER; note = 2'-O-methyl ribonucleotide
  modified_base 66: mod_base = OTHER; note = 2'-O-methyl ribonucleotide
  modified_base 67: mod_base = OTHER; note = 2'-O-methyl ribonucleotide
  modified_base 70: mod_base = OTHER; note = 2'-O-methyl ribonucleotide
  modified_base 71: mod_base = OTHER; note = 2'-O-methyl ribonucleotide
  modified_base 72: mod_base = OTHER; note = 2'-O-methyl ribonucleotide
  modified_base 74: mod_base = OTHER; note = 2'-O-methyl ribonucleotide
  modified_base 75: mod_base = OTHER; note = 2'-O-methyl ribonucleotide
  modified_base 76: mod_base = OTHER; note = 2'-O-methyl ribonucleotide
  modified_base 77: mod_base = OTHER; note = 2'-O-methyl ribonucleotide
  modified_base 78: mod_base = OTHER; note = 2'-O-methyl ribonucleotide
  modified_base 79: mod_base = OTHER; note = 2'-O-methyl ribonucleotide
  modified_base 80: mod_base = OTHER; note = 2'-O-methyl ribonucleotide
  modified_base 82: mod_base = OTHER; note = 2'-O-methyl ribonucleotide
  modified_base 83: mod_base = OTHER; note = 2'-O-methyl ribonucleotide
  modified_base 84: mod_base = OTHER; note = 2'-O-methyl ribonucleotide
  modified_base 85: mod_base = OTHER; note = 2'-O-methyl ribonucleotide
  modified_base 86: mod_base = OTHER; note = 2'-O-methyl ribonucleotide
  modified_base 87: mod_base = OTHER; note = 2'-O-methyl ribonucleotide
  modified_base 89: mod_base = OTHER; note = 2'-O-methyl ribonucleotide
  modified_base 92: mod_base = OTHER; note = 2'-O-methyl ribonucleotide
  modified_base 93: mod_base = OTHER; note = 2'-O-methyl ribonucleotide
  modified_base 94: mod_base = OTHER; note = 2'-O-methyl ribonucleotide
  modified_base 95: mod_base = OTHER; note = 2'-O-methyl ribonucleotide
  modified_base 96: mod_base = OTHER; note = 2'-O-methyl ribonucleotide
  modified_base 97: mod_base = OTHER; note = 2'-O-methyl ribonucleotide
  modified_base 98: mod_base = OTHER; note = 2'-O-methyl ribonucleotide
  modified_base 99: mod_base = OTHER; note = 2'-O-methyl ribonucleotide
  modified_base 100: mod_base = OTHER; note = 2'-O-methyl ribonucleotide
  modified_base 1..4: mod_base = OTHER; note = phosphorothioate linkage
  modified_base 45..46: mod_base = OTHER; note = phosphorothioate linkage
  modified_base 64..65: mod_base = OTHER; note = phosphorothioate linkage
  modified_base 98..100: mod_base = OTHER; note = phosphorothioate linkage

SEQ ID NO: 2375 - RNA, 100 nt, synthetic construct; identical to SEQ ID NO: 421
  source 1..100: mol_type = other RNA
  modified_base 1: mod_base = OTHER; note = 2'-O-methyl ribonucleotide
  modified_base 2: mod_base = OTHER; note = 2'-O-methyl ribonucleotide
  modified_base 3: mod_base = OTHER; note = 2'-O-methyl ribonucleotide
  modified_base 21: mod_base = OTHER; note = 2'-O-methyl ribonucleotide
  modified_base 28: mod_base = OTHER; note = 2'-O-methyl ribonucleotide
  modified_base 29: mod_base = OTHER; note = 2'-O-methyl ribonucleotide
  modified_base 30: mod_base = OTHER; note = 2'-O-methyl ribonucleotide
  modified_base 31: mod_base = OTHER; note = 2'-O-methyl ribonucleotide
  modified_base 32: mod_base = OTHER; note = 2'-O-methyl ribonucleotide
  modified_base 33: mod_base = OTHER; note = 2'-O-methyl ribonucleotide
  modified_base 34: mod_base = OTHER; note = 2'-O-methyl ribonucleotide
  modified_base 35: mod_base = OTHER; note = 2'-O-methyl ribonucleotide
  modified_base 36: mod_base = OTHER; note = 2'-O-methyl ribonucleotide
  modified_base 37: mod_base = OTHER; note = 2'-O-methyl ribonucleotide
  modified_base 38: mod_base = OTHER; note = 2'-O-methyl ribonucleotide
  modified_base 39: mod_base = OTHER; note = 2'-O-methyl ribonucleotide
  modified_base 40: mod_base = OTHER; note = 2'-O-methyl ribonucleotide
  modified_base 41: mod_base = OTHER; note = 2'-O-methyl ribonucleotide
  modified_base 42: mod_base = OTHER; note = 2'-O-methyl ribonucleotide
  modified_base 46: mod_base = OTHER; note = 2'-O-methyl ribonucleotide
  modified_base 48: mod_base = OTHER; note = 2'-O-methyl ribonucleotide
  modified_base 50: mod_base = OTHER; note = 2'-O-methyl ribonucleotide
  modified_base 52: mod_base = OTHER; note = 2'-O-methyl ribonucleotide
  modified_base 53: mod_base = OTHER; note = 2'-O-methyl ribonucleotide
  modified_base 54: mod_base = OTHER; note = 2'-O-methyl ribonucleotide
  modified_base 55: mod_base = OTHER; note = 2'-O-methyl ribonucleotide
  modified_base 56: mod_base = OTHER; note = 2'-O-methyl ribonucleotide
  modified_base 57: mod_base = OTHER; note = 2'-O-methyl ribonucleotide
  modified_base 60: mod_base = OTHER; note = 2'-O-methyl ribonucleotide
  modified_base 61: mod_base = OTHER; note = 2'-O-methyl ribonucleotide
  modified_base 66: mod_base = OTHER; note = 2'-O-methyl ribonucleotide
  modified_base 67: mod_base = OTHER; note = 2'-O-methyl ribonucleotide
  modified_base 70: mod_base = OTHER; note = 2'-O-methyl ribonucleotide
  modified_base 71: mod_base = OTHER; note = 2'-O-methyl ribonucleotide
  modified_base 72: mod_base = OTHER; note = 2'-O-methyl ribonucleotide
  modified_base 73: mod_base = OTHER; note = 2'-O-methyl ribonucleotide
  modified_base 74: mod_base = OTHER; note = 2'-O-methyl ribonucleotide
  modified_base 75: mod_base = OTHER; note = 2'-O-methyl ribonucleotide
  modified_base 76: mod_base = OTHER; note = 2'-O-methyl ribonucleotide
  modified_base 77: mod_base = OTHER; note = 2'-O-methyl ribonucleotide
  modified_base 78: mod_base = OTHER; note = 2'-O-methyl ribonucleotide
  modified_base 79: mod_base = OTHER; note = 2'-O-methyl ribonucleotide
  modified_base 80: mod_base = OTHER; note = 2'-O-methyl ribonucleotide
  modified_base 81: mod_base = OTHER; note = 2'-O-methyl ribonucleotide
  modified_base 83: mod_base = OTHER; note = 2'-O-methyl ribonucleotide
  modified_base 84: mod_base = OTHER; note = 2'-O-methyl ribonucleotide
  modified_base 85: mod_base = OTHER; note = 2'-O-methyl ribonucleotide
  modified_base 86: mod_base = OTHER; note = 2'-O-methyl ribonucleotide
  modified_base 87: mod_base = OTHER; note = 2'-O-methyl ribonucleotide
  modified_base 88: mod_base = OTHER; note = 2'-O-methyl ribonucleotide
  modified_base 89: mod_base = OTHER; note = 2'-O-methyl ribonucleotide
  modified_base 90: mod_base = OTHER; note = 2'-O-methyl ribonucleotide
  modified_base 91: mod_base = OTHER; note = 2'-O-methyl ribonucleotide
  modified_base 92: mod_base = OTHER; note = 2'-O-methyl ribonucleotide
  modified_base 93: mod_base = OTHER; note = 2'-O-methyl ribonucleotide
  modified_base 94: mod_base = OTHER; note = 2'-O-methyl ribonucleotide
  modified_base 95: mod_base = OTHER; note = 2'-O-methyl ribonucleotide
  modified_base 96: mod_base = OTHER; note = 2'-O-methyl ribonucleotide
  modified_base 97: mod_base = OTHER; note = 2'-O-methyl ribonucleotide
  modified_base 98: mod_base = OTHER; note = 2'-O-methyl ribonucleotide
  modified_base 99: mod_base = OTHER; note = 2'-O-methyl ribonucleotide
  modified_base 100: mod_base = OTHER; note = 2'-O-methyl ribonucleotide
  modified_base 1..4: mod_base = OTHER; note = phosphorothioate linkage
  modified_base 25..26: mod_base = OTHER; note = phosphorothioate linkage
  modified_base 45..46: mod_base = OTHER; note = phosphorothioate linkage
  modified_base 98..100: mod_base = OTHER; note = phosphorothioate linkage

SEQ ID NO: 2376 - RNA, 100 nt, synthetic construct; identical to SEQ ID NO: 421
  source 1..100: mol_type = other RNA
  modified_base 1: mod_base = OTHER; note = 2'-O-methyl ribonucleotide
  modified_base 2: mod_base = OTHER; note = 2'-O-methyl ribonucleotide
  modified_base 3: mod_base = OTHER; note = 2'-O-methyl ribonucleotide
  modified_base 21: mod_base = OTHER; note = 2'-O-methyl ribonucleotide
  modified_base 28: mod_base = OTHER; note = 2'-O-methyl ribonucleotide
  modified_base 29: mod_base = OTHER; note = 2'-O-methyl ribonucleotide
  modified_base 30: mod_base = OTHER; note = 2'-O-methyl ribonucleotide
  modified_base 31: mod_base = OTHER; note = 2'-O-methyl ribonucleotide
  modified_base 32: mod_base = OTHER; note = 2'-O-methyl ribonucleotide
  modified_base 34: mod_base = OTHER; note = 2'-O-methyl ribonucleotide
  modified_base 35: mod_base = OTHER; note = 2'-O-methyl ribonucleotide
  modified_base 36: mod_base = OTHER; note = 2'-O-methyl ribonucleotide
  modified_base 37: mod_base = OTHER; note = 2'-O-methyl ribonucleotide
  modified_base 38: mod_base = OTHER; note = 2'-O-methyl ribonucleotide
  modified_base 39: mod_base = OTHER; note = 2'-O-methyl ribonucleotide
  modified_base 40: mod_base = OTHER; note = 2'-O-methyl ribonucleotide
  modified_base 41: mod_base = OTHER; note = 2'-O-methyl ribonucleotide
  modified_base 42: mod_base = OTHER; note = 2'-O-methyl ribonucleotide
  modified_base 46: mod_base = OTHER; note = 2'-O-methyl ribonucleotide
  modified_base 48: mod_base = OTHER; note = 2'-O-methyl ribonucleotide
  modified_base 50: mod_base = OTHER; note = 2'-O-methyl ribonucleotide
  modified_base 52: mod_base = OTHER; note = 2'-O-methyl ribonucleotide
  modified_base 53: mod_base = OTHER; note = 2'-O-methyl ribonucleotide
  modified_base 54: mod_base = OTHER; note = 2'-O-methyl ribonucleotide
  modified_base 55: mod_base = OTHER; note = 2'-O-methyl ribonucleotide
  modified_base 56: mod_base = OTHER; note = 2'-O-methyl ribonucleotide
  modified_base 57: mod_base = OTHER; note = 2'-O-methyl ribonucleotide
  modified_base 60: mod_base = OTHER; note = 2'-O-methyl ribonucleotide
  modified_base 61: mod_base = OTHER; note = 2'-O-methyl ribonucleotide
  modified_base 66: mod_base = OTHER; note = 2'-O-methyl ribonucleotide
  modified_base 67: mod_base = OTHER; note = 2'-O-methyl ribonucleotide
  modified_base 70: mod_base = OTHER; note = 2'-O-methyl ribonucleotide
  modified_base 71: mod_base = OTHER; note = 2'-O-methyl ribonucleotide
  modified_base 72: mod_base = OTHER; note = 2'-O-methyl ribonucleotide
  modified_base 74: mod_base = OTHER; note = 2'-O-methyl ribonucleotide
  modified_base 75: mod_base = OTHER; note = 2'-O-methyl ribonucleotide
  modified_base 76: mod_base = OTHER; note = 2'-O-methyl ribonucleotide
  modified_base 77: mod_base = OTHER; note = 2'-O-methyl ribonucleotide
  modified_base 78: mod_base = OTHER; note = 2'-O-methyl ribonucleotide
  modified_base 79: mod_base = OTHER; note = 2'-O-methyl ribonucleotide
  modified_base 80: mod_base = OTHER; note = 2'-O-methyl ribonucleotide
  modified_base 81: mod_base = OTHER; note = 2'-O-methyl ribonucleotide
  modified_base 83: mod_base = OTHER; note = 2'-O-methyl ribonucleotide
  modified_base 84: mod_base = OTHER; note = 2'-O-methyl ribonucleotide
  modified_base 85: mod_base = OTHER; note = 2'-O-methyl ribonucleotide
  modified_base 86: mod_base = OTHER; note = 2'-O-methyl ribonucleotide
  modified_base 87: mod_base = OTHER; note = 2'-O-methyl ribonucleotide
  modified_base 88: mod_base = OTHER; note = 2'-O-methyl ribonucleotide
  modified_base 89: mod_base = OTHER; note = 2'-O-methyl ribonucleotide
  modified_base 90: mod_base = OTHER; note = 2'-O-methyl ribonucleotide
  modified_base 91: mod_base = OTHER; note = 2'-O-methyl ribonucleotide
  modified_base 92: mod_base = OTHER; note = 2'-O-methyl ribonucleotide
  modified_base 93: mod_base = OTHER; note = 2'-O-methyl ribonucleotide
  modified_base 94: mod_base = OTHER; note = 2'-O-methyl ribonucleotide
  modified_base 95: mod_base = OTHER; note = 2'-O-methyl ribonucleotide
  modified_base 96: mod_base = OTHER; note = 2'-O-methyl ribonucleotide
  modified_base 97: mod_base = OTHER; note = 2'-O-methyl ribonucleotide
  modified_base 98: mod_base = OTHER; note = 2'-O-methyl ribonucleotide
  modified_base 99: mod_base = OTHER; note = 2'-O-methyl ribonucleotide
  modified_base 100: mod_base = OTHER; note = 2'-O-methyl ribonucleotide
  modified_base 1..4: mod_base = OTHER; note = phosphorothioate linkage
  modified_base 25..26: mod_base = OTHER; note = phosphorothioate linkage
  modified_base 45..46: mod_base = OTHER; note = phosphorothioate linkage
  modified_base 98..100: mod_base = OTHER; note = phosphorothioate linkage

SEQ ID NO: 2377 - RNA, 100 nt, synthetic construct; identical to SEQ ID NO: 422
  source 1..100: mol_type = other RNA
  modified_base 1: mod_base = OTHER; note = 2'-O-methyl ribonucleotide
  modified_base 2: mod_base = OTHER; note = 2'-O-methyl ribonucleotide
  modified_base 3: mod_base = OTHER; note = 2'-O-methyl ribonucleotide
  modified_base 21: mod_base = OTHER; note = 2'-O-methyl ribonucleotide
  modified_base 28: mod_base = OTHER; note = 2'-O-methyl ribonucleotide
  modified_base 29: mod_base = OTHER; note = 2'-O-methyl ribonucleotide
  modified_base 30: mod_base = OTHER; note = 2'-O-methyl ribonucleotide
  modified_base 31: mod_base = OTHER; note = 2'-O-methyl ribonucleotide
  modified_base 32: mod_base = OTHER; note = 2'-O-methyl ribonucleotide
  modified_base 33: mod_base = OTHER; note = 2'-O-methyl ribonucleotide
  modified_base 34: mod_base = OTHER; note = 2'-O-methyl ribonucleotide
  modified_base 35: mod_base = OTHER; note = 2'-O-methyl ribonucleotide
  modified_base 36: mod_base = OTHER; note = 2'-O-methyl ribonucleotide
  modified_base 37: mod_base = OTHER; note = 2'-O-methyl ribonucleotide
  modified_base 38: mod_base = OTHER; note = 2'-O-methyl ribonucleotide
  modified_base 39: mod_base = OTHER; note = 2'-O-methyl ribonucleotide
  modified_base 40: mod_base = OTHER; note = 2'-O-methyl ribonucleotide
  modified_base 41: mod_base = OTHER; note = 2'-O-methyl ribonucleotide
  modified_base 42: mod_base = OTHER; note = 2'-O-methyl ribonucleotide
  modified_base 46: mod_base = OTHER; note = 2'-O-methyl ribonucleotide
  modified_base 48: mod_base = OTHER; note = 2'-O-methyl ribonucleotide
  modified_base 50: mod_base = OTHER; note = 2'-O-methyl ribonucleotide
  modified_base 52: mod_base = OTHER; note = 2'-O-methyl ribonucleotide
  modified_base 53: mod_base = OTHER; note = 2'-O-methyl ribonucleotide
  modified_base 54: mod_base = OTHER; note = 2'-O-methyl ribonucleotide
  modified_base 55: mod_base = OTHER; note = 2'-O-methyl ribonucleotide
  modified_base 56: mod_base = OTHER; note = 2'-O-methyl ribonucleotide
  modified_base 57: mod_base = OTHER; note = 2'-O-methyl ribonucleotide
  modified_base 60: mod_base = OTHER; note = 2'-O-methyl ribonucleotide
  modified_base 61: mod_base = OTHER; note = 2'-O-methyl ribonucleotide
  modified_base 66: mod_base = OTHER; note = 2'-O-methyl ribonucleotide
  modified_base 67: mod_base = OTHER; note = 2'-O-methyl ribonucleotide
  modified_base 70: mod_base = OTHER; note = 2'-O-methyl ribonucleotide
  modified_base 71: mod_base = OTHER; note = 2'-O-methyl ribonucleotide
  modified_base 72: mod_base = OTHER; note = 2'-O-methyl ribonucleotide
  modified_base 73: mod_base = OTHER; note = 2'-O-methyl ribonucleotide
  modified_base 74: mod_base = OTHER; note = 2'-O-methyl ribonucleotide
  modified_base 75: mod_base = OTHER; note = 2'-O-methyl ribonucleotide
  modified_base 76: mod_base = OTHER; note = 2'-O-methyl ribonucleotide
  modified_base 77: mod_base = OTHER; note = 2'-O-methyl ribonucleotide
  modified_base 78: mod_base = OTHER; note = 2'-O-methyl ribonucleotide
  modified_base 79: mod_base = OTHER; note = 2'-O-methyl ribonucleotide
  modified_base 80: mod_base = OTHER; note = 2'-O-methyl ribonucleotide
  modified_base 81: mod_base = OTHER; note = 2'-O-methyl ribonucleotide
  modified_base 83: mod_base = OTHER; note = 2'-O-methyl ribonucleotide
  modified_base 84: mod_base = OTHER; note = 2'-O-methyl ribonucleotide
  modified_base 85: mod_base = OTHER; note = 2'-O-methyl ribonucleotide
  modified_base 86: mod_base = OTHER; note = 2'-O-methyl ribonucleotide
  modified_base 87: mod_base = OTHER; note = 2'-O-methyl ribonucleotide
  modified_base 88: mod_base = OTHER; note = 2'-O-methyl ribonucleotide
  modified_base 89: mod_base = OTHER; note = 2'-O-methyl ribonucleotide
  modified_base 90: mod_base = OTHER; note = 2'-O-methyl ribonucleotide
  modified_base 91: mod_base = OTHER; note = 2'-O-methyl ribonucleotide
  modified_base 92: mod_base = OTHER; note = 2'-O-methyl ribonucleotide
  modified_base 93: mod_base = OTHER; note = 2'-O-methyl ribonucleotide
  modified_base 94: mod_base = OTHER; note = 2'-O-methyl ribonucleotide
  modified_base 95: mod_base = OTHER; note = 2'-O-methyl ribonucleotide
  modified_base 96: mod_base = OTHER; note = 2'-O-methyl ribonucleotide
  modified_base 97: mod_base = OTHER; note = 2'-O-methyl ribonucleotide
  modified_base 98: mod_base = OTHER; note = 2'-O-methyl ribonucleotide
  modified_base 99: mod_base = OTHER; note = 2'-O-methyl ribonucleotide
  modified_base 100: mod_base = OTHER; note = 2'-O-methyl ribonucleotide
  modified_base 1..4: mod_base = OTHER; note = phosphorothioate linkage
  modified_base 25..26: mod_base = OTHER; note = phosphorothioate linkage
  modified_base 45..46: mod_base = OTHER; note = phosphorothioate linkage
  modified_base 98..100: mod_base = OTHER; note = phosphorothioate linkage

SEQ ID NO: 2378 - RNA, 100 nt, synthetic construct; identical to SEQ ID NO: 422
  source 1..100: mol_type = other RNA
  modified_base 1: mod_base = OTHER; note = 2'-O-methyl ribonucleotide
  modified_base 2: mod_base = OTHER; note = 2'-O-methyl ribonucleotide
  modified_base 3: mod_base = OTHER; note = 2'-O-methyl ribonucleotide
  modified_base 21: mod_base = OTHER; note = 2'-O-methyl ribonucleotide
  modified_base 28: mod_base = OTHER; note = 2'-O-methyl ribonucleotide
  modified_base 29: mod_base = OTHER; note = 2'-O-methyl ribonucleotide
  modified_base 30: mod_base = OTHER; note = 2'-O-methyl ribonucleotide
  modified_base 31: mod_base = OTHER; note = 2'-O-methyl ribonucleotide
  modified_base 32: mod_base = OTHER; note = 2'-O-methyl ribonucleotide
  modified_base 34: mod_base = OTHER; note = 2'-O-methyl ribonucleotide
  modified_base 35: mod_base = OTHER; note = 2'-O-methyl ribonucleotide
  modified_base 36: mod_base = OTHER; note = 2'-O-methyl ribonucleotide
  modified_base 37: mod_base = OTHER; note = 2'-O-methyl ribonucleotide
  modified_base 38: mod_base = OTHER; note = 2'-O-methyl ribonucleotide
  modified_base 39: mod_base = OTHER; note = 2'-O-methyl ribonucleotide
  modified_base 40: mod_base = OTHER; note = 2'-O-methyl ribonucleotide
  modified_base 41: mod_base = OTHER; note = 2'-O-methyl ribonucleotide
  modified_base 42: mod_base = OTHER; note = 2'-O-methyl ribonucleotide
  modified_base 46: mod_base = OTHER; note = 2'-O-methyl ribonucleotide
  modified_base 48: mod_base = OTHER; note = 2'-O-methyl ribonucleotide
  modified_base 50: mod_base = OTHER; note = 2'-O-methyl ribonucleotide
  modified_base 52: mod_base = OTHER; note = 2'-O-methyl ribonucleotide
  modified_base 53: mod_base = OTHER; note = 2'-O-methyl ribonucleotide
  modified_base 54: mod_base = OTHER; note = 2'-O-methyl ribonucleotide
  modified_base 55: mod_base = OTHER; note = 2'-O-methyl ribonucleotide
  modified_base 56: mod_base = OTHER; note = 2'-O-methyl ribonucleotide
  modified_base 57: mod_base = OTHER; note = 2'-O-methyl ribonucleotide
  modified_base 60: mod_base = OTHER; note = 2'-O-methyl ribonucleotide
  modified_base 61: mod_base = OTHER; note = 2'-O-methyl ribonucleotide
  modified_base 66: mod_base = OTHER; note = 2'-O-methyl ribonucleotide
  modified_base 67: mod_base = OTHER; note = 2'-O-methyl ribonucleotide
  modified_base 70: mod_base = OTHER; note = 2'-O-methyl ribonucleotide
  modified_base 71: mod_base = OTHER; note = 2'-O-methyl ribonucleotide
  modified_base 72: mod_base = OTHER; note = 2'-O-methyl ribonucleotide
  modified_base 74: mod_base = OTHER; note = 2'-O-methyl ribonucleotide
  modified_base 75: mod_base = OTHER; note = 2'-O-methyl ribonucleotide
  modified_base 76: mod_base = OTHER; note = 2'-O-methyl ribonucleotide
  modified_base 77: mod_base = OTHER; note = 2'-O-methyl ribonucleotide
  modified_base 78: mod_base = OTHER; note = 2'-O-methyl ribonucleotide
  modified_base 79: mod_base = OTHER; note = 2'-O-methyl ribonucleotide
  modified_base 80: mod_base = OTHER; note = 2'-O-methyl ribonucleotide
  modified_base 81: mod_base = OTHER; note = 2'-O-methyl ribonucleotide
  modified_base 83: mod_base = OTHER; note = 2'-O-methyl ribonucleotide
  modified_base 84: mod_base = OTHER; note = 2'-O-methyl ribonucleotide
  modified_base 85: mod_base = OTHER; note = 2'-O-methyl ribonucleotide
  modified_base 86: mod_base = OTHER; note = 2'-O-methyl ribonucleotide
  modified_base 87: mod_base = OTHER; note = 2'-O-methyl ribonucleotide
  modified_base 88: mod_base = OTHER; note = 2'-O-methyl ribonucleotide
  modified_base 89: mod_base = OTHER; note = 2'-O-methyl ribonucleotide
  modified_base 90: mod_base = OTHER; note = 2'-O-methyl ribonucleotide
  modified_base 91: mod_base = OTHER; note = 2'-O-methyl ribonucleotide
  modified_base 92: mod_base = OTHER; note = 2'-O-methyl ribonucleotide
  modified_base 93: mod_base = OTHER; note = 2'-O-methyl ribonucleotide
  modified_base 94: mod_base = OTHER; note = 2'-O-methyl ribonucleotide
  modified_base 95: mod_base = OTHER; note = 2'-O-methyl ribonucleotide
  modified_base 96: mod_base = OTHER; note = 2'-O-methyl ribonucleotide
  modified_base 97: mod_base = OTHER; note = 2'-O-methyl ribonucleotide
  modified_base 98: mod_base = OTHER; note = 2'-O-methyl ribonucleotide
  modified_base 99: mod_base = OTHER; note = 2'-O-methyl ribonucleotide
  modified_base 100: mod_base = OTHER; note = 2'-O-methyl ribonucleotide
  modified_base 1..4: mod_base = OTHER; note = phosphorothioate linkage
  modified_base 25..26: mod_base = OTHER; note = phosphorothioate linkage
  modified_base 45..46: mod_base = OTHER; note = phosphorothioate linkage
  modified_base 98..100: mod_base = OTHER; note = phosphorothioate linkage

SEQ ID NO: 2379 - RNA, 100 nt, synthetic construct; identical to SEQ ID NO: 55
  source 1..100: mol_type = other RNA
  modified_base 1: mod_base = OTHER; note = 2'-O-methyl ribonucleotide
  modified_base 2: mod_base = OTHER; note = 2'-O-methyl ribonucleotide
  modified_base 3: mod_base = OTHER; note = 2'-O-methyl ribonucleotide
  modified_base 21: mod_base = OTHER; note = 2'-O-methyl ribonucleotide
  modified_base 28: mod_base = OTHER; note = 2'-O-methyl ribonucleotide
  modified_base 29: mod_base = OTHER; note = 2'-O-methyl ribonucleotide
  modified_base 30: mod_base = OTHER; note = 2'-O-methyl ribonucleotide
  modified_base 31: mod_base = OTHER; note = 2'-O-methyl ribonucleotide
  modified_base 32: mod_base = OTHER; note = 2'-O-methyl ribonucleotide
  modified_base 33: mod_base = OTHER; note = 2'-O-methyl ribonucleotide
  modified_base 34: mod_base = OTHER; note = 2'-O-methyl ribonucleotide
  modified_base 35: mod_base = OTHER; note = 2'-O-methyl ribonucleotide
  modified_base 36: mod_base = OTHER; note = 2'-O-methyl ribonucleotide
  modified_base 37: mod_base = OTHER; note = 2'-O-methyl ribonucleotide
  modified_base 38: mod_base = OTHER; note = 2'-O-methyl ribonucleotide
  modified_base 39: mod_base = OTHER; note = 2'-O-methyl ribonucleotide
  modified_base 40: mod_base = OTHER; note = 2'-O-methyl ribonucleotide
  modified_base 41: mod_base = OTHER; note = 2'-O-methyl ribonucleotide
  modified_base 42: mod_base = OTHER; note = 2'-O-methyl ribonucleotide
  modified_base 46: mod_base = OTHER; note = 2'-O-methyl ribonucleotide
  modified_base 48: mod_base = OTHER; note = 2'-O-methyl ribonucleotide
  modified_base 50: mod_base = OTHER; note = 2'-O-methyl ribonucleotide
  modified_base 52: mod_base = OTHER; note = 2'-O-methyl ribonucleotide
  modified_base 53: mod_base = OTHER; note = 2'-O-methyl ribonucleotide
  modified_base 54: mod_base = OTHER; note = 2'-O-methyl ribonucleotide
  modified_base 57: mod_base = OTHER; note = 2'-O-methyl ribonucleotide
  modified_base 61: mod_base = OTHER; note = 2'-O-methyl ribonucleotide
  modified_base 66: mod_base = OTHER; note = 2'-O-methyl ribonucleotide
  modified_base 67: mod_base = OTHER; note = 2'-O-methyl ribonucleotide
  modified_base 70: mod_base = OTHER; note = 2'-O-methyl ribonucleotide
  modified_base 71: mod_base = OTHER; note = 2'-O-methyl ribonucleotide
  modified_base 72: mod_base = OTHER; note = 2'-O-methyl ribonucleotide
  modified_base 74: mod_base = OTHER; note = 2'-O-methyl ribonucleotide
  modified_base 75: mod_base = OTHER; note = 2'-O-methyl ribonucleotide
  modified_base 76: mod_base = OTHER; note = 2'-O-methyl ribonucleotide
  modified_base 77: mod_base = OTHER; note = 2'-O-methyl ribonucleotide
  modified_base 78: mod_base = OTHER; note = 2'-O-methyl ribonucleotide
  modified_base 79: mod_base = OTHER; note = 2'-O-methyl ribonucleotide
  modified_base 80: mod_base = OTHER; note = 2'-O-methyl ribonucleotide
  modified_base 82: mod_base = OTHER; note = 2'-O-methyl ribonucleotide
  modified_base 83: mod_base = OTHER; note = 2'-O-methyl ribonucleotide
  modified_base 84: mod_base = OTHER; note = 2'-O-methyl ribonucleotide
  modified_base 85: mod_base = OTHER; note = 2'-O-methyl ribonucleotide
  modified_base 86: mod_base = OTHER; note = 2'-O-methyl ribonucleotide
  modified_base 87: mod_base = OTHER; note = 2'-O-methyl ribonucleotide
  modified_base 89: mod_base = OTHER; note = 2'-O-methyl ribonucleotide
  modified_base 92: mod_base = OTHER; note = 2'-O-methyl ribonucleotide
  modified_base 93: mod_base = OTHER; note = 2'-O-methyl ribonucleotide
  modified_base 94: mod_base = OTHER; note = 2'-O-methyl ribonucleotide
  modified_base 95: mod_base = OTHER; note = 2'-O-methyl ribonucleotide
  modified_base 96: mod_base = OTHER; note = 2'-O-methyl ribonucleotide
  modified_base 97: mod_base = OTHER; note = 2'-O-methyl ribonucleotide
  modified_base 98: mod_base = OTHER; note = 2'-O-methyl ribonucleotide
  modified_base 99: mod_base = OTHER; note = 2'-O-methyl ribonucleotide
  modified_base 100: mod_base = OTHER; note = 2'-O-methyl ribonucleotide
  modified_base 1..4: mod_base = OTHER; note = phosphorothioate linkage
  modified_base 25..26: mod_base = OTHER; note = phosphorothioate linkage
  modified_base 45..46: mod_base = OTHER; note = phosphorothioate linkage
  modified_base 98..100: mod_base = OTHER; note = phosphorothioate linkage

SEQ ID NO: 2380 - RNA, 100 nt, synthetic construct; identical to SEQ ID NO: 55
  source 1..100: mol_type = other RNA
  modified_base 1: mod_base = OTHER; note = 2'-O-methyl ribonucleotide
  modified_base 2: mod_base = OTHER; note = 2'-O-methyl ribonucleotide
  modified_base 3: mod_base = OTHER; note = 2'-O-methyl ribonucleotide
  modified_base 21: mod_base = OTHER; note = 2'-O-methyl ribonucleotide
  modified_base 28: mod_base = OTHER; note = 2'-O-methyl ribonucleotide
  modified_base 29: mod_base = OTHER; note = 2'-O-methyl ribonucleotide
  modified_base 30: mod_base = OTHER; note = 2'-O-methyl ribonucleotide
  modified_base 31: mod_base = OTHER; note = 2'-O-methyl ribonucleotide
  modified_base 32: mod_base = OTHER; note = 2'-O-methyl ribonucleotide
  modified_base 33: mod_base = OTHER; note = 2'-O-methyl ribonucleotide
  modified_base 34: mod_base = OTHER; note = 2'-O-methyl ribonucleotide
  modified_base 35: mod_base = OTHER; note = 2'-O-methyl ribonucleotide
  modified_base 36: mod_base = OTHER; note = 2'-O-methyl ribonucleotide
  modified_base 37: mod_base = OTHER; note = 2'-O-methyl ribonucleotide
  modified_base 38: mod_base = OTHER; note = 2'-O-methyl ribonucleotide
  modified_base 39: mod_base = OTHER; note = 2'-O-methyl ribonucleotide
  modified_base 40: mod_base = OTHER; note = 2'-O-methyl ribonucleotide
  modified_base 41: mod_base = OTHER; note = 2'-O-methyl ribonucleotide
  modified_base 42: mod_base = OTHER; note = 2'-O-methyl ribonucleotide
  modified_base 46: mod_base = OTHER; note = 2'-O-methyl ribonucleotide
  modified_base 48: mod_base = OTHER; note = 2'-O-methyl ribonucleotide
  modified_base 50: mod_base = OTHER; note = 2'-O-methyl ribonucleotide
  modified_base 52: mod_base = OTHER; note = 2'-O-methyl ribonucleotide
  modified_base 53: mod_base = OTHER; note = 2'-O-methyl ribonucleotide
  modified_base 54: mod_base = OTHER; note = 2'-O-methyl ribonucleotide
  modified_base 55: mod_base = OTHER; note = 2'-O-methyl ribonucleotide
  modified_base 56: mod_base = OTHER; note = 2'-O-methyl ribonucleotide
  modified_base 57: mod_base = OTHER; note = 2'-O-methyl ribonucleotide
  modified_base 60: mod_base = OTHER; note = 2'-O-methyl ribonucleotide
  modified_base 61: mod_base = OTHER; note = 2'-O-methyl ribonucleotide
  modified_base 66: mod_base = OTHER; note = 2'-O-methyl ribonucleotide
  modified_base 67: mod_base = OTHER; note = 2'-O-methyl ribonucleotide
  modified_base 70: mod_base = OTHER; note = 2'-O-methyl ribonucleotide
  modified_base 71: mod_base = OTHER; note = 2'-O-methyl ribonucleotide
  modified_base 72: mod_base = OTHER; note = 2'-O-methyl ribonucleotide
  modified_base 74: mod_base = OTHER; note = 2'-O-methyl ribonucleotide
  modified_base 75: mod_base = OTHER; note = 2'-O-methyl ribonucleotide
  modified_base 76: mod_base = OTHER; note = 2'-O-methyl ribonucleotide
  modified_base 77: mod_base = OTHER; note = 2'-O-methyl ribonucleotide
  modified_base 78: mod_base = OTHER; note = 2'-O-methyl ribonucleotide
  modified_base 79: mod_base = OTHER; note = 2'-O-methyl ribonucleotide
  modified_base 80: mod_base = OTHER; note = 2'-O-methyl ribonucleotide
  modified_base 82: mod_base = OTHER; note = 2'-O-methyl ribonucleotide
  modified_base 83: mod_base = OTHER; note = 2'-O-methyl ribonucleotide
  modified_base 84: mod_base = OTHER; note = 2'-O-methyl ribonucleotide
  modified_base 85: mod_base = OTHER; note = 2'-O-methyl ribonucleotide
  modified_base 86: mod_base = OTHER; note = 2'-O-methyl ribonucleotide
  modified_base 87: mod_base = OTHER; note = 2'-O-methyl ribonucleotide
  modified_base 89: mod_base = OTHER; note = 2'-O-methyl ribonucleotide
  modified_base 92: mod_base = OTHER; note = 2'-O-methyl ribonucleotide
  modified_base 93: mod_base = OTHER; note = 2'-O-methyl ribonucleotide
  modified_base 94: mod_base = OTHER; note = 2'-O-methyl ribonucleotide
  modified_base 95: mod_base = OTHER; note = 2'-O-methyl ribonucleotide
  modified_base 96: mod_base = OTHER; note = 2'-O-methyl ribonucleotide
  modified_base 97: mod_base = OTHER; note = 2'-O-methyl ribonucleotide
  modified_base 98: mod_base = OTHER; note = 2'-O-methyl ribonucleotide
  modified_base 99: mod_base = OTHER; note = 2'-O-methyl ribonucleotide
  modified_base 100: mod_base = OTHER; note = 2'-O-methyl ribonucleotide
  modified_base 1..4: mod_base = OTHER; note = phosphorothioate linkage
  modified_base 25..26: mod_base = OTHER; note = phosphorothioate linkage
  modified_base 45..46: mod_base = OTHER; note = phosphorothioate linkage
  modified_base 98..100: mod_base = OTHER; note = phosphorothioate linkage

SEQ ID NO: 2381 - RNA, 100 nt, synthetic construct; identical to SEQ ID NO: 55
  source 1..100: mol_type = other RNA
  modified_base 1: mod_base = OTHER; note = 2'-O-methyl ribonucleotide
  modified_base 2: mod_base = OTHER; note = 2'-O-methyl ribonucleotide
  modified_base 3: mod_base = OTHER; note = 2'-O-methyl ribonucleotide
  modified_base 21: mod_base = OTHER; note = 2'-O-methyl ribonucleotide
  modified_base 28: mod_base = OTHER; note = 2'-O-methyl ribonucleotide
  modified_base 29: mod_base = OTHER; note = 2'-O-methyl ribonucleotide
  modified_base 30: mod_base = OTHER; note = 2'-O-methyl ribonucleotide
  modified_base 31: mod_base = OTHER; note = 2'-O-methyl ribonucleotide
  modified_base 32: mod_base = OTHER; note = 2'-O-methyl ribonucleotide
  modified_base 33: mod_base = OTHER; note = 2'-O-methyl ribonucleotide
  modified_base 34: mod_base = OTHER; note = 2'-O-methyl ribonucleotide
  modified_base 35: mod_base = OTHER; note = 2'-O-methyl ribonucleotide
  modified_base 36: mod_base = OTHER; note = 2'-O-methyl ribonucleotide
  modified_base 37: mod_base = OTHER; note = 2'-O-methyl ribonucleotide
  modified_base 38: mod_base = OTHER; note = 2'-O-methyl ribonucleotide
  modified_base 39: mod_base = OTHER; note = 2'-O-methyl ribonucleotide
  modified_base 40: mod_base = OTHER; note = 2'-O-methyl ribonucleotide
  modified_base 41: mod_base = OTHER; note = 2'-O-methyl ribonucleotide
  modified_base 42: mod_base = OTHER; note = 2'-O-methyl ribonucleotide
  modified_base 46: mod_base = OTHER; note = 2'-O-methyl ribonucleotide
  modified_base 48: mod_base = OTHER; note = 2'-O-methyl ribonucleotide
  modified_base 50: mod_base = OTHER; note = 2'-O-methyl ribonucleotide
  modified_base 52: mod_base = OTHER; note = 2'-O-methyl ribonucleotide
  modified_base 53: mod_base = OTHER; note = 2'-O-methyl ribonucleotide
  modified_base 54: mod_base = OTHER; note = 2'-O-methyl ribonucleotide
  modified_base 57: mod_base = OTHER; note = 2'-O-methyl ribonucleotide
  modified_base 61: mod_base = OTHER; note = 2'-O-methyl ribonucleotide
  modified_base 66: mod_base = OTHER; note = 2'-O-methyl ribonucleotide
  modified_base 67: mod_base = OTHER; note = 2'-O-methyl ribonucleotide
  modified_base 70: mod_base = OTHER; note = 2'-O-methyl ribonucleotide
  modified_base 71: mod_base = OTHER; note = 2'-O-methyl ribonucleotide
  modified_base 72: mod_base = OTHER; note = 2'-O-methyl ribonucleotide
  modified_base 73: mod_base = OTHER; note = 2'-O-methyl ribonucleotide
  modified_base 74: mod_base = OTHER; note = 2'-O-methyl ribonucleotide
  modified_base 75: mod_base = OTHER; note = 2'-O-methyl ribonucleotide
  modified_base 76: mod_base = OTHER; note = 2'-O-methyl ribonucleotide
  modified_base 77: mod_base = OTHER; note = 2'-O-methyl ribonucleotide
  modified_base 78: mod_base = OTHER; note = 2'-O-methyl ribonucleotide
  modified_base 79: mod_base = OTHER; note = 2'-O-methyl ribonucleotide
  modified_base 80: mod_base = OTHER; note = 2'-O-methyl ribonucleotide
  modified_base 82: mod_base = OTHER; note = 2'-O-methyl ribonucleotide
  modified_base 83: mod_base = OTHER; note = 2'-O-methyl ribonucleotide
  modified_base 84: mod_base = OTHER; note = 2'-O-methyl ribonucleotide
  modified_base 85: mod_base = OTHER; note = 2'-O-methyl ribonucleotide
  modified_base 86: mod_base = OTHER; note = 2'-O-methyl ribonucleotide
  modified_base 87: mod_base = OTHER; note = 2'-O-methyl ribonucleotide
  modified_base 89: mod_base = OTHER; note = 2'-O-methyl ribonucleotide
  modified_base 92: mod_base = OTHER; note = 2'-O-methyl ribonucleotide
  modified_base 93: mod_base = OTHER; note = 2'-O-methyl ribonucleotide
  modified_base 94: mod_base = OTHER; note = 2'-O-methyl ribonucleotide
  modified_base 95: mod_base = OTHER; note = 2'-O-methyl ribonucleotide
  modified_base 96: mod_base = OTHER; note = 2'-O-methyl ribonucleotide
  modified_base 97: mod_base = OTHER; note = 2'-O-methyl ribonucleotide
  modified_base 98: mod_base = OTHER; note = 2'-O-methyl ribonucleotide
  modified_base 99: mod_base = OTHER; note = 2'-O-methyl ribonucleotide
  modified_base 100: mod_base = OTHER; note = 2'-O-methyl ribonucleotide
  modified_base 1..4: mod_base = OTHER; note = phosphorothioate linkage
  modified_base 25..26: mod_base = OTHER; note = phosphorothioate linkage
  modified_base 45..46: mod_base = OTHER; note = phosphorothioate linkage
  modified_base 98..100: mod_base = OTHER; note = phosphorothioate linkage

SEQ ID NO: 2382 - RNA, 100 nt, synthetic construct; identical to SEQ ID NO: 55
  source 1..100: mol_type = other RNA
  modified_base 1: mod_base = OTHER; note = 2'-O-methyl ribonucleotide
  modified_base 2: mod_base = OTHER; note = 2'-O-methyl ribonucleotide
  modified_base 3: mod_base = OTHER; note = 2'-O-methyl ribonucleotide
  modified_base 21: mod_base = OTHER; note = 2'-O-methyl ribonucleotide
  modified_base 28: mod_base = OTHER; note = 2'-O-methyl ribonucleotide
  modified_base 29: mod_base = OTHER; note = 2'-O-methyl ribonucleotide
  modified_base 30: mod_base = OTHER; note = 2'-O-methyl ribonucleotide
  modified_base 31: mod_base = OTHER; note = 2'-O-methyl ribonucleotide
  modified_base 32: mod_base = OTHER; note = 2'-O-methyl ribonucleotide
  modified_base 33: mod_base = OTHER; note = 2'-O-methyl ribonucleotide
  modified_base 34: mod_base = OTHER; note = 2'-O-methyl ribonucleotide
  modified_base 35: mod_base = OTHER; note = 2'-O-methyl ribonucleotide
  modified_base 36: mod_base = OTHER; note = 2'-O-methyl ribonucleotide
  modified_base 37: mod_base = OTHER; note = 2'-O-methyl ribonucleotide
  modified_base 38: mod_base = OTHER; note = 2'-O-methyl ribonucleotide
  modified_base 39: mod_base = OTHER; note = 2'-O-methyl ribonucleotide
  modified_base 40: mod_base = OTHER; note = 2'-O-methyl ribonucleotide
  modified_base 41: mod_base = OTHER; note = 2'-O-methyl ribonucleotide
  modified_base 42: mod_base = OTHER; note = 2'-O-methyl ribonucleotide
  modified_base 46: mod_base = OTHER; note = 2'-O-methyl ribonucleotide
  modified_base 48: mod_base = OTHER; note = 2'-O-methyl ribonucleotide
  modified_base 50: mod_base = OTHER; note = 2'-O-methyl ribonucleotide
  modified_base 52: mod_base = OTHER; note = 2'-O-methyl ribonucleotide
  modified_base 53: mod_base = OTHER; note = 2'-O-methyl ribonucleotide
  modified_base 54: mod_base = OTHER; note = 2'-O-methyl ribonucleotide
  modified_base 57: mod_base = OTHER; note = 2'-O-methyl ribonucleotide
  modified_base 61: mod_base = OTHER; note = 2'-O-methyl ribonucleotide
  modified_base 66: mod_base = OTHER; note = 2'-O-methyl ribonucleotide
  modified_base 67: mod_base = OTHER; note = 2'-O-methyl ribonucleotide
  modified_base 70: mod_base = OTHER; note = 2'-O-methyl ribonucleotide
  modified_base 71: mod_base = OTHER; note = 2'-O-methyl ribonucleotide
  modified_base 72: mod_base = OTHER; note = 2'-O-methyl ribonucleotide
  modified_base 73: mod_base = OTHER; note = 2'-O-methyl ribonucleotide
  modified_base 74: mod_base = OTHER; note = 2'-O-methyl ribonucleotide
  modified_base 75: mod_base = OTHER; note = 2'-O-methyl ribonucleotide
  modified_base 76: mod_base = OTHER; note = 2'-O-methyl ribonucleotide
  modified_base 77: mod_base = OTHER; note = 2'-O-methyl ribonucleotide
  modified_base 78: mod_base = OTHER; note = 2'-O-methyl ribonucleotide
  modified_base 79: mod_base = OTHER; note = 2'-O-methyl ribonucleotide
  modified_base 80: mod_base = OTHER; note = 2'-O-methyl ribonucleotide
  modified_base 82: mod_base = OTHER; note = 2'-O-methyl ribonucleotide
  modified_base 83: mod_base = OTHER; note = 2'-O-methyl ribonucleotide
  modified_base 84: mod_base = OTHER; note = 2'-O-methyl ribonucleotide
  modified_base 85: mod_base = OTHER; note = 2'-O-methyl ribonucleotide
  modified_base 86: mod_base = OTHER; note = 2'-O-methyl ribonucleotide
  modified_base 87: mod_base = OTHER; note = 2'-O-methyl ribonucleotide
  modified_base 89: mod_base = OTHER; note = 2'-O-methyl ribonucleotide
  modified_base 91: mod_base = OTHER; note = 2'-O-methyl ribonucleotide
  modified_base 92: mod_base = OTHER; note = 2'-O-methyl ribonucleotide
  modified_base 93: mod_base = OTHER; note = 2'-O-methyl ribonucleotide
  modified_base 94: mod_base = OTHER; note = 2'-O-methyl ribonucleotide
  modified_base 95: mod_base = OTHER; note = 2'-O-methyl ribonucleotide
  modified_base 96: mod_base = OTHER; note = 2'-O-methyl ribonucleotide
  modified_base 97: mod_base = OTHER; note = 2'-O-methyl ribonucleotide
  modified_base 98: mod_base = OTHER; note = 2'-O-methyl ribonucleotide
  modified_base 99: mod_base = OTHER; note = 2'-O-methyl ribonucleotide
  modified_base 100: mod_base = OTHER; note = 2'-O-methyl ribonucleotide
  modified_base 1..4: mod_base = OTHER; note = phosphorothioate linkage
  modified_base 25..26: mod_base = OTHER; note = phosphorothioate linkage
  modified_base 45..46: mod_base = OTHER; note = phosphorothioate linkage
  modified_base 98..100: mod_base = OTHER; note = phosphorothioate linkage

SEQ ID NO: 2383 - RNA, 100 nt, synthetic construct; identical to SEQ ID NO: 55
  source 1..100: mol_type = other RNA
  modified_base 1: mod_base = OTHER; note = 2'-O-methyl ribonucleotide
  modified_base 2: mod_base = OTHER; note = 2'-O-methyl ribonucleotide
  modified_base 3: mod_base = OTHER; note = 2'-O-methyl ribonucleotide
  modified_base 21: mod_base = OTHER; note = 2'-O-methyl ribonucleotide
  modified_base 28: mod_base = OTHER; note = 2'-O-methyl ribonucleotide
  modified_base 29: mod_base = OTHER; note = 2'-O-methyl ribonucleotide
  modified_base 30: mod_base = OTHER; note = 2'-O-methyl ribonucleotide
  modified_base 31: mod_base = OTHER; note = 2'-O-methyl ribonucleotide
  modified_base 32: mod_base = OTHER; note = 2'-O-methyl ribonucleotide
  modified_base 34: mod_base = OTHER; note = 2'-O-methyl ribonucleotide
  modified_base 35: mod_base = OTHER; note = 2'-O-methyl ribonucleotide
  modified_base 36: mod_base = OTHER; note = 2'-O-methyl ribonucleotide
  modified_base 37: mod_base = OTHER; note = 2'-O-methyl ribonucleotide
  modified_base 38: mod_base = OTHER; note = 2'-O-methyl ribonucleotide
  modified_base 39: mod_base = OTHER; note = 2'-O-methyl ribonucleotide
  modified_base 40: mod_base = OTHER; note = 2'-O-methyl ribonucleotide
  modified_base 41: mod_base = OTHER; note = 2'-O-methyl ribonucleotide
  modified_base 42: mod_base = OTHER; note = 2'-O-methyl ribonucleotide
  modified_base 46: mod_base = OTHER; note = 2'-O-methyl ribonucleotide
  modified_base 48: mod_base = OTHER; note = 2'-O-methyl ribonucleotide
  modified_base 50: mod_base = OTHER; note = 2'-O-methyl ribonucleotide
  modified_base 52: mod_base = OTHER; note = 2'-O-methyl ribonucleotide
  modified_base 53: mod_base = OTHER; note = 2'-O-methyl ribonucleotide
  modified_base 54: mod_base = OTHER; note = 2'-O-methyl ribonucleotide
  modified_base 57: mod_base = OTHER; note = 2'-O-methyl ribonucleotide
  modified_base 61: mod_base = OTHER; note = 2'-O-methyl ribonucleotide
  modified_base 66: mod_base = OTHER; note = 2'-O-methyl ribonucleotide
  modified_base 67: mod_base = OTHER; note = 2'-O-methyl ribonucleotide
  modified_base 70: mod_base = OTHER; note = 2'-O-methyl ribonucleotide
  modified_base 71: mod_base = OTHER; note = 2'-O-methyl ribonucleotide
  modified_base 72: mod_base = OTHER; note = 2'-O-methyl ribonucleotide
  modified_base 73: mod_base = OTHER; note = 2'-O-methyl ribonucleotide
  modified_base 74: mod_base = OTHER; note = 2'-O-methyl ribonucleotide
  modified_base 75: mod_base = OTHER; note = 2'-O-methyl ribonucleotide
  modified_base 76: mod_base = OTHER; note = 2'-O-methyl ribonucleotide
  modified_base 77: mod_base = OTHER; note = 2'-O-methyl ribonucleotide
  modified_base 78: mod_base = OTHER; note = 2'-O-methyl ribonucleotide
  modified_base 79: mod_base = OTHER; note = 2'-O-methyl ribonucleotide
  modified_base 80: mod_base = OTHER; note = 2'-O-methyl ribonucleotide
  modified_base 82: mod_base = OTHER; note = 2'-O-methyl ribonucleotide
  modified_base 83: mod_base = OTHER; note = 2'-O-methyl ribonucleotide
  modified_base 84: mod_base = OTHER; note = 2'-O-methyl ribonucleotide
  modified_base 85: mod_base = OTHER; note = 2'-O-methyl ribonucleotide
  modified_base 86: mod_base = OTHER; note = 2'-O-methyl ribonucleotide
  modified_base 87: mod_base = OTHER; note = 2'-O-methyl ribonucleotide
  modified_base 89: mod_base = OTHER; note = 2'-O-methyl ribonucleotide
  modified_base 92: mod_base = OTHER; note = 2'-O-methyl ribonucleotide
  modified_base 93: mod_base = OTHER; note = 2'-O-methyl ribonucleotide
  modified_base 94: mod_base = OTHER; note = 2'-O-methyl ribonucleotide
  modified_base 95: mod_base = OTHER; note = 2'-O-methyl ribonucleotide
  modified_base 96: mod_base = OTHER; note = 2'-O-methyl ribonucleotide
  modified_base 97: mod_base = OTHER; note = 2'-O-methyl ribonucleotide
  modified_base 98: mod_base = OTHER; note = 2'-O-methyl ribonucleotide
  modified_base 99: mod_base = OTHER; note = 2'-O-methyl ribonucleotide
  modified_base 100: mod_base = OTHER; note = 2'-O-methyl ribonucleotide
  modified_base 1..4: mod_base = OTHER; note = phosphorothioate linkage
  modified_base 25..26: mod_base = OTHER; note = phosphorothioate linkage
  modified_base 45..46: mod_base = OTHER; note = phosphorothioate linkage
  modified_base 98..100: mod_base = OTHER; note = phosphorothioate linkage

SEQ ID NO: 2384 - RNA, 100 nt, synthetic construct; identical to SEQ ID NO: 55
  source 1..100: mol_type = other RNA
  modified_base 1: mod_base = OTHER; note = 2'-O-methyl ribonucleotide
  modified_base 2: mod_base = OTHER; note = 2'-O-methyl ribonucleotide
  modified_base 3: mod_base = OTHER; note = 2'-O-methyl ribonucleotide
  modified_base 21: mod_base = OTHER; note = 2'-O-methyl ribonucleotide
  modified_base 28: mod_base = OTHER; note = 2'-O-methyl ribonucleotide
  modified_base 29: mod_base = OTHER; note = 2'-O-methyl ribonucleotide
  modified_base 30: mod_base = OTHER; note = 2'-O-methyl ribonucleotide
  modified_base 31: mod_base = OTHER; note = 2'-O-methyl ribonucleotide
  modified_base 32: mod_base = OTHER; note = 2'-O-methyl ribonucleotide
  modified_base 34: mod_base = OTHER; note = 2'-O-methyl ribonucleotide
  modified_base 35: mod_base = OTHER; note = 2'-O-methyl ribonucleotide
  modified_base 36: mod_base = OTHER; note = 2'-O-methyl ribonucleotide
  modified_base 37: mod_base = OTHER; note = 2'-O-methyl ribonucleotide
  modified_base 38: mod_base = OTHER; note = 2'-O-methyl ribonucleotide
  modified_base 39: mod_base = OTHER; note = 2'-O-methyl ribonucleotide
  modified_base 40: mod_base = OTHER; note = 2'-O-methyl ribonucleotide
  modified_base 41: mod_base = OTHER; note = 2'-O-methyl ribonucleotide
  modified_base 42: mod_base = OTHER; note = 2'-O-methyl ribonucleotide
  modified_base 46: mod_base = OTHER; note = 2'-O-methyl ribonucleotide
  modified_base 48: mod_base = OTHER; note = 2'-O-methyl ribonucleotide
  modified_base 50: mod_base = OTHER; note = 2'-O-methyl ribonucleotide
  modified_base 52: mod_base = OTHER; note = 2'-O-methyl ribonucleotide
  modified_base 53: mod_base = OTHER; note = 2'-O-methyl ribonucleotide
  modified_base 54: mod_base = OTHER; note = 2'-O-methyl ribonucleotide
  modified_base 57: mod_base = OTHER; note = 2'-O-methyl ribonucleotide
  modified_base 61: mod_base = OTHER; note = 2'-O-methyl ribonucleotide
  modified_base 66: mod_base = OTHER; note = 2'-O-methyl ribonucleotide
  modified_base 67: mod_base = OTHER; note = 2'-O-methyl ribonucleotide
  modified_base 70: mod_base = OTHER; note = 2'-O-methyl ribonucleotide
  modified_base 71: mod_base = OTHER; note = 2'-O-methyl ribonucleotide
  modified_base 72: mod_base = OTHER; note = 2'-O-methyl ribonucleotide
  modified_base 73: mod_base = OTHER; note = 2'-O-methyl ribonucleotide
  modified_base 74: mod_base = OTHER; note = 2'-O-methyl ribonucleotide
  modified_base 75: mod_base = OTHER; note = 2'-O-methyl ribonucleotide
  modified_base 76: mod_base = OTHER; note = 2'-O-methyl ribonucleotide
  modified_base 77: mod_base = OTHER; note = 2'-O-methyl ribonucleotide
  modified_base 78: mod_base = OTHER; note = 2'-O-methyl ribonucleotide
  modified_base 79: mod_base = OTHER; note = 2'-O-methyl ribonucleotide
  modified_base 80: mod_base = OTHER; note = 2'-O-methyl ribonucleotide
  modified_base 82: mod_base = OTHER; note = 2'-O-methyl ribonucleotide
  modified_base 83: mod_base = OTHER; note = 2'-O-methyl ribonucleotide
  modified_base 84: mod_base = OTHER; note = 2'-O-methyl ribonucleotide
  modified_base 85: mod_base = OTHER; note = 2'-O-methyl ribonucleotide
  modified_base 86: mod_base = OTHER; note = 2'-O-methyl ribonucleotide
  modified_base 87: mod_base = OTHER; note = 2'-O-methyl ribonucleotide
  modified_base 89: mod_base = OTHER; note = 2'-O-methyl ribonucleotide
  modified_base 91: mod_base = OTHER; note = 2'-O-methyl ribonucleotide
  modified_base 92: mod_base = OTHER; note = 2'-O-methyl ribonucleotide
  modified_base 93: mod_base = OTHER; note = 2'-O-methyl ribonucleotide
  modified_base 94: mod_base = OTHER; note = 2'-O-methyl ribonucleotide
  modified_base 95: mod_base = OTHER; note = 2'-O-methyl ribonucleotide
  modified_base 96: mod_base = OTHER; note = 2'-O-methyl ribonucleotide
  modified_base 97: mod_base = OTHER; note = 2'-O-methyl ribonucleotide
  modified_base 98: mod_base = OTHER; note = 2'-O-methyl ribonucleotide
  modified_base 99: mod_base = OTHER; note = 2'-O-methyl ribonucleotide
  modified_base 100: mod_base = OTHER; note = 2'-O-methyl ribonucleotide
  modified_base 1..4: mod_base = OTHER; note = phosphorothioate linkage
  modified_base 25..26: mod_base = OTHER; note = phosphorothioate linkage
  modified_base 45..46: mod_base = OTHER; note = phosphorothioate linkage
  modified_base 98..100: mod_base = OTHER; note = phosphorothioate linkage

SEQ ID NO: 2385 - RNA, 100 nt, synthetic construct; identical to SEQ ID NO: 55
  source 1..100: mol_type = other RNA
  modified_base 1: mod_base = OTHER; note = 2'-O-methyl ribonucleotide
  modified_base 2: mod_base = OTHER; note = 2'-O-methyl ribonucleotide
  modified_base 3: mod_base = OTHER; note = 2'-O-methyl ribonucleotide
  modified_base 21: mod_base = OTHER; note = 2'-O-methyl ribonucleotide
  modified_base 28: mod_base = OTHER; note = 2'-O-methyl ribonucleotide
  modified_base 29: mod_base = OTHER; note = 2'-O-methyl ribonucleotide
  modified_base 30: mod_base = OTHER; note = 2'-O-methyl ribonucleotide
  modified_base 31: mod_base = OTHER; note = 2'-O-methyl ribonucleotide
  modified_base 32: mod_base = OTHER; note = 2'-O-methyl ribonucleotide
  modified_base 34: mod_base = OTHER; note = 2'-O-methyl ribonucleotide
  modified_base 35: mod_base = OTHER; note = 2'-O-methyl ribonucleotide
  modified_base 36: mod_base = OTHER; note = 2'-O-methyl ribonucleotide
  modified_base 37: mod_base = OTHER; note = 2'-O-methyl ribonucleotide
  modified_base 38: mod_base = OTHER; note = 2'-O-methyl ribonucleotide
  modified_base 39: mod_base = OTHER; note = 2'-O-methyl ribonucleotide
  modified_base 40: mod_base = OTHER; note = 2'-O-methyl ribonucleotide
  modified_base 41: mod_base = OTHER; note = 2'-O-methyl ribonucleotide
  modified_base 42: mod_base = OTHER; note = 2'-O-methyl ribonucleotide
  modified_base 46: mod_base = OTHER; note = 2'-O-methyl ribonucleotide
  modified_base 48: mod_base = OTHER; note = 2'-O-methyl ribonucleotide
  modified_base 50: mod_base = OTHER; note = 2'-O-methyl ribonucleotide
  modified_base 52: mod_base = OTHER; note = 2'-O-methyl ribonucleotide
  modified_base 53: mod_base = OTHER; note = 2'-O-methyl ribonucleotide
  modified_base 54: mod_base = OTHER; note = 2'-O-methyl ribonucleotide
  modified_base 55: mod_base = OTHER; note = 2'-O-methyl ribonucleotide
  modified_base 56: mod_base = OTHER; note = 2'-O-methyl ribonucleotide
  modified_base 57: mod_base = OTHER; note = 2'-O-methyl ribonucleotide
  modified_base 60: mod_base = OTHER; note = 2'-O-methyl ribonucleotide
  modified_base 61: mod_base = OTHER; note = 2'-O-methyl ribonucleotide
  modified_base 66: mod_base = OTHER; note = 2'-O-methyl ribonucleotide
  modified_base 67: mod_base = OTHER; note = 2'-O-methyl ribonucleotide
  modified_base 70: mod_base = OTHER; note = 2'-O-methyl ribonucleotide
  modified_base 71: mod_base = OTHER; note = 2'-O-methyl ribonucleotide
  modified_base 72: mod_base = OTHER; note = 2'-O-methyl ribonucleotide
  modified_base 74: mod_base = OTHER; note = 2'-O-methyl ribonucleotide
  modified_base 75: mod_base = OTHER; note = 2'-O-methyl ribonucleotide
  modified_base 76: mod_base = OTHER; note = 2'-O-methyl ribonucleotide
  modified_base 77: mod_base = OTHER; note = 2'-O-methyl ribonucleotide
  modified_base 78: mod_base = OTHER; note = 2'-O-methyl ribonucleotide
  modified_base 79: mod_base = OTHER; note = 2'-O-methyl ribonucleotide
  modified_base 80: mod_base = OTHER; note = 2'-O-methyl ribonucleotide
  modified_base 82: mod_base = OTHER; note = 2'-O-methyl ribonucleotide
  modified_base 83: mod_base = OTHER; note = 2'-O-methyl ribonucleotide
  modified_base 84: mod_base = OTHER; note = 2'-O-methyl ribonucleotide
  modified_base 85: mod_base = OTHER; note = 2'-O-methyl ribonucleotide
  modified_base 86: mod_base = OTHER; note = 2'-O-methyl ribonucleotide
  modified_base 87: mod_base = OTHER; note = 2'-O-methyl ribonucleotide
  modified_base 89: mod_base = OTHER; note = 2'-O-methyl ribonucleotide
  modified_base 92: mod_base = OTHER; note = 2'-O-methyl ribonucleotide
  modified_base 93: mod_base = OTHER; note = 2'-O-methyl ribonucleotide
  modified_base 94: mod_base = OTHER; note = 2'-O-methyl ribonucleotide
  modified_base 95: mod_base = OTHER; note = 2'-O-methyl ribonucleotide
  modified_base 96: mod_base = OTHER; note = 2'-O-methyl ribonucleotide
  modified_base 97: mod_base = OTHER; note = 2'-O-methyl ribonucleotide
  modified_base 98: mod_base = OTHER; note = 2'-O-methyl ribonucleotide
  modified_base 99: mod_base = OTHER; note = 2'-O-methyl ribonucleotide
  modified_base 100: mod_base = OTHER; note = 2'-O-methyl ribonucleotide
  modified_base 1..4: mod_base = OTHER; note = phosphorothioate linkage
  modified_base 25..26: mod_base = OTHER; note = phosphorothioate linkage
  modified_base 45..46: mod_base = OTHER; note = phosphorothioate linkage
  modified_base 98..100: mod_base = OTHER; note = phosphorothioate linkage

SEQ ID NO: 2386 - RNA, 100 nt, synthetic construct; identical to SEQ ID NO: 421
  source 1..100: mol_type = other RNA
  modified_base 1: mod_base = OTHER; note = 2'-O-methyl ribonucleotide
  modified_base 2: mod_base = OTHER; note = 2'-O-methyl ribonucleotide
  modified_base 3: mod_base = OTHER; note = 2'-O-methyl ribonucleotide
  modified_base 21: mod_base = OTHER; note = 2'-O-methyl ribonucleotide
  modified_base 28: mod_base = OTHER; note = 2'-O-methyl ribonucleotide
  modified_base 29: mod_base = OTHER; note = 2'-O-methyl ribonucleotide
  modified_base 30: mod_base = OTHER; note = 2'-O-methyl ribonucleotide
  modified_base 31: mod_base = OTHER; note = 2'-O-methyl ribonucleotide
  modified_base 32: mod_base = OTHER; note = 2'-O-methyl ribonucleotide
  modified_base 33: mod_base = OTHER; note = 2'-O-methyl ribonucleotide
  modified_base 34: mod_base = OTHER; note = 2'-O-methyl ribonucleotide
  modified_base 35: mod_base = OTHER; note = 2'-O-methyl ribonucleotide
  modified_base 36: mod_base = OTHER; note = 2'-O-methyl ribonucleotide
  modified_base 37: mod_base = OTHER; note = 2'-O-methyl ribonucleotide
  modified_base 38: mod_base = OTHER; note = 2'-O-methyl ribonucleotide
  modified_base 39: mod_base = OTHER; note = 2'-O-methyl ribonucleotide
  modified_base 40: mod_base = OTHER; note = 2'-O-methyl ribonucleotide
  modified_base 41: mod_base = OTHER; note = 2'-O-methyl ribonucleotide
  modified_base 42: mod_base = OTHER; note = 2'-O-methyl ribonucleotide
  modified_base 46: mod_base = OTHER; note = 2'-O-methyl ribonucleotide
  modified_base 48: mod_base = OTHER; note = 2'-O-methyl ribonucleotide
  modified_base 50: mod_base = OTHER; note = 2'-O-methyl ribonucleotide
  modified_base 52: mod_base = OTHER; note = 2'-O-methyl ribonucleotide
  modified_base 53: mod_base = OTHER; note = 2'-O-methyl ribonucleotide
  modified_base 54: mod_base = OTHER; note = 2'-O-methyl ribonucleotide
  modified_base 55: mod_base = OTHER; note = 2'-O-methyl ribonucleotide
  modified_base 56: mod_base = OTHER; note = 2'-O-methyl ribonucleotide
  modified_base 57: mod_base = OTHER; note = 2'-O-methyl ribonucleotide
  modified_base 60: mod_base = OTHER; note = 2'-O-methyl ribonucleotide
  modified_base 61: mod_base = OTHER; note = 2'-O-methyl ribonucleotide
  modified_base 66: mod_base = OTHER; note = 2'-O-methyl ribonucleotide
  modified_base 67: mod_base = OTHER; note = 2'-O-methyl ribonucleotide
  modified_base 70: mod_base = OTHER; note = 2'-O-methyl ribonucleotide
  modified_base 71: mod_base = OTHER; note = 2'-O-methyl ribonucleotide
  modified_base 72: mod_base = OTHER; note = 2'-O-methyl ribonucleotide
  modified_base 73: mod_base = OTHER; note = 2'-O-methyl ribonucleotide
  modified_base 74: mod_base = OTHER; note = 2'-O-methyl ribonucleotide
  modified_base 75: mod_base = OTHER; note = 2'-O-methyl ribonucleotide
  modified_base 76: mod_base = OTHER; note = 2'-O-methyl ribonucleotide
  modified_base 77: mod_base = OTHER; note = 2'-O-methyl ribonucleotide
  modified_base 78: mod_base = OTHER; note = 2'-O-methyl ribonucleotide
  modified_base 79: mod_base = OTHER; note = 2'-O-methyl ribonucleotide
  modified_base 80: mod_base = OTHER; note = 2'-O-methyl ribonucleotide
  modified_base 81: mod_base = OTHER; note = 2'-O-methyl ribonucleotide
  modified_base 83: mod_base = OTHER; note = 2'-O-methyl ribonucleotide
  modified_base 84: mod_base = OTHER; note = 2'-O-methyl ribonucleotide
  modified_base 85: mod_base = OTHER; note = 2'-O-methyl ribonucleotide
  modified_base 86: mod_base = OTHER; note = 2'-O-methyl ribonucleotide
  modified_base 87: mod_base = OTHER; note = 2'-O-methyl ribonucleotide
  modified_base 88: mod_base = OTHER; note = 2'-O-methyl ribonucleotide
  modified_base 89: mod_base = OTHER; note = 2'-O-methyl ribonucleotide
  modified_base 90: mod_base = OTHER; note = 2'-O-methyl ribonucleotide
  modified_base 91: mod_base = OTHER; note = 2'-O-methyl ribonucleotide
  modified_base 92: mod_base = OTHER; note = 2'-O-methyl ribonucleotide
  modified_base 93: mod_base = OTHER; note = 2'-O-methyl ribonucleotide
  modified_base 94: mod_base = OTHER; note = 2'-O-methyl ribonucleotide
  modified_base 95: mod_base = OTHER; note = 2'-O-methyl ribonucleotide
  modified_base 96: mod_base = OTHER; note = 2'-O-methyl ribonucleotide
  modified_base 97: mod_base = OTHER; note = 2'-O-methyl ribonucleotide
  modified_base 98: mod_base = OTHER; note = 2'-O-methyl ribonucleotide
  modified_base 99: mod_base = OTHER; note = 2'-O-methyl ribonucleotide
  modified_base 100: mod_base = OTHER; note = 2'-O-methyl ribonucleotide
  modified_base 1..4: mod_base = OTHER; note = phosphorothioate linkage
  modified_base 25..26: mod_base = OTHER; note = phosphorothioate linkage
  modified_base 64..65: mod_base = OTHER; note = phosphorothioate linkage
  modified_base 98..100: mod_base = OTHER; note = phosphorothioate linkage

SEQ ID NO: 2387 - RNA, 100 nt, synthetic construct; identical to SEQ ID NO: 421
  source 1..100: mol_type = other RNA
  modified_base 1: mod_base = OTHER; note = 2'-O-methyl ribonucleotide
  modified_base 2: mod_base = OTHER; note = 2'-O-methyl ribonucleotide
  modified_base 3: mod_base = OTHER; note = 2'-O-methyl ribonucleotide
  modified_base 21: mod_base = OTHER; note = 2'-O-methyl ribonucleotide
  modified_base 28: mod_base = OTHER; note = 2'-O-methyl ribonucleotide
  modified_base 29: mod_base = OTHER; note = 2'-O-methyl ribonucleotide
  modified_base 30: mod_base = OTHER; note = 2'-O-methyl ribonucleotide
  modified_base 31: mod_base = OTHER; note = 2'-O-methyl ribonucleotide
  modified_base 32: mod_base = OTHER; note = 2'-O-methyl ribonucleotide
  modified_base 34: mod_base = OTHER; note = 2'-O-methyl ribonucleotide
  modified_base 35: mod_base = OTHER; note = 2'-O-methyl ribonucleotide
  modified_base 36: mod_base = OTHER; note = 2'-O-methyl ribonucleotide
  modified_base 37: mod_base = OTHER; note = 2'-O-methyl ribonucleotide
  modified_base 38: mod_base = OTHER; note = 2'-O-methyl ribonucleotide
  modified_base 39: mod_base = OTHER; note = 2'-O-methyl ribonucleotide
  modified_base 40: mod_base = OTHER; note = 2'-O-methyl ribonucleotide
  modified_base 41: mod_base = OTHER; note = 2'-O-methyl ribonucleotide
  modified_base 42: mod_base = OTHER; note = 2'-O-methyl ribonucleotide
  modified_base 46: mod_base = OTHER; note = 2'-O-methyl ribonucleotide
  modified_base 48: mod_base = OTHER; note = 2'-O-methyl ribonucleotide
  modified_base 50: mod_base = OTHER; note = 2'-O-methyl ribonucleotide
  modified_base 52: mod_base = OTHER; note = 2'-O-methyl ribonucleotide
  modified_base 53: mod_base = OTHER; note = 2'-O-methyl ribonucleotide
  modified_base 54: mod_base = OTHER; note = 2'-O-methyl ribonucleotide
  modified_base 55: mod_base = OTHER; note = 2'-O-methyl ribonucleotide
  modified_base 56: mod_base = OTHER; note = 2'-O-methyl ribonucleotide
  modified_base 57: mod_base = OTHER; note = 2'-O-methyl ribonucleotide
  modified_base 60: mod_base = OTHER; note = 2'-O-methyl ribonucleotide
  modified_base 61: mod_base = OTHER; note = 2'-O-methyl ribonucleotide
  modified_base 66: mod_base = OTHER; note = 2'-O-methyl ribonucleotide
  modified_base 67: mod_base = OTHER; note = 2'-O-methyl ribonucleotide
  modified_base 70: mod_base = OTHER; note = 2'-O-methyl ribonucleotide
  modified_base 71: mod_base = OTHER; note = 2'-O-methyl ribonucleotide
  modified_base 72: mod_base = OTHER; note = 2'-O-methyl ribonucleotide
  modified_base 74: mod_base = OTHER; note = 2'-O-methyl ribonucleotide
  modified_base 75: mod_base = OTHER; note = 2'-O-methyl ribonucleotide
  modified_base 76: mod_base = OTHER; note = 2'-O-methyl ribonucleotide
  modified_base 77: mod_base = OTHER; note = 2'-O-methyl ribonucleotide
  modified_base 78: mod_base = OTHER; note = 2'-O-methyl ribonucleotide
  modified_base 79: mod_base = OTHER; note = 2'-O-methyl ribonucleotide
  modified_base 80: mod_base = OTHER; note = 2'-O-methyl ribonucleotide
  modified_base 81: mod_base = OTHER; note = 2'-O-methyl ribonucleotide
  modified_base 83: mod_base = OTHER; note = 2'-O-methyl ribonucleotide
  modified_base 84: mod_base = OTHER; note = 2'-O-methyl ribonucleotide
  modified_base 85: mod_base = OTHER; note = 2'-O-methyl ribonucleotide
  modified_base 86: mod_base = OTHER; note = 2'-O-methyl ribonucleotide
  modified_base 87: mod_base = OTHER; note = 2'-O-methyl ribonucleotide
  modified_base 88: mod_base = OTHER; note = 2'-O-methyl ribonucleotide
  modified_base 89: mod_base = OTHER; note = 2'-O-methyl ribonucleotide
  modified_base 90: mod_base = OTHER; note = 2'-O-methyl ribonucleotide
  modified_base 91: mod_base = OTHER; note = 2'-O-methyl ribonucleotide
  modified_base 92: mod_base = OTHER; note = 2'-O-methyl ribonucleotide
  modified_base 93: mod_base = OTHER; note = 2'-O-methyl ribonucleotide
  modified_base 94: mod_base = OTHER; note = 2'-O-methyl ribonucleotide
  modified_base 95: mod_base = OTHER; note = 2'-O-methyl ribonucleotide
  modified_base 96: mod_base = OTHER; note = 2'-O-methyl ribonucleotide
  modified_base 97: mod_base = OTHER; note = 2'-O-methyl ribonucleotide
  modified_base 98: mod_base = OTHER; note = 2'-O-methyl ribonucleotide
  modified_base 99: mod_base = OTHER; note = 2'-O-methyl ribonucleotide
  modified_base 100: mod_base = OTHER; note = 2'-O-methyl ribonucleotide
  modified_base 1..4: mod_base = OTHER; note = phosphorothioate linkage
  modified_base 25..26: mod_base = OTHER; note = phosphorothioate linkage
  modified_base 64..65: mod_base = OTHER; note = phosphorothioate linkage
  modified_base 98..100: mod_base = OTHER; note = phosphorothioate linkage

SEQ ID NO: 2388 - RNA, 100 nt, synthetic construct; identical to SEQ ID NO: 422
  source 1..100: mol_type = other RNA
  modified_base 1: mod_base = OTHER; note = 2'-O-methyl ribonucleotide
  modified_base 2: mod_base = OTHER; note = 2'-O-methyl ribonucleotide
  modified_base 3: mod_base = OTHER; note = 2'-O-methyl ribonucleotide
  modified_base 21: mod_base = OTHER; note = 2'-O-methyl ribonucleotide
  modified_base 28: mod_base = OTHER; note = 2'-O-methyl ribonucleotide
  modified_base 29: mod_base = OTHER; note = 2'-O-methyl ribonucleotide
  modified_base 30: mod_base = OTHER; note = 2'-O-methyl ribonucleotide
  modified_base 31: mod_base = OTHER; note = 2'-O-methyl ribonucleotide
  modified_base 32: mod_base = OTHER; note = 2'-O-methyl ribonucleotide
  modified_base 33: mod_base = OTHER; note = 2'-O-methyl ribonucleotide
  modified_base 34: mod_base = OTHER; note = 2'-O-methyl ribonucleotide
  modified_base 35: mod_base = OTHER; note = 2'-O-methyl ribonucleotide
  modified_base 36: mod_base = OTHER; note = 2'-O-methyl ribonucleotide
  modified_base 37: mod_base = OTHER; note = 2'-O-methyl ribonucleotide
  modified_base 38: mod_base = OTHER; note = 2'-O-methyl ribonucleotide
  modified_base 39: mod_base = OTHER; note = 2'-O-methyl ribonucleotide
  modified_base 40: mod_base = OTHER; note = 2'-O-methyl ribonucleotide
  modified_base 41: mod_base = OTHER; note = 2'-O-methyl ribonucleotide
  modified_base 42: mod_base = OTHER; note = 2'-O-methyl ribonucleotide
  modified_base 46: mod_base = OTHER; note = 2'-O-methyl ribonucleotide
  modified_base 48: mod_base = OTHER; note = 2'-O-methyl ribonucleotide
  modified_base 50: mod_base = OTHER; note = 2'-O-methyl ribonucleotide
  modified_base 52: mod_base = OTHER; note = 2'-O-methyl ribonucleotide
  modified_base 53: mod_base = OTHER; note = 2'-O-methyl ribonucleotide
  modified_base 54: mod_base = OTHER; note = 2'-O-methyl ribonucleotide
  modified_base 55: mod_base = OTHER; note = 2'-O-methyl ribonucleotide
  modified_base 56: mod_base = OTHER; note = 2'-O-methyl ribonucleotide
  modified_base 57: mod_base = OTHER; note = 2'-O-methyl ribonucleotide
  modified_base 60: mod_base = OTHER; note = 2'-O-methyl ribonucleotide
  modified_base 61: mod_base = OTHER; note = 2'-O-methyl ribonucleotide
  modified_base 66: mod_base = OTHER; note = 2'-O-methyl ribonucleotide
  modified_base 67: mod_base = OTHER; note = 2'-O-methyl ribonucleotide
  modified_base 70: mod_base = OTHER; note = 2'-O-methyl ribonucleotide
  modified_base 71: mod_base = OTHER; note = 2'-O-methyl ribonucleotide
  modified_base 72: mod_base = OTHER; note = 2'-O-methyl ribonucleotide
  modified_base 73: mod_base = OTHER; note = 2'-O-methyl ribonucleotide
  modified_base 74: mod_base = OTHER; note = 2'-O-methyl ribonucleotide
  modified_base 75: mod_base = OTHER; note = 2'-O-methyl ribonucleotide
  modified_base 76: mod_base = OTHER; note = 2'-O-methyl ribonucleotide
  modified_base 77: mod_base = OTHER; note = 2'-O-methyl ribonucleotide
  modified_base 78: mod_base = OTHER; note = 2'-O-methyl ribonucleotide
  modified_base 79: mod_base = OTHER; note = 2'-O-methyl ribonucleotide
  modified_base 80: mod_base = OTHER; note = 2'-O-methyl ribonucleotide
  modified_base 81: mod_base = OTHER; note = 2'-O-methyl ribonucleotide
  modified_base 83: mod_base = OTHER; note = 2'-O-methyl ribonucleotide
  modified_base 84: mod_base = OTHER; note = 2'-O-methyl ribonucleotide
  modified_base 85: mod_base = OTHER; note = 2'-O-methyl ribonucleotide
  modified_base 86: mod_base = OTHER; note = 2'-O-methyl ribonucleotide
  modified_base 87: mod_base = OTHER; note = 2'-O-methyl ribonucleotide
  modified_base 88: mod_base = OTHER; note = 2'-O-methyl ribonucleotide
  modified_base 89: mod_base = OTHER; note = 2'-O-methyl ribonucleotide
  modified_base 90: mod_base = OTHER; note = 2'-O-methyl ribonucleotide
  modified_base 91: mod_base = OTHER; note = 2'-O-methyl ribonucleotide
  modified_base 92: mod_base = OTHER; note = 2'-O-methyl ribonucleotide
  modified_base 93: mod_base = OTHER; note = 2'-O-methyl ribonucleotide
  modified_base 94: mod_base = OTHER; note = 2'-O-methyl ribonucleotide
  modified_base 95: mod_base = OTHER; note = 2'-O-methyl ribonucleotide
  modified_base 96: mod_base = OTHER; note = 2'-O-methyl ribonucleotide
  modified_base 97: mod_base = OTHER; note = 2'-O-methyl ribonucleotide
  modified_base 98: mod_base = OTHER; note = 2'-O-methyl ribonucleotide
  modified_base 99: mod_base = OTHER; note = 2'-O-methyl ribonucleotide
  modified_base 100: mod_base = OTHER; note = 2'-O-methyl ribonucleotide
  modified_base 1..4: mod_base = OTHER; note = phosphorothioate linkage
  modified_base 25..26: mod_base = OTHER; note = phosphorothioate linkage
  modified_base 64..65: mod_base = OTHER; note = phosphorothioate linkage
  modified_base 98..100: mod_base = OTHER; note = phosphorothioate linkage

SEQ ID NO: 2389 - RNA, 100 nt, synthetic construct; identical to SEQ ID NO: 422
  source 1..100: mol_type = other RNA
  modified_base 1: mod_base = OTHER; note = 2'-O-methyl ribonucleotide
  modified_base 2: mod_base = OTHER; note = 2'-O-methyl ribonucleotide
  modified_base 3: mod_base = OTHER; note = 2'-O-methyl ribonucleotide
  modified_base 21: mod_base = OTHER; note = 2'-O-methyl ribonucleotide
  modified_base 28: mod_base = OTHER; note = 2'-O-methyl ribonucleotide
  modified_base 29: mod_base = OTHER; note = 2'-O-methyl ribonucleotide
  modified_base 30: mod_base = OTHER; note = 2'-O-methyl ribonucleotide
  modified_base 31: mod_base = OTHER; note = 2'-O-methyl ribonucleotide
  modified_base 32: mod_base = OTHER; note = 2'-O-methyl ribonucleotide
  modified_base 34: mod_base = OTHER; note = 2'-O-methyl ribonucleotide
  modified_base 35: mod_base = OTHER; note = 2'-O-methyl ribonucleotide
  modified_base 36: mod_base = OTHER; note = 2'-O-methyl ribonucleotide
  modified_base 37: mod_base = OTHER; note = 2'-O-methyl ribonucleotide
  modified_base 38: mod_base = OTHER; note = 2'-O-methyl ribonucleotide
  modified_base 39: mod_base = OTHER; note = 2'-O-methyl ribonucleotide
  modified_base 40: mod_base = OTHER; note = 2'-O-methyl ribonucleotide
  modified_base 41: mod_base = OTHER; note = 2'-O-methyl ribonucleotide
  modified_base 42: mod_base = OTHER; note = 2'-O-methyl ribonucleotide
  modified_base 46: mod_base = OTHER; note = 2'-O-methyl ribonucleotide
  modified_base 48: mod_base = OTHER; note = 2'-O-methyl ribonucleotide
  modified_base 50: mod_base = OTHER; note = 2'-O-methyl ribonucleotide
  modified_base 52: mod_base = OTHER; note = 2'-O-methyl ribonucleotide
  modified_base 53: mod_base = OTHER; note = 2'-O-methyl ribonucleotide
  modified_base 54: mod_base = OTHER; note = 2'-O-methyl ribonucleotide
  modified_base 55: mod_base = OTHER; note = 2'-O-methyl ribonucleotide
  modified_base 56: mod_base = OTHER; note = 2'-O-methyl ribonucleotide
  modified_base 57: mod_base = OTHER; note = 2'-O-methyl ribonucleotide
  modified_base 60: mod_base = OTHER; note = 2'-O-methyl ribonucleotide
  modified_base 61: mod_base = OTHER; note = 2'-O-methyl ribonucleotide
  modified_base 66: mod_base = OTHER; note = 2'-O-methyl ribonucleotide
  modified_base 67: mod_base = OTHER; note = 2'-O-methyl ribonucleotide
  modified_base 70: mod_base = OTHER; note = 2'-O-methyl ribonucleotide
  modified_base 71: mod_base = OTHER; note = 2'-O-methyl ribonucleotide
  modified_base 72: mod_base = OTHER; note = 2'-O-methyl ribonucleotide
  modified_base 74: mod_base = OTHER; note = 2'-O-methyl ribonucleotide
  modified_base 75: mod_base = OTHER; note = 2'-O-methyl ribonucleotide
  modified_base 76: mod_base = OTHER; note = 2'-O-methyl ribonucleotide
  modified_base 77: mod_base = OTHER; note = 2'-O-methyl ribonucleotide
  modified_base 78: mod_base = OTHER; note = 2'-O-methyl ribonucleotide
  modified_base 79: mod_base = OTHER; note = 2'-O-methyl ribonucleotide
  modified_base 80: mod_base = OTHER; note = 2'-O-methyl ribonucleotide
  modified_base 81: mod_base = OTHER; note = 2'-O-methyl ribonucleotide
  modified_base 83: mod_base = OTHER; note = 2'-O-methyl ribonucleotide
  modified_base 84: mod_base = OTHER; note = 2'-O-methyl ribonucleotide
  modified_base 85: mod_base = OTHER; note = 2'-O-methyl ribonucleotide
  modified_base 86: mod_base = OTHER; note = 2'-O-methyl ribonucleotide
  modified_base 87: mod_base = OTHER; note = 2'-O-methyl ribonucleotide
  modified_base 88: mod_base = OTHER; note = 2'-O-methyl ribonucleotide
  modified_base 89: mod_base = OTHER; note = 2'-O-methyl ribonucleotide
  modified_base 90: mod_base = OTHER; note = 2'-O-methyl ribonucleotide
  modified_base 91: mod_base = OTHER; note = 2'-O-methyl ribonucleotide
  modified_base 92: mod_base = OTHER; note = 2'-O-methyl ribonucleotide
  modified_base 93: mod_base = OTHER; note = 2'-O-methyl ribonucleotide
  modified_base 94: mod_base = OTHER; note = 2'-O-methyl ribonucleotide
  modified_base 95: mod_base = OTHER; note = 2'-O-methyl ribonucleotide
  modified_base 96: mod_base = OTHER; note = 2'-O-methyl ribonucleotide
  modified_base 97: mod_base = OTHER; note = 2'-O-methyl ribonucleotide
  modified_base 98: mod_base = OTHER; note = 2'-O-methyl ribonucleotide
  modified_base 99: mod_base = OTHER; note = 2'-O-methyl ribonucleotide
  modified_base 100: mod_base = OTHER; note = 2'-O-methyl ribonucleotide
  modified_base 1..4: mod_base = OTHER; note = phosphorothioate linkage
  modified_base 25..26: mod_base = OTHER; note = phosphorothioate linkage
  modified_base 64..65: mod_base = OTHER; note = phosphorothioate linkage
  modified_base 98..100: mod_base = OTHER; note = phosphorothioate linkage

SEQ ID NO: 2390 - RNA, 100 nt, synthetic construct; identical to SEQ ID NO: 55
  source 1..100: mol_type = other RNA
  modified_base 1: mod_base = OTHER; note = 2'-O-methyl ribonucleotide
  modified_base 2: mod_base = OTHER; note = 2'-O-methyl ribonucleotide
  modified_base 3: mod_base = OTHER; note = 2'-O-methyl ribonucleotide
  modified_base 21: mod_base = OTHER; note = 2'-O-methyl ribonucleotide
  modified_base 28: mod_base = OTHER; note = 2'-O-methyl ribonucleotide
  modified_base 29: mod_base = OTHER; note = 2'-O-methyl ribonucleotide
  modified_base 30: mod_base = OTHER; note = 2'-O-methyl ribonucleotide
  modified_base 31: mod_base = OTHER; note = 2'-O-methyl ribonucleotide
  modified_base 32: mod_base = OTHER; note = 2'-O-methyl ribonucleotide
  modified_base 33: mod_base = OTHER; note = 2'-O-methyl ribonucleotide
  modified_base 34: mod_base = OTHER; note = 2'-O-methyl ribonucleotide
  modified_base 35: mod_base = OTHER; note = 2'-O-methyl ribonucleotide
  modified_base 36: mod_base = OTHER; note = 2'-O-methyl ribonucleotide
  modified_base 37: mod_base = OTHER; note = 2'-O-methyl ribonucleotide
  modified_base 38: mod_base = OTHER; note = 2'-O-methyl ribonucleotide
  modified_base 39: mod_base = OTHER; note = 2'-O-methyl ribonucleotide
  modified_base 40: mod_base = OTHER; note = 2'-O-methyl ribonucleotide
  modified_base 41: mod_base = OTHER; note = 2'-O-methyl ribonucleotide
  modified_base 42: mod_base = OTHER; note = 2'-O-methyl ribonucleotide
  modified_base 46: mod_base = OTHER; note = 2'-O-methyl ribonucleotide
  modified_base 48: mod_base = OTHER; note = 2'-O-methyl ribonucleotide
  modified_base 50: mod_base = OTHER; note = 2'-O-methyl ribonucleotide
  modified_base 52: mod_base = OTHER; note = 2'-O-methyl ribonucleotide
  modified_base 53: mod_base = OTHER; note = 2'-O-methyl ribonucleotide
  modified_base 54: mod_base = OTHER; note = 2'-O-methyl ribonucleotide
  modified_base 57: mod_base = OTHER; note = 2'-O-methyl ribonucleotide
  modified_base 61: mod_base = OTHER; note = 2'-O-methyl ribonucleotide
  modified_base 66: mod_base = OTHER; note = 2'-O-methyl ribonucleotide
  modified_base 67: mod_base = OTHER; note = 2'-O-methyl ribonucleotide
  modified_base 70: mod_base = OTHER; note = 2'-O-methyl ribonucleotide
  modified_base 71: mod_base = OTHER; note = 2'-O-methyl ribonucleotide
  modified_base 72: mod_base = OTHER; note = 2'-O-methyl ribonucleotide
  modified_base 74: mod_base = OTHER; note = 2'-O-methyl ribonucleotide
  modified_base 75: mod_base = OTHER; note = 2'-O-methyl ribonucleotide
  modified_base 76: mod_base = OTHER; note = 2'-O-methyl ribonucleotide
  modified_base 77: mod_base = OTHER; note = 2'-O-methyl ribonucleotide
  modified_base 78: mod_base = OTHER; note = 2'-O-methyl ribonucleotide
  modified_base 79: mod_base = OTHER; note = 2'-O-methyl ribonucleotide
  modified_base 80: mod_base = OTHER; note = 2'-O-methyl ribonucleotide
  modified_base 82: mod_base = OTHER; note = 2'-O-methyl ribonucleotide
  modified_base 83: mod_base = OTHER; note = 2'-O-methyl ribonucleotide
  modified_base 84: mod_base = OTHER; note = 2'-O-methyl ribonucleotide
  modified_base 85: mod_base = OTHER; note = 2'-O-methyl ribonucleotide
  modified_base 86: mod_base = OTHER; note = 2'-O-methyl ribonucleotide
  modified_base 87: mod_base = OTHER; note = 2'-O-methyl ribonucleotide
  modified_base 89: mod_base = OTHER; note = 2'-O-methyl ribonucleotide
  modified_base 92: mod_base = OTHER; note = 2'-O-methyl ribonucleotide
  modified_base 93: mod_base = OTHER; note = 2'-O-methyl ribonucleotide
  modified_base 94: mod_base = OTHER; note = 2'-O-methyl ribonucleotide
  modified_base 95: mod_base = OTHER; note = 2'-O-methyl ribonucleotide
  modified_base 96: mod_base = OTHER; note = 2'-O-methyl ribonucleotide
  modified_base 97: mod_base = OTHER; note = 2'-O-methyl ribonucleotide
  modified_base 98: mod_base = OTHER; note = 2'-O-methyl ribonucleotide
  modified_base 99: mod_base = OTHER; note = 2'-O-methyl ribonucleotide
  modified_base 100: mod_base = OTHER; note = 2'-O-methyl ribonucleotide
  modified_base 1..4: mod_base = OTHER; note = phosphorothioate linkage
  modified_base 25..26: mod_base = OTHER; note = phosphorothioate linkage
  modified_base 64..65: mod_base = OTHER; note = phosphorothioate linkage
  modified_base 98..100: mod_base = OTHER; note = phosphorothioate linkage

SEQ ID NO: 2391 - RNA, 100 nt, synthetic construct; identical to SEQ ID NO: 55
  source 1..100: mol_type = other RNA
  modified_base 1: mod_base = OTHER; note = 2'-O-methyl ribonucleotide
  modified_base 2: mod_base = OTHER; note = 2'-O-methyl ribonucleotide
  modified_base 3: mod_base = OTHER; note = 2'-O-methyl ribonucleotide
  modified_base 21: mod_base = OTHER; note = 2'-O-methyl ribonucleotide
  modified_base 28: mod_base = OTHER; note = 2'-O-methyl ribonucleotide
  modified_base 29: mod_base = OTHER; note = 2'-O-methyl ribonucleotide
  modified_base 30: mod_base = OTHER; note = 2'-O-methyl ribonucleotide
  modified_base 31: mod_base = OTHER; note = 2'-O-methyl ribonucleotide
  modified_base 32: mod_base = OTHER; note = 2'-O-methyl ribonucleotide
  modified_base 33: mod_base = OTHER; note = 2'-O-methyl ribonucleotide
  modified_base 34: mod_base = OTHER; note = 2'-O-methyl ribonucleotide
  modified_base 35: mod_base = OTHER; note = 2'-O-methyl ribonucleotide
  modified_base 36: mod_base = OTHER; note = 2'-O-methyl ribonucleotide
  modified_base 37: mod_base = OTHER; note = 2'-O-methyl ribonucleotide
  modified_base 38: mod_base = OTHER; note = 2'-O-methyl ribonucleotide
  modified_base 39: mod_base = OTHER; note = 2'-O-methyl ribonucleotide
  modified_base 40: mod_base = OTHER; note = 2'-O-methyl ribonucleotide
  modified_base 41: mod_base = OTHER; note = 2'-O-methyl ribonucleotide
  modified_base 42: mod_base = OTHER; note = 2'-O-methyl ribonucleotide
  modified_base 46: mod_base = OTHER; note = 2'-O-methyl ribonucleotide
  modified_base 48: mod_base = OTHER; note = 2'-O-methyl ribonucleotide
  modified_base 50: mod_base = OTHER; note = 2'-O-methyl ribonucleotide
  modified_base 52: mod_base = OTHER; note = 2'-O-methyl ribonucleotide
  modified_base 53: mod_base = OTHER; note = 2'-O-methyl ribonucleotide
  modified_base 54: mod_base = OTHER; note = 2'-O-methyl ribonucleotide
  modified_base 55: mod_base = OTHER; note = 2'-O-methyl ribonucleotide
  modified_base 56: mod_base = OTHER; note = 2'-O-methyl ribonucleotide
  modified_base 57: mod_base = OTHER; note = 2'-O-methyl ribonucleotide
  modified_base 60: mod_base = OTHER; note = 2'-O-methyl ribonucleotide
  modified_base 61: mod_base = OTHER; note = 2'-O-methyl ribonucleotide
  modified_base 66: mod_base = OTHER; note = 2'-O-methyl ribonucleotide
  modified_base 67: mod_base = OTHER; note = 2'-O-methyl ribonucleotide
  modified_base 70: mod_base = OTHER; note = 2'-O-methyl ribonucleotide
  modified_base 71: mod_base = OTHER; note = 2'-O-methyl ribonucleotide
  modified_base 72: mod_base = OTHER; note = 2'-O-methyl ribonucleotide
  modified_base 74: mod_base = OTHER; note = 2'-O-methyl ribonucleotide
  modified_base 75: mod_base = OTHER; note = 2'-O-methyl ribonucleotide
  modified_base 76: mod_base = OTHER; note = 2'-O-methyl ribonucleotide
  modified_base 77: mod_base = OTHER; note = 2'-O-methyl ribonucleotide
  modified_base 78: mod_base = OTHER; note = 2'-O-methyl ribonucleotide
  modified_base 79: mod_base = OTHER; note = 2'-O-methyl ribonucleotide
  modified_base 80: mod_base = OTHER; note = 2'-O-methyl ribonucleotide
  modified_base 82: mod_base = OTHER; note = 2'-O-methyl ribonucleotide
  modified_base 83: mod_base = OTHER; note = 2'-O-methyl ribonucleotide
  modified_base 84: mod_base = OTHER; note = 2'-O-methyl ribonucleotide
  modified_base 85: mod_base = OTHER; note = 2'-O-methyl ribonucleotide
  modified_base 86: mod_base = OTHER; note = 2'-O-methyl ribonucleotide
  modified_base 87: mod_base = OTHER; note = 2'-O-methyl ribonucleotide
  modified_base 89: mod_base = OTHER; note = 2'-O-methyl ribonucleotide
  modified_base 92: mod_base = OTHER; note = 2'-O-methyl ribonucleotide
  modified_base 93: mod_base = OTHER; note = 2'-O-methyl ribonucleotide
  modified_base 94: mod_base = OTHER; note = 2'-O-methyl ribonucleotide
  modified_base 95: mod_base = OTHER; note = 2'-O-methyl ribonucleotide
  modified_base 96: mod_base = OTHER; note = 2'-O-methyl ribonucleotide
  modified_base 97: mod_base = OTHER; note = 2'-O-methyl ribonucleotide
  modified_base 98: mod_base = OTHER; note = 2'-O-methyl ribonucleotide
  modified_base 99: mod_base = OTHER; note = 2'-O-methyl ribonucleotide
  modified_base 100: mod_base = OTHER; note = 2'-O-methyl ribonucleotide
  modified_base 1..4: mod_base = OTHER; note = phosphorothioate linkage
  modified_base 25..26: mod_base = OTHER; note = phosphorothioate linkage
  modified_base 64..65: mod_base = OTHER; note = phosphorothioate linkage
  modified_base 98..100: mod_base = OTHER; note = phosphorothioate linkage

SEQ ID NO: 2392 - RNA, 100 nt, synthetic construct; identical to SEQ ID NO: 55
  source 1..100: mol_type = other RNA
  modified_base 1: mod_base = OTHER; note = 2'-O-methyl ribonucleotide
  modified_base 2: mod_base = OTHER; note = 2'-O-methyl ribonucleotide
  modified_base 3: mod_base = OTHER; note = 2'-O-methyl ribonucleotide
  modified_base 21: mod_base = OTHER; note = 2'-O-methyl ribonucleotide
  modified_base 28: mod_base = OTHER; note = 2'-O-methyl ribonucleotide
  modified_base 29: mod_base = OTHER; note = 2'-O-methyl ribonucleotide
  modified_base 30: mod_base = OTHER; note = 2'-O-methyl ribonucleotide
  modified_base 31: mod_base = OTHER; note = 2'-O-methyl ribonucleotide
  modified_base 32: mod_base = OTHER; note = 2'-O-methyl ribonucleotide
  modified_base 33: mod_base = OTHER; note = 2'-O-methyl ribonucleotide
  modified_base 34: mod_base = OTHER; note = 2'-O-methyl ribonucleotide
  modified_base 35: mod_base = OTHER; note = 2'-O-methyl ribonucleotide
  modified_base 36: mod_base = OTHER; note = 2'-O-methyl ribonucleotide
  modified_base 37: mod_base = OTHER; note = 2'-O-methyl ribonucleotide
  modified_base 38: mod_base = OTHER; note = 2'-O-methyl ribonucleotide
  modified_base 39: mod_base = OTHER; note = 2'-O-methyl ribonucleotide
  modified_base 40: mod_base = OTHER; note = 2'-O-methyl ribonucleotide
  modified_base 41: mod_base = OTHER; note = 2'-O-methyl ribonucleotide
  modified_base 42: mod_base = OTHER; note = 2'-O-methyl ribonucleotide
  modified_base 46: mod_base = OTHER; note = 2'-O-methyl ribonucleotide
  modified_base 48: mod_base = OTHER; note = 2'-O-methyl ribonucleotide
  modified_base 50: mod_base = OTHER; note = 2'-O-methyl ribonucleotide
  modified_base 52: mod_base = OTHER; note = 2'-O-methyl ribonucleotide
  modified_base 53: mod_base = OTHER; note = 2'-O-methyl ribonucleotide
  modified_base 54: mod_base = OTHER; note = 2'-O-methyl ribonucleotide
  modified_base 57: mod_base = OTHER; note = 2'-O-methyl ribonucleotide
  modified_base 61: mod_base = OTHER; note = 2'-O-methyl ribonucleotide
  modified_base 66: mod_base = OTHER; note = 2'-O-methyl ribonucleotide
  modified_base 67: mod_base = OTHER; note = 2'-O-methyl ribonucleotide
  modified_base 70: mod_base = OTHER; note = 2'-O-methyl ribonucleotide
  modified_base 71: mod_base = OTHER; note = 2'-O-methyl ribonucleotide
  modified_base 72: mod_base = OTHER; note = 2'-O-methyl ribonucleotide
  modified_base 73: mod_base = OTHER; note = 2'-O-methyl ribonucleotide
  modified_base 74: mod_base = OTHER; note = 2'-O-methyl ribonucleotide
  modified_base 75: mod_base = OTHER; note = 2'-O-methyl ribonucleotide
  modified_base 76: mod_base = OTHER; note = 2'-O-methyl ribonucleotide
  modified_base 77: mod_base = OTHER; note = 2'-O-methyl ribonucleotide
  modified_base 78: mod_base = OTHER; note = 2'-O-methyl ribonucleotide
  modified_base 79: mod_base = OTHER; note = 2'-O-methyl ribonucleotide
  modified_base 80: mod_base = OTHER; note = 2'-O-methyl ribonucleotide
  modified_base 82: mod_base = OTHER; note = 2'-O-methyl ribonucleotide
  modified_base 83: mod_base = OTHER; note = 2'-O-methyl ribonucleotide
  modified_base 84: mod_base = OTHER; note = 2'-O-methyl ribonucleotide
  modified_base 85: mod_base = OTHER; note = 2'-O-methyl ribonucleotide
  modified_base 86: mod_base = OTHER; note = 2'-O-methyl ribonucleotide
  modified_base 87: mod_base = OTHER; note = 2'-O-methyl ribonucleotide
  modified_base 89: mod_base = OTHER; note = 2'-O-methyl ribonucleotide
  modified_base 92: mod_base = OTHER; note = 2'-O-methyl ribonucleotide
  modified_base 93: mod_base = OTHER; note = 2'-O-methyl ribonucleotide
  modified_base 94: mod_base = OTHER; note = 2'-O-methyl ribonucleotide
  modified_base 95: mod_base = OTHER; note = 2'-O-methyl ribonucleotide
  modified_base 96: mod_base = OTHER; note = 2'-O-methyl ribonucleotide
  modified_base 97: mod_base = OTHER; note = 2'-O-methyl ribonucleotide
  modified_base 98: mod_base = OTHER; note = 2'-O-methyl ribonucleotide
  modified_base 99: mod_base = OTHER; note = 2'-O-methyl ribonucleotide
  modified_base 100: mod_base = OTHER; note = 2'-O-methyl ribonucleotide
  modified_base 1..4: mod_base = OTHER; note = phosphorothioate linkage
  modified_base 25..26: mod_base = OTHER; note = phosphorothioate linkage
  modified_base 64..65: mod_base = OTHER; note = phosphorothioate linkage
  modified_base 98..100: mod_base = OTHER; note = phosphorothioate linkage

SEQ ID NO: 2393 - RNA, 100 nt, synthetic construct; identical to SEQ ID NO: 55
  source 1..100: mol_type = other RNA
  modified_base 1: mod_base = OTHER; note = 2'-O-methyl ribonucleotide
  modified_base 2: mod_base = OTHER; note = 2'-O-methyl ribonucleotide
  modified_base 3: mod_base = OTHER; note = 2'-O-methyl ribonucleotide
  modified_base 21: mod_base = OTHER; note = 2'-O-methyl ribonucleotide
  modified_base 28: mod_base = OTHER; note = 2'-O-methyl ribonucleotide
  modified_base 29: mod_base = OTHER; note = 2'-O-methyl ribonucleotide
  modified_base 30: mod_base = OTHER; note = 2'-O-methyl ribonucleotide
  modified_base 31: mod_base = OTHER; note = 2'-O-methyl ribonucleotide
  modified_base 32: mod_base = OTHER; note = 2'-O-methyl ribonucleotide
  modified_base 34: mod_base = OTHER; note = 2'-O-methyl ribonucleotide
  modified_base 35: mod_base = OTHER; note = 2'-O-methyl ribonucleotide
  modified_base 36: mod_base = OTHER; note = 2'-O-methyl ribonucleotide
  modified_base 37: mod_base = OTHER; note = 2'-O-methyl ribonucleotide
  modified_base 38: mod_base = OTHER; note = 2'-O-methyl ribonucleotide
  modified_base 39: mod_base = OTHER; note = 2'-O-methyl ribonucleotide
  modified_base 40: mod_base = OTHER; note = 2'-O-methyl ribonucleotide
  modified_base 41: mod_base = OTHER; note = 2'-O-methyl ribonucleotide
  modified_base 42: mod_base = OTHER; note = 2'-O-methyl ribonucleotide
  modified_base 46: mod_base = OTHER; note = 2'-O-methyl ribonucleotide
  modified_base 48: mod_base = OTHER; note = 2'-O-methyl ribonucleotide
  modified_base 50: mod_base = OTHER; note = 2'-O-methyl ribonucleotide
  modified_base 52: mod_base = OTHER; note = 2'-O-methyl ribonucleotide
  modified_base 53: mod_base = OTHER; note = 2'-O-methyl ribonucleotide
  modified_base 54: mod_base = OTHER; note = 2'-O-methyl ribonucleotide
  modified_base 55: mod_base = OTHER; note = 2'-O-methyl ribonucleotide
  modified_base 56: mod_base = OTHER; note = 2'-O-methyl ribonucleotide
  modified_base 57: mod_base = OTHER; note = 2'-O-methyl ribonucleotide
  modified_base 60: mod_base = OTHER; note = 2'-O-methyl ribonucleotide
  modified_base 61: mod_base = OTHER; note = 2'-O-methyl ribonucleotide
  modified_base 66: mod_base = OTHER; note = 2'-O-methyl ribonucleotide
  modified_base 67: mod_base = OTHER; note = 2'-O-methyl ribonucleotide
  modified_base 70: mod_base = OTHER; note = 2'-O-methyl ribonucleotide
  modified_base 71: mod_base = OTHER; note = 2'-O-methyl ribonucleotide
  modified_base 72: mod_base = OTHER; note = 2'-O-methyl ribonucleotide
  modified_base 74: mod_base = OTHER; note = 2'-O-methyl ribonucleotide
  modified_base 75: mod_base = OTHER; note = 2'-O-methyl ribonucleotide
  modified_base 76: mod_base = OTHER; note = 2'-O-methyl ribonucleotide
  modified_base 77: mod_base = OTHER; note = 2'-O-methyl ribonucleotide
  modified_base 78: mod_base = OTHER; note = 2'-O-methyl ribonucleotide
  modified_base 79: mod_base = OTHER; note = 2'-O-methyl ribonucleotide
  modified_base 80: mod_base = OTHER; note = 2'-O-methyl ribonucleotide
  modified_base 82: mod_base = OTHER; note = 2'-O-methyl ribonucleotide
  modified_base 83: mod_base = OTHER; note = 2'-O-methyl ribonucleotide
  modified_base 84: mod_base = OTHER; note = 2'-O-methyl ribonucleotide
  modified_base 85: mod_base = OTHER; note = 2'-O-methyl ribonucleotide
  modified_base 86: mod_base = OTHER; note = 2'-O-methyl ribonucleotide
  modified_base 87: mod_base = OTHER; note = 2'-O-methyl ribonucleotide
  modified_base 89: mod_base = OTHER; note = 2'-O-methyl ribonucleotide
  modified_base 92: mod_base = OTHER; note = 2'-O-methyl ribonucleotide
  modified_base 93: mod_base = OTHER; note = 2'-O-methyl ribonucleotide
  modified_base 94: mod_base = OTHER; note = 2'-O-methyl ribonucleotide
  modified_base 95: mod_base = OTHER; note = 2'-O-methyl ribonucleotide
  modified_base 96: mod_base = OTHER; note = 2'-O-methyl ribonucleotide
  modified_base 97: mod_base = OTHER; note = 2'-O-methyl ribonucleotide
  modified_base 98: mod_base = OTHER; note = 2'-O-methyl ribonucleotide
  modified_base 99: mod_base = OTHER; note = 2'-O-methyl ribonucleotide
  modified_base 100: mod_base = OTHER; note = 2'-O-methyl ribonucleotide
  modified_base 1..4: mod_base = OTHER; note = phosphorothioate linkage
  modified_base 25..26: mod_base = OTHER; note = phosphorothioate linkage
  modified_base 64..65: mod_base = OTHER; note = phosphorothioate linkage
  modified_base 98..100: mod_base = OTHER; note = phosphorothioate linkage

SEQ ID NO: 2394 - RNA, 100 nt, synthetic construct; identical to SEQ ID NO: 421
  source 1..100: mol_type = other RNA
  modified_base 1: mod_base = OTHER; note = 2'-O-methyl ribonucleotide
  modified_base 2: mod_base = OTHER; note = 2'-O-methyl ribonucleotide
  modified_base 3: mod_base = OTHER; note = 2'-O-methyl ribonucleotide
  modified_base 21: mod_base = OTHER; note = 2'-O-methyl ribonucleotide
  modified_base 28: mod_base = OTHER; note = 2'-O-methyl ribonucleotide
  modified_base 29: mod_base = OTHER; note = 2'-O-methyl ribonucleotide
  modified_base 30: mod_base = OTHER; note = 2'-O-methyl ribonucleotide
  modified_base 31: mod_base = OTHER; note = 2'-O-methyl ribonucleotide
  modified_base 32: mod_base = OTHER; note = 2'-O-methyl ribonucleotide
  modified_base 33: mod_base = OTHER; note = 2'-O-methyl ribonucleotide
  modified_base 34: mod_base = OTHER; note = 2'-O-methyl ribonucleotide
  modified_base 35: mod_base = OTHER; note = 2'-O-methyl ribonucleotide
  modified_base 36: mod_base = OTHER; note = 2'-O-methyl ribonucleotide
  modified_base 37: mod_base = OTHER; note = 2'-O-methyl ribonucleotide
  modified_base 38: mod_base = OTHER; note = 2'-O-methyl ribonucleotide
  modified_base 39: mod_base = OTHER; note = 2'-O-methyl ribonucleotide
  modified_base 40: mod_base = OTHER; note = 2'-O-methyl ribonucleotide
  modified_base 41: mod_base = OTHER; note = 2'-O-methyl ribonucleotide
  modified_base 42: mod_base = OTHER; note = 2'-O-methyl ribonucleotide
  modified_base 46: mod_base = OTHER; note = 2'-O-methyl ribonucleotide
  modified_base 48: mod_base = OTHER; note = 2'-O-methyl ribonucleotide
  modified_base 50: mod_base = OTHER; note = 2'-O-methyl ribonucleotide
  modified_base 52: mod_base = OTHER; note = 2'-O-methyl ribonucleotide
  modified_base 53: mod_base = OTHER; note = 2'-O-methyl ribonucleotide
  modified_base 54: mod_base = OTHER; note = 2'-O-methyl ribonucleotide
  modified_base 55: mod_base = OTHER; note = 2'-O-methyl ribonucleotide
  modified_base 56: mod_base = OTHER; note = 2'-O-methyl ribonucleotide
  modified_base 57: mod_base = OTHER; note = 2'-O-methyl ribonucleotide
  modified_base 60: mod_base = OTHER; note = 2'-O-methyl ribonucleotide
  modified_base 61: mod_base = OTHER; note = 2'-O-methyl ribonucleotide
  modified_base 66: mod_base = OTHER; note = 2'-O-methyl ribonucleotide
  modified_base 67: mod_base = OTHER; note = 2'-O-methyl ribonucleotide
  modified_base 70: mod_base = OTHER; note = 2'-O-methyl ribonucleotide
  modified_base 71: mod_base = OTHER; note = 2'-O-methyl ribonucleotide
  modified_base 72: mod_base = OTHER; note = 2'-O-methyl ribonucleotide
  modified_base 73: mod_base = OTHER; note = 2'-O-methyl ribonucleotide
  modified_base 74: mod_base = OTHER; note = 2'-O-methyl ribonucleotide
  modified_base 75: mod_base = OTHER; note = 2'-O-methyl ribonucleotide
  modified_base 76: mod_base = OTHER; note = 2'-O-methyl ribonucleotide
  modified_base 77: mod_base = OTHER; note = 2'-O-methyl ribonucleotide
  modified_base 78: mod_base = OTHER; note = 2'-O-methyl ribonucleotide
  modified_base 79: mod_base = OTHER; note = 2'-O-methyl ribonucleotide
  modified_base 80: mod_base = OTHER; note = 2'-O-methyl ribonucleotide
  modified_base 81: mod_base = OTHER; note = 2'-O-methyl ribonucleotide
  modified_base 83: mod_base = OTHER; note = 2'-O-methyl ribonucleotide
  modified_base 84: mod_base = OTHER; note = 2'-O-methyl ribonucleotide
  modified_base 85: mod_base = OTHER; note = 2'-O-methyl ribonucleotide
  modified_base 86: mod_base = OTHER; note = 2'-O-methyl ribonucleotide
  modified_base 87: mod_base = OTHER; note = 2'-O-methyl ribonucleotide
  modified_base 88: mod_base = OTHER; note = 2'-O-methyl ribonucleotide
  modified_base 89: mod_base = OTHER; note = 2'-O-methyl ribonucleotide
  modified_base 90: mod_base = OTHER; note = 2'-O-methyl ribonucleotide
  modified_base 91: mod_base = OTHER; note = 2'-O-methyl ribonucleotide
  modified_base 92: mod_base = OTHER; note = 2'-O-methyl ribonucleotide
  modified_base 93: mod_base = OTHER; note = 2'-O-methyl ribonucleotide
  modified_base 94: mod_base = OTHER; note = 2'-O-methyl ribonucleotide
  modified_base 95: mod_base = OTHER; note = 2'-O-methyl ribonucleotide
  modified_base 96: mod_base = OTHER; note = 2'-O-methyl ribonucleotide
  modified_base 97: mod_base = OTHER; note = 2'-O-methyl ribonucleotide
  modified_base 98: mod_base = OTHER; note = 2'-O-methyl ribonucleotide
  modified_base 99: mod_base = OTHER; note = 2'-O-methyl ribonucleotide
  modified_base 100: mod_base = OTHER; note = 2'-O-methyl ribonucleotide
  modified_base 1..4: mod_base = OTHER; note = phosphorothioate linkage
  modified_base 25..26: mod_base = OTHER; note = phosphorothioate linkage
  modified_base 45..46: mod_base = OTHER; note = phosphorothioate linkage
  modified_base 64..65: mod_base = OTHER; note = phosphorothioate linkage
  modified_base 98..100: mod_base = OTHER; note = phosphorothioate linkage

SEQ ID NO: 2395 - RNA, 100 nt, synthetic construct; identical to SEQ ID NO: 421
  source 1..100: mol_type = other RNA
  modified_base 1: mod_base = OTHER; note = 2'-O-methyl ribonucleotide
  modified_base 2: mod_base = OTHER; note = 2'-O-methyl ribonucleotide
  modified_base 3: mod_base = OTHER; note = 2'-O-methyl ribonucleotide
  modified_base 21: mod_base = OTHER; note = 2'-O-methyl ribonucleotide
  modified_base 28: mod_base = OTHER; note = 2'-O-methyl ribonucleotide
  modified_base 29: mod_base = OTHER; note = 2'-O-methyl ribonucleotide
  modified_base 30: mod_base = OTHER; note = 2'-O-methyl ribonucleotide
  modified_base 31: mod_base = OTHER; note = 2'-O-methyl ribonucleotide
  modified_base 32: mod_base = OTHER; note = 2'-O-methyl ribonucleotide
  modified_base 34: mod_base = OTHER; note = 2'-O-methyl ribonucleotide
  modified_base 35: mod_base = OTHER; note = 2'-O-methyl ribonucleotide
  modified_base 36: mod_base = OTHER; note = 2'-O-methyl ribonucleotide
  modified_base 37: mod_base = OTHER; note = 2'-O-methyl ribonucleotide
  modified_base 38: mod_base = OTHER; note = 2'-O-methyl ribonucleotide
  modified_base 39: mod_base = OTHER; note = 2'-O-methyl ribonucleotide
  modified_base 40: mod_base = OTHER; note = 2'-O-methyl ribonucleotide
  modified_base 41: mod_base = OTHER; note = 2'-O-methyl ribonucleotide
  modified_base 42: mod_base = OTHER; note = 2'-O-methyl ribonucleotide
  modified_base 46: mod_base = OTHER; note = 2'-O-methyl ribonucleotide
  modified_base 48: mod_base = OTHER; note = 2'-O-methyl ribonucleotide
  modified_base 50: mod_base = OTHER; note = 2'-O-methyl ribonucleotide
  modified_base 52: mod_base = OTHER; note = 2'-O-methyl ribonucleotide
  modified_base 53: mod_base = OTHER; note = 2'-O-methyl ribonucleotide
  modified_base 54: mod_base = OTHER; note = 2'-O-methyl ribonucleotide
  modified_base 55: mod_base = OTHER; note = 2'-O-methyl ribonucleotide
  modified_base 56: mod_base = OTHER; note = 2'-O-methyl ribonucleotide
  modified_base 57: mod_base = OTHER; note = 2'-O-methyl ribonucleotide
  modified_base 60: mod_base = OTHER; note = 2'-O-methyl ribonucleotide
  modified_base 61: mod_base = OTHER; note = 2'-O-methyl ribonucleotide
  modified_base 66: mod_base = OTHER; note = 2'-O-methyl ribonucleotide
  modified_base 67: mod_base = OTHER; note = 2'-O-methyl ribonucleotide
  modified_base 70: mod_base = OTHER; note = 2'-O-methyl ribonucleotide
  modified_base 71: mod_base = OTHER; note = 2'-O-methyl ribonucleotide
  modified_base 72: mod_base = OTHER; note = 2'-O-methyl ribonucleotide
  modified_base 74: mod_base = OTHER; note = 2'-O-methyl ribonucleotide
  modified_base 75: mod_base = OTHER; note = 2'-O-methyl ribonucleotide
  modified_base 76: mod_base = OTHER; note = 2'-O-methyl ribonucleotide
  modified_base 77: mod_base = OTHER; note = 2'-O-methyl ribonucleotide
  modified_base 78: mod_base = OTHER; note = 2'-O-methyl ribonucleotide
  modified_base 79: mod_base = OTHER; note = 2'-O-methyl ribonucleotide
  modified_base 80: mod_base = OTHER; note = 2'-O-methyl ribonucleotide
  modified_base 81: mod_base = OTHER; note = 2'-O-methyl ribonucleotide
  modified_base 83: mod_base = OTHER; note = 2'-O-methyl ribonucleotide
  modified_base 84: mod_base = OTHER; note = 2'-O-methyl ribonucleotide
  modified_base 85: mod_base = OTHER; note = 2'-O-methyl ribonucleotide
  modified_base 86: mod_base = OTHER; note = 2'-O-methyl ribonucleotide
  modified_base 87: mod_base = OTHER; note = 2'-O-methyl ribonucleotide
  modified_base 88: mod_base = OTHER; note = 2'-O-methyl ribonucleotide
  modified_base 89: mod_base = OTHER; note = 2'-O-methyl ribonucleotide
  modified_base 90: mod_base = OTHER; note = 2'-O-methyl ribonucleotide
  modified_base 91: mod_base = OTHER; note = 2'-O-methyl ribonucleotide
  modified_base 92: mod_base = OTHER; note = 2'-O-methyl ribonucleotide
  modified_base 93: mod_base = OTHER; note = 2'-O-methyl ribonucleotide
  modified_base 94: mod_base = OTHER; note = 2'-O-methyl ribonucleotide
  modified_base 95: mod_base = OTHER; note = 2'-O-methyl ribonucleotide
  modified_base 96: mod_base = OTHER; note = 2'-O-methyl ribonucleotide
  modified_base 97: mod_base = OTHER; note = 2'-O-methyl ribonucleotide
  modified_base 98: mod_base = OTHER; note = 2'-O-methyl ribonucleotide
  modified_base 99: mod_base = OTHER; note = 2'-O-methyl ribonucleotide
  modified_base 100: mod_base = OTHER; note = 2'-O-methyl ribonucleotide
  modified_base 1..4: mod_base = OTHER; note = phosphorothioate linkage
  modified_base 25..26: mod_base = OTHER; note = phosphorothioate linkage
  modified_base 45..46: mod_base = OTHER; note = phosphorothioate linkage
  modified_base 64..65: mod_base = OTHER; note = phosphorothioate linkage
  modified_base 98..100: mod_base = OTHER; note = phosphorothioate linkage

SEQ ID NO: 2396 - RNA, 100 nt, synthetic construct; identical to SEQ ID NO: 422
  source 1..100: mol_type = other RNA
  modified_base 1: mod_base = OTHER; note = 2'-O-methyl ribonucleotide
  modified_base 2: mod_base = OTHER; note = 2'-O-methyl ribonucleotide
  modified_base 3: mod_base = OTHER; note = 2'-O-methyl ribonucleotide
  modified_base 21: mod_base = OTHER; note = 2'-O-methyl ribonucleotide
  modified_base 28: mod_base = OTHER; note = 2'-O-methyl ribonucleotide
  modified_base 29: mod_base = OTHER; note = 2'-O-methyl ribonucleotide
  modified_base 30: mod_base = OTHER; note = 2'-O-methyl ribonucleotide
  modified_base 31: mod_base = OTHER; note = 2'-O-methyl ribonucleotide
  modified_base 32: mod_base = OTHER; note = 2'-O-methyl ribonucleotide
  modified_base 33: mod_base = OTHER; note = 2'-O-methyl ribonucleotide
  modified_base 34: mod_base = OTHER; note = 2'-O-methyl ribonucleotide
  modified_base 35: mod_base = OTHER; note = 2'-O-methyl ribonucleotide
  modified_base 36: mod_base = OTHER; note = 2'-O-methyl ribonucleotide
  modified_base 37: mod_base = OTHER; note = 2'-O-methyl ribonucleotide
  modified_base 38: mod_base = OTHER; note = 2'-O-methyl ribonucleotide
  modified_base 39: mod_base = OTHER; note = 2'-O-methyl ribonucleotide
  modified_base 40: mod_base = OTHER; note = 2'-O-methyl ribonucleotide
  modified_base 41: mod_base = OTHER; note = 2'-O-methyl ribonucleotide
  modified_base 42: mod_base = OTHER; note = 2'-O-methyl ribonucleotide
  modified_base 46: mod_base = OTHER; note = 2'-O-methyl ribonucleotide
  modified_base 48: mod_base = OTHER; note = 2'-O-methyl ribonucleotide
  modified_base 50: mod_base = OTHER; note = 2'-O-methyl ribonucleotide
  modified_base 52: mod_base = OTHER; note = 2'-O-methyl ribonucleotide
  modified_base 53: mod_base = OTHER; note = 2'-O-methyl ribonucleotide
  modified_base 54: mod_base = OTHER; note = 2'-O-methyl ribonucleotide
  modified_base 55: mod_base = OTHER; note = 2'-O-methyl ribonucleotide
  modified_base 56: mod_base = OTHER; note = 2'-O-methyl ribonucleotide
  modified_base 57: mod_base = OTHER; note = 2'-O-methyl ribonucleotide
  modified_base 60: mod_base = OTHER; note = 2'-O-methyl ribonucleotide
  modified_base 61: mod_base = OTHER; note = 2'-O-methyl ribonucleotide
  modified_base 66: mod_base = OTHER; note = 2'-O-methyl ribonucleotide
  modified_base 67: mod_base = OTHER; note = 2'-O-methyl ribonucleotide
  modified_base 70: mod_base = OTHER; note = 2'-O-methyl ribonucleotide
  modified_base 71: mod_base = OTHER; note = 2'-O-methyl ribonucleotide
  modified_base 72: mod_base = OTHER; note = 2'-O-methyl ribonucleotide
  modified_base 73: mod_base = OTHER; note = 2'-O-methyl ribonucleotide
  modified_base 74: mod_base = OTHER; note = 2'-O-methyl ribonucleotide
  modified_base 75: mod_base = OTHER; note = 2'-O-methyl ribonucleotide
  modified_base 76: mod_base = OTHER; note = 2'-O-methyl ribonucleotide
  modified_base 77: mod_base = OTHER; note = 2'-O-methyl ribonucleotide
  modified_base 78: mod_base = OTHER; note = 2'-O-methyl ribonucleotide
  modified_base 79: mod_base = OTHER; note = 2'-O-methyl ribonucleotide
  modified_base 80: mod_base = OTHER; note = 2'-O-methyl ribonucleotide
  modified_base 81: mod_base = OTHER; note = 2'-O-methyl ribonucleotide
  modified_base 83: mod_base = OTHER; note = 2'-O-methyl ribonucleotide
  modified_base 84: mod_base = OTHER; note = 2'-O-methyl ribonucleotide
  modified_base 85: mod_base = OTHER; note = 2'-O-methyl ribonucleotide
  modified_base 86: mod_base = OTHER; note = 2'-O-methyl ribonucleotide
  modified_base 87: mod_base = OTHER; note = 2'-O-methyl ribonucleotide
  modified_base 88: mod_base = OTHER; note = 2'-O-methyl ribonucleotide
  modified_base 89: mod_base = OTHER; note = 2'-O-methyl ribonucleotide
  modified_base 90: mod_base = OTHER; note = 2'-O-methyl ribonucleotide
  modified_base 91: mod_base = OTHER; note = 2'-O-methyl ribonucleotide
  modified_base 92: mod_base = OTHER; note = 2'-O-methyl ribonucleotide
  modified_base 93: mod_base = OTHER; note = 2'-O-methyl ribonucleotide
  modified_base 94: mod_base = OTHER; note = 2'-O-methyl ribonucleotide
  modified_base 95: mod_base = OTHER; note = 2'-O-methyl ribonucleotide
  modified_base 96: mod_base = OTHER; note = 2'-O-methyl ribonucleotide
  modified_base 97: mod_base = OTHER; note = 2'-O-methyl ribonucleotide
  modified_base 98: mod_base = OTHER; note = 2'-O-methyl ribonucleotide
  modified_base 99: mod_base = OTHER; note = 2'-O-methyl ribonucleotide
  modified_base 100: mod_base = OTHER; note = 2'-O-methyl ribonucleotide
  modified_base 1..4: mod_base = OTHER; note = phosphorothioate linkage
  modified_base 25..26: mod_base = OTHER; note = phosphorothioate linkage
  modified_base 45..46: mod_base = OTHER; note = phosphorothioate linkage
  modified_base 64..65: mod_base = OTHER; note = phosphorothioate linkage
  modified_base 98..100: mod_base = OTHER; note = phosphorothioate linkage

SEQ ID NO: 2397 - RNA, 100 nt, synthetic construct; identical to SEQ ID NO: 422
  source 1..100: mol_type = other RNA
  modified_base 1: mod_base = OTHER; note = 2'-O-methyl ribonucleotide
  modified_base 2: mod_base = OTHER; note = 2'-O-methyl ribonucleotide
  modified_base 3: mod_base = OTHER; note = 2'-O-methyl ribonucleotide
  modified_base 21: mod_base = OTHER; note = 2'-O-methyl ribonucleotide
  modified_base 28: mod_base = OTHER; note = 2'-O-methyl ribonucleotide
  modified_base 29: mod_base = OTHER; note = 2'-O-methyl ribonucleotide
  modified_base 30: mod_base = OTHER; note = 2'-O-methyl ribonucleotide
  modified_base 31: mod_base = OTHER; note = 2'-O-methyl ribonucleotide
  modified_base 32: mod_base = OTHER; note = 2'-O-methyl ribonucleotide
  modified_base 34: mod_base = OTHER; note = 2'-O-methyl ribonucleotide
  modified_base 35: mod_base = OTHER; note = 2'-O-methyl ribonucleotide
  modified_base 36: mod_base = OTHER; note = 2'-O-methyl ribonucleotide
  modified_base 37: mod_base = OTHER; note = 2'-O-methyl ribonucleotide
  modified_base 38: mod_base = OTHER; note = 2'-O-methyl ribonucleotide
  modified_base 39: mod_base = OTHER; note = 2'-O-methyl ribonucleotide
  modified_base 40: mod_base = OTHER; note = 2'-O-methyl ribonucleotide
  modified_base 41: mod_base = OTHER; note = 2'-O-methyl ribonucleotide
  modified_base 42: mod_base = OTHER; note = 2'-O-methyl ribonucleotide
  modified_base 46: mod_base = OTHER; note = 2'-O-methyl ribonucleotide
  modified_base 48: mod_base = OTHER; note = 2'-O-methyl ribonucleotide
  modified_base 50: mod_base = OTHER; note = 2'-O-methyl ribonucleotide
  modified_base 52: mod_base = OTHER; note = 2'-O-methyl ribonucleotide
  modified_base 53: mod_base = OTHER; note = 2'-O-methyl ribonucleotide
  modified_base 54: mod_base = OTHER; note = 2'-O-methyl ribonucleotide
  modified_base 55: mod_base = OTHER; note = 2'-O-methyl ribonucleotide
  modified_base 56: mod_base = OTHER; note = 2'-O-methyl ribonucleotide
  modified_base 57: mod_base = OTHER; note = 2'-O-methyl ribonucleotide
  modified_base 60: mod_base = OTHER; note = 2'-O-methyl ribonucleotide
  modified_base 61: mod_base = OTHER; note = 2'-O-methyl ribonucleotide
  modified_base 66: mod_base = OTHER; note = 2'-O-methyl ribonucleotide
  modified_base 67: mod_base = OTHER; note = 2'-O-methyl ribonucleotide
  modified_base 70: mod_base = OTHER; note = 2'-O-methyl ribonucleotide
  modified_base 71: mod_base = OTHER; note = 2'-O-methyl ribonucleotide
  modified_base 72: mod_base = OTHER; note = 2'-O-methyl ribonucleotide
  modified_base 74: mod_base = OTHER; note = 2'-O-methyl ribonucleotide
  modified_base 75: mod_base = OTHER; note = 2'-O-methyl ribonucleotide
  modified_base 76: mod_base = OTHER; note = 2'-O-methyl ribonucleotide
  modified_base 77: mod_base = OTHER; note = 2'-O-methyl ribonucleotide
  modified_base 78: mod_base = OTHER; note = 2'-O-methyl ribonucleotide
  modified_base 79: mod_base = OTHER; note = 2'-O-methyl ribonucleotide
  modified_base 80: mod_base = OTHER; note = 2'-O-methyl ribonucleotide
  modified_base 81: mod_base = OTHER; note = 2'-O-methyl ribonucleotide
  modified_base 83: mod_base = OTHER; note = 2'-O-methyl ribonucleotide
  modified_base 84: mod_base = OTHER; note = 2'-O-methyl ribonucleotide
  modified_base 85: mod_base = OTHER; note = 2'-O-methyl ribonucleotide
  modified_base 86: mod_base = OTHER; note = 2'-O-methyl ribonucleotide
  modified_base 87: mod_base = OTHER; note = 2'-O-methyl ribonucleotide
  modified_base 88: mod_base = OTHER; note = 2'-O-methyl ribonucleotide
  modified_base 89: mod_base = OTHER; note = 2'-O-methyl ribonucleotide
  modified_base 90: mod_base = OTHER; note = 2'-O-methyl ribonucleotide
  modified_base 91: mod_base = OTHER; note = 2'-O-methyl ribonucleotide
  modified_base 92: mod_base = OTHER; note = 2'-O-methyl ribonucleotide
  modified_base 93: mod_base = OTHER; note = 2'-O-methyl ribonucleotide
  modified_base 94: mod_base = OTHER; note = 2'-O-methyl ribonucleotide
  modified_base 95: mod_base = OTHER; note = 2'-O-methyl ribonucleotide
  modified_base 96: mod_base = OTHER; note = 2'-O-methyl ribonucleotide
  modified_base 97: mod_base = OTHER; note = 2'-O-methyl ribonucleotide
  modified_base 98: mod_base = OTHER; note = 2'-O-methyl ribonucleotide
  modified_base 99: mod_base = OTHER; note = 2'-O-methyl ribonucleotide
  modified_base 100: mod_base = OTHER; note = 2'-O-methyl ribonucleotide
  modified_base 1..4: mod_base = OTHER; note = phosphorothioate linkage
  modified_base 25..26: mod_base = OTHER; note = phosphorothioate linkage
  modified_base 45..46: mod_base = OTHER; note = phosphorothioate linkage
  modified_base 64..65: mod_base = OTHER; note = phosphorothioate linkage
  modified_base 98..100: mod_base = OTHER; note = phosphorothioate linkage

SEQ ID NO: 2398 - RNA, 100 nt, synthetic construct; identical to SEQ ID NO: 55
  source 1..100: mol_type = other RNA
  modified_base 1: mod_base = OTHER; note = 2'-O-methyl ribonucleotide
  modified_base 2: mod_base = OTHER; note = 2'-O-methyl ribonucleotide
  modified_base 3: mod_base = OTHER; note = 2'-O-methyl ribonucleotide
  modified_base 21: mod_base = OTHER; note = 2'-O-methyl ribonucleotide
  modified_base 28: mod_base = OTHER; note = 2'-O-methyl ribonucleotide
  modified_base 29: mod_base = OTHER; note = 2'-O-methyl ribonucleotide
  modified_base 30: mod_base = OTHER; note = 2'-O-methyl ribonucleotide
  modified_base 31: mod_base = OTHER; note = 2'-O-methyl ribonucleotide
  modified_base 32: mod_base = OTHER; note = 2'-O-methyl ribonucleotide
  modified_base 33: mod_base = OTHER; note = 2'-O-methyl ribonucleotide
  modified_base 34: mod_base = OTHER; note = 2'-O-methyl ribonucleotide
  modified_base 35: mod_base = OTHER; note = 2'-O-methyl ribonucleotide
  modified_base 36: mod_base = OTHER; note = 2'-O-methyl ribonucleotide
  modified_base 37: mod_base = OTHER; note = 2'-O-methyl ribonucleotide
  modified_base 38: mod_base = OTHER; note = 2'-O-methyl ribonucleotide
  modified_base 39: mod_base = OTHER; note = 2'-O-methyl ribonucleotide
  modified_base 40: mod_base = OTHER; note = 2'-O-methyl ribonucleotide
  modified_base 41: mod_base = OTHER; note = 2'-O-methyl ribonucleotide
  modified_base 42: mod_base = OTHER; note = 2'-O-methyl ribonucleotide
  modified_base 46: mod_base = OTHER; note = 2'-O-methyl ribonucleotide
  modified_base 48: mod_base = OTHER; note = 2'-O-methyl ribonucleotide
  modified_base 50: mod_base = OTHER; note = 2'-O-methyl ribonucleotide
  modified_base 52: mod_base = OTHER; note = 2'-O-methyl ribonucleotide
  modified_base 53: mod_base = OTHER; note = 2'-O-methyl ribonucleotide
  modified_base 54: mod_base = OTHER; note = 2'-O-methyl ribonucleotide
  modified_base 57: mod_base = OTHER; note = 2'-O-methyl ribonucleotide
  modified_base 61: mod_base = OTHER; note = 2'-O-methyl ribonucleotide
  modified_base 66: mod_base = OTHER; note = 2'-O-methyl ribonucleotide
  modified_base 67: mod_base = OTHER; note = 2'-O-methyl ribonucleotide
  modified_base 70: mod_base = OTHER; note = 2'-O-methyl ribonucleotide
  modified_base 71: mod_base = OTHER; note = 2'-O-methyl ribonucleotide
  modified_base 72: mod_base = OTHER; note = 2'-O-methyl ribonucleotide
  modified_base 74: mod_base = OTHER; note = 2'-O-methyl ribonucleotide
  modified_base 75: mod_base = OTHER; note = 2'-O-methyl ribonucleotide
  modified_base 76: mod_base = OTHER; note = 2'-O-methyl ribonucleotide
  modified_base 77: mod_base = OTHER; note = 2'-O-methyl ribonucleotide
  modified_base 78: mod_base = OTHER; note = 2'-O-methyl ribonucleotide
  modified_base 79: mod_base = OTHER; note = 2'-O-methyl ribonucleotide
  modified_base 80: mod_base = OTHER; note = 2'-O-methyl ribonucleotide
  modified_base 82: mod_base = OTHER; note = 2'-O-methyl ribonucleotide
  modified_base 83: mod_base = OTHER; note = 2'-O-methyl ribonucleotide
  modified_base 84: mod_base = OTHER; note = 2'-O-methyl ribonucleotide
  modified_base 85: mod_base = OTHER; note = 2'-O-methyl ribonucleotide
  modified_base 86: mod_base = OTHER; note = 2'-O-methyl ribonucleotide
  modified_base 87: mod_base = OTHER; note = 2'-O-methyl ribonucleotide
  modified_base 89: mod_base = OTHER; note = 2'-O-methyl ribonucleotide
  modified_base 92: mod_base = OTHER; note = 2'-O-methyl ribonucleotide
  modified_base 93: mod_base = OTHER; note = 2'-O-methyl ribonucleotide
  modified_base 94: mod_base = OTHER; note = 2'-O-methyl ribonucleotide
  modified_base 95: mod_base = OTHER; note = 2'-O-methyl ribonucleotide
  modified_base 96: mod_base = OTHER; note = 2'-O-methyl ribonucleotide
  modified_base 97: mod_base = OTHER; note = 2'-O-methyl ribonucleotide
  modified_base 98: mod_base = OTHER; note = 2'-O-methyl ribonucleotide
  modified_base 99: mod_base = OTHER; note = 2'-O-methyl ribonucleotide
  modified_base 100: mod_base = OTHER; note = 2'-O-methyl ribonucleotide
  modified_base 1..4: mod_base = OTHER; note = phosphorothioate linkage
  modified_base 25..26: mod_base = OTHER; note = phosphorothioate linkage
  modified_base 45..46: mod_base = OTHER; note = phosphorothioate linkage
  modified_base 64..65: mod_base = OTHER; note = phosphorothioate linkage
  modified_base 98..100: mod_base = OTHER; note = phosphorothioate linkage

SEQ ID NO: 2399 - RNA, 100 nt, synthetic construct; identical to SEQ ID NO: 55
  source 1..100: mol_type = other RNA
  modified_base 1: mod_base = OTHER; note = 2'-O-methyl ribonucleotide
  modified_base 2: mod_base = OTHER; note = 2'-O-methyl ribonucleotide
  modified_base 3: mod_base = OTHER; note = 2'-O-methyl ribonucleotide
  modified_base 21: mod_base = OTHER; note = 2'-O-methyl ribonucleotide
  modified_base 28: mod_base = OTHER; note = 2'-O-methyl ribonucleotide
  modified_base 29: mod_base = OTHER; note = 2'-O-methyl ribonucleotide
  modified_base 30: mod_base = OTHER; note = 2'-O-methyl ribonucleotide
  modified_base 31: mod_base = OTHER; note = 2'-O-methyl ribonucleotide
  modified_base 32: mod_base = OTHER; note = 2'-O-methyl ribonucleotide
  modified_base 33: mod_base = OTHER; note = 2'-O-methyl ribonucleotide
  modified_base 34: mod_base = OTHER; note = 2'-O-methyl ribonucleotide
  modified_base 35: mod_base = OTHER; note = 2'-O-methyl ribonucleotide
  modified_base 36: mod_base = OTHER; note = 2'-O-methyl ribonucleotide
  modified_base 37: mod_base = OTHER; note = 2'-O-methyl ribonucleotide
  modified_base 38: mod_base = OTHER; note = 2'-O-methyl ribonucleotide
  modified_base 39: mod_base = OTHER; note = 2'-O-methyl ribonucleotide
  modified_base 40: mod_base = OTHER; note = 2'-O-methyl ribonucleotide
  modified_base 41: mod_base = OTHER; note = 2'-O-methyl ribonucleotide
  modified_base 42: mod_base = OTHER; note = 2'-O-methyl ribonucleotide
  modified_base 46: mod_base = OTHER; note = 2'-O-methyl ribonucleotide
  modified_base 48: mod_base = OTHER; note = 2'-O-methyl ribonucleotide
  modified_base 50: mod_base = OTHER; note = 2'-O-methyl ribonucleotide
  modified_base 52: mod_base = OTHER; note = 2'-O-methyl ribonucleotide
  modified_base 53: mod_base = OTHER; note = 2'-O-methyl ribonucleotide
  modified_base 54: mod_base = OTHER; note = 2'-O-methyl ribonucleotide
  modified_base 55: mod_base = OTHER; note = 2'-O-methyl ribonucleotide
  modified_base 56: mod_base = OTHER; note = 2'-O-methyl ribonucleotide
  modified_base 57: mod_base = OTHER; note = 2'-O-methyl ribonucleotide
  modified_base 60: mod_base = OTHER; note = 2'-O-methyl ribonucleotide
  modified_base 61: mod_base = OTHER; note = 2'-O-methyl ribonucleotide
  modified_base 66: mod_base = OTHER; note = 2'-O-methyl ribonucleotide
  modified_base 67: mod_base = OTHER; note = 2'-O-methyl ribonucleotide
  modified_base 70: mod_base = OTHER; note = 2'-O-methyl ribonucleotide
  modified_base 71: mod_base = OTHER; note = 2'-O-methyl ribonucleotide
  modified_base 72: mod_base = OTHER; note = 2'-O-methyl ribonucleotide
  modified_base 74: mod_base = OTHER; note = 2'-O-methyl ribonucleotide
  modified_base 75: mod_base = OTHER; note = 2'-O-methyl ribonucleotide
  modified_base 76: mod_base = OTHER; note = 2'-O-methyl ribonucleotide
  modified_base 77: mod_base = OTHER; note = 2'-O-methyl ribonucleotide
  modified_base 78: mod_base = OTHER; note = 2'-O-methyl ribonucleotide
  modified_base 79: mod_base = OTHER; note = 2'-O-methyl ribonucleotide
  modified_base 80: mod_base = OTHER; note = 2'-O-methyl ribonucleotide
  modified_base 82: mod_base = OTHER; note = 2'-O-methyl ribonucleotide
  modified_base 83: mod_base = OTHER; note = 2'-O-methyl ribonucleotide
  modified_base 84: mod_base = OTHER; note = 2'-O-methyl ribonucleotide
  modified_base 85: mod_base = OTHER; note = 2'-O-methyl ribonucleotide
  modified_base 86: mod_base = OTHER; note = 2'-O-methyl ribonucleotide
  modified_base 87: mod_base = OTHER; note = 2'-O-methyl ribonucleotide
  modified_base 89: mod_base = OTHER; note = 2'-O-methyl ribonucleotide
  modified_base 92: mod_base = OTHER; note = 2'-O-methyl ribonucleotide
  modified_base 93: mod_base = OTHER; note = 2'-O-methyl ribonucleotide
  modified_base 94: mod_base = OTHER; note = 2'-O-methyl ribonucleotide
  modified_base 95: mod_base = OTHER; note = 2'-O-methyl ribonucleotide
  modified_base 96: mod_base = OTHER; note = 2'-O-methyl ribonucleotide
  modified_base 97: mod_base = OTHER; note = 2'-O-methyl ribonucleotide
  modified_base 98: mod_base = OTHER; note = 2'-O-methyl ribonucleotide
  modified_base 99: mod_base = OTHER; note = 2'-O-methyl ribonucleotide
  modified_base 100: mod_base = OTHER; note = 2'-O-methyl ribonucleotide
  modified_base 1..4: mod_base = OTHER; note = phosphorothioate linkage
  modified_base 25..26: mod_base = OTHER; note = phosphorothioate linkage
  modified_base 45..46: mod_base = OTHER; note = phosphorothioate linkage
  modified_base 64..65: mod_base = OTHER; note = phosphorothioate linkage
  modified_base 98..100: mod_base = OTHER; note = phosphorothioate linkage

SEQ ID NO: 2400 - RNA, 100 nt, synthetic construct; identical to SEQ ID NO: 55
  source 1..100: mol_type = other RNA
  modified_base 1: mod_base = OTHER; note = 2'-O-methyl ribonucleotide
  modified_base 2: mod_base = OTHER; note = 2'-O-methyl ribonucleotide
  modified_base 3: mod_base = OTHER; note = 2'-O-methyl ribonucleotide
  modified_base 21: mod_base = OTHER; note = 2'-O-methyl ribonucleotide
  modified_base 28: mod_base = OTHER; note = 2'-O-methyl ribonucleotide
  modified_base 29: mod_base = OTHER; note = 2'-O-methyl ribonucleotide
  modified_base 30: mod_base = OTHER; note = 2'-O-methyl ribonucleotide
  modified_base 31: mod_base = OTHER; note = 2'-O-methyl ribonucleotide
  modified_base 32: mod_base = OTHER; note = 2'-O-methyl ribonucleotide
  modified_base 33: mod_base = OTHER; note = 2'-O-methyl ribonucleotide
  modified_base 34: mod_base = OTHER; note = 2'-O-methyl ribonucleotide
  modified_base 35: mod_base = OTHER; note = 2'-O-methyl ribonucleotide
  modified_base 36: mod_base = OTHER; note = 2'-O-methyl ribonucleotide
  modified_base 37: mod_base = OTHER; note = 2'-O-methyl ribonucleotide
  modified_base 38: mod_base = OTHER; note = 2'-O-methyl ribonucleotide
  modified_base 39: mod_base = OTHER; note = 2'-O-methyl ribonucleotide
  modified_base 40: mod_base = OTHER; note = 2'-O-methyl ribonucleotide
  modified_base 41: mod_base = OTHER; note = 2'-O-methyl ribonucleotide
  modified_base 42: mod_base = OTHER; note = 2'-O-methyl ribonucleotide
  modified_base 46: mod_base = OTHER; note = 2'-O-methyl ribonucleotide
  modified_base 48: mod_base = OTHER; note = 2'-O-methyl ribonucleotide
  modified_base 50: mod_base = OTHER; note = 2'-O-methyl ribonucleotide
  modified_base 52: mod_base = OTHER; note = 2'-O-methyl ribonucleotide
  modified_base 53: mod_base = OTHER; note = 2'-O-methyl ribonucleotide
  modified_base 54: mod_base = OTHER; note = 2'-O-methyl ribonucleotide
  modified_base 57: mod_base = OTHER; note = 2'-O-methyl ribonucleotide
  modified_base 61: mod_base = OTHER; note = 2'-O-methyl ribonucleotide
  modified_base 66: mod_base = OTHER; note = 2'-O-methyl ribonucleotide
  modified_base 67: mod_base = OTHER; note = 2'-O-methyl ribonucleotide
  modified_base 70: mod_base = OTHER; note = 2'-O-methyl ribonucleotide
  modified_base 71: mod_base = OTHER; note = 2'-O-methyl ribonucleotide
  modified_base 72: mod_base = OTHER; note = 2'-O-methyl ribonucleotide
  modified_base 73: mod_base = OTHER; note = 2'-O-methyl ribonucleotide
  modified_base 74: mod_base = OTHER; note = 2'-O-methyl ribonucleotide
  modified_base 75: mod_base = OTHER; note = 2'-O-methyl ribonucleotide
  modified_base 76: mod_base = OTHER; note = 2'-O-methyl ribonucleotide
  modified_base 77: mod_base = OTHER; note = 2'-O-methyl ribonucleotide
  modified_base 78: mod_base = OTHER; note = 2'-O-methyl ribonucleotide
  modified_base 79: mod_base = OTHER; note = 2'-O-methyl ribonucleotide
  modified_base 80: mod_base = OTHER; note = 2'-O-methyl ribonucleotide
  modified_base 82: mod_base = OTHER; note = 2'-O-methyl ribonucleotide
  modified_base 83: mod_base = OTHER; note = 2'-O-methyl ribonucleotide
  modified_base 84: mod_base = OTHER; note = 2'-O-methyl ribonucleotide
  modified_base 85: mod_base = OTHER; note = 2'-O-methyl ribonucleotide
  modified_base 86: mod_base = OTHER; note = 2'-O-methyl ribonucleotide
  modified_base 87: mod_base = OTHER; note = 2'-O-methyl ribonucleotide
  modified_base 89: mod_base = OTHER; note = 2'-O-methyl ribonucleotide
  modified_base 92: mod_base = OTHER; note = 2'-O-methyl ribonucleotide
  modified_base 93: mod_base = OTHER; note = 2'-O-methyl ribonucleotide
  modified_base 94: mod_base = OTHER; note = 2'-O-methyl ribonucleotide
  modified_base 95: mod_base = OTHER; note = 2'-O-methyl ribonucleotide
  modified_base 96: mod_base = OTHER; note = 2'-O-methyl ribonucleotide
  modified_base 97: mod_base = OTHER; note = 2'-O-methyl ribonucleotide
  modified_base 98: mod_base = OTHER; note = 2'-O-methyl ribonucleotide
  modified_base 99: mod_base = OTHER; note = 2'-O-methyl ribonucleotide
  modified_base 100: mod_base = OTHER; note = 2'-O-methyl ribonucleotide
  modified_base 1..4: mod_base = OTHER; note = phosphorothioate linkage
  modified_base 25..26: mod_base = OTHER; note = phosphorothioate linkage
  modified_base 45..46: mod_base = OTHER; note = phosphorothioate linkage
  modified_base 64..65: mod_base = OTHER; note = phosphorothioate linkage
  modified_base 98..100: mod_base = OTHER; note = phosphorothioate linkage

SEQ ID NO: 2401 - RNA, 100 nt, synthetic construct; identical to SEQ ID NO: 55
  source 1..100: mol_type = other RNA
  modified_base 1: mod_base = OTHER; note = 2'-O-methyl ribonucleotide
  modified_base 2: mod_base = OTHER; note = 2'-O-methyl ribonucleotide
  modified_base 3: mod_base = OTHER; note = 2'-O-methyl ribonucleotide
  modified_base 21: mod_base = OTHER; note = 2'-O-methyl ribonucleotide
  modified_base 28: mod_base = OTHER; note = 2'-O-methyl ribonucleotide
  modified_base 29: mod_base = OTHER; note = 2'-O-methyl ribonucleotide
  modified_base 30: mod_base = OTHER; note = 2'-O-methyl ribonucleotide
  modified_base 31: mod_base = OTHER; note = 2'-O-methyl ribonucleotide
  modified_base 32: mod_base = OTHER; note = 2'-O-methyl ribonucleotide
  modified_base 33: mod_base = OTHER; note = 2'-O-methyl ribonucleotide
  modified_base 34: mod_base = OTHER; note = 2'-O-methyl ribonucleotide
  modified_base 35: mod_base = OTHER; note = 2'-O-methyl ribonucleotide
  modified_base 36: mod_base = OTHER; note = 2'-O-methyl ribonucleotide
  modified_base 37: mod_base = OTHER; note = 2'-O-methyl ribonucleotide
  modified_base 38: mod_base = OTHER; note = 2'-O-methyl ribonucleotide
  modified_base 39: mod_base = OTHER; note = 2'-O-methyl ribonucleotide
  modified_base 40: mod_base = OTHER; note = 2'-O-methyl ribonucleotide
  modified_base 41: mod_base = OTHER; note = 2'-O-methyl ribonucleotide
  modified_base 42: mod_base = OTHER; note = 2'-O-methyl ribonucleotide
  modified_base 46: mod_base = OTHER; note = 2'-O-methyl ribonucleotide
  modified_base 48: mod_base = OTHER; note = 2'-O-methyl ribonucleotide
  modified_base 50: mod_base = OTHER; note = 2'-O-methyl ribonucleotide
  modified_base 52: mod_base = OTHER; note = 2'-O-methyl ribonucleotide
  modified_base 53: mod_base = OTHER; note = 2'-O-methyl ribonucleotide
  modified_base 54: mod_base = OTHER; note = 2'-O-methyl ribonucleotide
  modified_base 57: mod_base = OTHER; note = 2'-O-methyl ribonucleotide
  modified_base 61: mod_base = OTHER; note = 2'-O-methyl ribonucleotide
  modified_base 66: mod_base = OTHER; note = 2'-O-methyl ribonucleotide
  modified_base 67: mod_base = OTHER; note = 2'-O-methyl ribonucleotide
  modified_base 70: mod_base = OTHER; note = 2'-O-methyl ribonucleotide
  modified_base 71: mod_base = OTHER; note = 2'-O-methyl ribonucleotide
  modified_base 72: mod_base = OTHER; note = 2'-O-methyl ribonucleotide
  modified_base 73: mod_base = OTHER; note = 2'-O-methyl ribonucleotide
  modified_base 74: mod_base = OTHER; note = 2'-O-methyl ribonucleotide
  modified_base 75: mod_base = OTHER; note = 2'-O-methyl ribonucleotide
  modified_base 76: mod_base = OTHER; note = 2'-O-methyl ribonucleotide
  modified_base 77: mod_base = OTHER; note = 2'-O-methyl ribonucleotide
  modified_base 78: mod_base = OTHER; note = 2'-O-methyl ribonucleotide
  modified_base 79: mod_base = OTHER; note = 2'-O-methyl ribonucleotide
  modified_base 80: mod_base = OTHER; note = 2'-O-methyl ribonucleotide
  modified_base 82: mod_base = OTHER; note = 2'-O-methyl ribonucleotide
  modified_base 83: mod_base = OTHER; note = 2'-O-methyl ribonucleotide
  modified_base 84: mod_base = OTHER; note = 2'-O-methyl ribonucleotide
  modified_base 85: mod_base = OTHER; note = 2'-O-methyl ribonucleotide
  modified_base 86: mod_base = OTHER; note = 2'-O-methyl ribonucleotide
  modified_base 87: mod_base = OTHER; note = 2'-O-methyl ribonucleotide
  modified_base 89: mod_base = OTHER; note = 2'-O-methyl ribonucleotide
  modified_base 91: mod_base = OTHER; note = 2'-O-methyl ribonucleotide
  modified_base 92: mod_base = OTHER; note = 2'-O-methyl ribonucleotide
  modified_base 93: mod_base = OTHER; note = 2'-O-methyl ribonucleotide
  modified_base 94: mod_base = OTHER; note = 2'-O-methyl ribonucleotide
  modified_base 95: mod_base = OTHER; note = 2'-O-methyl ribonucleotide
  modified_base 96: mod_base = OTHER; note = 2'-O-methyl ribonucleotide
  modified_base 97: mod_base = OTHER; note = 2'-O-methyl ribonucleotide
  modified_base 98: mod_base = OTHER; note = 2'-O-methyl ribonucleotide
  modified_base 99: mod_base = OTHER; note = 2'-O-methyl ribonucleotide
  modified_base 100: mod_base = OTHER; note = 2'-O-methyl ribonucleotide
  modified_base 1..4: mod_base = OTHER; note = phosphorothioate linkage
  modified_base 25..26: mod_base = OTHER; note = phosphorothioate linkage
  modified_base 45..46: mod_base = OTHER; note = phosphorothioate linkage
  modified_base 64..65: mod_base = OTHER; note = phosphorothioate linkage
  modified_base 98..100: mod_base = OTHER; note = phosphorothioate linkage

SEQ ID NO: 2402 - RNA, 100 nt, synthetic construct; identical to SEQ ID NO: 55
  source 1..100: mol_type = other RNA
  modified_base 1: mod_base = OTHER; note = 2'-O-methyl ribonucleotide
  modified_base 2: mod_base = OTHER; note = 2'-O-methyl ribonucleotide
  modified_base 3: mod_base = OTHER; note = 2'-O-methyl ribonucleotide
  modified_base 21: mod_base = OTHER; note = 2'-O-methyl ribonucleotide
  modified_base 28: mod_base = OTHER; note = 2'-O-methyl ribonucleotide
  modified_base 29: mod_base = OTHER; note = 2'-O-methyl ribonucleotide
  modified_base 30: mod_base = OTHER; note = 2'-O-methyl ribonucleotide
  modified_base 31: mod_base = OTHER; note = 2'-O-methyl ribonucleotide
  modified_base 32: mod_base = OTHER; note = 2'-O-methyl ribonucleotide
  modified_base 34: mod_base = OTHER; note = 2'-O-methyl ribonucleotide
  modified_base 35: mod_base = OTHER; note = 2'-O-methyl ribonucleotide
  modified_base 36: mod_base = OTHER; note = 2'-O-methyl ribonucleotide
  modified_base 37: mod_base = OTHER; note = 2'-O-methyl ribonucleotide
  modified_base 38: mod_base = OTHER; note = 2'-O-methyl ribonucleotide
  modified_base 39: mod_base = OTHER; note = 2'-O-methyl ribonucleotide
  modified_base 40: mod_base = OTHER; note = 2'-O-methyl ribonucleotide
  modified_base 41: mod_base = OTHER; note = 2'-O-methyl ribonucleotide
  modified_base 42: mod_base = OTHER; note = 2'-O-methyl ribonucleotide
  modified_base 46: mod_base = OTHER; note = 2'-O-methyl ribonucleotide
  modified_base 48: mod_base = OTHER; note = 2'-O-methyl ribonucleotide
  modified_base 50: mod_base = OTHER; note = 2'-O-methyl ribonucleotide
  modified_base 52: mod_base = OTHER; note = 2'-O-methyl ribonucleotide
  modified_base 53: mod_base = OTHER; note = 2'-O-methyl ribonucleotide
  modified_base 54: mod_base = OTHER; note = 2'-O-methyl ribonucleotide
  modified_base 57: mod_base = OTHER; note = 2'-O-methyl ribonucleotide
  modified_base 61: mod_base = OTHER; note = 2'-O-methyl ribonucleotide
  modified_base 66: mod_base = OTHER; note = 2'-O-methyl ribonucleotide
  modified_base 67: mod_base = OTHER; note = 2'-O-methyl ribonucleotide
  modified_base 70: mod_base = OTHER; note = 2'-O-methyl ribonucleotide
  modified_base 71: mod_base = OTHER; note = 2'-O-methyl ribonucleotide
  modified_base 72: mod_base = OTHER; note = 2'-O-methyl ribonucleotide
  modified_base 73: mod_base = OTHER; note = 2'-O-methyl ribonucleotide
  modified_base 74: mod_base = OTHER; note = 2'-O-methyl ribonucleotide
  modified_base 75: mod_base = OTHER; note = 2'-O-methyl ribonucleotide
  modified_base 76: mod_base = OTHER; note = 2'-O-methyl ribonucleotide
  modified_base 77: mod_base = OTHER; note = 2'-O-methyl ribonucleotide
  modified_base 78: mod_base = OTHER; note = 2'-O-methyl ribonucleotide
  modified_base 79: mod_base = OTHER; note = 2'-O-methyl ribonucleotide
  modified_base 80: mod_base = OTHER; note = 2'-O-methyl ribonucleotide
  modified_base 82: mod_base = OTHER; note = 2'-O-methyl ribonucleotide
  modified_base 83: mod_base = OTHER; note = 2'-O-methyl ribonucleotide
  modified_base 84: mod_base = OTHER; note = 2'-O-methyl ribonucleotide
  modified_base 85: mod_base = OTHER; note = 2'-O-methyl ribonucleotide
  modified_base 86: mod_base = OTHER; note = 2'-O-methyl ribonucleotide
  modified_base 87: mod_base = OTHER; note = 2'-O-methyl ribonucleotide
  modified_base 89: mod_base = OTHER; note = 2'-O-methyl ribonucleotide
  modified_base 92: mod_base = OTHER; note = 2'-O-methyl ribonucleotide
  modified_base 93: mod_base = OTHER; note = 2'-O-methyl ribonucleotide
  modified_base 94: mod_base = OTHER; note = 2'-O-methyl ribonucleotide
  modified_base 95: mod_base = OTHER; note = 2'-O-methyl ribonucleotide
  modified_base 96: mod_base = OTHER; note = 2'-O-methyl ribonucleotide
  modified_base 97: mod_base = OTHER; note = 2'-O-methyl ribonucleotide
  modified_base 98: mod_base = OTHER; note = 2'-O-methyl ribonucleotide
  modified_base 99: mod_base = OTHER; note = 2'-O-methyl ribonucleotide
  modified_base 100: mod_base = OTHER; note = 2'-O-methyl ribonucleotide
  modified_base 1..4: mod_base = OTHER; note = phosphorothioate linkage
  modified_base 25..26: mod_base = OTHER; note = phosphorothioate linkage
  modified_base 45..46: mod_base = OTHER; note = phosphorothioate linkage
  modified_base 64..65: mod_base = OTHER; note = phosphorothioate linkage
  modified_base 98..100: mod_base = OTHER; note = phosphorothioate linkage

SEQ ID NO: 2403 - RNA, 100 nt, synthetic construct; identical to SEQ ID NO: 55
  source 1..100: mol_type = other RNA
  modified_base 1: mod_base = OTHER; note = 2'-O-methyl ribonucleotide
  modified_base 2: mod_base = OTHER; note = 2'-O-methyl ribonucleotide
  modified_base 3: mod_base = OTHER; note = 2'-O-methyl ribonucleotide
  modified_base 21: mod_base = OTHER; note = 2'-O-methyl ribonucleotide
  modified_base 28: mod_base = OTHER; note = 2'-O-methyl ribonucleotide
  modified_base 29: mod_base = OTHER; note = 2'-O-methyl ribonucleotide
  modified_base 30: mod_base = OTHER; note = 2'-O-methyl ribonucleotide
  modified_base 31: mod_base = OTHER; note = 2'-O-methyl ribonucleotide
  modified_base 32: mod_base = OTHER; note = 2'-O-methyl ribonucleotide
  modified_base 34: mod_base = OTHER; note = 2'-O-methyl ribonucleotide
  modified_base 35: mod_base = OTHER; note = 2'-O-methyl ribonucleotide
  modified_base 36: mod_base = OTHER; note = 2'-O-methyl ribonucleotide
  modified_base 37: mod_base = OTHER; note = 2'-O-methyl ribonucleotide
  modified_base 38: mod_base = OTHER; note = 2'-O-methyl ribonucleotide
  modified_base 39: mod_base = OTHER; note = 2'-O-methyl ribonucleotide
  modified_base 40: mod_base = OTHER; note = 2'-O-methyl ribonucleotide
  modified_base 41: mod_base = OTHER; note = 2'-O-methyl ribonucleotide
  modified_base 42: mod_base = OTHER; note = 2'-O-methyl ribonucleotide
  modified_base 46: mod_base = OTHER; note = 2'-O-methyl ribonucleotide
  modified_base 48: mod_base = OTHER; note = 2'-O-methyl ribonucleotide
  modified_base 50: mod_base = OTHER; note = 2'-O-methyl ribonucleotide
  modified_base 52: mod_base = OTHER; note = 2'-O-methyl ribonucleotide
  modified_base 53: mod_base = OTHER; note = 2'-O-methyl ribonucleotide
  modified_base 54: mod_base = OTHER; note = 2'-O-methyl ribonucleotide
  modified_base 57: mod_base = OTHER; note = 2'-O-methyl ribonucleotide
  modified_base 61: mod_base = OTHER; note = 2'-O-methyl ribonucleotide
  modified_base 66: mod_base = OTHER; note = 2'-O-methyl ribonucleotide
  modified_base 67: mod_base = OTHER; note = 2'-O-methyl ribonucleotide
  modified_base 70: mod_base = OTHER; note = 2'-O-methyl ribonucleotide
  modified_base 71: mod_base = OTHER; note = 2'-O-methyl ribonucleotide
  modified_base 72: mod_base = OTHER; note = 2'-O-methyl ribonucleotide
  modified_base 73: mod_base = OTHER; note = 2'-O-methyl ribonucleotide
  modified_base 74: mod_base = OTHER; note = 2'-O-methyl ribonucleotide
  modified_base 75: mod_base = OTHER; note = 2'-O-methyl ribonucleotide
  modified_base 76: mod_base = OTHER; note = 2'-O-methyl ribonucleotide
  modified_base 77: mod_base = OTHER; note = 2'-O-methyl ribonucleotide
  modified_base 78: mod_base = OTHER; note = 2'-O-methyl ribonucleotide
  modified_base 79: mod_base = OTHER; note = 2'-O-methyl ribonucleotide
  modified_base 80: mod_base = OTHER; note = 2'-O-methyl ribonucleotide
  modified_base 82: mod_base = OTHER; note = 2'-O-methyl ribonucleotide
  modified_base 83: mod_base = OTHER; note = 2'-O-methyl ribonucleotide
  modified_base 84: mod_base = OTHER; note = 2'-O-methyl ribonucleotide
  modified_base 85: mod_base = OTHER; note = 2'-O-methyl ribonucleotide
  modified_base 86: mod_base = OTHER; note = 2'-O-methyl ribonucleotide
  modified_base 87: mod_base = OTHER; note = 2'-O-methyl ribonucleotide
  modified_base 89: mod_base = OTHER; note = 2'-O-methyl ribonucleotide
  modified_base 91: mod_base = OTHER; note = 2'-O-methyl ribonucleotide
  modified_base 92: mod_base = OTHER; note = 2'-O-methyl ribonucleotide
  modified_base 93: mod_base = OTHER; note = 2'-O-methyl ribonucleotide
  modified_base 94: mod_base = OTHER; note = 2'-O-methyl ribonucleotide
  modified_base 95: mod_base = OTHER; note = 2'-O-methyl ribonucleotide
  modified_base 96: mod_base = OTHER; note = 2'-O-methyl ribonucleotide
  modified_base 97: mod_base = OTHER; note = 2'-O-methyl ribonucleotide
  modified_base 98: mod_base = OTHER; note = 2'-O-methyl ribonucleotide
  modified_base 99: mod_base = OTHER; note = 2'-O-methyl ribonucleotide
  modified_base 100: mod_base = OTHER; note = 2'-O-methyl ribonucleotide
  modified_base 1..4: mod_base = OTHER; note = phosphorothioate linkage
  modified_base 25..26: mod_base = OTHER; note = phosphorothioate linkage
  modified_base 45..46: mod_base = OTHER; note = phosphorothioate linkage
  modified_base 64..65: mod_base = OTHER; note = phosphorothioate linkage
  modified_base 98..100: mod_base = OTHER; note = phosphorothioate linkage

SEQ ID NO: 2404 - RNA, 100 nt, synthetic construct; identical to SEQ ID NO: 55
  source 1..100: mol_type = other RNA
  modified_base 1: mod_base = OTHER; note = 2'-O-methyl ribonucleotide
  modified_base 2: mod_base = OTHER; note = 2'-O-methyl ribonucleotide
  modified_base 3: mod_base = OTHER; note = 2'-O-methyl ribonucleotide
  modified_base 21: mod_base = OTHER; note = 2'-O-methyl ribonucleotide
  modified_base 28: mod_base = OTHER; note = 2'-O-methyl ribonucleotide
  modified_base 29: mod_base = OTHER; note = 2'-O-methyl ribonucleotide
  modified_base 30: mod_base = OTHER; note = 2'-O-methyl ribonucleotide
  modified_base 31: mod_base = OTHER; note = 2'-O-methyl ribonucleotide
  modified_base 32: mod_base = OTHER; note = 2'-O-methyl ribonucleotide
  modified_base 34: mod_base = OTHER; note = 2'-O-methyl ribonucleotide
  modified_base 35: mod_base = OTHER; note = 2'-O-methyl ribonucleotide
  modified_base 36: mod_base = OTHER; note = 2'-O-methyl ribonucleotide
  modified_base 37: mod_base = OTHER; note = 2'-O-methyl ribonucleotide
  modified_base 38: mod_base = OTHER; note = 2'-O-methyl ribonucleotide
  modified_base 39: mod_base = OTHER; note = 2'-O-methyl ribonucleotide
  modified_base 40: mod_base = OTHER; note = 2'-O-methyl ribonucleotide
  modified_base 41: mod_base = OTHER; note = 2'-O-methyl ribonucleotide
  modified_base 42: mod_base = OTHER; note = 2'-O-methyl ribonucleotide
  modified_base 46: mod_base = OTHER; note = 2'-O-methyl ribonucleotide
  modified_base 48: mod_base = OTHER; note = 2'-O-methyl ribonucleotide
  modified_base 50: mod_base = OTHER; note = 2'-O-methyl ribonucleotide
  modified_base 52: mod_base = OTHER; note = 2'-O-methyl ribonucleotide
  modified_base 53: mod_base = OTHER; note = 2'-O-methyl ribonucleotide
  modified_base 54: mod_base = OTHER; note = 2'-O-methyl ribonucleotide
  modified_base 55: mod_base = OTHER; note = 2'-O-methyl ribonucleotide
  modified_base 56: mod_base = OTHER; note = 2'-O-methyl ribonucleotide
  modified_base 57: mod_base = OTHER; note = 2'-O-methyl ribonucleotide
  modified_base 60: mod_base = OTHER; note = 2'-O-methyl ribonucleotide
  modified_base 61: mod_base = OTHER; note = 2'-O-methyl ribonucleotide
  modified_base 66: mod_base = OTHER; note = 2'-O-methyl ribonucleotide
  modified_base 67: mod_base = OTHER; note = 2'-O-methyl ribonucleotide
  modified_base 70: mod_base = OTHER; note = 2'-O-methyl ribonucleotide
  modified_base 71: mod_base = OTHER; note = 2'-O-methyl ribonucleotide
  modified_base 72: mod_base = OTHER; note = 2'-O-methyl ribonucleotide
  modified_base 74: mod_base = OTHER; note = 2'-O-methyl ribonucleotide
  modified_base 75: mod_base = OTHER; note = 2'-O-methyl ribonucleotide
  modified_base 76: mod_base = OTHER; note = 2'-O-methyl ribonucleotide
  modified_base 77: mod_base = OTHER; note = 2'-O-methyl ribonucleotide
  modified_base 78: mod_base = OTHER; note = 2'-O-methyl ribonucleotide
  modified_base 79: mod_base = OTHER; note = 2'-O-methyl ribonucleotide
  modified_base 80: mod_base = OTHER; note = 2'-O-methyl ribonucleotide
  modified_base 82: mod_base = OTHER; note = 2'-O-methyl ribonucleotide
  modified_base 83: mod_base = OTHER; note = 2'-O-methyl ribonucleotide
  modified_base 84: mod_base = OTHER; note = 2'-O-methyl ribonucleotide
  modified_base 85: mod_base = OTHER; note = 2'-O-methyl ribonucleotide
  modified_base 86: mod_base = OTHER; note = 2'-O-methyl ribonucleotide
  modified_base 87: mod_base = OTHER; note = 2'-O-methyl ribonucleotide
  modified_base 89: mod_base = OTHER; note = 2'-O-methyl ribonucleotide
  modified_base 92: mod_base = OTHER; note = 2'-O-methyl ribonucleotide
  modified_base 93: mod_base = OTHER; note = 2'-O-methyl ribonucleotide
  modified_base 94: mod_base = OTHER; note = 2'-O-methyl ribonucleotide
  modified_base 95: mod_base = OTHER; note = 2'-O-methyl ribonucleotide
  modified_base 96: mod_base = OTHER; note = 2'-O-methyl ribonucleotide
  modified_base 97: mod_base = OTHER; note = 2'-O-methyl ribonucleotide
  modified_base 98: mod_base = OTHER; note = 2'-O-methyl ribonucleotide
  modified_base 99: mod_base = OTHER; note = 2'-O-methyl ribonucleotide
  modified_base 100: mod_base = OTHER; note = 2'-O-methyl ribonucleotide
  modified_base 1..4: mod_base = OTHER; note = phosphorothioate linkage
  modified_base 25..26: mod_base = OTHER; note = phosphorothioate linkage
  modified_base 45..46: mod_base = OTHER; note = phosphorothioate linkage
  modified_base 64..65: mod_base = OTHER; note = phosphorothioate linkage
  modified_base 98..100: mod_base = OTHER; note = phosphorothioate linkage

SEQ ID NO: 2405 - RNA, 100 nt, synthetic construct; identical to SEQ ID NO: 422
  source 1..100: mol_type = other RNA
  modified_base 1: mod_base = OTHER; note = 2'-O-methyl ribonucleotide
  modified_base 2: mod_base = OTHER; note = 2'-O-methyl ribonucleotide
  modified_base 3: mod_base = OTHER; note = 2'-O-methyl ribonucleotide
  modified_base 21: mod_base = OTHER; note = 2'-O-methyl ribonucleotide
  modified_base 28: mod_base = OTHER; note = 2'-O-methyl ribonucleotide
  modified_base 29: mod_base = OTHER; note = 2'-O-methyl ribonucleotide
  modified_base 30: mod_base = OTHER; note = 2'-O-methyl ribonucleotide
  modified_base 31: mod_base = OTHER; note = 2'-O-methyl ribonucleotide
  modified_base 32: mod_base = OTHER; note = 2'-O-methyl ribonucleotide
  modified_base 33: mod_base = OTHER; note = 2'-O-methyl ribonucleotide
  modified_base 34: mod_base = OTHER; note = 2'-O-methyl ribonucleotide
  modified_base 35: mod_base = OTHER; note = 2'-O-methyl ribonucleotide
  modified_base 36: mod_base = OTHER; note = 2'-O-methyl ribonucleotide
  modified_base 37: mod_base = OTHER; note = 2'-O-methyl ribonucleotide
  modified_base 38: mod_base = OTHER; note = 2'-O-methyl ribonucleotide
  modified_base 39: mod_base = OTHER; note = 2'-O-methyl ribonucleotide
  modified_base 40: mod_base = OTHER; note = 2'-O-methyl ribonucleotide
  modified_base 41: mod_base = OTHER; note = 2'-O-methyl ribonucleotide
  modified_base 42: mod_base = OTHER; note = 2'-O-methyl ribonucleotide
  modified_base 46: mod_base = OTHER; note = 2'-O-methyl ribonucleotide
  modified_base 48: mod_base = OTHER; note = 2'-O-methyl ribonucleotide
  modified_base 50: mod_base = OTHER; note = 2'-O-methyl ribonucleotide
  modified_base 52: mod_base = OTHER; note = 2'-O-methyl ribonucleotide
  modified_base 53: mod_base = OTHER; note = 2'-O-methyl ribonucleotide
  modified_base 54: mod_base = OTHER; note = 2'-O-methyl ribonucleotide
  modified_base 55: mod_base = OTHER; note = 2'-O-methyl ribonucleotide
  modified_base 56: mod_base = OTHER; note = 2'-O-methyl ribonucleotide
  modified_base 57: mod_base = OTHER; note = 2'-O-methyl ribonucleotide
  modified_base 60: mod_base = OTHER; note = 2'-O-methyl ribonucleotide
  modified_base 61: mod_base = OTHER; note = 2'-O-methyl ribonucleotide
  modified_base 66: mod_base = OTHER; note = 2'-O-methyl ribonucleotide
  modified_base 67: mod_base = OTHER; note = 2'-O-methyl ribonucleotide
  modified_base 70: mod_base = OTHER; note = 2'-O-methyl ribonucleotide
  modified_base 71: mod_base = OTHER; note = 2'-O-methyl ribonucleotide
  modified_base 72: mod_base = OTHER; note = 2'-O-methyl ribonucleotide
  modified_base 73: mod_base = OTHER; note = 2'-O-methyl ribonucleotide
  modified_base 74: mod_base = OTHER; note = 2'-O-methyl ribonucleotide
  modified_base 75: mod_base = OTHER; note = 2'-O-methyl ribonucleotide
  modified_base 76: mod_base = OTHER; note = 2'-O-methyl ribonucleotide
  modified_base 77: mod_base = OTHER; note = 2'-O-methyl ribonucleotide
  modified_base 78: mod_base = OTHER; note = 2'-O-methyl ribonucleotide
  modified_base 79: mod_base = OTHER; note = 2'-O-methyl ribonucleotide
  modified_base 80: mod_base = OTHER; note = 2'-O-methyl ribonucleotide
  modified_base 81: mod_base = OTHER; note = 2'-O-methyl ribonucleotide
  modified_base 83: mod_base = OTHER; note = 2'-O-methyl ribonucleotide
  modified_base 84: mod_base = OTHER; note = 2'-O-methyl ribonucleotide
  modified_base 85: mod_base = OTHER; note = 2'-O-methyl ribonucleotide
  modified_base 86: mod_base = OTHER; note = 2'-O-methyl ribonucleotide
  modified_base 87: mod_base = OTHER; note = 2'-O-methyl ribonucleotide
  modified_base 88: mod_base = OTHER; note = 2'-O-methyl ribonucleotide
  modified_base 89: mod_base = OTHER; note = 2'-O-methyl ribonucleotide
  modified_base 90: mod_base = OTHER; note = 2'-O-methyl ribonucleotide
  modified_base 91: mod_base = OTHER; note = 2'-O-methyl ribonucleotide
  modified_base 92: mod_base = OTHER; note = 2'-O-methyl ribonucleotide
  modified_base 93: mod_base = OTHER; note = 2'-O-methyl ribonucleotide
  modified_base 94: mod_base = OTHER; note = 2'-O-methyl ribonucleotide
  modified_base 95: mod_base = OTHER; note = 2'-O-methyl ribonucleotide
  modified_base 96: mod_base = OTHER; note = 2'-O-methyl ribonucleotide
  modified_base 97: mod_base = OTHER; note = 2'-O-methyl ribonucleotide
  modified_base 98: mod_base = OTHER; note = 2'-O-methyl ribonucleotide
  modified_base 99: mod_base = OTHER; note = 2'-O-methyl ribonucleotide
  modified_base 100: mod_base = OTHER; note = 2'-O-methyl ribonucleotide
  modified_base 1..3: mod_base = OTHER; note = phosphorothioate linkage
  modified_base 64..65: mod_base = OTHER; note = phosphorothioate linkage
  modified_base 98..100: mod_base = OTHER; note = phosphorothioate linkage

SEQ ID NO: 2406 - RNA, 100 nt, synthetic construct; identical to SEQ ID NO: 422
  source 1..100: mol_type = other RNA
  modified_base 1: mod_base = OTHER; note = 2'-O-methyl ribonucleotide
  modified_base 2: mod_base = OTHER; note = 2'-O-methyl ribonucleotide
  modified_base 3: mod_base = OTHER; note = 2'-O-methyl ribonucleotide
  modified_base 21: mod_base = OTHER; note = 2'-O-methyl ribonucleotide
  modified_base 28: mod_base = OTHER; note = 2'-O-methyl ribonucleotide
  modified_base 29: mod_base = OTHER; note = 2'-O-methyl ribonucleotide
  modified_base 30: mod_base = OTHER; note = 2'-O-methyl ribonucleotide
  modified_base 31: mod_base = OTHER; note = 2'-O-methyl ribonucleotide
  modified_base 32: mod_base = OTHER; note = 2'-O-methyl ribonucleotide
  modified_base 34: mod_base = OTHER; note = 2'-O-methyl ribonucleotide
  modified_base 35: mod_base = OTHER; note = 2'-O-methyl ribonucleotide
  modified_base 36: mod_base = OTHER; note = 2'-O-methyl ribonucleotide
  modified_base 37: mod_base = OTHER; note = 2'-O-methyl ribonucleotide
  modified_base 38: mod_base = OTHER; note = 2'-O-methyl ribonucleotide
  modified_base 39: mod_base = OTHER; note = 2'-O-methyl ribonucleotide
  modified_base 40: mod_base = OTHER; note = 2'-O-methyl ribonucleotide
  modified_base 41: mod_base = OTHER; note = 2'-O-methyl ribonucleotide
  modified_base 42: mod_base = OTHER; note = 2'-O-methyl ribonucleotide
  modified_base 46: mod_base = OTHER; note = 2'-O-methyl ribonucleotide
  modified_base 48: mod_base = OTHER; note = 2'-O-methyl ribonucleotide
  modified_base 50: mod_base = OTHER; note = 2'-O-methyl ribonucleotide
  modified_base 52: mod_base = OTHER; note = 2'-O-methyl ribonucleotide
  modified_base 53: mod_base = OTHER; note = 2'-O-methyl ribonucleotide
  modified_base 54: mod_base = OTHER; note = 2'-O-methyl ribonucleotide
  modified_base 55: mod_base = OTHER; note = 2'-O-methyl ribonucleotide
  modified_base 56: mod_base = OTHER; note = 2'-O-methyl ribonucleotide
  modified_base 57: mod_base = OTHER; note = 2'-O-methyl ribonucleotide
  modified_base 60: mod_base = OTHER; note = 2'-O-methyl ribonucleotide
  modified_base 61: mod_base = OTHER; note = 2'-O-methyl ribonucleotide
  modified_base 66: mod_base = OTHER; note = 2'-O-methyl ribonucleotide
  modified_base 67: mod_base = OTHER; note = 2'-O-methyl ribonucleotide
  modified_base 70: mod_base = OTHER; note = 2'-O-methyl ribonucleotide
  modified_base 71: mod_base = OTHER; note = 2'-O-methyl ribonucleotide
  modified_base 72: mod_base = OTHER; note = 2'-O-methyl ribonucleotide
  modified_base 74: mod_base = OTHER; note = 2'-O-methyl ribonucleotide
  modified_base 75: mod_base = OTHER; note = 2'-O-methyl ribonucleotide
  modified_base 76: mod_base = OTHER; note = 2'-O-methyl ribonucleotide
  modified_base 77: mod_base = OTHER; note = 2'-O-methyl ribonucleotide
  modified_base 78: mod_base = OTHER; note = 2'-O-methyl ribonucleotide
  modified_base 79: mod_base = OTHER; note = 2'-O-methyl ribonucleotide
  modified_base 80: mod_base = OTHER; note = 2'-O-methyl ribonucleotide
  modified_base 81: mod_base = OTHER; note = 2'-O-methyl ribonucleotide
  modified_base 83: mod_base = OTHER; note = 2'-O-methyl ribonucleotide
  modified_base 84: mod_base = OTHER; note = 2'-O-methyl ribonucleotide
  modified_base 85: mod_base = OTHER; note = 2'-O-methyl ribonucleotide
  modified_base 86: mod_base = OTHER; note = 2'-O-methyl ribonucleotide
  modified_base 87: mod_base = OTHER; note = 2'-O-methyl ribonucleotide
  modified_base 88: mod_base = OTHER; note = 2'-O-methyl ribonucleotide
  modified_base 89: mod_base = OTHER; note = 2'-O-methyl ribonucleotide
  modified_base 90: mod_base = OTHER; note = 2'-O-methyl ribonucleotide
  modified_base 91: mod_base = OTHER; note = 2'-O-methyl ribonucleotide
  modified_base 92: mod_base = OTHER; note = 2'-O-methyl ribonucleotide
  modified_base 93: mod_base = OTHER; note = 2'-O-methyl ribonucleotide
  modified_base 94: mod_base = OTHER; note = 2'-O-methyl ribonucleotide
  modified_base 95: mod_base = OTHER; note = 2'-O-methyl ribonucleotide
  modified_base 96: mod_base = OTHER; note = 2'-O-methyl ribonucleotide
  modified_base 97: mod_base = OTHER; note = 2'-O-methyl ribonucleotide
  modified_base 98: mod_base = OTHER; note = 2'-O-methyl ribonucleotide
  modified_base 99: mod_base = OTHER; note = 2'-O-methyl ribonucleotide
  modified_base 100: mod_base = OTHER; note = 2'-O-methyl ribonucleotide
  modified_base 1..3: mod_base = OTHER; note = phosphorothioate linkage
  modified_base 64..65: mod_base = OTHER; note = phosphorothioate linkage
  modified_base 98..100: mod_base = OTHER; note = phosphorothioate linkage

SEQ ID NO: 2407 - RNA, 100 nt, synthetic construct; identical to SEQ ID NO: 55
  source 1..100: mol_type = other RNA
  modified_base 1: mod_base = OTHER; note = 2'-O-methyl ribonucleotide
  modified_base 2: mod_base = OTHER; note = 2'-O-methyl ribonucleotide
  modified_base 3: mod_base = OTHER; note = 2'-O-methyl ribonucleotide
  modified_base 21: mod_base = OTHER; note = 2'-O-methyl ribonucleotide
  modified_base 28: mod_base = OTHER; note = 2'-O-methyl ribonucleotide
  modified_base 29: mod_base = OTHER; note = 2'-O-methyl ribonucleotide
  modified_base 30: mod_base = OTHER; note = 2'-O-methyl ribonucleotide
  modified_base 31: mod_base = OTHER; note = 2'-O-methyl ribonucleotide
  modified_base 32: mod_base = OTHER; note = 2'-O-methyl ribonucleotide
  modified_base 33: mod_base = OTHER; note = 2'-O-methyl ribonucleotide
  modified_base 34: mod_base = OTHER; note = 2'-O-methyl ribonucleotide
  modified_base 35: mod_base = OTHER; note = 2'-O-methyl ribonucleotide
  modified_base 36: mod_base = OTHER; note = 2'-O-methyl ribonucleotide
  modified_base 37: mod_base = OTHER; note = 2'-O-methyl ribonucleotide
  modified_base 38: mod_base = OTHER; note = 2'-O-methyl ribonucleotide
  modified_base 39: mod_base = OTHER; note = 2'-O-methyl ribonucleotide
  modified_base 40: mod_base = OTHER; note = 2'-O-methyl ribonucleotide
  modified_base 41: mod_base = OTHER; note = 2'-O-methyl ribonucleotide
  modified_base 42: mod_base = OTHER; note = 2'-O-methyl ribonucleotide
  modified_base 46: mod_base = OTHER; note = 2'-O-methyl ribonucleotide
  modified_base 48: mod_base = OTHER; note = 2'-O-methyl ribonucleotide
  modified_base 50: mod_base = OTHER; note = 2'-O-methyl ribonucleotide
  modified_base 52: mod_base = OTHER; note = 2'-O-methyl ribonucleotide
  modified_base 53: mod_base = OTHER; note = 2'-O-methyl ribonucleotide
  modified_base 54: mod_base = OTHER; note = 2'-O-methyl ribonucleotide
  modified_base 57: mod_base = OTHER; note = 2'-O-methyl ribonucleotide
  modified_base 61: mod_base = OTHER; note = 2'-O-methyl ribonucleotide
  modified_base 66: mod_base = OTHER; note = 2'-O-methyl ribonucleotide
  modified_base 67: mod_base = OTHER; note = 2'-O-methyl ribonucleotide
  modified_base 70: mod_base = OTHER; note = 2'-O-methyl ribonucleotide
  modified_base 71: mod_base = OTHER; note = 2'-O-methyl ribonucleotide
  modified_base 72: mod_base = OTHER; note = 2'-O-methyl ribonucleotide
  modified_base 74: mod_base = OTHER; note = 2'-O-methyl ribonucleotide
  modified_base 75: mod_base = OTHER; note = 2'-O-methyl ribonucleotide
  modified_base 76: mod_base = OTHER; note = 2'-O-methyl ribonucleotide
  modified_base 77: mod_base = OTHER; note = 2'-O-methyl ribonucleotide
  modified_base 78: mod_base = OTHER; note = 2'-O-methyl ribonucleotide
  modified_base 79: mod_base = OTHER; note = 2'-O-methyl ribonucleotide
  modified_base 80: mod_base = OTHER; note = 2'-O-methyl ribonucleotide
  modified_base 82: mod_base = OTHER; note = 2'-O-methyl ribonucleotide
  modified_base 83: mod_base = OTHER; note = 2'-O-methyl ribonucleotide
  modified_base 84: mod_base = OTHER; note = 2'-O-methyl ribonucleotide
  modified_base 85: mod_base = OTHER; note = 2'-O-methyl ribonucleotide
  modified_base 86: mod_base = OTHER; note = 2'-O-methyl ribonucleotide
  modified_base 87: mod_base = OTHER; note = 2'-O-methyl ribonucleotide
  modified_base 89: mod_base = OTHER; note = 2'-O-methyl ribonucleotide
  modified_base 92: mod_base = OTHER; note = 2'-O-methyl ribonucleotide
  modified_base 93: mod_base = OTHER; note = 2'-O-methyl ribonucleotide
  modified_base 94: mod_base = OTHER; note = 2'-O-methyl ribonucleotide
  modified_base 95: mod_base = OTHER; note = 2'-O-methyl ribonucleotide
  modified_base 96: mod_base = OTHER; note = 2'-O-methyl ribonucleotide
  modified_base 97: mod_base = OTHER; note = 2'-O-methyl ribonucleotide
  modified_base 98: mod_base = OTHER; note = 2'-O-methyl ribonucleotide
  modified_base 99: mod_base = OTHER; note = 2'-O-methyl ribonucleotide
  modified_base 100: mod_base = OTHER; note = 2'-O-methyl ribonucleotide
  modified_base 1..3: mod_base = OTHER; note = phosphorothioate linkage
  modified_base 64..65: mod_base = OTHER; note = phosphorothioate linkage
  modified_base 98..100: mod_base = OTHER; note = phosphorothioate linkage

SEQ ID NO: 2408 - RNA, 100 nt, synthetic construct; identical to SEQ ID NO: 55
  source 1..100: mol_type = other RNA
  modified_base 1: mod_base = OTHER; note = 2'-O-methyl ribonucleotide
  modified_base 2: mod_base = OTHER; note = 2'-O-methyl ribonucleotide
  modified_base 3: mod_base = OTHER; note = 2'-O-methyl ribonucleotide
  modified_base 21: mod_base = OTHER; note = 2'-O-methyl ribonucleotide
  modified_base 28: mod_base = OTHER; note = 2'-O-methyl ribonucleotide
  modified_base 29: mod_base = OTHER; note = 2'-O-methyl ribonucleotide
  modified_base 30: mod_base = OTHER; note = 2'-O-methyl ribonucleotide
  modified_base 31: mod_base = OTHER; note = 2'-O-methyl ribonucleotide
  modified_base 32: mod_base = OTHER; note = 2'-O-methyl ribonucleotide
  modified_base 33: mod_base = OTHER; note = 2'-O-methyl ribonucleotide
  modified_base 34: mod_base = OTHER; note = 2'-O-methyl ribonucleotide
  modified_base 35: mod_base = OTHER; note = 2'-O-methyl ribonucleotide
  modified_base 36: mod_base = OTHER; note = 2'-O-methyl ribonucleotide
  modified_base 37: mod_base = OTHER; note = 2'-O-methyl ribonucleotide
  modified_base 38: mod_base = OTHER; note = 2'-O-methyl ribonucleotide
  modified_base 39: mod_base = OTHER; note = 2'-O-methyl ribonucleotide
  modified_base 40: mod_base = OTHER; note = 2'-O-methyl ribonucleotide
  modified_base 41: mod_base = OTHER; note = 2'-O-methyl ribonucleotide
  modified_base 42: mod_base = OTHER; note = 2'-O-methyl ribonucleotide
  modified_base 46: mod_base = OTHER; note = 2'-O-methyl ribonucleotide
  modified_base 48: mod_base = OTHER; note = 2'-O-methyl ribonucleotide
  modified_base 50: mod_base = OTHER; note = 2'-O-methyl ribonucleotide
  modified_base 52: mod_base = OTHER; note = 2'-O-methyl ribonucleotide
  modified_base 53: mod_base = OTHER; note = 2'-O-methyl ribonucleotide
  modified_base 54: mod_base = OTHER; note = 2'-O-methyl ribonucleotide
  modified_base 55: mod_base = OTHER; note = 2'-O-methyl ribonucleotide
  modified_base 56: mod_base = OTHER; note = 2'-O-methyl ribonucleotide
  modified_base 57: mod_base = OTHER; note = 2'-O-methyl ribonucleotide
  modified_base 60: mod_base = OTHER; note = 2'-O-methyl ribonucleotide
  modified_base 61: mod_base = OTHER; note = 2'-O-methyl ribonucleotide
  modified_base 66: mod_base = OTHER; note = 2'-O-methyl ribonucleotide
  modified_base 67: mod_base = OTHER; note = 2'-O-methyl ribonucleotide
  modified_base 70: mod_base = OTHER; note = 2'-O-methyl ribonucleotide
  modified_base 71: mod_base = OTHER; note = 2'-O-methyl ribonucleotide
  modified_base 72: mod_base = OTHER; note = 2'-O-methyl ribonucleotide
  modified_base 74: mod_base = OTHER; note = 2'-O-methyl ribonucleotide
  modified_base 75: mod_base = OTHER; note = 2'-O-methyl ribonucleotide
  modified_base 76: mod_base = OTHER; note = 2'-O-methyl ribonucleotide
  modified_base 77: mod_base = OTHER; note = 2'-O-methyl ribonucleotide
  modified_base 78: mod_base = OTHER; note = 2'-O-methyl ribonucleotide
  modified_base 79: mod_base = OTHER; note = 2'-O-methyl ribonucleotide
  modified_base 80: mod_base = OTHER; note = 2'-O-methyl ribonucleotide
  modified_base 82: mod_base = OTHER; note = 2'-O-methyl ribonucleotide
  modified_base 83: mod_base = OTHER; note = 2'-O-methyl ribonucleotide
  modified_base 84: mod_base = OTHER; note = 2'-O-methyl ribonucleotide
  modified_base 85: mod_base = OTHER; note = 2'-O-methyl ribonucleotide
  modified_base 86: mod_base = OTHER; note = 2'-O-methyl ribonucleotide
  modified_base 87: mod_base = OTHER; note = 2'-O-methyl ribonucleotide
  modified_base 89: mod_base = OTHER; note = 2'-O-methyl ribonucleotide
  modified_base 92: mod_base = OTHER; note = 2'-O-methyl ribonucleotide
  modified_base 93: mod_base = OTHER; note = 2'-O-methyl ribonucleotide
  modified_base 94: mod_base = OTHER; note = 2'-O-methyl ribonucleotide
  modified_base 95: mod_base = OTHER; note = 2'-O-methyl ribonucleotide
  modified_base 96: mod_base = OTHER; note = 2'-O-methyl ribonucleotide
  modified_base 97: mod_base = OTHER; note = 2'-O-methyl ribonucleotide
  modified_base 98: mod_base = OTHER; note = 2'-O-methyl ribonucleotide
  modified_base 99: mod_base = OTHER; note = 2'-O-methyl ribonucleotide
  modified_base 100: mod_base = OTHER; note = 2'-O-methyl ribonucleotide
  modified_base 1..3: mod_base = OTHER; note = phosphorothioate linkage
  modified_base 64..65: mod_base = OTHER; note = phosphorothioate linkage
  modified_base 98..100: mod_base = OTHER; note = phosphorothioate linkage

SEQ ID NO: 2409 - RNA, 100 nt, synthetic construct; identical to SEQ ID NO: 55
  source 1..100: mol_type = other RNA
  modified_base 1: mod_base = OTHER; note = 2'-O-methyl ribonucleotide
  modified_base 2: mod_base = OTHER; note = 2'-O-methyl ribonucleotide
  modified_base 3: mod_base = OTHER; note = 2'-O-methyl ribonucleotide
  modified_base 21: mod_base = OTHER; note = 2'-O-methyl ribonucleotide
  modified_base 28: mod_base = OTHER; note = 2'-O-methyl ribonucleotide
  modified_base 29: mod_base = OTHER; note = 2'-O-methyl ribonucleotide
  modified_base 30: mod_base = OTHER; note = 2'-O-methyl ribonucleotide
  modified_base 31: mod_base = OTHER; note = 2'-O-methyl ribonucleotide
  modified_base 32: mod_base = OTHER; note = 2'-O-methyl ribonucleotide
  modified_base 33: mod_base = OTHER; note = 2'-O-methyl ribonucleotide
  modified_base 34: mod_base = OTHER; note = 2'-O-methyl ribonucleotide
  modified_base 35: mod_base = OTHER; note = 2'-O-methyl ribonucleotide
  modified_base 36: mod_base = OTHER; note = 2'-O-methyl ribonucleotide
  modified_base 37: mod_base = OTHER; note = 2'-O-methyl ribonucleotide
  modified_base 38: mod_base = OTHER; note = 2'-O-methyl ribonucleotide
  modified_base 39: mod_base = OTHER; note = 2'-O-methyl ribonucleotide
  modified_base 40: mod_base = OTHER; note = 2'-O-methyl ribonucleotide
  modified_base 41: mod_base = OTHER; note = 2'-O-methyl ribonucleotide
  modified_base 42: mod_base = OTHER; note = 2'-O-methyl ribonucleotide
  modified_base 46: mod_base = OTHER; note = 2'-O-methyl ribonucleotide
  modified_base 48: mod_base = OTHER; note = 2'-O-methyl ribonucleotide
  modified_base 50: mod_base = OTHER; note = 2'-O-methyl ribonucleotide
  modified_base 52: mod_base = OTHER; note = 2'-O-methyl ribonucleotide
  modified_base 53: mod_base = OTHER; note = 2'-O-methyl ribonucleotide
  modified_base 54: mod_base = OTHER; note = 2'-O-methyl ribonucleotide
  modified_base 57: mod_base = OTHER; note = 2'-O-methyl ribonucleotide
  modified_base 61: mod_base = OTHER; note = 2'-O-methyl ribonucleotide
  modified_base 66: mod_base = OTHER; note = 2'-O-methyl ribonucleotide
  modified_base 67: mod_base = OTHER; note = 2'-O-methyl ribonucleotide
  modified_base 70: mod_base = OTHER; note = 2'-O-methyl ribonucleotide
  modified_base 71: mod_base = OTHER; note = 2'-O-methyl ribonucleotide
  modified_base 72: mod_base = OTHER; note = 2'-O-methyl ribonucleotide
  modified_base 73: mod_base = OTHER; note = 2'-O-methyl ribonucleotide
  modified_base 74: mod_base = OTHER; note = 2'-O-methyl ribonucleotide
  modified_base 75: mod_base = OTHER; note = 2'-O-methyl ribonucleotide
  modified_base 76: mod_base = OTHER; note = 2'-O-methyl ribonucleotide
  modified_base 77: mod_base = OTHER; note = 2'-O-methyl ribonucleotide
  modified_base 78: mod_base = OTHER; note = 2'-O-methyl ribonucleotide
  modified_base 79: mod_base = OTHER; note = 2'-O-methyl ribonucleotide
  modified_base 80: mod_base = OTHER; note = 2'-O-methyl ribonucleotide
  modified_base 82: mod_base = OTHER; note = 2'-O-methyl ribonucleotide
  modified_base 83: mod_base = OTHER; note = 2'-O-methyl ribonucleotide
  modified_base 84: mod_base = OTHER; note = 2'-O-methyl ribonucleotide
  modified_base 85: mod_base = OTHER; note = 2'-O-methyl ribonucleotide
  modified_base 86: mod_base = OTHER; note = 2'-O-methyl ribonucleotide
  modified_base 87: mod_base = OTHER; note = 2'-O-methyl ribonucleotide
  modified_base 89: mod_base = OTHER; note = 2'-O-methyl ribonucleotide
  modified_base 92: mod_base = OTHER; note = 2'-O-methyl ribonucleotide
  modified_base 93: mod_base = OTHER; note = 2'-O-methyl ribonucleotide
  modified_base 94: mod_base = OTHER; note = 2'-O-methyl ribonucleotide
  modified_base 95: mod_base = OTHER; note = 2'-O-methyl ribonucleotide
  modified_base 96: mod_base = OTHER; note = 2'-O-methyl ribonucleotide
  modified_base 97: mod_base = OTHER; note = 2'-O-methyl ribonucleotide
  modified_base 98: mod_base = OTHER; note = 2'-O-methyl ribonucleotide
  modified_base 99: mod_base = OTHER; note = 2'-O-methyl ribonucleotide
  modified_base 100: mod_base = OTHER; note = 2'-O-methyl ribonucleotide
  modified_base 1..3: mod_base = OTHER; note = phosphorothioate linkage
  modified_base 64..65: mod_base = OTHER; note = phosphorothioate linkage
  modified_base 98..100: mod_base = OTHER; note = phosphorothioate linkage

SEQ ID NO: 2410 - RNA, 100 nt, synthetic construct; identical to SEQ ID NO: 55
  source 1..100: mol_type = other RNA
  modified_base 1: mod_base = OTHER; note = 2'-O-methyl ribonucleotide
  modified_base 2: mod_base = OTHER; note = 2'-O-methyl ribonucleotide
  modified_base 3: mod_base = OTHER; note = 2'-O-methyl ribonucleotide
  modified_base 21: mod_base = OTHER; note = 2'-O-methyl ribonucleotide
  modified_base 28: mod_base = OTHER; note = 2'-O-methyl ribonucleotide
  modified_base 29: mod_base = OTHER; note = 2'-O-methyl ribonucleotide
  modified_base 30: mod_base = OTHER; note = 2'-O-methyl ribonucleotide
  modified_base 31: mod_base = OTHER; note = 2'-O-methyl ribonucleotide
  modified_base 32: mod_base = OTHER; note = 2'-O-methyl ribonucleotide
  modified_base 33: mod_base = OTHER; note = 2'-O-methyl ribonucleotide
  modified_base 34: mod_base = OTHER; note = 2'-O-methyl ribonucleotide
  modified_base 35: mod_base = OTHER; note = 2'-O-methyl ribonucleotide
  modified_base 36: mod_base = OTHER; note = 2'-O-methyl ribonucleotide
  modified_base 37: mod_base = OTHER; note = 2'-O-methyl ribonucleotide
  modified_base 38: mod_base = OTHER; note = 2'-O-methyl ribonucleotide
  modified_base 39: mod_base = OTHER; note = 2'-O-methyl ribonucleotide
  modified_base 40: mod_base = OTHER; note = 2'-O-methyl ribonucleotide
  modified_base 41: mod_base = OTHER; note = 2'-O-methyl ribonucleotide
  modified_base 42: mod_base = OTHER; note = 2'-O-methyl ribonucleotide
  modified_base 46: mod_base = OTHER; note = 2'-O-methyl ribonucleotide
  modified_base 48: mod_base = OTHER; note = 2'-O-methyl ribonucleotide
  modified_base 50: mod_base = OTHER; note = 2'-O-methyl ribonucleotide
  modified_base 52: mod_base = OTHER; note = 2'-O-methyl ribonucleotide
  modified_base 53: mod_base = OTHER; note = 2'-O-methyl ribonucleotide
  modified_base 54: mod_base = OTHER; note = 2'-O-methyl ribonucleotide
  modified_base 57: mod_base = OTHER; note = 2'-O-methyl ribonucleotide
  modified_base 61: mod_base = OTHER; note = 2'-O-methyl ribonucleotide
  modified_base 66: mod_base = OTHER; note = 2'-O-methyl ribonucleotide
  modified_base 67: mod_base = OTHER; note = 2'-O-methyl ribonucleotide
  modified_base 70: mod_base = OTHER; note = 2'-O-methyl ribonucleotide
  modified_base 71: mod_base = OTHER; note = 2'-O-methyl ribonucleotide
  modified_base 72: mod_base = OTHER; note = 2'-O-methyl ribonucleotide
  modified_base 73: mod_base = OTHER; note = 2'-O-methyl ribonucleotide
  modified_base 74: mod_base = OTHER; note = 2'-O-methyl ribonucleotide
  modified_base 75: mod_base = OTHER; note = 2'-O-methyl ribonucleotide
  modified_base 76: mod_base = OTHER; note = 2'-O-methyl ribonucleotide
  modified_base 77: mod_base = OTHER; note = 2'-O-methyl ribonucleotide
  modified_base 78: mod_base = OTHER; note = 2'-O-methyl ribonucleotide
  modified_base 79: mod_base = OTHER; note = 2'-O-methyl ribonucleotide
  modified_base 80: mod_base = OTHER; note = 2'-O-methyl ribonucleotide
  modified_base 82: mod_base = OTHER; note = 2'-O-methyl ribonucleotide
  modified_base 83: mod_base = OTHER; note = 2'-O-methyl ribonucleotide
  modified_base 84: mod_base = OTHER; note = 2'-O-methyl ribonucleotide
  modified_base 85: mod_base = OTHER; note = 2'-O-methyl ribonucleotide
  modified_base 86: mod_base = OTHER; note = 2'-O-methyl ribonucleotide
  modified_base 87: mod_base = OTHER; note = 2'-O-methyl ribonucleotide
  modified_base 89: mod_base = OTHER; note = 2'-O-methyl ribonucleotide
  modified_base 91: mod_base = OTHER; note = 2'-O-methyl ribonucleotide
  modified_base 92: mod_base = OTHER; note = 2'-O-methyl ribonucleotide
  modified_base 93: mod_base = OTHER; note = 2'-O-methyl ribonucleotide
  modified_base 94: mod_base = OTHER; note = 2'-O-methyl ribonucleotide
  modified_base 95: mod_base = OTHER; note = 2'-O-methyl ribonucleotide
  modified_base 96: mod_base = OTHER; note = 2'-O-methyl ribonucleotide
  modified_base 97: mod_base = OTHER; note = 2'-O-methyl ribonucleotide
  modified_base 98: mod_base = OTHER; note = 2'-O-methyl ribonucleotide
  modified_base 99: mod_base = OTHER; note = 2'-O-methyl ribonucleotide
  modified_base 100: mod_base = OTHER; note = 2'-O-methyl ribonucleotide
  modified_base 1..3: mod_base = OTHER; note = phosphorothioate linkage
  modified_base 64..65: mod_base = OTHER; note = phosphorothioate linkage
  modified_base 98..100: mod_base = OTHER; note = phosphorothioate linkage

SEQ ID NO: 2411 - RNA, 100 nt, synthetic construct; identical to SEQ ID NO: 55
  source 1..100: mol_type = other RNA
  modified_base 1: mod_base = OTHER; note = 2'-O-methyl ribonucleotide
  modified_base 2: mod_base = OTHER; note = 2'-O-methyl ribonucleotide
  modified_base 3: mod_base = OTHER; note = 2'-O-methyl ribonucleotide
  modified_base 21: mod_base = OTHER; note = 2'-O-methyl ribonucleotide
  modified_base 28: mod_base = OTHER; note = 2'-O-methyl ribonucleotide
  modified_base 29: mod_base = OTHER; note = 2'-O-methyl ribonucleotide
  modified_base 30: mod_base = OTHER; note = 2'-O-methyl ribonucleotide
  modified_base 31: mod_base = OTHER; note = 2'-O-methyl ribonucleotide
  modified_base 32: mod_base = OTHER; note = 2'-O-methyl ribonucleotide
  modified_base 34: mod_base = OTHER; note = 2'-O-methyl ribonucleotide
  modified_base 35: mod_base = OTHER; note = 2'-O-methyl ribonucleotide
  modified_base 36: mod_base = OTHER; note = 2'-O-methyl ribonucleotide
  modified_base 37: mod_base = OTHER; note = 2'-O-methyl ribonucleotide
  modified_base 38: mod_base = OTHER; note = 2'-O-methyl ribonucleotide
  modified_base 39: mod_base = OTHER; note = 2'-O-methyl ribonucleotide
  modified_base 40: mod_base = OTHER; note = 2'-O-methyl ribonucleotide
  modified_base 41: mod_base = OTHER; note = 2'-O-methyl ribonucleotide
  modified_base 42: mod_base = OTHER; note = 2'-O-methyl ribonucleotide
  modified_base 46: mod_base = OTHER; note = 2'-O-methyl ribonucleotide
  modified_base 48: mod_base = OTHER; note = 2'-O-methyl ribonucleotide
  modified_base 50: mod_base = OTHER; note = 2'-O-methyl ribonucleotide
  modified_base 52: mod_base = OTHER; note = 2'-O-methyl ribonucleotide
  modified_base 53: mod_base = OTHER; note = 2'-O-methyl ribonucleotide
  modified_base 54: mod_base = OTHER; note = 2'-O-methyl ribonucleotide
  modified_base 57: mod_base = OTHER; note = 2'-O-methyl ribonucleotide
  modified_base 61: mod_base = OTHER; note = 2'-O-methyl ribonucleotide
  modified_base 66: mod_base = OTHER; note = 2'-O-methyl ribonucleotide
  modified_base 67: mod_base = OTHER; note = 2'-O-methyl ribonucleotide
  modified_base 70: mod_base = OTHER; note = 2'-O-methyl ribonucleotide
  modified_base 71: mod_base = OTHER; note = 2'-O-methyl ribonucleotide
  modified_base 72: mod_base = OTHER; note = 2'-O-methyl ribonucleotide
  modified_base 73: mod_base = OTHER; note = 2'-O-methyl ribonucleotide
  modified_base 74: mod_base = OTHER; note = 2'-O-methyl ribonucleotide
  modified_base 75: mod_base = OTHER; note = 2'-O-methyl ribonucleotide
  modified_base 76: mod_base = OTHER; note = 2'-O-methyl ribonucleotide
  modified_base 77: mod_base = OTHER; note = 2'-O-methyl ribonucleotide
  modified_base 78: mod_base = OTHER; note = 2'-O-methyl ribonucleotide
  modified_base 79: mod_base = OTHER; note = 2'-O-methyl ribonucleotide
  modified_base 80: mod_base = OTHER; note = 2'-O-methyl ribonucleotide
  modified_base 82: mod_base = OTHER; note = 2'-O-methyl ribonucleotide
  modified_base 83: mod_base = OTHER; note = 2'-O-methyl ribonucleotide
  modified_base 84: mod_base = OTHER; note = 2'-O-methyl ribonucleotide
  modified_base 85: mod_base = OTHER; note = 2'-O-methyl ribonucleotide
  modified_base 86: mod_base = OTHER; note = 2'-O-methyl ribonucleotide
  modified_base 87: mod_base = OTHER; note = 2'-O-methyl ribonucleotide
  modified_base 89: mod_base = OTHER; note = 2'-O-methyl ribonucleotide
  modified_base 92: mod_base = OTHER; note = 2'-O-methyl ribonucleotide
  modified_base 93: mod_base = OTHER; note = 2'-O-methyl ribonucleotide
  modified_base 94: mod_base = OTHER; note = 2'-O-methyl ribonucleotide
  modified_base 95: mod_base = OTHER; note = 2'-O-methyl ribonucleotide
  modified_base 96: mod_base = OTHER; note = 2'-O-methyl ribonucleotide
  modified_base 97: mod_base = OTHER; note = 2'-O-methyl ribonucleotide
  modified_base 98: mod_base = OTHER; note = 2'-O-methyl ribonucleotide
  modified_base 99: mod_base = OTHER; note = 2'-O-methyl ribonucleotide
  modified_base 100: mod_base = OTHER; note = 2'-O-methyl ribonucleotide
  modified_base 1..3: mod_base = OTHER; note = phosphorothioate linkage
  modified_base 64..65: mod_base = OTHER; note = phosphorothioate linkage
  modified_base 98..100: mod_base = OTHER; note = phosphorothioate linkage

SEQ ID NO: 2412 - RNA, 100 nt, synthetic construct; identical to SEQ ID NO: 55
  source 1..100: mol_type = other RNA
  modified_base 1: mod_base = OTHER; note = 2'-O-methyl ribonucleotide
  modified_base 2: mod_base = OTHER; note = 2'-O-methyl ribonucleotide
  modified_base 3: mod_base = OTHER; note = 2'-O-methyl ribonucleotide
  modified_base 21: mod_base = OTHER; note = 2'-O-methyl ribonucleotide
  modified_base 28: mod_base = OTHER; note = 2'-O-methyl ribonucleotide
  modified_base 29: mod_base = OTHER; note = 2'-O-methyl ribonucleotide
  modified_base 30: mod_base = OTHER; note = 2'-O-methyl ribonucleotide
  modified_base 31: mod_base = OTHER; note = 2'-O-methyl ribonucleotide
  modified_base 32: mod_base = OTHER; note = 2'-O-methyl ribonucleotide
  modified_base 34: mod_base = OTHER; note = 2'-O-methyl ribonucleotide
  modified_base 35: mod_base = OTHER; note = 2'-O-methyl ribonucleotide
  modified_base 36: mod_base = OTHER; note = 2'-O-methyl ribonucleotide
  modified_base 37: mod_base = OTHER; note = 2'-O-methyl ribonucleotide
  modified_base 38: mod_base = OTHER; note = 2'-O-methyl ribonucleotide
  modified_base 39: mod_base = OTHER; note = 2'-O-methyl ribonucleotide
  modified_base 40: mod_base = OTHER; note = 2'-O-methyl ribonucleotide
  modified_base 41: mod_base = OTHER; note = 2'-O-methyl ribonucleotide
  modified_base 42: mod_base = OTHER; note = 2'-O-methyl ribonucleotide
  modified_base 46: mod_base = OTHER; note = 2'-O-methyl ribonucleotide
  modified_base 48: mod_base = OTHER; note = 2'-O-methyl ribonucleotide
  modified_base 50: mod_base = OTHER; note = 2'-O-methyl ribonucleotide
  modified_base 52: mod_base = OTHER; note = 2'-O-methyl ribonucleotide
  modified_base 53: mod_base = OTHER; note = 2'-O-methyl ribonucleotide
  modified_base 54: mod_base = OTHER; note = 2'-O-methyl ribonucleotide
  modified_base 57: mod_base = OTHER; note = 2'-O-methyl ribonucleotide
  modified_base 61: mod_base = OTHER; note = 2'-O-methyl ribonucleotide
  modified_base 66: mod_base = OTHER; note = 2'-O-methyl ribonucleotide
  modified_base 67: mod_base = OTHER; note = 2'-O-methyl ribonucleotide
  modified_base 70: mod_base = OTHER; note = 2'-O-methyl ribonucleotide
  modified_base 71: mod_base = OTHER; note = 2'-O-methyl ribonucleotide
  modified_base 72: mod_base = OTHER; note = 2'-O-methyl ribonucleotide
  modified_base 73: mod_base = OTHER; note = 2'-O-methyl ribonucleotide
  modified_base 74: mod_base = OTHER; note = 2'-O-methyl ribonucleotide
  modified_base 75: mod_base = OTHER; note = 2'-O-methyl ribonucleotide
  modified_base 76: mod_base = OTHER; note = 2'-O-methyl ribonucleotide
  modified_base 77: mod_base = OTHER; note = 2'-O-methyl ribonucleotide
  modified_base 78: mod_base = OTHER; note = 2'-O-methyl ribonucleotide
  modified_base 79: mod_base = OTHER; note = 2'-O-methyl ribonucleotide
  modified_base 80: mod_base = OTHER; note = 2'-O-methyl ribonucleotide
  modified_base 82: mod_base = OTHER; note = 2'-O-methyl ribonucleotide
  modified_base 83: mod_base = OTHER; note = 2'-O-methyl ribonucleotide
  modified_base 84: mod_base = OTHER; note = 2'-O-methyl ribonucleotide
  modified_base 85: mod_base = OTHER; note = 2'-O-methyl ribonucleotide
  modified_base 86: mod_base = OTHER; note = 2'-O-methyl ribonucleotide
  modified_base 87: mod_base = OTHER; note = 2'-O-methyl ribonucleotide
  modified_base 89: mod_base = OTHER; note = 2'-O-methyl ribonucleotide
  modified_base 91: mod_base = OTHER; note = 2'-O-methyl ribonucleotide
  modified_base 92: mod_base = OTHER; note = 2'-O-methyl ribonucleotide
  modified_base 93: mod_base = OTHER; note = 2'-O-methyl ribonucleotide
  modified_base 94: mod_base = OTHER; note = 2'-O-methyl ribonucleotide
  modified_base 95: mod_base = OTHER; note = 2'-O-methyl ribonucleotide
  modified_base 96: mod_base = OTHER; note = 2'-O-methyl ribonucleotide
  modified_base 97: mod_base = OTHER; note = 2'-O-methyl ribonucleotide
  modified_base 98: mod_base = OTHER; note = 2'-O-methyl ribonucleotide
  modified_base 99: mod_base = OTHER; note = 2'-O-methyl ribonucleotide
  modified_base 100: mod_base = OTHER; note = 2'-O-methyl ribonucleotide
  modified_base 1..3: mod_base = OTHER; note = phosphorothioate linkage
  modified_base 64..65: mod_base = OTHER; note = phosphorothioate linkage
  modified_base 98..100: mod_base = OTHER; note = phosphorothioate linkage

SEQ ID NO: 2413 - RNA, 100 nt, synthetic construct; identical to SEQ ID NO: 55
  source 1..100: mol_type = other RNA
  modified_base 1: mod_base = OTHER; note = 2'-O-methyl ribonucleotide
  modified_base 2: mod_base = OTHER; note = 2'-O-methyl ribonucleotide
  modified_base 3: mod_base = OTHER; note = 2'-O-methyl ribonucleotide
  modified_base 21: mod_base = OTHER; note = 2'-O-methyl ribonucleotide
  modified_base 28: mod_base = OTHER; note = 2'-O-methyl ribonucleotide
  modified_base 29: mod_base = OTHER; note = 2'-O-methyl ribonucleotide
  modified_base 30: mod_base = OTHER; note = 2'-O-methyl ribonucleotide
  modified_base 31: mod_base = OTHER; note = 2'-O-methyl ribonucleotide
  modified_base 32: mod_base = OTHER; note = 2'-O-methyl ribonucleotide
  modified_base 34: mod_base = OTHER; note = 2'-O-methyl ribonucleotide
  modified_base 35: mod_base = OTHER; note = 2'-O-methyl ribonucleotide
  modified_base 36: mod_base = OTHER; note = 2'-O-methyl ribonucleotide
  modified_base 37: mod_base = OTHER; note = 2'-O-methyl ribonucleotide
  modified_base 38: mod_base = OTHER; note = 2'-O-methyl ribonucleotide
  modified_base 39: mod_base = OTHER; note = 2'-O-methyl ribonucleotide
  modified_base 40: mod_base = OTHER; note = 2'-O-methyl ribonucleotide
  modified_base 41: mod_base = OTHER; note = 2'-O-methyl ribonucleotide
  modified_base 42: mod_base = OTHER; note = 2'-O-methyl ribonucleotide
  modified_base 46: mod_base = OTHER; note = 2'-O-methyl ribonucleotide
  modified_base 48: mod_base = OTHER; note = 2'-O-methyl ribonucleotide
  modified_base 50: mod_base = OTHER; note = 2'-O-methyl ribonucleotide
  modified_base 52: mod_base = OTHER; note = 2'-O-methyl ribonucleotide
  modified_base 53: mod_base = OTHER; note = 2'-O-methyl ribonucleotide
  modified_base 54: mod_base = OTHER; note = 2'-O-methyl ribonucleotide
  modified_base 55: mod_base = OTHER; note = 2'-O-methyl ribonucleotide
  modified_base 56: mod_base = OTHER; note = 2'-O-methyl ribonucleotide
  modified_base 57: mod_base = OTHER; note = 2'-O-methyl ribonucleotide
  modified_base 60: mod_base = OTHER; note = 2'-O-methyl ribonucleotide
  modified_base 61: mod_base = OTHER; note = 2'-O-methyl ribonucleotide
  modified_base 66: mod_base = OTHER; note = 2'-O-methyl ribonucleotide
  modified_base 67: mod_base = OTHER; note = 2'-O-methyl ribonucleotide
  modified_base 70: mod_base = OTHER; note = 2'-O-methyl ribonucleotide
  modified_base 71: mod_base = OTHER; note = 2'-O-methyl ribonucleotide
  modified_base 72: mod_base = OTHER; note = 2'-O-methyl ribonucleotide
  modified_base 74: mod_base = OTHER; note = 2'-O-methyl ribonucleotide
  modified_base 75: mod_base = OTHER; note = 2'-O-methyl ribonucleotide
  modified_base 76: mod_base = OTHER; note = 2'-O-methyl ribonucleotide
  modified_base 77: mod_base = OTHER; note = 2'-O-methyl ribonucleotide
  modified_base 78: mod_base = OTHER; note = 2'-O-methyl ribonucleotide
  modified_base 79: mod_base = OTHER; note = 2'-O-methyl ribonucleotide
  modified_base 80: mod_base = OTHER; note = 2'-O-methyl ribonucleotide
  modified_base 82: mod_base = OTHER; note = 2'-O-methyl ribonucleotide
  modified_base 83: mod_base = OTHER; note = 2'-O-methyl ribonucleotide
  modified_base 84: mod_base = OTHER; note = 2'-O-methyl ribonucleotide
  modified_base 85: mod_base = OTHER; note = 2'-O-methyl ribonucleotide
  modified_base 86: mod_base = OTHER; note = 2'-O-methyl ribonucleotide
  modified_base 87: mod_base = OTHER; note = 2'-O-methyl ribonucleotide
  modified_base 89: mod_base = OTHER; note = 2'-O-methyl ribonucleotide
  modified_base 92: mod_base = OTHER; note = 2'-O-methyl ribonucleotide
  modified_base 93: mod_base = OTHER; note = 2'-O-methyl ribonucleotide
  modified_base 94: mod_base = OTHER; note = 2'-O-methyl ribonucleotide
  modified_base 95: mod_base = OTHER; note = 2'-O-methyl ribonucleotide
  modified_base 96: mod_base = OTHER; note = 2'-O-methyl ribonucleotide
  modified_base 97: mod_base = OTHER; note = 2'-O-methyl ribonucleotide
  modified_base 98: mod_base = OTHER; note = 2'-O-methyl ribonucleotide
  modified_base 99: mod_base = OTHER; note = 2'-O-methyl ribonucleotide
  modified_base 100: mod_base = OTHER; note = 2'-O-methyl ribonucleotide
  modified_base 1..3: mod_base = OTHER; note = phosphorothioate linkage
  modified_base 64..65: mod_base = OTHER; note = phosphorothioate linkage
  modified_base 98..100: mod_base = OTHER; note = phosphorothioate linkage

SEQ ID NO: 2414 - RNA, 100 nt, synthetic construct; identical to SEQ ID NO: 421
  source 1..100: mol_type = other RNA
  modified_base 1: mod_base = OTHER; note = 2'-O-methyl ribonucleotide
  modified_base 2: mod_base = OTHER; note = 2'-O-methyl ribonucleotide
  modified_base 3: mod_base = OTHER; note = 2'-O-methyl ribonucleotide
  modified_base 21: mod_base = OTHER; note = 2'-O-methyl ribonucleotide
  modified_base 28: mod_base = OTHER; note = 2'-O-methyl ribonucleotide
  modified_base 29: mod_base = OTHER; note = 2'-O-methyl ribonucleotide
  modified_base 30: mod_base = OTHER; note = 2'-O-methyl ribonucleotide
  modified_base 31: mod_base = OTHER; note = 2'-O-methyl ribonucleotide
  modified_base 32: mod_base = OTHER; note = 2'-O-methyl ribonucleotide
  modified_base 33: mod_base = OTHER; note = 2'-O-methyl ribonucleotide
  modified_base 34: mod_base = OTHER; note = 2'-O-methyl ribonucleotide
  modified_base 35: mod_base = OTHER; note = 2'-O-methyl ribonucleotide
  modified_base 36: mod_base = OTHER; note = 2'-O-methyl ribonucleotide
  modified_base 37: mod_base = OTHER; note = 2'-O-methyl ribonucleotide
  modified_base 38: mod_base = OTHER; note = 2'-O-methyl ribonucleotide
  modified_base 39: mod_base = OTHER; note = 2'-O-methyl ribonucleotide
  modified_base 40: mod_base = OTHER; note = 2'-O-methyl ribonucleotide
  modified_base 41: mod_base = OTHER; note = 2'-O-methyl ribonucleotide
  modified_base 42: mod_base = OTHER; note = 2'-O-methyl ribonucleotide
  modified_base 46: mod_base = OTHER; note = 2'-O-methyl ribonucleotide
  modified_base 48: mod_base = OTHER; note = 2'-O-methyl ribonucleotide
  modified_base 50: mod_base = OTHER; note = 2'-O-methyl ribonucleotide
  modified_base 52: mod_base = OTHER; note = 2'-O-methyl ribonucleotide
  modified_base 53: mod_base = OTHER; note = 2'-O-methyl ribonucleotide
  modified_base 54: mod_base = OTHER; note = 2'-O-methyl ribonucleotide
  modified_base 55: mod_base = OTHER; note = 2'-O-methyl ribonucleotide
  modified_base 56: mod_base = OTHER; note = 2'-O-methyl ribonucleotide
  modified_base 57: mod_base = OTHER; note = 2'-O-methyl ribonucleotide
  modified_base 60: mod_base = OTHER; note = 2'-O-methyl ribonucleotide
  modified_base 61: mod_base = OTHER; note = 2'-O-methyl ribonucleotide
  modified_base 66: mod_base = OTHER; note = 2'-O-methyl ribonucleotide
  modified_base 67: mod_base = OTHER; note = 2'-O-methyl ribonucleotide
  modified_base 70: mod_base = OTHER; note = 2'-O-methyl ribonucleotide
  modified_base 71: mod_base = OTHER; note = 2'-O-methyl ribonucleotide
  modified_base 72: mod_base = OTHER; note = 2'-O-methyl ribonucleotide
  modified_base 73: mod_base = OTHER; note = 2'-O-methyl ribonucleotide
  modified_base 74: mod_base = OTHER; note = 2'-O-methyl ribonucleotide
  modified_base 75: mod_base = OTHER; note = 2'-O-methyl ribonucleotide
  modified_base 76: mod_base = OTHER; note = 2'-O-methyl ribonucleotide
  modified_base 77: mod_base = OTHER; note = 2'-O-methyl ribonucleotide
  modified_base 78: mod_base = OTHER; note = 2'-O-methyl ribonucleotide
  modified_base 79: mod_base = OTHER; note = 2'-O-methyl ribonucleotide
  modified_base 80: mod_base = OTHER; note = 2'-O-methyl ribonucleotide
  modified_base 81: mod_base = OTHER; note = 2'-O-methyl ribonucleotide
  modified_base 83: mod_base = OTHER; note = 2'-O-methyl ribonucleotide
  modified_base 84: mod_base = OTHER; note = 2'-O-methyl ribonucleotide
  modified_base 85: mod_base = OTHER; note = 2'-O-methyl ribonucleotide
  modified_base 86: mod_base = OTHER; note = 2'-O-methyl ribonucleotide
  modified_base 87: mod_base = OTHER; note = 2'-O-methyl ribonucleotide
  modified_base 88: mod_base = OTHER; note = 2'-O-methyl ribonucleotide
  modified_base 89: mod_base = OTHER; note = 2'-O-methyl ribonucleotide
  modified_base 90: mod_base = OTHER; note = 2'-O-methyl ribonucleotide
  modified_base 91: mod_base = OTHER; note = 2'-O-methyl ribonucleotide
  modified_base 92: mod_base = OTHER; note = 2'-O-methyl ribonucleotide
  modified_base 93: mod_base = OTHER; note = 2'-O-methyl ribonucleotide
  modified_base 94: mod_base = OTHER; note = 2'-O-methyl ribonucleotide
  modified_base 95: mod_base = OTHER; note = 2'-O-methyl ribonucleotide
  modified_base 96: mod_base = OTHER; note = 2'-O-methyl ribonucleotide
  modified_base 97: mod_base = OTHER; note = 2'-O-methyl ribonucleotide
  modified_base 98: mod_base = OTHER; note = 2'-O-methyl ribonucleotide
  modified_base 99: mod_base = OTHER; note = 2'-O-methyl ribonucleotide
  modified_base 100: mod_base = OTHER; note = 2'-O-methyl ribonucleotide
  modified_base 1..3: mod_base = OTHER; note = phosphorothioate linkage
  modified_base 45..46: mod_base = OTHER; note = phosphorothioate linkage
  modified_base 98..100: mod_base = OTHER; note = phosphorothioate linkage

SEQ ID NO: 2415 - RNA, 100 nt, synthetic construct; identical to SEQ ID NO: 421
  source 1..100: mol_type = other RNA
  modified_base 1: mod_base = OTHER; note = 2'-O-methyl ribonucleotide
  modified_base 2: mod_base = OTHER; note = 2'-O-methyl ribonucleotide
  modified_base 3: mod_base = OTHER; note = 2'-O-methyl ribonucleotide
  modified_base 21: mod_base = OTHER; note = 2'-O-methyl ribonucleotide
  modified_base 28: mod_base = OTHER; note = 2'-O-methyl ribonucleotide
  modified_base 29: mod_base = OTHER; note = 2'-O-methyl ribonucleotide
  modified_base 30: mod_base = OTHER; note = 2'-O-methyl ribonucleotide
  modified_base 31: mod_base = OTHER; note = 2'-O-methyl ribonucleotide
  modified_base 32: mod_base = OTHER; note = 2'-O-methyl ribonucleotide
  modified_base 34: mod_base = OTHER; note = 2'-O-methyl ribonucleotide
  modified_base 35: mod_base = OTHER; note = 2'-O-methyl ribonucleotide
  modified_base 36: mod_base = OTHER; note = 2'-O-methyl ribonucleotide
  modified_base 37: mod_base = OTHER; note = 2'-O-methyl ribonucleotide
  modified_base 38: mod_base = OTHER; note = 2'-O-methyl ribonucleotide
  modified_base 39: mod_base = OTHER; note = 2'-O-methyl ribonucleotide
  modified_base 40: mod_base = OTHER; note = 2'-O-methyl ribonucleotide
  modified_base 41: mod_base = OTHER; note = 2'-O-methyl ribonucleotide
  modified_base 42: mod_base = OTHER; note = 2'-O-methyl ribonucleotide
  modified_base 46: mod_base = OTHER; note = 2'-O-methyl ribonucleotide
  modified_base 48: mod_base = OTHER; note = 2'-O-methyl ribonucleotide
  modified_base 50: mod_base = OTHER; note = 2'-O-methyl ribonucleotide
  modified_base 52: mod_base = OTHER; note = 2'-O-methyl ribonucleotide
  modified_base 53: mod_base = OTHER; note = 2'-O-methyl ribonucleotide
  modified_base 54: mod_base = OTHER; note = 2'-O-methyl ribonucleotide
  modified_base 55: mod_base = OTHER; note = 2'-O-methyl ribonucleotide
  modified_base 56: mod_base = OTHER; note = 2'-O-methyl ribonucleotide
  modified_base 57: mod_base = OTHER; note = 2'-O-methyl ribonucleotide
  modified_base 60: mod_base = OTHER; note = 2'-O-methyl ribonucleotide
  modified_base 61: mod_base = OTHER; note = 2'-O-methyl ribonucleotide
  modified_base 66: mod_base = OTHER; note = 2'-O-methyl ribonucleotide
  modified_base 67: mod_base = OTHER; note = 2'-O-methyl ribonucleotide
  modified_base 70: mod_base = OTHER; note = 2'-O-methyl ribonucleotide
  modified_base 71: mod_base = OTHER; note = 2'-O-methyl ribonucleotide
  modified_base 72: mod_base = OTHER; note = 2'-O-methyl ribonucleotide
  modified_base 74: mod_base = OTHER; note = 2'-O-methyl ribonucleotide
  modified_base 75: mod_base = OTHER; note = 2'-O-methyl ribonucleotide
  modified_base 76: mod_base = OTHER; note = 2'-O-methyl ribonucleotide
  modified_base 77: mod_base = OTHER; note = 2'-O-methyl ribonucleotide
  modified_base 78: mod_base = OTHER; note = 2'-O-methyl ribonucleotide
  modified_base 79: mod_base = OTHER; note = 2'-O-methyl ribonucleotide
  modified_base 80: mod_base = OTHER; note = 2'-O-methyl ribonucleotide
  modified_base 81: mod_base = OTHER; note = 2'-O-methyl ribonucleotide
  modified_base 83: mod_base = OTHER; note = 2'-O-methyl ribonucleotide
  modified_base 84: mod_base = OTHER; note = 2'-O-methyl ribonucleotide
  modified_base 85: mod_base = OTHER; note = 2'-O-methyl ribonucleotide
  modified_base 86: mod_base = OTHER; note = 2'-O-methyl ribonucleotide
  modified_base 87: mod_base = OTHER; note = 2'-O-methyl ribonucleotide
  modified_base 88: mod_base = OTHER; note = 2'-O-methyl ribonucleotide
  modified_base 89: mod_base = OTHER; note = 2'-O-methyl ribonucleotide
  modified_base 90: mod_base = OTHER; note = 2'-O-methyl ribonucleotide
  modified_base 91: mod_base = OTHER; note = 2'-O-methyl ribonucleotide
  modified_base 92: mod_base = OTHER; note = 2'-O-methyl ribonucleotide
  modified_base 93: mod_base = OTHER; note = 2'-O-methyl ribonucleotide
  modified_base 94: mod_base = OTHER; note = 2'-O-methyl ribonucleotide
  modified_base 95: mod_base = OTHER; note = 2'-O-methyl ribonucleotide
  modified_base 96: mod_base = OTHER; note = 2'-O-methyl ribonucleotide
  modified_base 97: mod_base = OTHER; note = 2'-O-methyl ribonucleotide
  modified_base 98: mod_base = OTHER; note = 2'-O-methyl ribonucleotide
  modified_base 99: mod_base = OTHER; note = 2'-O-methyl ribonucleotide
  modified_base 100: mod_base = OTHER; note = 2'-O-methyl ribonucleotide
  modified_base 1..3: mod_base = OTHER; note = phosphorothioate linkage
  modified_base 45..46: mod_base = OTHER; note = phosphorothioate linkage
  modified_base 98..100: mod_base = OTHER; note = phosphorothioate linkage

SEQ ID NO: 2416 - RNA, 100 nt, synthetic construct; identical to SEQ ID NO: 422
  source 1..100: mol_type = other RNA
  modified_base 1: mod_base = OTHER; note = 2'-O-methyl ribonucleotide
  modified_base 2: mod_base = OTHER; note = 2'-O-methyl ribonucleotide
  modified_base 3: mod_base = OTHER; note = 2'-O-methyl ribonucleotide
  modified_base 21: mod_base = OTHER; note = 2'-O-methyl ribonucleotide
  modified_base 28: mod_base = OTHER; note = 2'-O-methyl ribonucleotide
  modified_base 29: mod_base = OTHER; note = 2'-O-methyl ribonucleotide
  modified_base 30: mod_base = OTHER; note = 2'-O-methyl ribonucleotide
  modified_base 31: mod_base = OTHER; note = 2'-O-methyl ribonucleotide
  modified_base 32: mod_base = OTHER; note = 2'-O-methyl ribonucleotide
  modified_base 33: mod_base = OTHER; note = 2'-O-methyl ribonucleotide
  modified_base 34: mod_base = OTHER; note = 2'-O-methyl ribonucleotide
  modified_base 35: mod_base = OTHER; note = 2'-O-methyl ribonucleotide
  modified_base 36: mod_base = OTHER; note = 2'-O-methyl ribonucleotide
  modified_base 37: mod_base = OTHER; note = 2'-O-methyl ribonucleotide
  modified_base 38: mod_base = OTHER; note = 2'-O-methyl ribonucleotide
  modified_base 39: mod_base = OTHER; note = 2'-O-methyl ribonucleotide
  modified_base 40: mod_base = OTHER; note = 2'-O-methyl ribonucleotide
  modified_base 41: mod_base = OTHER; note = 2'-O-methyl ribonucleotide
  modified_base 42: mod_base = OTHER; note = 2'-O-methyl ribonucleotide
  modified_base 46: mod_base = OTHER; note = 2'-O-methyl ribonucleotide
  modified_base 48: mod_base = OTHER; note = 2'-O-methyl ribonucleotide
  modified_base 50: mod_base = OTHER; note = 2'-O-methyl ribonucleotide
  modified_base 52: mod_base = OTHER; note = 2'-O-methyl ribonucleotide
  modified_base 53: mod_base = OTHER; note = 2'-O-methyl ribonucleotide
  modified_base 54: mod_base = OTHER; note = 2'-O-methyl ribonucleotide
  modified_base 55: mod_base = OTHER; note = 2'-O-methyl ribonucleotide
  modified_base 56: mod_base = OTHER; note = 2'-O-methyl ribonucleotide
  modified_base 57: mod_base = OTHER; note = 2'-O-methyl ribonucleotide
  modified_base 60: mod_base = OTHER; note = 2'-O-methyl ribonucleotide
  modified_base 61: mod_base = OTHER; note = 2'-O-methyl ribonucleotide
  modified_base 66: mod_base = OTHER; note = 2'-O-methyl ribonucleotide
  modified_base 67: mod_base = OTHER; note = 2'-O-methyl ribonucleotide
  modified_base 70: mod_base = OTHER; note = 2'-O-methyl ribonucleotide
  modified_base 71: mod_base = OTHER; note = 2'-O-methyl ribonucleotide
  modified_base 72: mod_base = OTHER; note = 2'-O-methyl ribonucleotide
  modified_base 73: mod_base = OTHER; note = 2'-O-methyl ribonucleotide
  modified_base 74: mod_base = OTHER; note = 2'-O-methyl ribonucleotide
  modified_base 75: mod_base = OTHER; note = 2'-O-methyl ribonucleotide
  modified_base 76: mod_base = OTHER; note = 2'-O-methyl ribonucleotide
  modified_base 77: mod_base = OTHER; note = 2'-O-methyl ribonucleotide
  modified_base 78: mod_base = OTHER; note = 2'-O-methyl ribonucleotide
  modified_base 79: mod_base = OTHER; note = 2'-O-methyl ribonucleotide
  modified_base 80: mod_base = OTHER; note = 2'-O-methyl ribonucleotide
  modified_base 81: mod_base = OTHER; note = 2'-O-methyl ribonucleotide
  modified_base 83: mod_base = OTHER; note = 2'-O-methyl ribonucleotide
  modified_base 84: mod_base = OTHER; note = 2'-O-methyl ribonucleotide
  modified_base 85: mod_base = OTHER; note = 2'-O-methyl ribonucleotide
  modified_base 86: mod_base = OTHER; note = 2'-O-methyl ribonucleotide
  modified_base 87: mod_base = OTHER; note = 2'-O-methyl ribonucleotide
  modified_base 88: mod_base = OTHER; note = 2'-O-methyl ribonucleotide
  modified_base 89: mod_base = OTHER; note = 2'-O-methyl ribonucleotide
  modified_base 90: mod_base = OTHER; note = 2'-O-methyl ribonucleotide
  modified_base 91: mod_base = OTHER; note = 2'-O-methyl ribonucleotide
  modified_base 92: mod_base = OTHER; note = 2'-O-methyl ribonucleotide
  modified_base 93: mod_base = OTHER; note = 2'-O-methyl ribonucleotide
  modified_base 94: mod_base = OTHER; note = 2'-O-methyl ribonucleotide
  modified_base 95: mod_base = OTHER; note = 2'-O-methyl ribonucleotide
  modified_base 96: mod_base = OTHER; note = 2'-O-methyl ribonucleotide
  modified_base 97: mod_base = OTHER; note = 2'-O-methyl ribonucleotide
  modified_base 98: mod_base = OTHER; note = 2'-O-methyl ribonucleotide
  modified_base 99: mod_base = OTHER; note = 2'-O-methyl ribonucleotide
  modified_base 100: mod_base = OTHER; note = 2'-O-methyl ribonucleotide
  modified_base 1..3: mod_base = OTHER; note = phosphorothioate linkage
  modified_base 45..46: mod_base = OTHER; note = phosphorothioate linkage
  modified_base 98..100: mod_base = OTHER; note = phosphorothioate linkage

SEQ ID NO: 2417 - RNA, 100 nt, synthetic construct; identical to SEQ ID NO: 422
  source 1..100: mol_type = other RNA
  modified_base 1: mod_base = OTHER; note = 2'-O-methyl ribonucleotide
  modified_base 2: mod_base = OTHER; note = 2'-O-methyl ribonucleotide
  modified_base 3: mod_base = OTHER; note = 2'-O-methyl ribonucleotide
  modified_base 21: mod_base = OTHER; note = 2'-O-methyl ribonucleotide
  modified_base 28: mod_base = OTHER; note = 2'-O-methyl ribonucleotide
  modified_base 29: mod_base = OTHER; note = 2'-O-methyl ribonucleotide
  modified_base 30: mod_base = OTHER; note = 2'-O-methyl ribonucleotide
  modified_base 31: mod_base = OTHER; note = 2'-O-methyl ribonucleotide
  modified_base 32: mod_base = OTHER; note = 2'-O-methyl ribonucleotide
  modified_base 34: mod_base = OTHER; note = 2'-O-methyl ribonucleotide
  modified_base 35: mod_base = OTHER; note = 2'-O-methyl ribonucleotide
  modified_base 36: mod_base = OTHER; note = 2'-O-methyl ribonucleotide
  modified_base 37: mod_base = OTHER; note = 2'-O-methyl ribonucleotide
  modified_base 38: mod_base = OTHER; note = 2'-O-methyl ribonucleotide
  modified_base 39: mod_base = OTHER; note = 2'-O-methyl ribonucleotide
  modified_base 40: mod_base = OTHER; note = 2'-O-methyl ribonucleotide
  modified_base 41: mod_base = OTHER; note = 2'-O-methyl ribonucleotide
  modified_base 42: mod_base = OTHER; note = 2'-O-methyl ribonucleotide
  modified_base 46: mod_base = OTHER; note = 2'-O-methyl ribonucleotide
  modified_base 48: mod_base = OTHER; note = 2'-O-methyl ribonucleotide
  modified_base 50: mod_base = OTHER; note = 2'-O-methyl ribonucleotide
  modified_base 52: mod_base = OTHER; note = 2'-O-methyl ribonucleotide
  modified_base 53: mod_base = OTHER; note = 2'-O-methyl ribonucleotide
  modified_base 54: mod_base = OTHER; note = 2'-O-methyl ribonucleotide
  modified_base 55: mod_base = OTHER; note = 2'-O-methyl ribonucleotide
  modified_base 56: mod_base = OTHER; note = 2'-O-methyl ribonucleotide
  modified_base 57: mod_base = OTHER; note = 2'-O-methyl ribonucleotide
  modified_base 60: mod_base = OTHER; note = 2'-O-methyl ribonucleotide
  modified_base 61: mod_base = OTHER; note = 2'-O-methyl ribonucleotide
  modified_base 66: mod_base = OTHER; note = 2'-O-methyl ribonucleotide
  modified_base 67: mod_base = OTHER; note = 2'-O-methyl ribonucleotide
  modified_base 70: mod_base = OTHER; note = 2'-O-methyl ribonucleotide
  modified_base 71: mod_base = OTHER; note = 2'-O-methyl ribonucleotide
  modified_base 72: mod_base = OTHER; note = 2'-O-methyl ribonucleotide
  modified_base 74: mod_base = OTHER; note = 2'-O-methyl ribonucleotide
  modified_base 75: mod_base = OTHER; note = 2'-O-methyl ribonucleotide
  modified_base 76: mod_base = OTHER; note = 2'-O-methyl ribonucleotide
  modified_base 77: mod_base = OTHER; note = 2'-O-methyl ribonucleotide
  modified_base 78: mod_base = OTHER; note = 2'-O-methyl ribonucleotide
  modified_base 79: mod_base = OTHER; note = 2'-O-methyl ribonucleotide
  modified_base 80: mod_base = OTHER; note = 2'-O-methyl ribonucleotide
  modified_base 81: mod_base = OTHER; note = 2'-O-methyl ribonucleotide
  modified_base 83: mod_base = OTHER; note = 2'-O-methyl ribonucleotide
  modified_base 84: mod_base = OTHER; note = 2'-O-methyl ribonucleotide
  modified_base 85: mod_base = OTHER; note = 2'-O-methyl ribonucleotide
  modified_base 86: mod_base = OTHER; note = 2'-O-methyl ribonucleotide
  modified_base 87: mod_base = OTHER; note = 2'-O-methyl ribonucleotide
  modified_base 88: mod_base = OTHER; note = 2'-O-methyl ribonucleotide
  modified_base 89: mod_base = OTHER; note = 2'-O-methyl ribonucleotide
  modified_base 90: mod_base = OTHER; note = 2'-O-methyl ribonucleotide
  modified_base 91: mod_base = OTHER; note = 2'-O-methyl ribonucleotide
  modified_base 92: mod_base = OTHER; note = 2'-O-methyl ribonucleotide
  modified_base 93: mod_base = OTHER; note = 2'-O-methyl ribonucleotide
  modified_base 94: mod_base = OTHER; note = 2'-O-methyl ribonucleotide
  modified_base 95: mod_base = OTHER; note = 2'-O-methyl ribonucleotide
  modified_base 96: mod_base = OTHER; note = 2'-O-methyl ribonucleotide
  modified_base 97: mod_base = OTHER; note = 2'-O-methyl ribonucleotide
  modified_base 98: mod_base = OTHER; note = 2'-O-methyl ribonucleotide
  modified_base 99: mod_base = OTHER; note = 2'-O-methyl ribonucleotide
  modified_base 100: mod_base = OTHER; note = 2'-O-methyl ribonucleotide
  modified_base 1..3: mod_base = OTHER; note = phosphorothioate linkage
  modified_base 45..46: mod_base = OTHER; note = phosphorothioate linkage
  modified_base 98..100: mod_base = OTHER; note = phosphorothioate linkage

SEQ ID NO: 2418 - RNA, 100 nt, synthetic construct; identical to SEQ ID NO: 55
  source 1..100: mol_type = other RNA
  modified_base 1: mod_base = OTHER; note = 2'-O-methyl ribonucleotide
  modified_base 2: mod_base = OTHER; note = 2'-O-methyl ribonucleotide
  modified_base 3: mod_base = OTHER; note = 2'-O-methyl ribonucleotide
  modified_base 21: mod_base = OTHER; note = 2'-O-methyl ribonucleotide
  modified_base 28: mod_base = OTHER; note = 2'-O-methyl ribonucleotide
  modified_base 29: mod_base = OTHER; note = 2'-O-methyl ribonucleotide
  modified_base 30: mod_base = OTHER; note = 2'-O-methyl ribonucleotide
  modified_base 31: mod_base = OTHER; note = 2'-O-methyl ribonucleotide
  modified_base 32: mod_base = OTHER; note = 2'-O-methyl ribonucleotide
  modified_base 33: mod_base = OTHER; note = 2'-O-methyl ribonucleotide
  modified_base 34: mod_base = OTHER; note = 2'-O-methyl ribonucleotide
  modified_base 35: mod_base = OTHER; note = 2'-O-methyl ribonucleotide
  modified_base 36: mod_base = OTHER; note = 2'-O-methyl ribonucleotide
  modified_base 37: mod_base = OTHER; note = 2'-O-methyl ribonucleotide
  modified_base 38: mod_base = OTHER; note = 2'-O-methyl ribonucleotide
  modified_base 39: mod_base = OTHER; note = 2'-O-methyl ribonucleotide
  modified_base 40: mod_base = OTHER; note = 2'-O-methyl ribonucleotide
  modified_base 41: mod_base = OTHER; note = 2'-O-methyl ribonucleotide
  modified_base 42: mod_base = OTHER; note = 2'-O-methyl ribonucleotide
  modified_base 46: mod_base = OTHER; note = 2'-O-methyl ribonucleotide
  modified_base 48: mod_base = OTHER; note = 2'-O-methyl ribonucleotide
  modified_base 50: mod_base = OTHER; note = 2'-O-methyl ribonucleotide
  modified_base 52: mod_base = OTHER; note = 2'-O-methyl ribonucleotide
  modified_base 53: mod_base = OTHER; note = 2'-O-methyl ribonucleotide
  modified_base 54: mod_base = OTHER; note = 2'-O-methyl ribonucleotide
  modified_base 57: mod_base = OTHER; note = 2'-O-methyl ribonucleotide
  modified_base 61: mod_base = OTHER; note = 2'-O-methyl ribonucleotide
  modified_base 66: mod_base = OTHER; note = 2'-O-methyl ribonucleotide
  modified_base 67: mod_base = OTHER; note = 2'-O-methyl ribonucleotide
  modified_base 70: mod_base = OTHER; note = 2'-O-methyl ribonucleotide
  modified_base 71: mod_base = OTHER; note = 2'-O-methyl ribonucleotide
  modified_base 72: mod_base = OTHER; note = 2'-O-methyl ribonucleotide
  modified_base 74: mod_base = OTHER; note = 2'-O-methyl ribonucleotide
  modified_base 75: mod_base = OTHER; note = 2'-O-methyl ribonucleotide
  modified_base 76: mod_base = OTHER; note = 2'-O-methyl ribonucleotide
  modified_base 77: mod_base = OTHER; note = 2'-O-methyl ribonucleotide
  modified_base 78: mod_base = OTHER; note = 2'-O-methyl ribonucleotide
  modified_base 79: mod_base = OTHER; note = 2'-O-methyl ribonucleotide
  modified_base 80: mod_base = OTHER; note = 2'-O-methyl ribonucleotide
  modified_base 82: mod_base = OTHER; note = 2'-O-methyl ribonucleotide
  modified_base 83: mod_base = OTHER; note = 2'-O-methyl ribonucleotide
  modified_base 84: mod_base = OTHER; note = 2'-O-methyl ribonucleotide
  modified_base 85: mod_base = OTHER; note = 2'-O-methyl ribonucleotide
  modified_base 86: mod_base = OTHER; note = 2'-O-methyl ribonucleotide
  modified_base 87: mod_base = OTHER; note = 2'-O-methyl ribonucleotide
  modified_base 89: mod_base = OTHER; note = 2'-O-methyl ribonucleotide
  modified_base 92: mod_base = OTHER; note = 2'-O-methyl ribonucleotide
  modified_base 93: mod_base = OTHER; note = 2'-O-methyl ribonucleotide
  modified_base 94: mod_base = OTHER; note = 2'-O-methyl ribonucleotide
  modified_base 95: mod_base = OTHER; note = 2'-O-methyl ribonucleotide
  modified_base 96: mod_base = OTHER; note = 2'-O-methyl ribonucleotide
  modified_base 97: mod_base = OTHER; note = 2'-O-methyl ribonucleotide
  modified_base 98: mod_base = OTHER; note = 2'-O-methyl ribonucleotide
  modified_base 99: mod_base = OTHER; note = 2'-O-methyl ribonucleotide
  modified_base 100: mod_base = OTHER; note = 2'-O-methyl ribonucleotide
  modified_base 1..3: mod_base = OTHER; note = phosphorothioate linkage
  modified_base 45..46: mod_base = OTHER; note = phosphorothioate linkage
  modified_base 98..100: mod_base = OTHER; note = phosphorothioate linkage

SEQ ID NO: 2419 - RNA, 100 nt, synthetic construct; identical to SEQ ID NO: 55
  source 1..100: mol_type = other RNA
  modified_base 1: mod_base = OTHER; note = 2'-O-methyl ribonucleotide
  modified_base 2: mod_base = OTHER; note = 2'-O-methyl ribonucleotide
  modified_base 3: mod_base = OTHER; note = 2'-O-methyl ribonucleotide
  modified_base 21: mod_base = OTHER; note = 2'-O-methyl ribonucleotide
  modified_base 28: mod_base = OTHER; note = 2'-O-methyl ribonucleotide
  modified_base 29: mod_base = OTHER; note = 2'-O-methyl ribonucleotide
  modified_base 30: mod_base = OTHER; note = 2'-O-methyl ribonucleotide
  modified_base 31: mod_base = OTHER; note = 2'-O-methyl ribonucleotide
  modified_base 32: mod_base = OTHER; note = 2'-O-methyl ribonucleotide
  modified_base 33: mod_base = OTHER; note = 2'-O-methyl ribonucleotide
  modified_base 34: mod_base = OTHER; note = 2'-O-methyl ribonucleotide
  modified_base 35: mod_base = OTHER; note = 2'-O-methyl ribonucleotide
  modified_base 36: mod_base = OTHER; note = 2'-O-methyl ribonucleotide
  modified_base 37: mod_base = OTHER; note = 2'-O-methyl ribonucleotide
  modified_base 38: mod_base = OTHER; note = 2'-O-methyl ribonucleotide
  modified_base 39: mod_base = OTHER; note = 2'-O-methyl ribonucleotide
  modified_base 40: mod_base = OTHER; note = 2'-O-methyl ribonucleotide
  modified_base 41: mod_base = OTHER; note = 2'-O-methyl ribonucleotide
  modified_base 42: mod_base = OTHER; note = 2'-O-methyl ribonucleotide
  modified_base 46: mod_base = OTHER; note = 2'-O-methyl ribonucleotide
  modified_base 48: mod_base = OTHER; note = 2'-O-methyl ribonucleotide
  modified_base 50: mod_base = OTHER; note = 2'-O-methyl ribonucleotide
  modified_base 52: mod_base = OTHER; note = 2'-O-methyl ribonucleotide
  modified_base 53: mod_base = OTHER; note = 2'-O-methyl ribonucleotide
  modified_base 54: mod_base = OTHER; note = 2'-O-methyl ribonucleotide
  modified_base 55: mod_base = OTHER; note = 2'-O-methyl ribonucleotide
  modified_base 56: mod_base = OTHER; note = 2'-O-methyl ribonucleotide
  modified_base 57: mod_base = OTHER; note = 2'-O-methyl ribonucleotide
  modified_base 60: mod_base = OTHER; note = 2'-O-methyl ribonucleotide
  modified_base 61: mod_base = OTHER; note = 2'-O-methyl ribonucleotide
  modified_base 66: mod_base = OTHER; note = 2'-O-methyl ribonucleotide
  modified_base 67: mod_base = OTHER; note = 2'-O-methyl ribonucleotide
  modified_base 70: mod_base = OTHER; note = 2'-O-methyl ribonucleotide
  modified_base 71: mod_base = OTHER; note = 2'-O-methyl ribonucleotide
  modified_base 72: mod_base = OTHER; note = 2'-O-methyl ribonucleotide
  modified_base 74: mod_base = OTHER; note = 2'-O-methyl ribonucleotide
  modified_base 75: mod_base = OTHER; note = 2'-O-methyl ribonucleotide
  modified_base 76: mod_base = OTHER; note = 2'-O-methyl ribonucleotide
  modified_base 77: mod_base = OTHER; note = 2'-O-methyl ribonucleotide
  modified_base 78: mod_base = OTHER; note = 2'-O-methyl ribonucleotide
  modified_base 79: mod_base = OTHER; note = 2'-O-methyl ribonucleotide
  modified_base 80: mod_base = OTHER; note = 2'-O-methyl ribonucleotide
  modified_base 82: mod_base = OTHER; note = 2'-O-methyl ribonucleotide
  modified_base 83: mod_base = OTHER; note = 2'-O-methyl ribonucleotide
  modified_base 84: mod_base = OTHER; note = 2'-O-methyl ribonucleotide
  modified_base 85: mod_base = OTHER; note = 2'-O-methyl ribonucleotide
  modified_base 86: mod_base = OTHER; note = 2'-O-methyl ribonucleotide
  modified_base 87: mod_base = OTHER; note = 2'-O-methyl ribonucleotide
  modified_base 89: mod_base = OTHER; note = 2'-O-methyl ribonucleotide
  modified_base 92: mod_base = OTHER; note = 2'-O-methyl ribonucleotide
  modified_base 93: mod_base = OTHER; note = 2'-O-methyl ribonucleotide
  modified_base 94: mod_base = OTHER; note = 2'-O-methyl ribonucleotide
  modified_base 95: mod_base = OTHER; note = 2'-O-methyl ribonucleotide
  modified_base 96: mod_base = OTHER; note = 2'-O-methyl ribonucleotide
  modified_base 97: mod_base = OTHER; note = 2'-O-methyl ribonucleotide
  modified_base 98: mod_base = OTHER; note = 2'-O-methyl ribonucleotide
  modified_base 99: mod_base = OTHER; note = 2'-O-methyl ribonucleotide
  modified_base 100: mod_base = OTHER; note = 2'-O-methyl ribonucleotide
  modified_base 1..3: mod_base = OTHER; note = phosphorothioate linkage
  modified_base 45..46: mod_base = OTHER; note = phosphorothioate linkage
  modified_base 98..100: mod_base = OTHER; note = phosphorothioate linkage

SEQ ID NO: 2420 - RNA, 100 nt, synthetic construct; identical to SEQ ID NO: 55
  source 1..100: mol_type = other RNA
  modified_base 1: mod_base = OTHER; note = 2'-O-methyl ribonucleotide
  modified_base 2: mod_base = OTHER; note = 2'-O-methyl ribonucleotide
  modified_base 3: mod_base = OTHER; note = 2'-O-methyl ribonucleotide
  modified_base 21: mod_base = OTHER; note = 2'-O-methyl ribonucleotide
  modified_base 28: mod_base = OTHER; note = 2'-O-methyl ribonucleotide
  modified_base 29: mod_base = OTHER; note = 2'-O-methyl ribonucleotide
  modified_base 30: mod_base = OTHER; note = 2'-O-methyl ribonucleotide
  modified_base 31: mod_base = OTHER; note = 2'-O-methyl ribonucleotide
  modified_base 32: mod_base = OTHER; note = 2'-O-methyl ribonucleotide
  modified_base 33: mod_base = OTHER; note = 2'-O-methyl ribonucleotide
  modified_base 34: mod_base = OTHER; note = 2'-O-methyl ribonucleotide
  modified_base 35: mod_base = OTHER; note = 2'-O-methyl ribonucleotide
  modified_base 36: mod_base = OTHER; note = 2'-O-methyl ribonucleotide
  modified_base 37: mod_base = OTHER; note = 2'-O-methyl ribonucleotide
  modified_base 38: mod_base = OTHER; note = 2'-O-methyl ribonucleotide
  modified_base 39: mod_base = OTHER; note = 2'-O-methyl ribonucleotide
  modified_base 40: mod_base = OTHER; note = 2'-O-methyl ribonucleotide
  modified_base 41: mod_base = OTHER; note = 2'-O-methyl ribonucleotide
  modified_base 42: mod_base = OTHER; note = 2'-O-methyl ribonucleotide
  modified_base 46: mod_base = OTHER; note = 2'-O-methyl ribonucleotide
  modified_base 48: mod_base = OTHER; note = 2'-O-methyl ribonucleotide
  modified_base 50: mod_base = OTHER; note = 2'-O-methyl ribonucleotide
  modified_base 52: mod_base = OTHER; note = 2'-O-methyl ribonucleotide
  modified_base 53: mod_base = OTHER; note = 2'-O-methyl ribonucleotide
  modified_base 54: mod_base = OTHER; note = 2'-O-methyl ribonucleotide
  modified_base 57: mod_base = OTHER; note = 2'-O-methyl ribonucleotide
  modified_base 61: mod_base = OTHER; note = 2'-O-methyl ribonucleotide
  modified_base 66: mod_base = OTHER; note = 2'-O-methyl ribonucleotide
  modified_base 67: mod_base = OTHER; note = 2'-O-methyl ribonucleotide
  modified_base 70: mod_base = OTHER; note = 2'-O-methyl ribonucleotide
  modified_base 71: mod_base = OTHER; note = 2'-O-methyl ribonucleotide
  modified_base 72: mod_base = OTHER; note = 2'-O-methyl ribonucleotide
  modified_base 73: mod_base = OTHER; note = 2'-O-methyl ribonucleotide
  modified_base 74: mod_base = OTHER; note = 2'-O-methyl ribonucleotide
  modified_base 75: mod_base = OTHER; note = 2'-O-methyl ribonucleotide
  modified_base 76: mod_base = OTHER; note = 2'-O-methyl ribonucleotide
  modified_base 77: mod_base = OTHER; note = 2'-O-methyl ribonucleotide
  modified_base 78: mod_base = OTHER; note = 2'-O-methyl ribonucleotide
  modified_base 79: mod_base = OTHER; note = 2'-O-methyl ribonucleotide
  modified_base 80: mod_base = OTHER; note = 2'-O-methyl ribonucleotide
  modified_base 82: mod_base = OTHER; note = 2'-O-methyl ribonucleotide
  modified_base 83: mod_base = OTHER; note = 2'-O-methyl ribonucleotide
  modified_base 84: mod_base = OTHER; note = 2'-O-methyl ribonucleotide
  modified_base 85: mod_base = OTHER; note = 2'-O-methyl ribonucleotide
  modified_base 86: mod_base = OTHER; note = 2'-O-methyl ribonucleotide
  modified_base 87: mod_base = OTHER; note = 2'-O-methyl ribonucleotide
  modified_base 89: mod_base = OTHER; note = 2'-O-methyl ribonucleotide
  modified_base 91: mod_base = OTHER; note = 2'-O-methyl ribonucleotide
  modified_base 92: mod_base = OTHER; note = 2'-O-methyl ribonucleotide
  modified_base 93: mod_base = OTHER; note = 2'-O-methyl ribonucleotide
  modified_base 94: mod_base = OTHER; note = 2'-O-methyl ribonucleotide
  modified_base 95: mod_base = OTHER; note = 2'-O-methyl ribonucleotide
  modified_base 96: mod_base = OTHER; note = 2'-O-methyl ribonucleotide
  modified_base 97: mod_base = OTHER; note = 2'-O-methyl ribonucleotide
  modified_base 98: mod_base = OTHER; note = 2'-O-methyl ribonucleotide
  modified_base 99: mod_base = OTHER; note = 2'-O-methyl ribonucleotide
  modified_base 100: mod_base = OTHER; note = 2'-O-methyl ribonucleotide
  modified_base 1..3: mod_base = OTHER; note = phosphorothioate linkage
  modified_base 45..46: mod_base = OTHER; note = phosphorothioate linkage
  modified_base 98..100: mod_base = OTHER; note = phosphorothioate linkage

SEQ ID NO: 2421 - RNA, 100 nt, synthetic construct; identical to SEQ ID NO: 55
  source 1..100: mol_type = other RNA
  modified_base 1: mod_base = OTHER; note = 2'-O-methyl ribonucleotide
  modified_base 2: mod_base = OTHER; note = 2'-O-methyl ribonucleotide
  modified_base 3: mod_base = OTHER; note = 2'-O-methyl ribonucleotide
  modified_base 21: mod_base = OTHER; note = 2'-O-methyl ribonucleotide
  modified_base 28: mod_base = OTHER; note = 2'-O-methyl ribonucleotide
  modified_base 29: mod_base = OTHER; note = 2'-O-methyl ribonucleotide
  modified_base 30: mod_base = OTHER; note = 2'-O-methyl ribonucleotide
  modified_base 31: mod_base = OTHER; note = 2'-O-methyl ribonucleotide
  modified_base 32: mod_base = OTHER; note = 2'-O-methyl ribonucleotide
  modified_base 34: mod_base = OTHER; note = 2'-O-methyl ribonucleotide
  modified_base 35: mod_base = OTHER; note = 2'-O-methyl ribonucleotide
  modified_base 36: mod_base = OTHER; note = 2'-O-methyl ribonucleotide
  modified_base 37: mod_base = OTHER; note = 2'-O-methyl ribonucleotide
  modified_base 38: mod_base = OTHER; note = 2'-O-methyl ribonucleotide
  modified_base 39: mod_base = OTHER; note = 2'-O-methyl ribonucleotide
  modified_base 40: mod_base = OTHER; note = 2'-O-methyl ribonucleotide
  modified_base 41: mod_base = OTHER; note = 2'-O-methyl ribonucleotide
  modified_base 42: mod_base = OTHER; note = 2'-O-methyl ribonucleotide
  modified_base 46: mod_base = OTHER; note = 2'-O-methyl ribonucleotide
  modified_base 48: mod_base = OTHER; note = 2'-O-methyl ribonucleotide
  modified_base 50: mod_base = OTHER; note = 2'-O-methyl ribonucleotide
  modified_base 52: mod_base = OTHER; note = 2'-O-methyl ribonucleotide
  modified_base 53: mod_base = OTHER; note = 2'-O-methyl ribonucleotide
  modified_base 54: mod_base = OTHER; note = 2'-O-methyl ribonucleotide
  modified_base 57: mod_base = OTHER; note = 2'-O-methyl ribonucleotide
  modified_base 61: mod_base = OTHER; note = 2'-O-methyl ribonucleotide
  modified_base 66: mod_base = OTHER; note = 2'-O-methyl ribonucleotide
  modified_base 67: mod_base = OTHER; note = 2'-O-methyl ribonucleotide
  modified_base 70: mod_base = OTHER; note = 2'-O-methyl ribonucleotide
  modified_base 71: mod_base = OTHER; note = 2'-O-methyl ribonucleotide
  modified_base 72: mod_base = OTHER; note = 2'-O-methyl ribonucleotide
  modified_base 73: mod_base = OTHER; note = 2'-O-methyl ribonucleotide
  modified_base 74: mod_base = OTHER; note = 2'-O-methyl ribonucleotide
  modified_base 75: mod_base = OTHER; note = 2'-O-methyl ribonucleotide
  modified_base 76: mod_base = OTHER; note = 2'-O-methyl ribonucleotide
  modified_base 77: mod_base = OTHER; note = 2'-O-methyl ribonucleotide
  modified_base 78: mod_base = OTHER; note = 2'-O-methyl ribonucleotide
  modified_base 79: mod_base = OTHER; note = 2'-O-methyl ribonucleotide
  modified_base 80: mod_base = OTHER; note = 2'-O-methyl ribonucleotide
  modified_base 82: mod_base = OTHER; note = 2'-O-methyl ribonucleotide
  modified_base 83: mod_base = OTHER; note = 2'-O-methyl ribonucleotide
  modified_base 84: mod_base = OTHER; note = 2'-O-methyl ribonucleotide
  modified_base 85: mod_base = OTHER; note = 2'-O-methyl ribonucleotide
  modified_base 86: mod_base = OTHER; note = 2'-O-methyl ribonucleotide
  modified_base 87: mod_base = OTHER; note = 2'-O-methyl ribonucleotide
  modified_base 89: mod_base = OTHER; note = 2'-O-methyl ribonucleotide
  modified_base 92: mod_base = OTHER; note = 2'-O-methyl ribonucleotide
  modified_base 93: mod_base = OTHER; note = 2'-O-methyl ribonucleotide
  modified_base 94: mod_base = OTHER; note = 2'-O-methyl ribonucleotide
  modified_base 95: mod_base = OTHER; note = 2'-O-methyl ribonucleotide
  modified_base 96: mod_base = OTHER; note = 2'-O-methyl ribonucleotide
  modified_base 97: mod_base = OTHER; note = 2'-O-methyl ribonucleotide
  modified_base 98: mod_base = OTHER; note = 2'-O-methyl ribonucleotide
  modified_base 99: mod_base = OTHER; note = 2'-O-methyl ribonucleotide
  modified_base 100: mod_base = OTHER; note = 2'-O-methyl ribonucleotide
  modified_base 1..3: mod_base = OTHER; note = phosphorothioate linkage
  modified_base 45..46: mod_base = OTHER; note = phosphorothioate linkage
  modified_base 98..100: mod_base = OTHER; note = phosphorothioate linkage

SEQ ID NO: 2422 - RNA, 100 nt, synthetic construct; identical to SEQ ID NO: 55
  source 1..100: mol_type = other RNA
  modified_base 1: mod_base = OTHER; note = 2'-O-methyl ribonucleotide
  modified_base 2: mod_base = OTHER; note = 2'-O-methyl ribonucleotide
  modified_base 3: mod_base = OTHER; note = 2'-O-methyl ribonucleotide
  modified_base 21: mod_base = OTHER; note = 2'-O-methyl ribonucleotide
  modified_base 28: mod_base = OTHER; note = 2'-O-methyl ribonucleotide
  modified_base 29: mod_base = OTHER; note = 2'-O-methyl ribonucleotide
  modified_base 30: mod_base = OTHER; note = 2'-O-methyl ribonucleotide
  modified_base 31: mod_base = OTHER; note = 2'-O-methyl ribonucleotide
  modified_base 32: mod_base = OTHER; note = 2'-O-methyl ribonucleotide
  modified_base 34: mod_base = OTHER; note = 2'-O-methyl ribonucleotide
  modified_base 35: mod_base = OTHER; note = 2'-O-methyl ribonucleotide
  modified_base 36: mod_base = OTHER; note = 2'-O-methyl ribonucleotide
  modified_base 37: mod_base = OTHER; note = 2'-O-methyl ribonucleotide
  modified_base 38: mod_base = OTHER; note = 2'-O-methyl ribonucleotide
  modified_base 39: mod_base = OTHER; note = 2'-O-methyl ribonucleotide
  modified_base 40: mod_base = OTHER; note = 2'-O-methyl ribonucleotide
  modified_base 41: mod_base = OTHER; note = 2'-O-methyl ribonucleotide
  modified_base 42: mod_base = OTHER; note = 2'-O-methyl ribonucleotide
  modified_base 46: mod_base = OTHER; note = 2'-O-methyl ribonucleotide
  modified_base 48: mod_base = OTHER; note = 2'-O-methyl ribonucleotide
  modified_base 50: mod_base = OTHER; note = 2'-O-methyl ribonucleotide
  modified_base 52: mod_base = OTHER; note = 2'-O-methyl ribonucleotide
  modified_base 53: mod_base = OTHER; note = 2'-O-methyl ribonucleotide
  modified_base 54: mod_base = OTHER; note = 2'-O-methyl ribonucleotide
  modified_base 57: mod_base = OTHER; note = 2'-O-methyl ribonucleotide
  modified_base 61: mod_base = OTHER; note = 2'-O-methyl ribonucleotide
  modified_base 66: mod_base = OTHER; note = 2'-O-methyl ribonucleotide
  modified_base 67: mod_base = OTHER; note = 2'-O-methyl ribonucleotide
  modified_base 70: mod_base = OTHER; note = 2'-O-methyl ribonucleotide
  modified_base 71: mod_base = OTHER; note = 2'-O-methyl ribonucleotide
  modified_base 72: mod_base = OTHER; note = 2'-O-methyl ribonucleotide
  modified_base 73: mod_base = OTHER; note = 2'-O-methyl ribonucleotide
  modified_base 74: mod_base = OTHER; note = 2'-O-methyl ribonucleotide
  modified_base 75: mod_base = OTHER; note = 2'-O-methyl ribonucleotide
  modified_base 76: mod_base = OTHER; note = 2'-O-methyl ribonucleotide
  modified_base 77: mod_base = OTHER; note = 2'-O-methyl ribonucleotide
  modified_base 78: mod_base = OTHER; note = 2'-O-methyl ribonucleotide
  modified_base 79: mod_base = OTHER; note = 2'-O-methyl ribonucleotide
  modified_base 80: mod_base = OTHER; note = 2'-O-methyl ribonucleotide
  modified_base 82: mod_base = OTHER; note = 2'-O-methyl ribonucleotide
  modified_base 83: mod_base = OTHER; note = 2'-O-methyl ribonucleotide
  modified_base 84: mod_base = OTHER; note = 2'-O-methyl ribonucleotide
  modified_base 85: mod_base = OTHER; note = 2'-O-methyl ribonucleotide
  modified_base 86: mod_base = OTHER; note = 2'-O-methyl ribonucleotide
  modified_base 87: mod_base = OTHER; note = 2'-O-methyl ribonucleotide
  modified_base 89: mod_base = OTHER; note = 2'-O-methyl ribonucleotide
  modified_base 91: mod_base = OTHER; note = 2'-O-methyl ribonucleotide
  modified_base 92: mod_base = OTHER; note = 2'-O-methyl ribonucleotide
  modified_base 93: mod_base = OTHER; note = 2'-O-methyl ribonucleotide
  modified_base 94: mod_base = OTHER; note = 2'-O-methyl ribonucleotide
  modified_base 95: mod_base = OTHER; note = 2'-O-methyl ribonucleotide
  modified_base 96: mod_base = OTHER; note = 2'-O-methyl ribonucleotide
  modified_base 97: mod_base = OTHER; note = 2'-O-methyl ribonucleotide
  modified_base 98: mod_base = OTHER; note = 2'-O-methyl ribonucleotide
  modified_base 99: mod_base = OTHER; note = 2'-O-methyl ribonucleotide
  modified_base 100: mod_base = OTHER; note = 2'-O-methyl ribonucleotide
  modified_base 1..3: mod_base = OTHER; note = phosphorothioate linkage
  modified_base 45..46: mod_base = OTHER; note = phosphorothioate linkage
  modified_base 98..100: mod_base = OTHER; note = phosphorothioate linkage

SEQ ID NO: 2423 - RNA, 100 nt, synthetic construct; identical to SEQ ID NO: 55
  source 1..100: mol_type = other RNA
  modified_base 1: mod_base = OTHER; note = 2'-O-methyl ribonucleotide
  modified_base 2: mod_base = OTHER; note = 2'-O-methyl ribonucleotide
  modified_base 3: mod_base = OTHER; note = 2'-O-methyl ribonucleotide
  modified_base 21: mod_base = OTHER; note = 2'-O-methyl ribonucleotide
  modified_base 28: mod_base = OTHER; note = 2'-O-methyl ribonucleotide
  modified_base 29: mod_base = OTHER; note = 2'-O-methyl ribonucleotide
  modified_base 30: mod_base = OTHER; note = 2'-O-methyl ribonucleotide
  modified_base 31: mod_base = OTHER; note = 2'-O-methyl ribonucleotide
  modified_base 32: mod_base = OTHER; note = 2'-O-methyl ribonucleotide
  modified_base 34: mod_base = OTHER; note = 2'-O-methyl ribonucleotide
  modified_base 35: mod_base = OTHER; note = 2'-O-methyl ribonucleotide
  modified_base 36: mod_base = OTHER; note = 2'-O-methyl ribonucleotide
  modified_base 37: mod_base = OTHER; note = 2'-O-methyl ribonucleotide
  modified_base 38: mod_base = OTHER; note = 2'-O-methyl ribonucleotide
  modified_base 39: mod_base = OTHER; note = 2'-O-methyl ribonucleotide
  modified_base 40: mod_base = OTHER; note = 2'-O-methyl ribonucleotide
  modified_base 41: mod_base = OTHER; note = 2'-O-methyl ribonucleotide
  modified_base 42: mod_base = OTHER; note = 2'-O-methyl ribonucleotide
  modified_base 46: mod_base = OTHER; note = 2'-O-methyl ribonucleotide
  modified_base 48: mod_base = OTHER; note = 2'-O-methyl ribonucleotide
  modified_base 50: mod_base = OTHER; note = 2'-O-methyl ribonucleotide
  modified_base 52: mod_base = OTHER; note = 2'-O-methyl ribonucleotide
  modified_base 53: mod_base = OTHER; note = 2'-O-methyl ribonucleotide
  modified_base 54: mod_base = OTHER; note = 2'-O-methyl ribonucleotide
  modified_base 55: mod_base = OTHER; note = 2'-O-methyl ribonucleotide
  modified_base 56: mod_base = OTHER; note = 2'-O-methyl ribonucleotide
  modified_base 57: mod_base = OTHER; note = 2'-O-methyl ribonucleotide
  modified_base 60: mod_base = OTHER; note = 2'-O-methyl ribonucleotide
  modified_base 61: mod_base = OTHER; note = 2'-O-methyl ribonucleotide
  modified_base 66: mod_base = OTHER; note = 2'-O-methyl ribonucleotide
  modified_base 67: mod_base = OTHER; note = 2'-O-methyl ribonucleotide
  modified_base 70: mod_base = OTHER; note = 2'-O-methyl ribonucleotide
  modified_base 71: mod_base = OTHER; note = 2'-O-methyl ribonucleotide
  modified_base 72: mod_base = OTHER; note = 2'-O-methyl ribonucleotide
  modified_base 74: mod_base = OTHER; note = 2'-O-methyl ribonucleotide
  modified_base 75: mod_base = OTHER; note = 2'-O-methyl ribonucleotide
  modified_base 76: mod_base = OTHER; note = 2'-O-methyl ribonucleotide
  modified_base 77: mod_base = OTHER; note = 2'-O-methyl ribonucleotide
  modified_base 78: mod_base = OTHER; note = 2'-O-methyl ribonucleotide
  modified_base 79: mod_base = OTHER; note = 2'-O-methyl ribonucleotide
  modified_base 80: mod_base = OTHER; note = 2'-O-methyl ribonucleotide
  modified_base 82: mod_base = OTHER; note = 2'-O-methyl ribonucleotide
  modified_base 83: mod_base = OTHER; note = 2'-O-methyl ribonucleotide
  modified_base 84: mod_base = OTHER; note = 2'-O-methyl ribonucleotide
  modified_base 85: mod_base = OTHER; note = 2'-O-methyl ribonucleotide
  modified_base 86: mod_base = OTHER; note = 2'-O-methyl ribonucleotide
  modified_base 87: mod_base = OTHER; note = 2'-O-methyl ribonucleotide
  modified_base 89: mod_base = OTHER; note = 2'-O-methyl ribonucleotide
  modified_base 92: mod_base = OTHER; note = 2'-O-methyl ribonucleotide
  modified_base 93: mod_base = OTHER; note = 2'-O-methyl ribonucleotide
  modified_base 94: mod_base = OTHER; note = 2'-O-methyl ribonucleotide
  modified_base 95: mod_base = OTHER; note = 2'-O-methyl ribonucleotide
  modified_base 96: mod_base = OTHER; note = 2'-O-methyl ribonucleotide
  modified_base 97: mod_base = OTHER; note = 2'-O-methyl ribonucleotide
  modified_base 98: mod_base = OTHER; note = 2'-O-methyl ribonucleotide
  modified_base 99: mod_base = OTHER; note = 2'-O-methyl ribonucleotide
  modified_base 100: mod_base = OTHER; note = 2'-O-methyl ribonucleotide
  modified_base 1..3: mod_base = OTHER; note = phosphorothioate linkage
  modified_base 45..46: mod_base = OTHER; note = phosphorothioate linkage
  modified_base 98..100: mod_base = OTHER; note = phosphorothioate linkage

SEQ ID NO: 2424 - RNA, 100 nt, synthetic construct; identical to SEQ ID NO: 421
  source 1..100: mol_type = other RNA
  modified_base 1: mod_base = OTHER; note = 2'-O-methyl ribonucleotide
  modified_base 2: mod_base = OTHER; note = 2'-O-methyl ribonucleotide
  modified_base 3: mod_base = OTHER; note = 2'-O-methyl ribonucleotide
  modified_base 21: mod_base = OTHER; note = 2'-O-methyl ribonucleotide
  modified_base 28: mod_base = OTHER; note = 2'-O-methyl ribonucleotide
  modified_base 29: mod_base = OTHER; note = 2'-O-methyl ribonucleotide
  modified_base 30: mod_base = OTHER; note = 2'-O-methyl ribonucleotide
  modified_base 31: mod_base = OTHER; note = 2'-O-methyl ribonucleotide
  modified_base 32: mod_base = OTHER; note = 2'-O-methyl ribonucleotide
  modified_base 33: mod_base = OTHER; note = 2'-O-methyl ribonucleotide
  modified_base 34: mod_base = OTHER; note = 2'-O-methyl ribonucleotide
  modified_base 35: mod_base = OTHER; note = 2'-O-methyl ribonucleotide
  modified_base 36: mod_base = OTHER; note = 2'-O-methyl ribonucleotide
  modified_base 37: mod_base = OTHER; note = 2'-O-methyl ribonucleotide
  modified_base 38: mod_base = OTHER; note = 2'-O-methyl ribonucleotide
  modified_base 39: mod_base = OTHER; note = 2'-O-methyl ribonucleotide
  modified_base 40: mod_base = OTHER; note = 2'-O-methyl ribonucleotide
  modified_base 41: mod_base = OTHER; note = 2'-O-methyl ribonucleotide
  modified_base 42: mod_base = OTHER; note = 2'-O-methyl ribonucleotide
  modified_base 46: mod_base = OTHER; note = 2'-O-methyl ribonucleotide
  modified_base 48: mod_base = OTHER; note = 2'-O-methyl ribonucleotide
  modified_base 50: mod_base = OTHER; note = 2'-O-methyl ribonucleotide
  modified_base 52: mod_base = OTHER; note = 2'-O-methyl ribonucleotide
  modified_base 53: mod_base = OTHER; note = 2'-O-methyl ribonucleotide
  modified_base 54: mod_base = OTHER; note = 2'-O-methyl ribonucleotide
  modified_base 55: mod_base = OTHER; note = 2'-O-methyl ribonucleotide
  modified_base 56: mod_base = OTHER; note = 2'-O-methyl ribonucleotide
  modified_base 57: mod_base = OTHER; note = 2'-O-methyl ribonucleotide
  modified_base 60: mod_base = OTHER; note = 2'-O-methyl ribonucleotide
  modified_base 61: mod_base = OTHER; note = 2'-O-methyl ribonucleotide
  modified_base 66: mod_base = OTHER; note = 2'-O-methyl ribonucleotide
  modified_base 67: mod_base = OTHER; note = 2'-O-methyl ribonucleotide
  modified_base 70: mod_base = OTHER; note = 2'-O-methyl ribonucleotide
  modified_base 71: mod_base = OTHER; note = 2'-O-methyl ribonucleotide
  modified_base 72: mod_base = OTHER; note = 2'-O-methyl ribonucleotide
  modified_base 73: mod_base = OTHER; note = 2'-O-methyl ribonucleotide
  modified_base 74: mod_base = OTHER; note = 2'-O-methyl ribonucleotide
  modified_base 75: mod_base = OTHER; note = 2'-O-methyl ribonucleotide
  modified_base 76: mod_base = OTHER; note = 2'-O-methyl ribonucleotide
  modified_base 77: mod_base = OTHER; note = 2'-O-methyl ribonucleotide
  modified_base 78: mod_base = OTHER; note = 2'-O-methyl ribonucleotide
  modified_base 79: mod_base = OTHER; note = 2'-O-methyl ribonucleotide
  modified_base 80: mod_base = OTHER; note = 2'-O-methyl ribonucleotide
  modified_base 81: mod_base = OTHER; note = 2'-O-methyl ribonucleotide
  modified_base 83: mod_base = OTHER; note = 2'-O-methyl ribonucleotide
  modified_base 84: mod_base = OTHER; note = 2'-O-methyl ribonucleotide
  modified_base 85: mod_base = OTHER; note = 2'-O-methyl ribonucleotide
  modified_base 86: mod_base = OTHER; note = 2'-O-methyl ribonucleotide
  modified_base 87: mod_base = OTHER; note = 2'-O-methyl ribonucleotide
  modified_base 88: mod_base = OTHER; note = 2'-O-methyl ribonucleotide
  modified_base 89: mod_base = OTHER; note = 2'-O-methyl ribonucleotide
  modified_base 90: mod_base = OTHER; note = 2'-O-methyl ribonucleotide
  modified_base 91: mod_base = OTHER; note = 2'-O-methyl ribonucleotide
  modified_base 92: mod_base = OTHER; note = 2'-O-methyl ribonucleotide
  modified_base 93: mod_base = OTHER; note = 2'-O-methyl ribonucleotide
  modified_base 94: mod_base = OTHER; note = 2'-O-methyl ribonucleotide
  modified_base 95: mod_base = OTHER; note = 2'-O-methyl ribonucleotide
  modified_base 96: mod_base = OTHER; note = 2'-O-methyl ribonucleotide
  modified_base 97: mod_base = OTHER; note = 2'-O-methyl ribonucleotide
  modified_base 98: mod_base = OTHER; note = 2'-O-methyl ribonucleotide
  modified_base 99: mod_base = OTHER; note = 2'-O-methyl ribonucleotide
  modified_base 100: mod_base = OTHER; note = 2'-O-methyl ribonucleotide
  modified_base 1..3: mod_base = OTHER; note = phosphorothioate linkage
  modified_base 25..26: mod_base = OTHER; note = phosphorothioate linkage
  modified_base 98..100: mod_base = OTHER; note = phosphorothioate linkage

SEQ ID NO: 2425 - RNA, 100 nt, synthetic construct; identical to SEQ ID NO: 421
  source 1..100: mol_type = other RNA
  modified_base 1: mod_base = OTHER; note = 2'-O-methyl ribonucleotide
  modified_base 2: mod_base = OTHER; note = 2'-O-methyl ribonucleotide
  modified_base 3: mod_base = OTHER; note = 2'-O-methyl ribonucleotide
  modified_base 21: mod_base = OTHER; note = 2'-O-methyl ribonucleotide
  modified_base 28: mod_base = OTHER; note = 2'-O-methyl ribonucleotide
  modified_base 29: mod_base = OTHER; note = 2'-O-methyl ribonucleotide
  modified_base 30: mod_base = OTHER; note = 2'-O-methyl ribonucleotide
  modified_base 31: mod_base = OTHER; note = 2'-O-methyl ribonucleotide
  modified_base 32: mod_base = OTHER; note = 2'-O-methyl ribonucleotide
  modified_base 34: mod_base = OTHER; note = 2'-O-methyl ribonucleotide
  modified_base 35: mod_base = OTHER; note = 2'-O-methyl ribonucleotide
  modified_base 36: mod_base = OTHER; note = 2'-O-methyl ribonucleotide
  modified_base 37: mod_base = OTHER; note = 2'-O-methyl ribonucleotide
  modified_base 38: mod_base = OTHER; note = 2'-O-methyl ribonucleotide
  modified_base 39: mod_base = OTHER; note = 2'-O-methyl ribonucleotide
  modified_base 40: mod_base = OTHER; note = 2'-O-methyl ribonucleotide
  modified_base 41: mod_base = OTHER; note = 2'-O-methyl ribonucleotide
  modified_base 42: mod_base = OTHER; note = 2'-O-methyl ribonucleotide
  modified_base 46: mod_base = OTHER; note = 2'-O-methyl ribonucleotide
  modified_base 48: mod_base = OTHER; note = 2'-O-methyl ribonucleotide
  modified_base 50: mod_base = OTHER; note = 2'-O-methyl ribonucleotide
  modified_base 52: mod_base = OTHER; note = 2'-O-methyl ribonucleotide
  modified_base 53: mod_base = OTHER; note = 2'-O-methyl ribonucleotide
  modified_base 54: mod_base = OTHER; note = 2'-O-methyl ribonucleotide
  modified_base 55: mod_base = OTHER; note = 2'-O-methyl ribonucleotide
  modified_base 56: mod_base = OTHER; note = 2'-O-methyl ribonucleotide
  modified_base 57: mod_base = OTHER; note = 2'-O-methyl ribonucleotide
  modified_base 60: mod_base = OTHER; note = 2'-O-methyl ribonucleotide
  modified_base 61: mod_base = OTHER; note = 2'-O-methyl ribonucleotide
  modified_base 66: mod_base = OTHER; note = 2'-O-methyl ribonucleotide
  modified_base 67: mod_base = OTHER; note = 2'-O-methyl ribonucleotide
  modified_base 70: mod_base = OTHER; note = 2'-O-methyl ribonucleotide
  modified_base 71: mod_base = OTHER; note = 2'-O-methyl ribonucleotide
  modified_base 72: mod_base = OTHER; note = 2'-O-methyl ribonucleotide
  modified_base 74: mod_base = OTHER; note = 2'-O-methyl ribonucleotide
  modified_base 75: mod_base = OTHER; note = 2'-O-methyl ribonucleotide
  modified_base 76: mod_base = OTHER; note = 2'-O-methyl ribonucleotide
  modified_base 77: mod_base = OTHER; note = 2'-O-methyl ribonucleotide
  modified_base 78: mod_base = OTHER; note = 2'-O-methyl ribonucleotide
  modified_base 79: mod_base = OTHER; note = 2'-O-methyl ribonucleotide
  modified_base 80: mod_base = OTHER; note = 2'-O-methyl ribonucleotide
  modified_base 81: mod_base = OTHER; note = 2'-O-methyl ribonucleotide
  modified_base 83: mod_base = OTHER; note = 2'-O-methyl ribonucleotide
  modified_base 84: mod_base = OTHER; note = 2'-O-methyl ribonucleotide
  modified_base 85: mod_base = OTHER; note = 2'-O-methyl ribonucleotide
  modified_base 86: mod_base = OTHER; note = 2'-O-methyl ribonucleotide
  modified_base 87: mod_base = OTHER; note = 2'-O-methyl ribonucleotide
  modified_base 88: mod_base = OTHER; note = 2'-O-methyl ribonucleotide
  modified_base 89: mod_base = OTHER; note = 2'-O-methyl ribonucleotide
  modified_base 90: mod_base = OTHER; note = 2'-O-methyl ribonucleotide
  modified_base 91: mod_base = OTHER; note = 2'-O-methyl ribonucleotide
  modified_base 92: mod_base = OTHER; note = 2'-O-methyl ribonucleotide
  modified_base 93: mod_base = OTHER; note = 2'-O-methyl ribonucleotide
  modified_base 94: mod_base = OTHER; note = 2'-O-methyl ribonucleotide
  modified_base 95: mod_base = OTHER; note = 2'-O-methyl ribonucleotide
  modified_base 96: mod_base = OTHER; note = 2'-O-methyl ribonucleotide
  modified_base 97: mod_base = OTHER; note = 2'-O-methyl ribonucleotide
  modified_base 98: mod_base = OTHER; note = 2'-O-methyl ribonucleotide
  modified_base 99: mod_base = OTHER; note = 2'-O-methyl ribonucleotide
  modified_base 100: mod_base = OTHER; note = 2'-O-methyl ribonucleotide
  modified_base 1..3: mod_base = OTHER; note = phosphorothioate linkage
  modified_base 25..26: mod_base = OTHER; note = phosphorothioate linkage
  modified_base 98..100: mod_base = OTHER; note = phosphorothioate linkage

SEQ ID NO: 2426 - RNA, 100 nt, synthetic construct; identical to SEQ ID NO: 422
  source 1..100: mol_type = other RNA
  modified_base 1: mod_base = OTHER; note = 2'-O-methyl ribonucleotide
  modified_base 2: mod_base = OTHER; note = 2'-O-methyl ribonucleotide
  modified_base 3: mod_base = OTHER; note = 2'-O-methyl ribonucleotide
  modified_base 21: mod_base = OTHER; note = 2'-O-methyl ribonucleotide
  modified_base 28: mod_base = OTHER; note = 2'-O-methyl ribonucleotide
  modified_base 29: mod_base = OTHER; note = 2'-O-methyl ribonucleotide
  modified_base 30: mod_base = OTHER; note = 2'-O-methyl ribonucleotide
  modified_base 31: mod_base = OTHER; note = 2'-O-methyl ribonucleotide
  modified_base 32: mod_base = OTHER; note = 2'-O-methyl ribonucleotide
  modified_base 33: mod_base = OTHER; note = 2'-O-methyl ribonucleotide
  modified_base 34: mod_base = OTHER; note = 2'-O-methyl ribonucleotide
  modified_base 35: mod_base = OTHER; note = 2'-O-methyl ribonucleotide
  modified_base 36: mod_base = OTHER; note = 2'-O-methyl ribonucleotide
  modified_base 37: mod_base = OTHER; note = 2'-O-methyl ribonucleotide
  modified_base 38: mod_base = OTHER; note = 2'-O-methyl ribonucleotide
  modified_base 39: mod_base = OTHER; note = 2'-O-methyl ribonucleotide
  modified_base 40: mod_base = OTHER; note = 2'-O-methyl ribonucleotide
  modified_base 41: mod_base = OTHER; note = 2'-O-methyl ribonucleotide
  modified_base 42: mod_base = OTHER; note = 2'-O-methyl ribonucleotide
  modified_base 46: mod_base = OTHER; note = 2'-O-methyl ribonucleotide
  modified_base 48: mod_base = OTHER; note = 2'-O-methyl ribonucleotide
  modified_base 50: mod_base = OTHER; note = 2'-O-methyl ribonucleotide
  modified_base 52: mod_base = OTHER; note = 2'-O-methyl ribonucleotide
  modified_base 53: mod_base = OTHER; note = 2'-O-methyl ribonucleotide
  modified_base 54: mod_base = OTHER; note = 2'-O-methyl ribonucleotide
  modified_base 55: mod_base = OTHER; note = 2'-O-methyl ribonucleotide
  modified_base 56: mod_base = OTHER; note = 2'-O-methyl ribonucleotide
  modified_base 57: mod_base = OTHER; note = 2'-O-methyl ribonucleotide
  modified_base 60: mod_base = OTHER; note = 2'-O-methyl ribonucleotide
  modified_base 61: mod_base = OTHER; note = 2'-O-methyl ribonucleotide
  modified_base 66: mod_base = OTHER; note = 2'-O-methyl ribonucleotide
  modified_base 67: mod_base = OTHER; note = 2'-O-methyl ribonucleotide
  modified_base 70: mod_base = OTHER; note = 2'-O-methyl ribonucleotide
  modified_base 71: mod_base = OTHER; note = 2'-O-methyl ribonucleotide
  modified_base 72: mod_base = OTHER; note = 2'-O-methyl ribonucleotide
  modified_base 73: mod_base = OTHER; note = 2'-O-methyl ribonucleotide
  modified_base 74: mod_base = OTHER; note = 2'-O-methyl ribonucleotide
  modified_base 75: mod_base = OTHER; note = 2'-O-methyl ribonucleotide
  modified_base 76: mod_base = OTHER; note = 2'-O-methyl ribonucleotide
  modified_base 77: mod_base = OTHER; note = 2'-O-methyl ribonucleotide
  modified_base 78: mod_base = OTHER; note = 2'-O-methyl ribonucleotide
  modified_base 79: mod_base = OTHER; note = 2'-O-methyl ribonucleotide
  modified_base 80: mod_base = OTHER; note = 2'-O-methyl ribonucleotide
  modified_base 81: mod_base = OTHER; note = 2'-O-methyl ribonucleotide
  modified_base 83: mod_base = OTHER; note = 2'-O-methyl ribonucleotide
  modified_base 84: mod_base = OTHER; note = 2'-O-methyl ribonucleotide
  modified_base 85: mod_base = OTHER; note = 2'-O-methyl ribonucleotide
  modified_base 86: mod_base = OTHER; note = 2'-O-methyl ribonucleotide
  modified_base 87: mod_base = OTHER; note = 2'-O-methyl ribonucleotide
  modified_base 88: mod_base = OTHER; note = 2'-O-methyl ribonucleotide
  modified_base 89: mod_base = OTHER; note = 2'-O-methyl ribonucleotide
  modified_base 90: mod_base = OTHER; note = 2'-O-methyl ribonucleotide
  modified_base 91: mod_base = OTHER; note = 2'-O-methyl ribonucleotide
  modified_base 92: mod_base = OTHER; note = 2'-O-methyl ribonucleotide
  modified_base 93: mod_base = OTHER; note = 2'-O-methyl ribonucleotide
  modified_base 94: mod_base = OTHER; note = 2'-O-methyl ribonucleotide
  modified_base 95: mod_base = OTHER; note = 2'-O-methyl ribonucleotide
  modified_base 96: mod_base = OTHER; note = 2'-O-methyl ribonucleotide
  modified_base 97: mod_base = OTHER; note = 2'-O-methyl ribonucleotide
  modified_base 98: mod_base = OTHER; note = 2'-O-methyl ribonucleotide
  modified_base 99: mod_base = OTHER; note = 2'-O-methyl ribonucleotide
  modified_base 100: mod_base = OTHER; note = 2'-O-methyl ribonucleotide
  modified_base 1..3: mod_base = OTHER; note = phosphorothioate linkage
  modified_base 25..26: mod_base = OTHER; note = phosphorothioate linkage
  modified_base 98..100: mod_base = OTHER; note = phosphorothioate linkage

SEQ ID NO: 2427 - RNA, 100 nt, synthetic construct; identical to SEQ ID NO: 422
  source 1..100: mol_type = other RNA
  modified_base 1: mod_base = OTHER; note = 2'-O-methyl ribonucleotide
  modified_base 2: mod_base = OTHER; note = 2'-O-methyl ribonucleotide
  modified_base 3: mod_base = OTHER; note = 2'-O-methyl ribonucleotide
  modified_base 21: mod_base = OTHER; note = 2'-O-methyl ribonucleotide
  modified_base 28: mod_base = OTHER; note = 2'-O-methyl ribonucleotide
  modified_base 29: mod_base = OTHER; note = 2'-O-methyl ribonucleotide
  modified_base 30: mod_base = OTHER; note = 2'-O-methyl ribonucleotide
  modified_base 31: mod_base = OTHER; note = 2'-O-methyl ribonucleotide
  modified_base 32: mod_base = OTHER; note = 2'-O-methyl ribonucleotide
  modified_base 34: mod_base = OTHER; note = 2'-O-methyl ribonucleotide
  modified_base 35: mod_base = OTHER; note = 2'-O-methyl ribonucleotide
  modified_base 36: mod_base = OTHER; note = 2'-O-methyl ribonucleotide
  modified_base 37: mod_base = OTHER; note = 2'-O-methyl ribonucleotide
  modified_base 38: mod_base = OTHER; note = 2'-O-methyl ribonucleotide
  modified_base 39: mod_base = OTHER; note = 2'-O-methyl ribonucleotide
  modified_base 40: mod_base = OTHER; note = 2'-O-methyl ribonucleotide
  modified_base 41: mod_base = OTHER; note = 2'-O-methyl ribonucleotide
  modified_base 42: mod_base = OTHER; note = 2'-O-methyl ribonucleotide
  modified_base 46: mod_base = OTHER; note = 2'-O-methyl ribonucleotide
  modified_base 48: mod_base = OTHER; note = 2'-O-methyl ribonucleotide
  modified_base 50: mod_base = OTHER; note = 2'-O-methyl ribonucleotide
  modified_base 52: mod_base = OTHER; note = 2'-O-methyl ribonucleotide
  modified_base 53: mod_base = OTHER; note = 2'-O-methyl ribonucleotide
  modified_base 54: mod_base = OTHER; note = 2'-O-methyl ribonucleotide
  modified_base 55: mod_base = OTHER; note = 2'-O-methyl ribonucleotide
  modified_base 56: mod_base = OTHER; note = 2'-O-methyl ribonucleotide
  modified_base 57: mod_base = OTHER; note = 2'-O-methyl ribonucleotide
  modified_base 60: mod_base = OTHER; note = 2'-O-methyl ribonucleotide
  modified_base 61: mod_base = OTHER; note = 2'-O-methyl ribonucleotide
  modified_base 66: mod_base = OTHER; note = 2'-O-methyl ribonucleotide
  modified_base 67: mod_base = OTHER; note = 2'-O-methyl ribonucleotide
  modified_base 70: mod_base = OTHER; note = 2'-O-methyl ribonucleotide
  modified_base 71: mod_base = OTHER; note = 2'-O-methyl ribonucleotide
  modified_base 72: mod_base = OTHER; note = 2'-O-methyl ribonucleotide
  modified_base 74: mod_base = OTHER; note = 2'-O-methyl ribonucleotide
  modified_base 75: mod_base = OTHER; note = 2'-O-methyl ribonucleotide
  modified_base 76: mod_base = OTHER; note = 2'-O-methyl ribonucleotide
  modified_base 77: mod_base = OTHER; note = 2'-O-methyl ribonucleotide
  modified_base 78: mod_base = OTHER; note = 2'-O-methyl ribonucleotide
  modified_base 79: mod_base = OTHER; note = 2'-O-methyl ribonucleotide
  modified_base 80: mod_base = OTHER; note = 2'-O-methyl ribonucleotide
  modified_base 81: mod_base = OTHER; note = 2'-O-methyl ribonucleotide
  modified_base 83: mod_base = OTHER; note = 2'-O-methyl ribonucleotide
  modified_base 84: mod_base = OTHER; note = 2'-O-methyl ribonucleotide
  modified_base 85: mod_base = OTHER; note = 2'-O-methyl ribonucleotide
  modified_base 86: mod_base = OTHER; note = 2'-O-methyl ribonucleotide
  modified_base 87: mod_base = OTHER; note = 2'-O-methyl ribonucleotide
  modified_base 88: mod_base = OTHER; note = 2'-O-methyl ribonucleotide
  modified_base 89: mod_base = OTHER; note = 2'-O-methyl ribonucleotide
  modified_base 90: mod_base = OTHER; note = 2'-O-methyl ribonucleotide
  modified_base 91: mod_base = OTHER; note = 2'-O-methyl ribonucleotide
  modified_base 92: mod_base = OTHER; note = 2'-O-methyl ribonucleotide
  modified_base 93: mod_base = OTHER; note = 2'-O-methyl ribonucleotide
  modified_base 94: mod_base = OTHER; note = 2'-O-methyl ribonucleotide
  modified_base 95: mod_base = OTHER; note = 2'-O-methyl ribonucleotide
  modified_base 96: mod_base = OTHER; note = 2'-O-methyl ribonucleotide
  modified_base 97: mod_base = OTHER; note = 2'-O-methyl ribonucleotide
  modified_base 98: mod_base = OTHER; note = 2'-O-methyl ribonucleotide
  modified_base 99: mod_base = OTHER; note = 2'-O-methyl ribonucleotide
  modified_base 100: mod_base = OTHER; note = 2'-O-methyl ribonucleotide
  modified_base 1..3: mod_base = OTHER; note = phosphorothioate linkage
  modified_base 25..26: mod_base = OTHER; note = phosphorothioate linkage
  modified_base 98..100: mod_base = OTHER; note = phosphorothioate linkage

SEQ ID NO: 2428 - RNA, 100 nt, synthetic construct; identical to SEQ ID NO: 55
  source 1..100: mol_type = other RNA
  modified_base 1: mod_base = OTHER; note = 2'-O-methyl ribonucleotide
  modified_base 2: mod_base = OTHER; note = 2'-O-methyl ribonucleotide
  modified_base 3: mod_base = OTHER; note = 2'-O-methyl ribonucleotide
  modified_base 21: mod_base = OTHER; note = 2'-O-methyl ribonucleotide
  modified_base 28: mod_base = OTHER; note = 2'-O-methyl ribonucleotide
  modified_base 29: mod_base = OTHER; note = 2'-O-methyl ribonucleotide
  modified_base 30: mod_base = OTHER; note = 2'-O-methyl ribonucleotide
  modified_base 31: mod_base = OTHER; note = 2'-O-methyl ribonucleotide
  modified_base 32: mod_base = OTHER; note = 2'-O-methyl ribonucleotide
  modified_base 33: mod_base = OTHER; note = 2'-O-methyl ribonucleotide
  modified_base 34: mod_base = OTHER; note = 2'-O-methyl ribonucleotide
  modified_base 35: mod_base = OTHER; note = 2'-O-methyl ribonucleotide
  modified_base 36: mod_base = OTHER; note = 2'-O-methyl ribonucleotide
  modified_base 37: mod_base = OTHER; note = 2'-O-methyl ribonucleotide
  modified_base 38: mod_base = OTHER; note = 2'-O-methyl ribonucleotide
  modified_base 39: mod_base = OTHER; note = 2'-O-methyl ribonucleotide
  modified_base 40: mod_base = OTHER; note = 2'-O-methyl ribonucleotide
  modified_base 41: mod_base = OTHER; note = 2'-O-methyl ribonucleotide
  modified_base 42: mod_base = OTHER; note = 2'-O-methyl ribonucleotide
  modified_base 46: mod_base = OTHER; note = 2'-O-methyl ribonucleotide
  modified_base 48: mod_base = OTHER; note = 2'-O-methyl ribonucleotide
  modified_base 50: mod_base = OTHER; note = 2'-O-methyl ribonucleotide
  modified_base 52: mod_base = OTHER; note = 2'-O-methyl ribonucleotide
  modified_base 53: mod_base = OTHER; note = 2'-O-methyl ribonucleotide
  modified_base 54: mod_base = OTHER; note = 2'-O-methyl ribonucleotide
  modified_base 57: mod_base = OTHER; note = 2'-O-methyl ribonucleotide
  modified_base 61: mod_base = OTHER; note = 2'-O-methyl ribonucleotide
  modified_base 66: mod_base = OTHER; note = 2'-O-methyl ribonucleotide
  modified_base 67: mod_base = OTHER; note = 2'-O-methyl ribonucleotide
  modified_base 70: mod_base = OTHER; note = 2'-O-methyl ribonucleotide
  modified_base 71: mod_base = OTHER; note = 2'-O-methyl ribonucleotide
  modified_base 72: mod_base = OTHER; note = 2'-O-methyl ribonucleotide
  modified_base 74: mod_base = OTHER; note = 2'-O-methyl ribonucleotide
  modified_base 75: mod_base = OTHER; note = 2'-O-methyl ribonucleotide
  modified_base 76: mod_base = OTHER; note = 2'-O-methyl ribonucleotide
  modified_base 77: mod_base = OTHER; note = 2'-O-methyl ribonucleotide
  modified_base 78: mod_base = OTHER; note = 2'-O-methyl ribonucleotide
  modified_base 79: mod_base = OTHER; note = 2'-O-methyl ribonucleotide
  modified_base 80: mod_base = OTHER; note = 2'-O-methyl ribonucleotide
  modified_base 82: mod_base = OTHER; note = 2'-O-methyl ribonucleotide
  modified_base 83: mod_base = OTHER; note = 2'-O-methyl ribonucleotide
  modified_base 84: mod_base = OTHER; note = 2'-O-methyl ribonucleotide
  modified_base 85: mod_base = OTHER; note = 2'-O-methyl ribonucleotide
  modified_base 86: mod_base = OTHER; note = 2'-O-methyl ribonucleotide
  modified_base 87: mod_base = OTHER; note = 2'-O-methyl ribonucleotide
  modified_base 89: mod_base = OTHER; note = 2'-O-methyl ribonucleotide
  modified_base 92: mod_base = OTHER; note = 2'-O-methyl ribonucleotide
  modified_base 93: mod_base = OTHER; note = 2'-O-methyl ribonucleotide
  modified_base 94: mod_base = OTHER; note = 2'-O-methyl ribonucleotide
  modified_base 95: mod_base = OTHER; note = 2'-O-methyl ribonucleotide
  modified_base 96: mod_base = OTHER; note = 2'-O-methyl ribonucleotide
  modified_base 97: mod_base = OTHER; note = 2'-O-methyl ribonucleotide
  modified_base 98: mod_base = OTHER; note = 2'-O-methyl ribonucleotide
  modified_base 99: mod_base = OTHER; note = 2'-O-methyl ribonucleotide
  modified_base 100: mod_base = OTHER; note = 2'-O-methyl ribonucleotide
  modified_base 1..3: mod_base = OTHER; note = phosphorothioate linkage
  modified_base 25..26: mod_base = OTHER; note = phosphorothioate linkage
  modified_base 98..100: mod_base = OTHER; note = phosphorothioate linkage

SEQ ID NO: 2429 - RNA, 100 nt, synthetic construct; identical to SEQ ID NO: 55
  source 1..100: mol_type = other RNA
  modified_base 1: mod_base = OTHER; note = 2'-O-methyl ribonucleotide
  modified_base 2: mod_base = OTHER; note = 2'-O-methyl ribonucleotide
  modified_base 3: mod_base = OTHER; note = 2'-O-methyl ribonucleotide
  modified_base 21: mod_base = OTHER; note = 2'-O-methyl ribonucleotide
  modified_base 28: mod_base = OTHER; note = 2'-O-methyl ribonucleotide
  modified_base 29: mod_base = OTHER; note = 2'-O-methyl ribonucleotide
  modified_base 30: mod_base = OTHER; note = 2'-O-methyl ribonucleotide
  modified_base 31: mod_base = OTHER; note = 2'-O-methyl ribonucleotide
  modified_base 32: mod_base = OTHER; note = 2'-O-methyl ribonucleotide
  modified_base 33: mod_base = OTHER; note = 2'-O-methyl ribonucleotide
  modified_base 34: mod_base = OTHER; note = 2'-O-methyl ribonucleotide
  modified_base 35: mod_base = OTHER; note = 2'-O-methyl ribonucleotide
  modified_base 36: mod_base = OTHER; note = 2'-O-methyl ribonucleotide
  modified_base 37: mod_base = OTHER; note = 2'-O-methyl ribonucleotide
  modified_base 38: mod_base = OTHER; note = 2'-O-methyl ribonucleotide
  modified_base 39: mod_base = OTHER; note = 2'-O-methyl ribonucleotide
  modified_base 40: mod_base = OTHER; note = 2'-O-methyl ribonucleotide
  modified_base 41: mod_base = OTHER; note = 2'-O-methyl ribonucleotide
  modified_base 42: mod_base = OTHER; note = 2'-O-methyl ribonucleotide
  modified_base 46: mod_base = OTHER; note = 2'-O-methyl ribonucleotide
  modified_base 48: mod_base = OTHER; note = 2'-O-methyl ribonucleotide
  modified_base 50: mod_base = OTHER; note = 2'-O-methyl ribonucleotide
  modified_base 52: mod_base = OTHER; note = 2'-O-methyl ribonucleotide
  modified_base 53: mod_base = OTHER; note = 2'-O-methyl ribonucleotide
  modified_base 54: mod_base = OTHER; note = 2'-O-methyl ribonucleotide
  modified_base 55: mod_base = OTHER; note = 2'-O-methyl ribonucleotide
  modified_base 56: mod_base = OTHER; note = 2'-O-methyl ribonucleotide
  modified_base 57: mod_base = OTHER; note = 2'-O-methyl ribonucleotide
  modified_base 60: mod_base = OTHER; note = 2'-O-methyl ribonucleotide
  modified_base 61: mod_base = OTHER; note = 2'-O-methyl ribonucleotide
  modified_base 66: mod_base = OTHER; note = 2'-O-methyl ribonucleotide
  modified_base 67: mod_base = OTHER; note = 2'-O-methyl ribonucleotide
  modified_base 70: mod_base = OTHER; note = 2'-O-methyl ribonucleotide
  modified_base 71: mod_base = OTHER; note = 2'-O-methyl ribonucleotide
  modified_base 72: mod_base = OTHER; note = 2'-O-methyl ribonucleotide
  modified_base 74: mod_base = OTHER; note = 2'-O-methyl ribonucleotide
  modified_base 75: mod_base = OTHER; note = 2'-O-methyl ribonucleotide
  modified_base 76: mod_base = OTHER; note = 2'-O-methyl ribonucleotide
  modified_base 77: mod_base = OTHER; note = 2'-O-methyl ribonucleotide
  modified_base 78: mod_base = OTHER; note = 2'-O-methyl ribonucleotide
  modified_base 79: mod_base = OTHER; note = 2'-O-methyl ribonucleotide
  modified_base 80: mod_base = OTHER; note = 2'-O-methyl ribonucleotide
  modified_base 82: mod_base = OTHER; note = 2'-O-methyl ribonucleotide
  modified_base 83: mod_base = OTHER; note = 2'-O-methyl ribonucleotide
  modified_base 84: mod_base = OTHER; note = 2'-O-methyl ribonucleotide
  modified_base 85: mod_base = OTHER; note = 2'-O-methyl ribonucleotide
  modified_base 86: mod_base = OTHER; note = 2'-O-methyl ribonucleotide
  modified_base 87: mod_base = OTHER; note = 2'-O-methyl ribonucleotide
  modified_base 89: mod_base = OTHER; note = 2'-O-methyl ribonucleotide
  modified_base 92: mod_base = OTHER; note = 2'-O-methyl ribonucleotide
  modified_base 93: mod_base = OTHER; note = 2'-O-methyl ribonucleotide
  modified_base 94: mod_base = OTHER; note = 2'-O-methyl ribonucleotide
  modified_base 95: mod_base = OTHER; note = 2'-O-methyl ribonucleotide
  modified_base 96: mod_base = OTHER; note = 2'-O-methyl ribonucleotide
  modified_base 97: mod_base = OTHER; note = 2'-O-methyl ribonucleotide
  modified_base 98: mod_base = OTHER; note = 2'-O-methyl ribonucleotide
  modified_base 99: mod_base = OTHER; note = 2'-O-methyl ribonucleotide
  modified_base 100: mod_base = OTHER; note = 2'-O-methyl ribonucleotide
  modified_base 1..3: mod_base = OTHER; note = phosphorothioate linkage
  modified_base 25..26: mod_base = OTHER; note = phosphorothioate linkage
  modified_base 98..100: mod_base = OTHER; note = phosphorothioate linkage

SEQ ID NO: 2430 - RNA, 100 nt, synthetic construct; identical to SEQ ID NO: 55
  source 1..100: mol_type = other RNA
  modified_base 1: mod_base = OTHER; note = 2'-O-methyl ribonucleotide
  modified_base 2: mod_base = OTHER; note = 2'-O-methyl ribonucleotide
  modified_base 3: mod_base = OTHER; note = 2'-O-methyl ribonucleotide
  modified_base 21: mod_base = OTHER; note = 2'-O-methyl ribonucleotide
  modified_base 28: mod_base = OTHER; note = 2'-O-methyl ribonucleotide
  modified_base 29: mod_base = OTHER; note = 2'-O-methyl ribonucleotide
  modified_base 30: mod_base = OTHER; note = 2'-O-methyl ribonucleotide
  modified_base 31: mod_base = OTHER; note = 2'-O-methyl ribonucleotide
  modified_base 32: mod_base = OTHER; note = 2'-O-methyl ribonucleotide
  modified_base 33: mod_base = OTHER; note = 2'-O-methyl ribonucleotide
  modified_base 34: mod_base = OTHER; note = 2'-O-methyl ribonucleotide
  modified_base 35: mod_base = OTHER; note = 2'-O-methyl ribonucleotide
  modified_base 36: mod_base = OTHER; note = 2'-O-methyl ribonucleotide
  modified_base 37: mod_base = OTHER; note = 2'-O-methyl ribonucleotide
  modified_base 38: mod_base = OTHER; note = 2'-O-methyl ribonucleotide
  modified_base 39: mod_base = OTHER; note = 2'-O-methyl ribonucleotide
  modified_base 40: mod_base = OTHER; note = 2'-O-methyl ribonucleotide
  modified_base 41: mod_base = OTHER; note = 2'-O-methyl ribonucleotide
  modified_base 42: mod_base = OTHER; note = 2'-O-methyl ribonucleotide
  modified_base 46: mod_base = OTHER; note = 2'-O-methyl ribonucleotide
  modified_base 48: mod_base = OTHER; note = 2'-O-methyl ribonucleotide
  modified_base 50: mod_base = OTHER; note = 2'-O-methyl ribonucleotide
  modified_base 52: mod_base = OTHER; note = 2'-O-methyl ribonucleotide
  modified_base 53: mod_base = OTHER; note = 2'-O-methyl ribonucleotide
  modified_base 54: mod_base = OTHER; note = 2'-O-methyl ribonucleotide
  modified_base 57: mod_base = OTHER; note = 2'-O-methyl ribonucleotide
  modified_base 61: mod_base = OTHER; note = 2'-O-methyl ribonucleotide
  modified_base 66: mod_base = OTHER; note = 2'-O-methyl ribonucleotide
  modified_base 67: mod_base = OTHER; note = 2'-O-methyl ribonucleotide
  modified_base 70: mod_base = OTHER; note = 2'-O-methyl ribonucleotide
  modified_base 71: mod_base = OTHER; note = 2'-O-methyl ribonucleotide
  modified_base 72: mod_base = OTHER; note = 2'-O-methyl ribonucleotide
  modified_base 73: mod_base = OTHER; note = 2'-O-methyl ribonucleotide
  modified_base 74: mod_base = OTHER; note = 2'-O-methyl ribonucleotide
  modified_base 75: mod_base = OTHER; note = 2'-O-methyl ribonucleotide
  modified_base 76: mod_base = OTHER; note = 2'-O-methyl ribonucleotide
  modified_base 77: mod_base = OTHER; note = 2'-O-methyl ribonucleotide
  modified_base 78: mod_base = OTHER; note = 2'-O-methyl ribonucleotide
  modified_base 79: mod_base = OTHER; note = 2'-O-methyl ribonucleotide
  modified_base 80: mod_base = OTHER; note = 2'-O-methyl ribonucleotide
  modified_base 82: mod_base = OTHER; note = 2'-O-methyl ribonucleotide
  modified_base 83: mod_base = OTHER; note = 2'-O-methyl ribonucleotide
  modified_base 84: mod_base = OTHER; note = 2'-O-methyl ribonucleotide
  modified_base 85: mod_base = OTHER; note = 2'-O-methyl ribonucleotide
  modified_base 86: mod_base = OTHER; note = 2'-O-methyl ribonucleotide
  modified_base 87: mod_base = OTHER; note = 2'-O-methyl ribonucleotide
  modified_base 89: mod_base = OTHER; note = 2'-O-methyl ribonucleotide
  modified_base 92: mod_base = OTHER; note = 2'-O-methyl ribonucleotide
  modified_base 93: mod_base = OTHER; note = 2'-O-methyl ribonucleotide
  modified_base 94: mod_base = OTHER; note = 2'-O-methyl ribonucleotide
  modified_base 95: mod_base = OTHER; note = 2'-O-methyl ribonucleotide
  modified_base 96: mod_base = OTHER; note = 2'-O-methyl ribonucleotide
  modified_base 97: mod_base = OTHER; note = 2'-O-methyl ribonucleotide
  modified_base 98: mod_base = OTHER; note = 2'-O-methyl ribonucleotide
  modified_base 99: mod_base = OTHER; note = 2'-O-methyl ribonucleotide
  modified_base 100: mod_base = OTHER; note = 2'-O-methyl ribonucleotide
  modified_base 1..3: mod_base = OTHER; note = phosphorothioate linkage
  modified_base 25..26: mod_base = OTHER; note = phosphorothioate linkage
  modified_base 98..100: mod_base = OTHER; note = phosphorothioate linkage

SEQ ID NO: 2431 - RNA, 100 nt, synthetic construct; identical to SEQ ID NO: 55
  source 1..100: mol_type = other RNA
  modified_base 1: mod_base = OTHER; note = 2'-O-methyl ribonucleotide
  modified_base 2: mod_base = OTHER; note = 2'-O-methyl ribonucleotide
  modified_base 3: mod_base = OTHER; note = 2'-O-methyl ribonucleotide
  modified_base 21: mod_base = OTHER; note = 2'-O-methyl ribonucleotide
  modified_base 28: mod_base = OTHER; note = 2'-O-methyl ribonucleotide
  modified_base 29: mod_base = OTHER; note = 2'-O-methyl ribonucleotide
  modified_base 30: mod_base = OTHER; note = 2'-O-methyl ribonucleotide
  modified_base 31: mod_base = OTHER; note = 2'-O-methyl ribonucleotide
  modified_base 32: mod_base = OTHER; note = 2'-O-methyl ribonucleotide
  modified_base 33: mod_base = OTHER; note = 2'-O-methyl ribonucleotide
  modified_base 34: mod_base = OTHER; note = 2'-O-methyl ribonucleotide
  modified_base 35: mod_base = OTHER; note = 2'-O-methyl ribonucleotide
  modified_base 36: mod_base = OTHER; note = 2'-O-methyl ribonucleotide
  modified_base 37: mod_base = OTHER; note = 2'-O-methyl ribonucleotide
  modified_base 38: mod_base = OTHER; note = 2'-O-methyl ribonucleotide
  modified_base 39: mod_base = OTHER; note = 2'-O-methyl ribonucleotide
  modified_base 40: mod_base = OTHER; note = 2'-O-methyl ribonucleotide
  modified_base 41: mod_base = OTHER; note = 2'-O-methyl ribonucleotide
  modified_base 42: mod_base = OTHER; note = 2'-O-methyl ribonucleotide
  modified_base 46: mod_base = OTHER; note = 2'-O-methyl ribonucleotide
  modified_base 48: mod_base = OTHER; note = 2'-O-methyl ribonucleotide
  modified_base 50: mod_base = OTHER; note = 2'-O-methyl ribonucleotide
  modified_base 52: mod_base = OTHER; note = 2'-O-methyl ribonucleotide
  modified_base 53: mod_base = OTHER; note = 2'-O-methyl ribonucleotide
  modified_base 54: mod_base = OTHER; note = 2'-O-methyl ribonucleotide
  modified_base 57: mod_base = OTHER; note = 2'-O-methyl ribonucleotide
  modified_base 61: mod_base = OTHER; note = 2'-O-methyl ribonucleotide
  modified_base 66: mod_base = OTHER; note = 2'-O-methyl ribonucleotide
  modified_base 67: mod_base = OTHER; note = 2'-O-methyl ribonucleotide
  modified_base 70: mod_base = OTHER; note = 2'-O-methyl ribonucleotide
  modified_base 71: mod_base = OTHER; note = 2'-O-methyl ribonucleotide
  modified_base 72: mod_base = OTHER; note = 2'-O-methyl ribonucleotide
  modified_base 73: mod_base = OTHER; note = 2'-O-methyl ribonucleotide
  modified_base 74: mod_base = OTHER; note = 2'-O-methyl ribonucleotide
  modified_base 75: mod_base = OTHER; note = 2'-O-methyl ribonucleotide
  modified_base 76: mod_base = OTHER; note = 2'-O-methyl ribonucleotide
  modified_base 77: mod_base = OTHER; note = 2'-O-methyl ribonucleotide
  modified_base 78: mod_base = OTHER; note = 2'-O-methyl ribonucleotide
  modified_base 79: mod_base = OTHER; note = 2'-O-methyl ribonucleotide
  modified_base 80: mod_base = OTHER; note = 2'-O-methyl ribonucleotide
  modified_base 82: mod_base = OTHER; note = 2'-O-methyl ribonucleotide
  modified_base 83: mod_base = OTHER; note = 2'-O-methyl ribonucleotide
  modified_base 84: mod_base = OTHER; note = 2'-O-methyl ribonucleotide
  modified_base 85: mod_base = OTHER; note = 2'-O-methyl ribonucleotide
  modified_base 86: mod_base = OTHER; note = 2'-O-methyl ribonucleotide
  modified_base 87: mod_base = OTHER; note = 2'-O-methyl ribonucleotide
  modified_base 89: mod_base = OTHER; note = 2'-O-methyl ribonucleotide
  modified_base 91: mod_base = OTHER; note = 2'-O-methyl ribonucleotide
  modified_base 92: mod_base = OTHER; note = 2'-O-methyl ribonucleotide
  modified_base 93: mod_base = OTHER; note = 2'-O-methyl ribonucleotide
  modified_base 94: mod_base = OTHER; note = 2'-O-methyl ribonucleotide
  modified_base 95: mod_base = OTHER; note = 2'-O-methyl ribonucleotide
  modified_base 96: mod_base = OTHER; note = 2'-O-methyl ribonucleotide
  modified_base 97: mod_base = OTHER; note = 2'-O-methyl ribonucleotide
  modified_base 98: mod_base = OTHER; note = 2'-O-methyl ribonucleotide
  modified_base 99: mod_base = OTHER; note = 2'-O-methyl ribonucleotide
  modified_base 100: mod_base = OTHER; note = 2'-O-methyl ribonucleotide
  modified_base 1..3: mod_base = OTHER; note = phosphorothioate linkage
  modified_base 25..26: mod_base = OTHER; note = phosphorothioate linkage
  modified_base 98..100: mod_base = OTHER; note = phosphorothioate linkage

SEQ ID NO: 2432 - RNA, 100 nt, synthetic construct; identical to SEQ ID NO: 421
  source 1..100: mol_type = other RNA
  modified_base 1: mod_base = OTHER; note = 2'-O-methyl ribonucleotide
  modified_base 2: mod_base = OTHER; note = 2'-O-methyl ribonucleotide
  modified_base 3: mod_base = OTHER; note = 2'-O-methyl ribonucleotide
  modified_base 21: mod_base = OTHER; note = 2'-O-methyl ribonucleotide
  modified_base 28: mod_base = OTHER; note = 2'-O-methyl ribonucleotide
  modified_base 29: mod_base = OTHER; note = 2'-O-methyl ribonucleotide
  modified_base 30: mod_base = OTHER; note = 2'-O-methyl ribonucleotide
  modified_base 31: mod_base = OTHER; note = 2'-O-methyl ribonucleotide
  modified_base 32: mod_base = OTHER; note = 2'-O-methyl ribonucleotide
  modified_base 33: mod_base = OTHER; note = 2'-O-methyl ribonucleotide
  modified_base 34: mod_base = OTHER; note = 2'-O-methyl ribonucleotide
  modified_base 35: mod_base = OTHER; note = 2'-O-methyl ribonucleotide
  modified_base 36: mod_base = OTHER; note = 2'-O-methyl ribonucleotide
  modified_base 37: mod_base = OTHER; note = 2'-O-methyl ribonucleotide
  modified_base 38: mod_base = OTHER; note = 2'-O-methyl ribonucleotide
  modified_base 39: mod_base = OTHER; note = 2'-O-methyl ribonucleotide
  modified_base 40: mod_base = OTHER; note = 2'-O-methyl ribonucleotide
  modified_base 41: mod_base = OTHER; note = 2'-O-methyl ribonucleotide
  modified_base 42: mod_base = OTHER; note = 2'-O-methyl ribonucleotide
  modified_base 46: mod_base = OTHER; note = 2'-O-methyl ribonucleotide
  modified_base 48: mod_base = OTHER; note = 2'-O-methyl ribonucleotide
  modified_base 50: mod_base = OTHER; note = 2'-O-methyl ribonucleotide
  modified_base 52: mod_base = OTHER; note = 2'-O-methyl ribonucleotide
  modified_base 53: mod_base = OTHER; note = 2'-O-methyl ribonucleotide
  modified_base 54: mod_base = OTHER; note = 2'-O-methyl ribonucleotide
  modified_base 55: mod_base = OTHER; note = 2'-O-methyl ribonucleotide
  modified_base 56: mod_base = OTHER; note = 2'-O-methyl ribonucleotide
  modified_base 57: mod_base = OTHER; note = 2'-O-methyl ribonucleotide
  modified_base 60: mod_base = OTHER; note = 2'-O-methyl ribonucleotide
  modified_base 61: mod_base = OTHER; note = 2'-O-methyl ribonucleotide
  modified_base 66: mod_base = OTHER; note = 2'-O-methyl ribonucleotide
  modified_base 67: mod_base = OTHER; note = 2'-O-methyl ribonucleotide
  modified_base 70: mod_base = OTHER; note = 2'-O-methyl ribonucleotide
  modified_base 71: mod_base = OTHER; note = 2'-O-methyl ribonucleotide
  modified_base 72: mod_base = OTHER; note = 2'-O-methyl ribonucleotide
  modified_base 73: mod_base = OTHER; note = 2'-O-methyl ribonucleotide
  modified_base 74: mod_base = OTHER; note = 2'-O-methyl ribonucleotide
  modified_base 75: mod_base = OTHER; note = 2'-O-methyl ribonucleotide
  modified_base 76: mod_base = OTHER; note = 2'-O-methyl ribonucleotide
  modified_base 77: mod_base = OTHER; note = 2'-O-methyl ribonucleotide
  modified_base 78: mod_base = OTHER; note = 2'-O-methyl ribonucleotide
  modified_base 79: mod_base = OTHER; note = 2'-O-methyl ribonucleotide
  modified_base 80: mod_base = OTHER; note = 2'-O-methyl ribonucleotide
  modified_base 81: mod_base = OTHER; note = 2'-O-methyl ribonucleotide
  modified_base 83: mod_base = OTHER; note = 2'-O-methyl ribonucleotide
  modified_base 84: mod_base = OTHER; note = 2'-O-methyl ribonucleotide
  modified_base 85: mod_base = OTHER; note = 2'-O-methyl ribonucleotide
  modified_base 86: mod_base = OTHER; note = 2'-O-methyl ribonucleotide
  modified_base 87: mod_base = OTHER; note = 2'-O-methyl ribonucleotide
  modified_base 88: mod_base = OTHER; note = 2'-O-methyl ribonucleotide
  modified_base 89: mod_base = OTHER; note = 2'-O-methyl ribonucleotide
  modified_base 90: mod_base = OTHER; note = 2'-O-methyl ribonucleotide
  modified_base 91: mod_base = OTHER; note = 2'-O-methyl ribonucleotide
  modified_base 92: mod_base = OTHER; note = 2'-O-methyl ribonucleotide
  modified_base 93: mod_base = OTHER; note = 2'-O-methyl ribonucleotide
  modified_base 94: mod_base = OTHER; note = 2'-O-methyl ribonucleotide
  modified_base 95: mod_base = OTHER; note = 2'-O-methyl ribonucleotide
  modified_base 96: mod_base = OTHER; note = 2'-O-methyl ribonucleotide
  modified_base 97: mod_base = OTHER; note = 2'-O-methyl ribonucleotide
  modified_base 98: mod_base = OTHER; note = 2'-O-methyl ribonucleotide
  modified_base 99: mod_base = OTHER; note = 2'-O-methyl ribonucleotide
  modified_base 100: mod_base = OTHER; note = 2'-O-methyl ribonucleotide
  modified_base 1..3: mod_base = OTHER; note = phosphorothioate linkage
  modified_base 25..26: mod_base = OTHER; note = phosphorothioate linkage
  modified_base 64..65: mod_base = OTHER; note = phosphorothioate linkage
  modified_base 98..100: mod_base = OTHER; note = phosphorothioate linkage

SEQ ID NO: 2433 - RNA, 100 nt, synthetic construct; identical to SEQ ID NO: 421
  source 1..100: mol_type = other RNA
  modified_base 1: mod_base = OTHER; note = 2'-O-methyl ribonucleotide
  modified_base 2: mod_base = OTHER; note = 2'-O-methyl ribonucleotide
  modified_base 3: mod_base = OTHER; note = 2'-O-methyl ribonucleotide
  modified_base 21: mod_base = OTHER; note = 2'-O-methyl ribonucleotide
  modified_base 28: mod_base = OTHER; note = 2'-O-methyl ribonucleotide
  modified_base 29: mod_base = OTHER; note = 2'-O-methyl ribonucleotide
  modified_base 30: mod_base = OTHER; note = 2'-O-methyl ribonucleotide
  modified_base 31: mod_base = OTHER; note = 2'-O-methyl ribonucleotide
  modified_base 32: mod_base = OTHER; note = 2'-O-methyl ribonucleotide
  modified_base 34: mod_base = OTHER; note = 2'-O-methyl ribonucleotide
  modified_base 35: mod_base = OTHER; note = 2'-O-methyl ribonucleotide
  modified_base 36: mod_base = OTHER; note = 2'-O-methyl ribonucleotide
  modified_base 37: mod_base = OTHER; note = 2'-O-methyl ribonucleotide
  modified_base 38: mod_base = OTHER; note = 2'-O-methyl ribonucleotide
  modified_base 39: mod_base = OTHER; note = 2'-O-methyl ribonucleotide
  modified_base 40: mod_base = OTHER; note = 2'-O-methyl ribonucleotide
  modified_base 41: mod_base = OTHER; note = 2'-O-methyl ribonucleotide
  modified_base 42: mod_base = OTHER; note = 2'-O-methyl ribonucleotide
  modified_base 46: mod_base = OTHER; note = 2'-O-methyl ribonucleotide
  modified_base 48: mod_base = OTHER; note = 2'-O-methyl ribonucleotide
  modified_base 50: mod_base = OTHER; note = 2'-O-methyl ribonucleotide
  modified_base 52: mod_base = OTHER; note = 2'-O-methyl ribonucleotide
  modified_base 53: mod_base = OTHER; note = 2'-O-methyl ribonucleotide
  modified_base 54: mod_base = OTHER; note = 2'-O-methyl ribonucleotide
  modified_base 55: mod_base = OTHER; note = 2'-O-methyl ribonucleotide
  modified_base 56: mod_base = OTHER; note = 2'-O-methyl ribonucleotide
  modified_base 57: mod_base = OTHER; note = 2'-O-methyl ribonucleotide
  modified_base 60: mod_base = OTHER; note = 2'-O-methyl ribonucleotide
  modified_base 61: mod_base = OTHER; note = 2'-O-methyl ribonucleotide
  modified_base 66: mod_base = OTHER; note = 2'-O-methyl ribonucleotide
  modified_base 67: mod_base = OTHER; note = 2'-O-methyl ribonucleotide
  modified_base 70: mod_base = OTHER; note = 2'-O-methyl ribonucleotide
  modified_base 71: mod_base = OTHER; note = 2'-O-methyl ribonucleotide
  modified_base 72: mod_base = OTHER; note = 2'-O-methyl ribonucleotide
  modified_base 74: mod_base = OTHER; note = 2'-O-methyl ribonucleotide
  modified_base 75: mod_base = OTHER; note = 2'-O-methyl ribonucleotide
  modified_base 76: mod_base = OTHER; note = 2'-O-methyl ribonucleotide
  modified_base 77: mod_base = OTHER; note = 2'-O-methyl ribonucleotide
  modified_base 78: mod_base = OTHER; note = 2'-O-methyl ribonucleotide
  modified_base 79: mod_base = OTHER; note = 2'-O-methyl ribonucleotide
  modified_base 80: mod_base = OTHER; note = 2'-O-methyl ribonucleotide
  modified_base 81: mod_base = OTHER; note = 2'-O-methyl ribonucleotide
  modified_base 83: mod_base = OTHER; note = 2'-O-methyl ribonucleotide
  modified_base 84: mod_base = OTHER; note = 2'-O-methyl ribonucleotide
  modified_base 85: mod_base = OTHER; note = 2'-O-methyl ribonucleotide
  modified_base 86: mod_base = OTHER; note = 2'-O-methyl ribonucleotide
  modified_base 87: mod_base = OTHER; note = 2'-O-methyl ribonucleotide
  modified_base 88: mod_base = OTHER; note = 2'-O-methyl ribonucleotide
  modified_base 89: mod_base = OTHER; note = 2'-O-methyl ribonucleotide
  modified_base 90: mod_base = OTHER; note = 2'-O-methyl ribonucleotide
  modified_base 91: mod_base = OTHER; note = 2'-O-methyl ribonucleotide
  modified_base 92: mod_base = OTHER; note = 2'-O-methyl ribonucleotide
  modified_base 93: mod_base = OTHER; note = 2'-O-methyl ribonucleotide
  modified_base 94: mod_base = OTHER; note = 2'-O-methyl ribonucleotide
  modified_base 95: mod_base = OTHER; note = 2'-O-methyl ribonucleotide
  modified_base 96: mod_base = OTHER; note = 2'-O-methyl ribonucleotide
  modified_base 97: mod_base = OTHER; note = 2'-O-methyl ribonucleotide
  modified_base 98: mod_base = OTHER; note = 2'-O-methyl ribonucleotide
  modified_base 99: mod_base = OTHER; note = 2'-O-methyl ribonucleotide
  modified_base 100: mod_base = OTHER; note = 2'-O-methyl ribonucleotide
  modified_base 1..3: mod_base = OTHER; note = phosphorothioate linkage
  modified_base 25..26: mod_base = OTHER; note = phosphorothioate linkage
  modified_base 64..65: mod_base = OTHER; note = phosphorothioate linkage
  modified_base 98..100: mod_base = OTHER; note = phosphorothioate linkage

SEQ ID NO: 2434 - RNA, 100 nt, synthetic construct; identical to SEQ ID NO: 422
  source 1..100: mol_type = other RNA
  modified_base 1: mod_base = OTHER; note = 2'-O-methyl ribonucleotide
  modified_base 2: mod_base = OTHER; note = 2'-O-methyl ribonucleotide
  modified_base 3: mod_base = OTHER; note = 2'-O-methyl ribonucleotide
  modified_base 21: mod_base = OTHER; note = 2'-O-methyl ribonucleotide
  modified_base 28: mod_base = OTHER; note = 2'-O-methyl ribonucleotide
  modified_base 29: mod_base = OTHER; note = 2'-O-methyl ribonucleotide
  modified_base 30: mod_base = OTHER; note = 2'-O-methyl ribonucleotide
  modified_base 31: mod_base = OTHER; note = 2'-O-methyl ribonucleotide
  modified_base 32: mod_base = OTHER; note = 2'-O-methyl ribonucleotide
  modified_base 33: mod_base = OTHER; note = 2'-O-methyl ribonucleotide
  modified_base 34: mod_base = OTHER; note = 2'-O-methyl ribonucleotide
  modified_base 35: mod_base = OTHER; note = 2'-O-methyl ribonucleotide
  modified_base 36: mod_base = OTHER; note = 2'-O-methyl ribonucleotide
  modified_base 37: mod_base = OTHER; note = 2'-O-methyl ribonucleotide
  modified_base 38: mod_base = OTHER; note = 2'-O-methyl ribonucleotide
  modified_base 39: mod_base = OTHER; note = 2'-O-methyl ribonucleotide
  modified_base 40: mod_base = OTHER; note = 2'-O-methyl ribonucleotide
  modified_base 41: mod_base = OTHER; note = 2'-O-methyl ribonucleotide
  modified_base 42: mod_base = OTHER; note = 2'-O-methyl ribonucleotide
  modified_base 46: mod_base = OTHER; note = 2'-O-methyl ribonucleotide
  modified_base 48: mod_base = OTHER; note = 2'-O-methyl ribonucleotide
  modified_base 50: mod_base = OTHER; note = 2'-O-methyl ribonucleotide
  modified_base 52: mod_base = OTHER; note = 2'-O-methyl ribonucleotide
  modified_base 53: mod_base = OTHER; note = 2'-O-methyl ribonucleotide
  modified_base 54: mod_base = OTHER; note = 2'-O-methyl ribonucleotide
  modified_base 55: mod_base = OTHER; note = 2'-O-methyl ribonucleotide
  modified_base 56: mod_base = OTHER; note = 2'-O-methyl ribonucleotide
  modified_base 57: mod_base = OTHER; note = 2'-O-methyl ribonucleotide
  modified_base 60: mod_base = OTHER; note = 2'-O-methyl ribonucleotide
  modified_base 61: mod_base = OTHER; note = 2'-O-methyl ribonucleotide
  modified_base 66: mod_base = OTHER; note = 2'-O-methyl ribonucleotide
  modified_base 67: mod_base = OTHER; note = 2'-O-methyl ribonucleotide
  modified_base 70: mod_base = OTHER; note = 2'-O-methyl ribonucleotide
  modified_base 71: mod_base = OTHER; note = 2'-O-methyl ribonucleotide
  modified_base 72: mod_base = OTHER; note = 2'-O-methyl ribonucleotide
  modified_base 73: mod_base = OTHER; note = 2'-O-methyl ribonucleotide
  modified_base 74: mod_base = OTHER; note = 2'-O-methyl ribonucleotide
  modified_base 75: mod_base = OTHER; note = 2'-O-methyl ribonucleotide
  modified_base 76: mod_base = OTHER; note = 2'-O-methyl ribonucleotide
  modified_base 77: mod_base = OTHER; note = 2'-O-methyl ribonucleotide
  modified_base 78: mod_base = OTHER; note = 2'-O-methyl ribonucleotide
  modified_base 79: mod_base = OTHER; note = 2'-O-methyl ribonucleotide
  modified_base 80: mod_base = OTHER; note = 2'-O-methyl ribonucleotide
  modified_base 81: mod_base = OTHER; note = 2'-O-methyl ribonucleotide
  modified_base 83: mod_base = OTHER; note = 2'-O-methyl ribonucleotide
  modified_base 84: mod_base = OTHER; note = 2'-O-methyl ribonucleotide
  modified_base 85: mod_base = OTHER; note = 2'-O-methyl ribonucleotide
  modified_base 86: mod_base = OTHER; note = 2'-O-methyl ribonucleotide
  modified_base 87: mod_base = OTHER; note = 2'-O-methyl ribonucleotide
  modified_base 88: mod_base = OTHER; note = 2'-O-methyl ribonucleotide
  modified_base 89: mod_base = OTHER; note = 2'-O-methyl ribonucleotide
  modified_base 90: mod_base = OTHER; note = 2'-O-methyl ribonucleotide
  modified_base 91: mod_base = OTHER; note = 2'-O-methyl ribonucleotide
  modified_base 92: mod_base = OTHER; note = 2'-O-methyl ribonucleotide
  modified_base 93: mod_base = OTHER; note = 2'-O-methyl ribonucleotide
  modified_base 94: mod_base = OTHER; note = 2'-O-methyl ribonucleotide
  modified_base 95: mod_base = OTHER; note = 2'-O-methyl ribonucleotide
  modified_base 96: mod_base = OTHER; note = 2'-O-methyl ribonucleotide
  modified_base 97: mod_base = OTHER; note = 2'-O-methyl ribonucleotide
  modified_base 98: mod_base = OTHER; note = 2'-O-methyl ribonucleotide
  modified_base 99: mod_base = OTHER; note = 2'-O-methyl ribonucleotide
  modified_base 100: mod_base = OTHER; note = 2'-O-methyl ribonucleotide
  modified_base 1..3: mod_base = OTHER; note = phosphorothioate linkage
  modified_base 25..26: mod_base = OTHER; note = phosphorothioate linkage
  modified_base 64..65: mod_base = OTHER; note = phosphorothioate linkage
  modified_base 98..100: mod_base = OTHER; note = phosphorothioate linkage

SEQ ID NO: 2435 - RNA, 100 nt, synthetic construct; identical to SEQ ID NO: 422
  source 1..100: mol_type = other RNA
  modified_base 1: mod_base = OTHER; note = 2'-O-methyl ribonucleotide
  modified_base 2: mod_base = OTHER; note = 2'-O-methyl ribonucleotide
  modified_base 3: mod_base = OTHER; note = 2'-O-methyl ribonucleotide
  modified_base 21: mod_base = OTHER; note = 2'-O-methyl ribonucleotide
  modified_base 28: mod_base = OTHER; note = 2'-O-methyl ribonucleotide
  modified_base 29: mod_base = OTHER; note = 2'-O-methyl ribonucleotide
  modified_base 30: mod_base = OTHER; note = 2'-O-methyl ribonucleotide
  modified_base 31: mod_base = OTHER; note = 2'-O-methyl ribonucleotide
  modified_base 32: mod_base = OTHER; note = 2'-O-methyl ribonucleotide
  modified_base 34: mod_base = OTHER; note = 2'-O-methyl ribonucleotide
  modified_base 35: mod_base = OTHER; note = 2'-O-methyl ribonucleotide
  modified_base 36: mod_base = OTHER; note = 2'-O-methyl ribonucleotide
  modified_base 37: mod_base = OTHER; note = 2'-O-methyl ribonucleotide
  modified_base 38: mod_base = OTHER; note = 2'-O-methyl ribonucleotide
  modified_base 39: mod_base = OTHER; note = 2'-O-methyl ribonucleotide
  modified_base 40: mod_base = OTHER; note = 2'-O-methyl ribonucleotide
  modified_base 41: mod_base = OTHER; note = 2'-O-methyl ribonucleotide
  modified_base 42: mod_base = OTHER; note = 2'-O-methyl ribonucleotide
  modified_base 46: mod_base = OTHER; note = 2'-O-methyl ribonucleotide
  modified_base 48: mod_base = OTHER; note = 2'-O-methyl ribonucleotide
  modified_base 50: mod_base = OTHER; note = 2'-O-methyl ribonucleotide
  modified_base 52: mod_base = OTHER; note = 2'-O-methyl ribonucleotide
  modified_base 53: mod_base = OTHER; note = 2'-O-methyl ribonucleotide
  modified_base 54: mod_base = OTHER; note = 2'-O-methyl ribonucleotide
  modified_base 55: mod_base = OTHER; note = 2'-O-methyl ribonucleotide
  modified_base 56: mod_base = OTHER; note = 2'-O-methyl ribonucleotide
  modified_base 57: mod_base = OTHER; note = 2'-O-methyl ribonucleotide
  modified_base 60: mod_base = OTHER; note = 2'-O-methyl ribonucleotide
  modified_base 61: mod_base = OTHER; note = 2'-O-methyl ribonucleotide
  modified_base 66: mod_base = OTHER; note = 2'-O-methyl ribonucleotide
  modified_base 67: mod_base = OTHER; note = 2'-O-methyl ribonucleotide
  modified_base 70: mod_base = OTHER; note = 2'-O-methyl ribonucleotide
  modified_base 71: mod_base = OTHER; note = 2'-O-methyl ribonucleotide
  modified_base 72: mod_base = OTHER; note = 2'-O-methyl ribonucleotide
  modified_base 74: mod_base = OTHER; note = 2'-O-methyl ribonucleotide
  modified_base 75: mod_base = OTHER; note = 2'-O-methyl ribonucleotide
  modified_base 76: mod_base = OTHER; note = 2'-O-methyl ribonucleotide
  modified_base 77: mod_base = OTHER; note = 2'-O-methyl ribonucleotide
  modified_base 78: mod_base = OTHER; note = 2'-O-methyl ribonucleotide
  modified_base 79: mod_base = OTHER; note = 2'-O-methyl ribonucleotide
  modified_base 80: mod_base = OTHER; note = 2'-O-methyl ribonucleotide
  modified_base 81: mod_base = OTHER; note = 2'-O-methyl ribonucleotide
  modified_base 83: mod_base = OTHER; note = 2'-O-methyl ribonucleotide
  modified_base 84: mod_base = OTHER; note = 2'-O-methyl ribonucleotide
  modified_base 85: mod_base = OTHER; note = 2'-O-methyl ribonucleotide
  modified_base 86: mod_base = OTHER; note = 2'-O-methyl ribonucleotide
  modified_base 87: mod_base = OTHER; note = 2'-O-methyl ribonucleotide
  modified_base 88: mod_base = OTHER; note = 2'-O-methyl ribonucleotide
  modified_base 89: mod_base = OTHER; note = 2'-O-methyl ribonucleotide
  modified_base 90: mod_base = OTHER; note = 2'-O-methyl ribonucleotide
  modified_base 91: mod_base = OTHER; note = 2'-O-methyl ribonucleotide
  modified_base 92: mod_base = OTHER; note = 2'-O-methyl ribonucleotide
  modified_base 93: mod_base = OTHER; note = 2'-O-methyl ribonucleotide
  modified_base 94: mod_base = OTHER; note = 2'-O-methyl ribonucleotide
  modified_base 95: mod_base = OTHER; note = 2'-O-methyl ribonucleotide
  modified_base 96: mod_base = OTHER; note = 2'-O-methyl ribonucleotide
  modified_base 97: mod_base = OTHER; note = 2'-O-methyl ribonucleotide
  modified_base 98: mod_base = OTHER; note = 2'-O-methyl ribonucleotide
  modified_base 99: mod_base = OTHER; note = 2'-O-methyl ribonucleotide
  modified_base 100: mod_base = OTHER; note = 2'-O-methyl ribonucleotide
  modified_base 1..3: mod_base = OTHER; note = phosphorothioate linkage
  modified_base 25..26: mod_base = OTHER; note = phosphorothioate linkage
  modified_base 64..65: mod_base = OTHER; note = phosphorothioate linkage
  modified_base 98..100: mod_base = OTHER; note = phosphorothioate linkage

SEQ ID NO: 2436 - RNA, 100 nt, synthetic construct; identical to SEQ ID NO: 55
  source 1..100: mol_type = other RNA
  modified_base 1: mod_base = OTHER; note = 2'-O-methyl ribonucleotide
  modified_base 2: mod_base = OTHER; note = 2'-O-methyl ribonucleotide
  modified_base 3: mod_base = OTHER; note = 2'-O-methyl ribonucleotide
  modified_base 21: mod_base = OTHER; note = 2'-O-methyl ribonucleotide
  modified_base 28: mod_base = OTHER; note = 2'-O-methyl ribonucleotide
  modified_base 29: mod_base = OTHER; note = 2'-O-methyl ribonucleotide
  modified_base 30: mod_base = OTHER; note = 2'-O-methyl ribonucleotide
  modified_base 31: mod_base = OTHER; note = 2'-O-methyl ribonucleotide
  modified_base 32: mod_base = OTHER; note = 2'-O-methyl ribonucleotide
  modified_base 33: mod_base = OTHER; note = 2'-O-methyl ribonucleotide
  modified_base 34: mod_base = OTHER; note = 2'-O-methyl ribonucleotide
  modified_base 35: mod_base = OTHER; note = 2'-O-methyl ribonucleotide
  modified_base 36: mod_base = OTHER; note = 2'-O-methyl ribonucleotide
  modified_base 37: mod_base = OTHER; note = 2'-O-methyl ribonucleotide
  modified_base 38: mod_base = OTHER; note = 2'-O-methyl ribonucleotide
  modified_base 39: mod_base = OTHER; note = 2'-O-methyl ribonucleotide
  modified_base 40: mod_base = OTHER; note = 2'-O-methyl ribonucleotide
  modified_base 41: mod_base = OTHER; note = 2'-O-methyl ribonucleotide
  modified_base 42: mod_base = OTHER; note = 2'-O-methyl ribonucleotide
  modified_base 46: mod_base = OTHER; note = 2'-O-methyl ribonucleotide
  modified_base 48: mod_base = OTHER; note = 2'-O-methyl ribonucleotide
  modified_base 50: mod_base = OTHER; note = 2'-O-methyl ribonucleotide
  modified_base 52: mod_base = OTHER; note = 2'-O-methyl ribonucleotide
  modified_base 53: mod_base = OTHER; note = 2'-O-methyl ribonucleotide
  modified_base 54: mod_base = OTHER; note = 2'-O-methyl ribonucleotide
  modified_base 57: mod_base = OTHER; note = 2'-O-methyl ribonucleotide
  modified_base 61: mod_base = OTHER; note = 2'-O-methyl ribonucleotide
  modified_base 66: mod_base = OTHER; note = 2'-O-methyl ribonucleotide
  modified_base 67: mod_base = OTHER; note = 2'-O-methyl ribonucleotide
  modified_base 70: mod_base = OTHER; note = 2'-O-methyl ribonucleotide
  modified_base 71: mod_base = OTHER; note = 2'-O-methyl ribonucleotide
  modified_base 72: mod_base = OTHER; note = 2'-O-methyl ribonucleotide
  modified_base 74: mod_base = OTHER; note = 2'-O-methyl ribonucleotide
  modified_base 75: mod_base = OTHER; note = 2'-O-methyl ribonucleotide
  modified_base 76: mod_base = OTHER; note = 2'-O-methyl ribonucleotide
  modified_base 77: mod_base = OTHER; note = 2'-O-methyl ribonucleotide
  modified_base 78: mod_base = OTHER; note = 2'-O-methyl ribonucleotide
  modified_base 79: mod_base = OTHER; note = 2'-O-methyl ribonucleotide
  modified_base 80: mod_base = OTHER; note = 2'-O-methyl ribonucleotide
  modified_base 82: mod_base = OTHER; note = 2'-O-methyl ribonucleotide
  modified_base 83: mod_base = OTHER; note = 2'-O-methyl ribonucleotide
  modified_base 84: mod_base = OTHER; note = 2'-O-methyl ribonucleotide
  modified_base 85: mod_base = OTHER; note = 2'-O-methyl ribonucleotide
  modified_base 86: mod_base = OTHER; note = 2'-O-methyl ribonucleotide
  modified_base 87: mod_base = OTHER; note = 2'-O-methyl ribonucleotide
  modified_base 89: mod_base = OTHER; note = 2'-O-methyl ribonucleotide
  modified_base 92: mod_base = OTHER; note = 2'-O-methyl ribonucleotide
  modified_base 93: mod_base = OTHER; note = 2'-O-methyl ribonucleotide
  modified_base 94: mod_base = OTHER; note = 2'-O-methyl ribonucleotide
  modified_base 95: mod_base = OTHER; note = 2'-O-methyl ribonucleotide
  modified_base 96: mod_base = OTHER; note = 2'-O-methyl ribonucleotide
  modified_base 97: mod_base = OTHER; note = 2'-O-methyl ribonucleotide
  modified_base 98: mod_base = OTHER; note = 2'-O-methyl ribonucleotide
  modified_base 99: mod_base = OTHER; note = 2'-O-methyl ribonucleotide
  modified_base 100: mod_base = OTHER; note = 2'-O-methyl ribonucleotide
  modified_base 1..3: mod_base = OTHER; note = phosphorothioate linkage
  modified_base 25..26: mod_base = OTHER; note = phosphorothioate linkage
  modified_base 64..65: mod_base = OTHER; note = phosphorothioate linkage
  modified_base 98..100: mod_base = OTHER; note = phosphorothioate linkage

SEQ ID NO: 2437 - RNA, 100 nt, synthetic construct; identical to SEQ ID NO: 55
  source 1..100: mol_type = other RNA
  modified_base 1: mod_base = OTHER; note = 2'-O-methyl ribonucleotide
  modified_base 2: mod_base = OTHER; note = 2'-O-methyl ribonucleotide
  modified_base 3: mod_base = OTHER; note = 2'-O-methyl ribonucleotide
  modified_base 21: mod_base = OTHER; note = 2'-O-methyl ribonucleotide
  modified_base 28: mod_base = OTHER; note = 2'-O-methyl ribonucleotide
  modified_base 29: mod_base = OTHER; note = 2'-O-methyl ribonucleotide
  modified_base 30: mod_base = OTHER; note = 2'-O-methyl ribonucleotide
  modified_base 31: mod_base = OTHER; note = 2'-O-methyl ribonucleotide
  modified_base 32: mod_base = OTHER; note = 2'-O-methyl ribonucleotide
  modified_base 33: mod_base = OTHER; note = 2'-O-methyl ribonucleotide
  modified_base 34: mod_base = OTHER; note = 2'-O-methyl ribonucleotide
  modified_base 35: mod_base = OTHER; note = 2'-O-methyl ribonucleotide
  modified_base 36: mod_base = OTHER; note = 2'-O-methyl ribonucleotide
  modified_base 37: mod_base = OTHER; note = 2'-O-methyl ribonucleotide
  modified_base 38: mod_base = OTHER; note = 2'-O-methyl ribonucleotide
  modified_base 39: mod_base = OTHER; note = 2'-O-methyl ribonucleotide
  modified_base 40: mod_base = OTHER; note = 2'-O-methyl ribonucleotide
  modified_base 41: mod_base = OTHER; note = 2'-O-methyl ribonucleotide
  modified_base 42: mod_base = OTHER; note = 2'-O-methyl ribonucleotide
  modified_base 46: mod_base = OTHER; note = 2'-O-methyl ribonucleotide
  modified_base 48: mod_base = OTHER; note = 2'-O-methyl ribonucleotide
  modified_base 50: mod_base = OTHER; note = 2'-O-methyl ribonucleotide
  modified_base 52: mod_base = OTHER; note = 2'-O-methyl ribonucleotide
  modified_base 53: mod_base = OTHER; note = 2'-O-methyl ribonucleotide
  modified_base 54: mod_base = OTHER; note = 2'-O-methyl ribonucleotide
  modified_base 55: mod_base = OTHER; note = 2'-O-methyl ribonucleotide
  modified_base 56: mod_base = OTHER; note = 2'-O-methyl ribonucleotide
  modified_base 57: mod_base = OTHER; note = 2'-O-methyl ribonucleotide
  modified_base 60: mod_base = OTHER; note = 2'-O-methyl ribonucleotide
  modified_base 61: mod_base = OTHER; note = 2'-O-methyl ribonucleotide
  modified_base 66: mod_base = OTHER; note = 2'-O-methyl ribonucleotide
  modified_base 67: mod_base = OTHER; note = 2'-O-methyl ribonucleotide
  modified_base 70: mod_base = OTHER; note = 2'-O-methyl ribonucleotide
  modified_base 71: mod_base = OTHER; note = 2'-O-methyl ribonucleotide
  modified_base 72: mod_base = OTHER; note = 2'-O-methyl ribonucleotide
  modified_base 74: mod_base = OTHER; note = 2'-O-methyl ribonucleotide
  modified_base 75: mod_base = OTHER; note = 2'-O-methyl ribonucleotide
  modified_base 76: mod_base = OTHER; note = 2'-O-methyl ribonucleotide
  modified_base 77: mod_base = OTHER; note = 2'-O-methyl ribonucleotide
  modified_base 78: mod_base = OTHER; note = 2'-O-methyl ribonucleotide
  modified_base 79: mod_base = OTHER; note = 2'-O-methyl ribonucleotide
  modified_base 80: mod_base = OTHER; note = 2'-O-methyl ribonucleotide
  modified_base 82: mod_base = OTHER; note = 2'-O-methyl ribonucleotide
  modified_base 83: mod_base = OTHER; note = 2'-O-methyl ribonucleotide
  modified_base 84: mod_base = OTHER; note = 2'-O-methyl ribonucleotide
  modified_base 85: mod_base = OTHER; note = 2'-O-methyl ribonucleotide
  modified_base 86: mod_base = OTHER; note = 2'-O-methyl ribonucleotide
  modified_base 87: mod_base = OTHER; note = 2'-O-methyl ribonucleotide
  modified_base 89: mod_base = OTHER; note = 2'-O-methyl ribonucleotide
  modified_base 92: mod_base = OTHER; note = 2'-O-methyl ribonucleotide
  modified_base 93: mod_base = OTHER; note = 2'-O-methyl ribonucleotide
  modified_base 94: mod_base = OTHER; note = 2'-O-methyl ribonucleotide
  modified_base 95: mod_base = OTHER; note = 2'-O-methyl ribonucleotide
  modified_base 96: mod_base = OTHER; note = 2'-O-methyl ribonucleotide
  modified_base 97: mod_base = OTHER; note = 2'-O-methyl ribonucleotide
  modified_base 98: mod_base = OTHER; note = 2'-O-methyl ribonucleotide
  modified_base 99: mod_base = OTHER; note = 2'-O-methyl ribonucleotide
  modified_base 100: mod_base = OTHER; note = 2'-O-methyl ribonucleotide
  modified_base 1..3: mod_base = OTHER; note = phosphorothioate linkage
  modified_base 25..26: mod_base = OTHER; note = phosphorothioate linkage
  modified_base 64..65: mod_base = OTHER; note = phosphorothioate linkage
  modified_base 98..100: mod_base = OTHER; note = phosphorothioate linkage

SEQ ID NO: 2438 - RNA, 100 nt, synthetic construct; identical to SEQ ID NO: 55
  source 1..100: mol_type = other RNA
  modified_base 1: mod_base = OTHER; note = 2'-O-methyl ribonucleotide
  modified_base 2: mod_base = OTHER; note = 2'-O-methyl ribonucleotide
  modified_base 3: mod_base = OTHER; note = 2'-O-methyl ribonucleotide
  modified_base 21: mod_base = OTHER; note = 2'-O-methyl ribonucleotide
  modified_base 28: mod_base = OTHER; note = 2'-O-methyl ribonucleotide
  modified_base 29: mod_base = OTHER; note = 2'-O-methyl ribonucleotide
  modified_base 30: mod_base = OTHER; note = 2'-O-methyl ribonucleotide
  modified_base 31: mod_base = OTHER; note = 2'-O-methyl ribonucleotide
  modified_base 32: mod_base = OTHER; note = 2'-O-methyl ribonucleotide
  modified_base 33: mod_base = OTHER; note = 2'-O-methyl ribonucleotide
  modified_base 34: mod_base = OTHER; note = 2'-O-methyl ribonucleotide
  modified_base 35: mod_base = OTHER; note = 2'-O-methyl ribonucleotide
  modified_base 36: mod_base = OTHER; note = 2'-O-methyl ribonucleotide
  modified_base 37: mod_base = OTHER; note = 2'-O-methyl ribonucleotide
  modified_base 38: mod_base = OTHER; note = 2'-O-methyl ribonucleotide
  modified_base 39: mod_base = OTHER; note = 2'-O-methyl ribonucleotide
  modified_base 40: mod_base = OTHER; note = 2'-O-methyl ribonucleotide
  modified_base 41: mod_base = OTHER; note = 2'-O-methyl ribonucleotide
  modified_base 42: mod_base = OTHER; note = 2'-O-methyl ribonucleotide
  modified_base 46: mod_base = OTHER; note = 2'-O-methyl ribonucleotide
  modified_base 48: mod_base = OTHER; note = 2'-O-methyl ribonucleotide
  modified_base 50: mod_base = OTHER; note = 2'-O-methyl ribonucleotide
  modified_base 52: mod_base = OTHER; note = 2'-O-methyl ribonucleotide
  modified_base 53: mod_base = OTHER; note = 2'-O-methyl ribonucleotide
  modified_base 54: mod_base = OTHER; note = 2'-O-methyl ribonucleotide
  modified_base 57: mod_base = OTHER; note = 2'-O-methyl ribonucleotide
  modified_base 61: mod_base = OTHER; note = 2'-O-methyl ribonucleotide
  modified_base 66: mod_base = OTHER; note = 2'-O-methyl ribonucleotide
  modified_base 67: mod_base = OTHER; note = 2'-O-methyl ribonucleotide
  modified_base 70: mod_base = OTHER; note = 2'-O-methyl ribonucleotide
  modified_base 71: mod_base = OTHER; note = 2'-O-methyl ribonucleotide
  modified_base 72: mod_base = OTHER; note = 2'-O-methyl ribonucleotide
  modified_base 73: mod_base = OTHER; note = 2'-O-methyl ribonucleotide
  modified_base 74: mod_base = OTHER; note = 2'-O-methyl ribonucleotide
  modified_base 75: mod_base = OTHER; note = 2'-O-methyl ribonucleotide
  modified_base 76: mod_base = OTHER; note = 2'-O-methyl ribonucleotide
  modified_base 77: mod_base = OTHER; note = 2'-O-methyl ribonucleotide
  modified_base 78: mod_base = OTHER; note = 2'-O-methyl ribonucleotide
  modified_base 79: mod_base = OTHER; note = 2'-O-methyl ribonucleotide
  modified_base 80: mod_base = OTHER; note = 2'-O-methyl ribonucleotide
  modified_base 82: mod_base = OTHER; note = 2'-O-methyl ribonucleotide
  modified_base 83: mod_base = OTHER; note = 2'-O-methyl ribonucleotide
  modified_base 84: mod_base = OTHER; note = 2'-O-methyl ribonucleotide
  modified_base 85: mod_base = OTHER; note = 2'-O-methyl ribonucleotide
  modified_base 86: mod_base = OTHER; note = 2'-O-methyl ribonucleotide
  modified_base 87: mod_base = OTHER; note = 2'-O-methyl ribonucleotide
  modified_base 89: mod_base = OTHER; note = 2'-O-methyl ribonucleotide
  modified_base 92: mod_base = OTHER; note = 2'-O-methyl ribonucleotide
  modified_base 93: mod_base = OTHER; note = 2'-O-methyl ribonucleotide
  modified_base 94: mod_base = OTHER; note = 2'-O-methyl ribonucleotide
  modified_base 95: mod_base = OTHER; note = 2'-O-methyl ribonucleotide
  modified_base 96: mod_base = OTHER; note = 2'-O-methyl ribonucleotide
  modified_base 97: mod_base = OTHER; note = 2'-O-methyl ribonucleotide
  modified_base 98: mod_base = OTHER; note = 2'-O-methyl ribonucleotide
  modified_base 99: mod_base = OTHER; note = 2'-O-methyl ribonucleotide
  modified_base 100: mod_base = OTHER; note = 2'-O-methyl ribonucleotide
  modified_base 1..3: mod_base = OTHER; note = phosphorothioate linkage
  modified_base 25..26: mod_base = OTHER; note = phosphorothioate linkage
  modified_base 64..65: mod_base = OTHER; note = phosphorothioate linkage
  modified_base 98..100: mod_base = OTHER; note = phosphorothioate linkage

SEQ ID NO: 2439 - RNA, 100 nt, synthetic construct; identical to SEQ ID NO: 55
  source 1..100: mol_type = other RNA
  modified_base 1: mod_base = OTHER; note = 2'-O-methyl ribonucleotide
  modified_base 2: mod_base = OTHER; note = 2'-O-methyl ribonucleotide
  modified_base 3: mod_base = OTHER; note = 2'-O-methyl ribonucleotide
  modified_base 21: mod_base = OTHER; note = 2'-O-methyl ribonucleotide
  modified_base 28: mod_base = OTHER; note = 2'-O-methyl ribonucleotide
  modified_base 29: mod_base = OTHER; note = 2'-O-methyl ribonucleotide
  modified_base 30: mod_base = OTHER; note = 2'-O-methyl ribonucleotide
  modified_base 31: mod_base = OTHER; note = 2'-O-methyl ribonucleotide
  modified_base 32: mod_base = OTHER; note = 2'-O-methyl ribonucleotide
  modified_base 33: mod_base = OTHER; note = 2'-O-methyl ribonucleotide
  modified_base 34: mod_base = OTHER; note = 2'-O-methyl ribonucleotide
  modified_base 35: mod_base = OTHER; note = 2'-O-methyl ribonucleotide
  modified_base 36: mod_base = OTHER; note = 2'-O-methyl ribonucleotide
  modified_base 37: mod_base = OTHER; note = 2'-O-methyl ribonucleotide
  modified_base 38: mod_base = OTHER; note = 2'-O-methyl ribonucleotide
  modified_base 39: mod_base = OTHER; note = 2'-O-methyl ribonucleotide
  modified_base 40: mod_base = OTHER; note = 2'-O-methyl ribonucleotide
  modified_base 41: mod_base = OTHER; note = 2'-O-methyl ribonucleotide
  modified_base 42: mod_base = OTHER; note = 2'-O-methyl ribonucleotide
  modified_base 46: mod_base = OTHER; note = 2'-O-methyl ribonucleotide
  modified_base 48: mod_base = OTHER; note = 2'-O-methyl ribonucleotide
  modified_base 50: mod_base = OTHER; note = 2'-O-methyl ribonucleotide
  modified_base 52: mod_base = OTHER; note = 2'-O-methyl ribonucleotide
  modified_base 53: mod_base = OTHER; note = 2'-O-methyl ribonucleotide
  modified_base 54: mod_base = OTHER; note = 2'-O-methyl ribonucleotide
  modified_base 57: mod_base = OTHER; note = 2'-O-methyl ribonucleotide
  modified_base 61: mod_base = OTHER; note = 2'-O-methyl ribonucleotide
  modified_base 66: mod_base = OTHER; note = 2'-O-methyl ribonucleotide
  modified_base 67: mod_base = OTHER; note = 2'-O-methyl ribonucleotide
  modified_base 70: mod_base = OTHER; note = 2'-O-methyl ribonucleotide
  modified_base 71: mod_base = OTHER; note = 2'-O-methyl ribonucleotide
  modified_base 72: mod_base = OTHER; note = 2'-O-methyl ribonucleotide
  modified_base 73: mod_base = OTHER; note = 2'-O-methyl ribonucleotide
  modified_base 74: mod_base = OTHER; note = 2'-O-methyl ribonucleotide
  modified_base 75: mod_base = OTHER; note = 2'-O-methyl ribonucleotide
  modified_base 76: mod_base = OTHER; note = 2'-O-methyl ribonucleotide
  modified_base 77: mod_base = OTHER; note = 2'-O-methyl ribonucleotide
  modified_base 78: mod_base = OTHER; note = 2'-O-methyl ribonucleotide
  modified_base 79: mod_base = OTHER; note = 2'-O-methyl ribonucleotide
  modified_base 80: mod_base = OTHER; note = 2'-O-methyl ribonucleotide
  modified_base 82: mod_base = OTHER; note = 2'-O-methyl ribonucleotide
  modified_base 83: mod_base = OTHER; note = 2'-O-methyl ribonucleotide
  modified_base 84: mod_base = OTHER; note = 2'-O-methyl ribonucleotide
  modified_base 85: mod_base = OTHER; note = 2'-O-methyl ribonucleotide
  modified_base 86: mod_base = OTHER; note = 2'-O-methyl ribonucleotide
  modified_base 87: mod_base = OTHER; note = 2'-O-methyl ribonucleotide
  modified_base 89: mod_base = OTHER; note = 2'-O-methyl ribonucleotide
  modified_base 91: mod_base = OTHER; note = 2'-O-methyl ribonucleotide
  modified_base 92: mod_base = OTHER; note = 2'-O-methyl ribonucleotide
  modified_base 93: mod_base = OTHER; note = 2'-O-methyl ribonucleotide
  modified_base 94: mod_base = OTHER; note = 2'-O-methyl ribonucleotide
  modified_base 95: mod_base = OTHER; note = 2'-O-methyl ribonucleotide
  modified_base 96: mod_base = OTHER; note = 2'-O-methyl ribonucleotide
  modified_base 97: mod_base = OTHER; note = 2'-O-methyl ribonucleotide
  modified_base 98: mod_base = OTHER; note = 2'-O-methyl ribonucleotide
  modified_base 99: mod_base = OTHER; note = 2'-O-methyl ribonucleotide
  modified_base 100: mod_base = OTHER; note = 2'-O-methyl ribonucleotide
  modified_base 1..3: mod_base = OTHER; note = phosphorothioate linkage
  modified_base 25..26: mod_base = OTHER; note = phosphorothioate linkage
  modified_base 64..65: mod_base = OTHER; note = phosphorothioate linkage
  modified_base 98..100: mod_base = OTHER; note = phosphorothioate linkage

SEQ ID NO: 2440 - RNA, 100 nt, synthetic construct; identical to SEQ ID NO: 55
  source 1..100: mol_type = other RNA
  modified_base 1: mod_base = OTHER; note = 2'-O-methyl ribonucleotide
  modified_base 2: mod_base = OTHER; note = 2'-O-methyl ribonucleotide
  modified_base 3: mod_base = OTHER; note = 2'-O-methyl ribonucleotide
  modified_base 21: mod_base = OTHER; note = 2'-O-methyl ribonucleotide
  modified_base 28: mod_base = OTHER; note = 2'-O-methyl ribonucleotide
  modified_base 29: mod_base = OTHER; note = 2'-O-methyl ribonucleotide
  modified_base 30: mod_base = OTHER; note = 2'-O-methyl ribonucleotide
  modified_base 31: mod_base = OTHER; note = 2'-O-methyl ribonucleotide
  modified_base 32: mod_base = OTHER; note = 2'-O-methyl ribonucleotide
  modified_base 34: mod_base = OTHER; note = 2'-O-methyl ribonucleotide
  modified_base 35: mod_base = OTHER; note = 2'-O-methyl ribonucleotide
  modified_base 36: mod_base = OTHER; note = 2'-O-methyl ribonucleotide
  modified_base 37: mod_base = OTHER; note = 2'-O-methyl ribonucleotide
  modified_base 38: mod_base = OTHER; note = 2'-O-methyl ribonucleotide
  modified_base 39: mod_base = OTHER; note = 2'-O-methyl ribonucleotide
  modified_base 40: mod_base = OTHER; note = 2'-O-methyl ribonucleotide
  modified_base 41: mod_base = OTHER; note = 2'-O-methyl ribonucleotide
  modified_base 42: mod_base = OTHER; note = 2'-O-methyl ribonucleotide
  modified_base 46: mod_base = OTHER; note = 2'-O-methyl ribonucleotide
  modified_base 48: mod_base = OTHER; note = 2'-O-methyl ribonucleotide
  modified_base 50: mod_base = OTHER; note = 2'-O-methyl ribonucleotide
  modified_base 52: mod_base = OTHER; note = 2'-O-methyl ribonucleotide
  modified_base 53: mod_base = OTHER; note = 2'-O-methyl ribonucleotide
  modified_base 54: mod_base = OTHER; note = 2'-O-methyl ribonucleotide
  modified_base 57: mod_base = OTHER; note = 2'-O-methyl ribonucleotide
  modified_base 61: mod_base = OTHER; note = 2'-O-methyl ribonucleotide
  modified_base 66: mod_base = OTHER; note = 2'-O-methyl ribonucleotide
  modified_base 67: mod_base = OTHER; note = 2'-O-methyl ribonucleotide
  modified_base 70: mod_base = OTHER; note = 2'-O-methyl ribonucleotide
  modified_base 71: mod_base = OTHER; note = 2'-O-methyl ribonucleotide
  modified_base 72: mod_base = OTHER; note = 2'-O-methyl ribonucleotide
  modified_base 73: mod_base = OTHER; note = 2'-O-methyl ribonucleotide
  modified_base 74: mod_base = OTHER; note = 2'-O-methyl ribonucleotide
  modified_base 75: mod_base = OTHER; note = 2'-O-methyl ribonucleotide
  modified_base 76: mod_base = OTHER; note = 2'-O-methyl ribonucleotide
  modified_base 77: mod_base = OTHER; note = 2'-O-methyl ribonucleotide
  modified_base 78: mod_base = OTHER; note = 2'-O-methyl ribonucleotide
  modified_base 79: mod_base = OTHER; note = 2'-O-methyl ribonucleotide
  modified_base 80: mod_base = OTHER; note = 2'-O-methyl ribonucleotide
  modified_base 82: mod_base = OTHER; note = 2'-O-methyl ribonucleotide
  modified_base 83: mod_base = OTHER; note = 2'-O-methyl ribonucleotide
  modified_base 84: mod_base = OTHER; note = 2'-O-methyl ribonucleotide
  modified_base 85: mod_base = OTHER; note = 2'-O-methyl ribonucleotide
  modified_base 86: mod_base = OTHER; note = 2'-O-methyl ribonucleotide
  modified_base 87: mod_base = OTHER; note = 2'-O-methyl ribonucleotide
  modified_base 89: mod_base = OTHER; note = 2'-O-methyl ribonucleotide
  modified_base 92: mod_base = OTHER; note = 2'-O-methyl ribonucleotide
  modified_base 93: mod_base = OTHER; note = 2'-O-methyl ribonucleotide
  modified_base 94: mod_base = OTHER; note = 2'-O-methyl ribonucleotide
  modified_base 95: mod_base = OTHER; note = 2'-O-methyl ribonucleotide
  modified_base 96: mod_base = OTHER; note = 2'-O-methyl ribonucleotide
  modified_base 97: mod_base = OTHER; note = 2'-O-methyl ribonucleotide
  modified_base 98: mod_base = OTHER; note = 2'-O-methyl ribonucleotide
  modified_base 99: mod_base = OTHER; note = 2'-O-methyl ribonucleotide
  modified_base 100: mod_base = OTHER; note = 2'-O-methyl ribonucleotide
  modified_base 1..3: mod_base = OTHER; note = phosphorothioate linkage
  modified_base 25..26: mod_base = OTHER; note = phosphorothioate linkage
  modified_base 64..65: mod_base = OTHER; note = phosphorothioate linkage
  modified_base 98..100: mod_base = OTHER; note = phosphorothioate linkage

SEQ ID NO: 2441 - RNA, 100 nt, synthetic construct; identical to SEQ ID NO: 55
  source 1..100: mol_type = other RNA
  modified_base 1: mod_base = OTHER; note = 2'-O-methyl ribonucleotide
  modified_base 2: mod_base = OTHER; note = 2'-O-methyl ribonucleotide
  modified_base 3: mod_base = OTHER; note = 2'-O-methyl ribonucleotide
  modified_base 21: mod_base = OTHER; note = 2'-O-methyl ribonucleotide
  modified_base 28: mod_base = OTHER; note = 2'-O-methyl ribonucleotide
  modified_base 29: mod_base = OTHER; note = 2'-O-methyl ribonucleotide
  modified_base 30: mod_base = OTHER; note = 2'-O-methyl ribonucleotide
  modified_base 31: mod_base = OTHER; note = 2'-O-methyl ribonucleotide
  modified_base 32: mod_base = OTHER; note = 2'-O-methyl ribonucleotide
  modified_base 34: mod_base = OTHER; note = 2'-O-methyl ribonucleotide
  modified_base 35: mod_base = OTHER; note = 2'-O-methyl ribonucleotide
  modified_base 36: mod_base = OTHER; note = 2'-O-methyl ribonucleotide
  modified_base 37: mod_base = OTHER; note = 2'-O-methyl ribonucleotide
  modified_base 38: mod_base = OTHER; note = 2'-O-methyl ribonucleotide
  modified_base 39: mod_base = OTHER; note = 2'-O-methyl ribonucleotide
  modified_base 40: mod_base = OTHER; note = 2'-O-methyl ribonucleotide
  modified_base 41: mod_base = OTHER; note = 2'-O-methyl ribonucleotide
  modified_base 42: mod_base = OTHER; note = 2'-O-methyl ribonucleotide
  modified_base 46: mod_base = OTHER; note = 2'-O-methyl ribonucleotide
  modified_base 48: mod_base = OTHER; note = 2'-O-methyl ribonucleotide
  modified_base 50: mod_base = OTHER; note = 2'-O-methyl ribonucleotide
  modified_base 52: mod_base = OTHER; note = 2'-O-methyl ribonucleotide
  modified_base 53: mod_base = OTHER; note = 2'-O-methyl ribonucleotide
  modified_base 54: mod_base = OTHER; note = 2'-O-methyl ribonucleotide
  modified_base 57: mod_base = OTHER; note = 2'-O-methyl ribonucleotide
  modified_base 61: mod_base = OTHER; note = 2'-O-methyl ribonucleotide
  modified_base 66: mod_base = OTHER; note = 2'-O-methyl ribonucleotide
  modified_base 67: mod_base = OTHER; note = 2'-O-methyl ribonucleotide
  modified_base 70: mod_base = OTHER; note = 2'-O-methyl ribonucleotide
  modified_base 71: mod_base = OTHER; note = 2'-O-methyl ribonucleotide
  modified_base 72: mod_base = OTHER; note = 2'-O-methyl ribonucleotide
  modified_base 73: mod_base = OTHER; note = 2'-O-methyl ribonucleotide
  modified_base 74: mod_base = OTHER; note = 2'-O-methyl ribonucleotide
  modified_base 75: mod_base = OTHER; note = 2'-O-methyl ribonucleotide
  modified_base 76: mod_base = OTHER; note = 2'-O-methyl ribonucleotide
  modified_base 77: mod_base = OTHER; note = 2'-O-methyl ribonucleotide
  modified_base 78: mod_base = OTHER; note = 2'-O-methyl ribonucleotide
  modified_base 79: mod_base = OTHER; note = 2'-O-methyl ribonucleotide
  modified_base 80: mod_base = OTHER; note = 2'-O-methyl ribonucleotide
  modified_base 82: mod_base = OTHER; note = 2'-O-methyl ribonucleotide
  modified_base 83: mod_base = OTHER; note = 2'-O-methyl ribonucleotide
  modified_base 84: mod_base = OTHER; note = 2'-O-methyl ribonucleotide
  modified_base 85: mod_base = OTHER; note = 2'-O-methyl ribonucleotide
  modified_base 86: mod_base = OTHER; note = 2'-O-methyl ribonucleotide
  modified_base 87: mod_base = OTHER; note = 2'-O-methyl ribonucleotide
  modified_base 89: mod_base = OTHER; note = 2'-O-methyl ribonucleotide
  modified_base 91: mod_base = OTHER; note = 2'-O-methyl ribonucleotide
  modified_base 92: mod_base = OTHER; note = 2'-O-methyl ribonucleotide
  modified_base 93: mod_base = OTHER; note = 2'-O-methyl ribonucleotide
  modified_base 94: mod_base = OTHER; note = 2'-O-methyl ribonucleotide
  modified_base 95: mod_base = OTHER; note = 2'-O-methyl ribonucleotide
  modified_base 96: mod_base = OTHER; note = 2'-O-methyl ribonucleotide
  modified_base 97: mod_base = OTHER; note = 2'-O-methyl ribonucleotide
  modified_base 98: mod_base = OTHER; note = 2'-O-methyl ribonucleotide
  modified_base 99: mod_base = OTHER; note = 2'-O-methyl ribonucleotide
  modified_base 100: mod_base = OTHER; note = 2'-O-methyl ribonucleotide
  modified_base 1..3: mod_base = OTHER; note = phosphorothioate linkage
  modified_base 25..26: mod_base = OTHER; note = phosphorothioate linkage
  modified_base 64..65: mod_base = OTHER; note = phosphorothioate linkage
  modified_base 98..100: mod_base = OTHER; note = phosphorothioate linkage

SEQ ID NO: 2442 - RNA, 100 nt, synthetic construct; identical to SEQ ID NO: 55
  source 1..100: mol_type = other RNA
  modified_base 1: mod_base = OTHER; note = 2'-O-methyl ribonucleotide
  modified_base 2: mod_base = OTHER; note = 2'-O-methyl ribonucleotide
  modified_base 3: mod_base = OTHER; note = 2'-O-methyl ribonucleotide
  modified_base 21: mod_base = OTHER; note = 2'-O-methyl ribonucleotide
  modified_base 28: mod_base = OTHER; note = 2'-O-methyl ribonucleotide
  modified_base 29: mod_base = OTHER; note = 2'-O-methyl ribonucleotide
  modified_base 30: mod_base = OTHER; note = 2'-O-methyl ribonucleotide
  modified_base 31: mod_base = OTHER; note = 2'-O-methyl ribonucleotide
  modified_base 32: mod_base = OTHER; note = 2'-O-methyl ribonucleotide
  modified_base 34: mod_base = OTHER; note = 2'-O-methyl ribonucleotide
  modified_base 35: mod_base = OTHER; note = 2'-O-methyl ribonucleotide
  modified_base 36: mod_base = OTHER; note = 2'-O-methyl ribonucleotide
  modified_base 37: mod_base = OTHER; note = 2'-O-methyl ribonucleotide
  modified_base 38: mod_base = OTHER; note = 2'-O-methyl ribonucleotide
  modified_base 39: mod_base = OTHER; note = 2'-O-methyl ribonucleotide
  modified_base 40: mod_base = OTHER; note = 2'-O-methyl ribonucleotide
  modified_base 41: mod_base = OTHER; note = 2'-O-methyl ribonucleotide
  modified_base 42: mod_base = OTHER; note = 2'-O-methyl ribonucleotide
  modified_base 46: mod_base = OTHER; note = 2'-O-methyl ribonucleotide
  modified_base 48: mod_base = OTHER; note = 2'-O-methyl ribonucleotide
  modified_base 50: mod_base = OTHER; note = 2'-O-methyl ribonucleotide
  modified_base 52: mod_base = OTHER; note = 2'-O-methyl ribonucleotide
  modified_base 53: mod_base = OTHER; note = 2'-O-methyl ribonucleotide
  modified_base 54: mod_base = OTHER; note = 2'-O-methyl ribonucleotide
  modified_base 55: mod_base = OTHER; note = 2'-O-methyl ribonucleotide
  modified_base 56: mod_base = OTHER; note = 2'-O-methyl ribonucleotide
  modified_base 57: mod_base = OTHER; note = 2'-O-methyl ribonucleotide
  modified_base 60: mod_base = OTHER; note = 2'-O-methyl ribonucleotide
  modified_base 61: mod_base = OTHER; note = 2'-O-methyl ribonucleotide
  modified_base 66: mod_base = OTHER; note = 2'-O-methyl ribonucleotide
  modified_base 67: mod_base = OTHER; note = 2'-O-methyl ribonucleotide
  modified_base 70: mod_base = OTHER; note = 2'-O-methyl ribonucleotide
  modified_base 71: mod_base = OTHER; note = 2'-O-methyl ribonucleotide
  modified_base 72: mod_base = OTHER; note = 2'-O-methyl ribonucleotide
  modified_base 74: mod_base = OTHER; note = 2'-O-methyl ribonucleotide
  modified_base 75: mod_base = OTHER; note = 2'-O-methyl ribonucleotide
  modified_base 76: mod_base = OTHER; note = 2'-O-methyl ribonucleotide
  modified_base 77: mod_base = OTHER; note = 2'-O-methyl ribonucleotide
  modified_base 78: mod_base = OTHER; note = 2'-O-methyl ribonucleotide
  modified_base 79: mod_base = OTHER; note = 2'-O-methyl ribonucleotide
  modified_base 80: mod_base = OTHER; note = 2'-O-methyl ribonucleotide
  modified_base 82: mod_base = OTHER; note = 2'-O-methyl ribonucleotide
  modified_base 83: mod_base = OTHER; note = 2'-O-methyl ribonucleotide
  modified_base 84: mod_base = OTHER; note = 2'-O-methyl ribonucleotide
  modified_base 85: mod_base = OTHER; note = 2'-O-methyl ribonucleotide
  modified_base 86: mod_base = OTHER; note = 2'-O-methyl ribonucleotide
  modified_base 87: mod_base = OTHER; note = 2'-O-methyl ribonucleotide
  modified_base 89: mod_base = OTHER; note = 2'-O-methyl ribonucleotide
  modified_base 92: mod_base = OTHER; note = 2'-O-methyl ribonucleotide
  modified_base 93: mod_base = OTHER; note = 2'-O-methyl ribonucleotide
  modified_base 94: mod_base = OTHER; note = 2'-O-methyl ribonucleotide
  modified_base 95: mod_base = OTHER; note = 2'-O-methyl ribonucleotide
  modified_base 96: mod_base = OTHER; note = 2'-O-methyl ribonucleotide
  modified_base 97: mod_base = OTHER; note = 2'-O-methyl ribonucleotide
  modified_base 98: mod_base = OTHER; note = 2'-O-methyl ribonucleotide
  modified_base 99: mod_base = OTHER; note = 2'-O-methyl ribonucleotide
  modified_base 100: mod_base = OTHER; note = 2'-O-methyl ribonucleotide
  modified_base 1..3: mod_base = OTHER; note = phosphorothioate linkage
  modified_base 25..26: mod_base = OTHER; note = phosphorothioate linkage
  modified_base 64..65: mod_base = OTHER; note = phosphorothioate linkage
  modified_base 98..100: mod_base = OTHER; note = phosphorothioate linkage

SEQ ID NO: 2443 - RNA, 100 nt, synthetic construct; identical to SEQ ID NO: 421
  source 1..100: mol_type = other RNA
  modified_base 1: mod_base = OTHER; note = 2'-O-methyl ribonucleotide
  modified_base 2: mod_base = OTHER; note = 2'-O-methyl ribonucleotide
  modified_base 3: mod_base = OTHER; note = 2'-O-methyl ribonucleotide
  modified_base 21: mod_base = OTHER; note = 2'-O-methyl ribonucleotide
  modified_base 28: mod_base = OTHER; note = 2'-O-methyl ribonucleotide
  modified_base 29: mod_base = OTHER; note = 2'-O-methyl ribonucleotide
  modified_base 30: mod_base = OTHER; note = 2'-O-methyl ribonucleotide
  modified_base 31: mod_base = OTHER; note = 2'-O-methyl ribonucleotide
  modified_base 32: mod_base = OTHER; note = 2'-O-methyl ribonucleotide
  modified_base 33: mod_base = OTHER; note = 2'-O-methyl ribonucleotide
  modified_base 34: mod_base = OTHER; note = 2'-O-methyl ribonucleotide
  modified_base 35: mod_base = OTHER; note = 2'-O-methyl ribonucleotide
  modified_base 36: mod_base = OTHER; note = 2'-O-methyl ribonucleotide
  modified_base 37: mod_base = OTHER; note = 2'-O-methyl ribonucleotide
  modified_base 38: mod_base = OTHER; note = 2'-O-methyl ribonucleotide
  modified_base 39: mod_base = OTHER; note = 2'-O-methyl ribonucleotide
  modified_base 40: mod_base = OTHER; note = 2'-O-methyl ribonucleotide
  modified_base 41: mod_base = OTHER; note = 2'-O-methyl ribonucleotide
  modified_base 42: mod_base = OTHER; note = 2'-O-methyl ribonucleotide
  modified_base 46: mod_base = OTHER; note = 2'-O-methyl ribonucleotide
  modified_base 48: mod_base = OTHER; note = 2'-O-methyl ribonucleotide
  modified_base 50: mod_base = OTHER; note = 2'-O-methyl ribonucleotide
  modified_base 52: mod_base = OTHER; note = 2'-O-methyl ribonucleotide
  modified_base 53: mod_base = OTHER; note = 2'-O-methyl ribonucleotide
  modified_base 54: mod_base = OTHER; note = 2'-O-methyl ribonucleotide
  modified_base 55: mod_base = OTHER; note = 2'-O-methyl ribonucleotide
  modified_base 56: mod_base = OTHER; note = 2'-O-methyl ribonucleotide
  modified_base 57: mod_base = OTHER; note = 2'-O-methyl ribonucleotide
  modified_base 60: mod_base = OTHER; note = 2'-O-methyl ribonucleotide
  modified_base 61: mod_base = OTHER; note = 2'-O-methyl ribonucleotide
  modified_base 66: mod_base = OTHER; note = 2'-O-methyl ribonucleotide
  modified_base 67: mod_base = OTHER; note = 2'-O-methyl ribonucleotide
  modified_base 70: mod_base = OTHER; note = 2'-O-methyl ribonucleotide
  modified_base 71: mod_base = OTHER; note = 2'-O-methyl ribonucleotide
  modified_base 72: mod_base = OTHER; note = 2'-O-methyl ribonucleotide
  modified_base 73: mod_base = OTHER; note = 2'-O-methyl ribonucleotide
  modified_base 74: mod_base = OTHER; note = 2'-O-methyl ribonucleotide
  modified_base 75: mod_base = OTHER; note = 2'-O-methyl ribonucleotide
  modified_base 76: mod_base = OTHER; note = 2'-O-methyl ribonucleotide
  modified_base 77: mod_base = OTHER; note = 2'-O-methyl ribonucleotide
  modified_base 78: mod_base = OTHER; note = 2'-O-methyl ribonucleotide
  modified_base 79: mod_base = OTHER; note = 2'-O-methyl ribonucleotide
  modified_base 80: mod_base = OTHER; note = 2'-O-methyl ribonucleotide
  modified_base 81: mod_base = OTHER; note = 2'-O-methyl ribonucleotide
  modified_base 83: mod_base = OTHER; note = 2'-O-methyl ribonucleotide
  modified_base 84: mod_base = OTHER; note = 2'-O-methyl ribonucleotide
  modified_base 85: mod_base = OTHER; note = 2'-O-methyl ribonucleotide
  modified_base 86: mod_base = OTHER; note = 2'-O-methyl ribonucleotide
  modified_base 87: mod_base = OTHER; note = 2'-O-methyl ribonucleotide
  modified_base 88: mod_base = OTHER; note = 2'-O-methyl ribonucleotide
  modified_base 89: mod_base = OTHER; note = 2'-O-methyl ribonucleotide
  modified_base 90: mod_base = OTHER; note = 2'-O-methyl ribonucleotide
  modified_base 91: mod_base = OTHER; note = 2'-O-methyl ribonucleotide
  modified_base 92: mod_base = OTHER; note = 2'-O-methyl ribonucleotide
  modified_base 93: mod_base = OTHER; note = 2'-O-methyl ribonucleotide
  modified_base 94: mod_base = OTHER; note = 2'-O-methyl ribonucleotide
  modified_base 95: mod_base = OTHER; note = 2'-O-methyl ribonucleotide
  modified_base 96: mod_base = OTHER; note = 2'-O-methyl ribonucleotide
  modified_base 97: mod_base = OTHER; note = 2'-O-methyl ribonucleotide
  modified_base 98: mod_base = OTHER; note = 2'-O-methyl ribonucleotide
  modified_base 99: mod_base = OTHER; note = 2'-O-methyl ribonucleotide
  modified_base 100: mod_base = OTHER; note = 2'-O-methyl ribonucleotide
  modified_base 1..3: mod_base = OTHER; note = phosphorothioate linkage
  modified_base 25..26: mod_base = OTHER; note = phosphorothioate linkage
  modified_base 45..46: mod_base = OTHER; note = phosphorothioate linkage
  modified_base 64..65: mod_base = OTHER; note = phosphorothioate linkage
  modified_base 98..100: mod_base = OTHER; note = phosphorothioate linkage

SEQ ID NO: 2444 - RNA, 100 nt, synthetic construct; identical to SEQ ID NO: 421
  source 1..100: mol_type = other RNA
  modified_base 1: mod_base = OTHER; note = 2'-O-methyl ribonucleotide
  modified_base 2: mod_base = OTHER; note = 2'-O-methyl ribonucleotide
  modified_base 3: mod_base = OTHER; note = 2'-O-methyl ribonucleotide
  modified_base 21: mod_base = OTHER; note = 2'-O-methyl ribonucleotide
  modified_base 28: mod_base = OTHER; note = 2'-O-methyl ribonucleotide
  modified_base 29: mod_base = OTHER; note = 2'-O-methyl ribonucleotide
  modified_base 30: mod_base = OTHER; note = 2'-O-methyl ribonucleotide
  modified_base 31: mod_base = OTHER; note = 2'-O-methyl ribonucleotide
  modified_base 32: mod_base = OTHER; note = 2'-O-methyl ribonucleotide
  modified_base 34: mod_base = OTHER; note = 2'-O-methyl ribonucleotide
  modified_base 35: mod_base = OTHER; note = 2'-O-methyl ribonucleotide
  modified_base 36: mod_base = OTHER; note = 2'-O-methyl ribonucleotide
  modified_base 37: mod_base = OTHER; note = 2'-O-methyl ribonucleotide
  modified_base 38: mod_base = OTHER; note = 2'-O-methyl ribonucleotide
  modified_base 39: mod_base = OTHER; note = 2'-O-methyl ribonucleotide
  modified_base 40: mod_base = OTHER; note = 2'-O-methyl ribonucleotide
  modified_base 41: mod_base = OTHER; note = 2'-O-methyl ribonucleotide
  modified_base 42: mod_base = OTHER; note = 2'-O-methyl ribonucleotide
  modified_base 46: mod_base = OTHER; note = 2'-O-methyl ribonucleotide
  modified_base 48: mod_base = OTHER; note = 2'-O-methyl ribonucleotide
  modified_base 50: mod_base = OTHER; note = 2'-O-methyl ribonucleotide
  modified_base 52: mod_base = OTHER; note = 2'-O-methyl ribonucleotide
  modified_base 53: mod_base = OTHER; note = 2'-O-methyl ribonucleotide
  modified_base 54: mod_base = OTHER; note = 2'-O-methyl ribonucleotide
  modified_base 55: mod_base = OTHER; note = 2'-O-methyl ribonucleotide
  modified_base 56: mod_base = OTHER; note = 2'-O-methyl ribonucleotide
  modified_base 57: mod_base = OTHER; note = 2'-O-methyl ribonucleotide
  modified_base 60: mod_base = OTHER; note = 2'-O-methyl ribonucleotide
  modified_base 61: mod_base = OTHER; note = 2'-O-methyl ribonucleotide
  modified_base 66: mod_base = OTHER; note = 2'-O-methyl ribonucleotide
  modified_base 67: mod_base = OTHER; note = 2'-O-methyl ribonucleotide
  modified_base 70: mod_base = OTHER; note = 2'-O-methyl ribonucleotide
  modified_base 71: mod_base = OTHER; note = 2'-O-methyl ribonucleotide
  modified_base 72: mod_base = OTHER; note = 2'-O-methyl ribonucleotide
  modified_base 74: mod_base = OTHER; note = 2'-O-methyl ribonucleotide
  modified_base 75: mod_base = OTHER; note = 2'-O-methyl ribonucleotide
  modified_base 76: mod_base = OTHER; note = 2'-O-methyl ribonucleotide
  modified_base 77: mod_base = OTHER; note = 2'-O-methyl ribonucleotide
  modified_base 78: mod_base = OTHER; note = 2'-O-methyl ribonucleotide
  modified_base 79: mod_base = OTHER; note = 2'-O-methyl ribonucleotide
  modified_base 80: mod_base = OTHER; note = 2'-O-methyl ribonucleotide
  modified_base 81: mod_base = OTHER; note = 2'-O-methyl ribonucleotide
  modified_base 83: mod_base = OTHER; note = 2'-O-methyl ribonucleotide
  modified_base 84: mod_base = OTHER; note = 2'-O-methyl ribonucleotide
  modified_base 85: mod_base = OTHER; note = 2'-O-methyl ribonucleotide
  modified_base 86: mod_base = OTHER; note = 2'-O-methyl ribonucleotide
  modified_base 87: mod_base = OTHER; note = 2'-O-methyl ribonucleotide
  modified_base 88: mod_base = OTHER; note = 2'-O-methyl ribonucleotide
  modified_base 89: mod_base = OTHER; note = 2'-O-methyl ribonucleotide
  modified_base 90: mod_base = OTHER; note = 2'-O-methyl ribonucleotide
  modified_base 91: mod_base = OTHER; note = 2'-O-methyl ribonucleotide
  modified_base 92: mod_base = OTHER; note = 2'-O-methyl ribonucleotide
  modified_base 93: mod_base = OTHER; note = 2'-O-methyl ribonucleotide
  modified_base 94: mod_base = OTHER; note = 2'-O-methyl ribonucleotide
  modified_base 95: mod_base = OTHER; note = 2'-O-methyl ribonucleotide
  modified_base 96: mod_base = OTHER; note = 2'-O-methyl ribonucleotide
  modified_base 97: mod_base = OTHER; note = 2'-O-methyl ribonucleotide
  modified_base 98: mod_base = OTHER; note = 2'-O-methyl ribonucleotide
  modified_base 99: mod_base = OTHER; note = 2'-O-methyl ribonucleotide
  modified_base 100: mod_base = OTHER; note = 2'-O-methyl ribonucleotide
  modified_base 1..3: mod_base = OTHER; note = phosphorothioate linkage
  modified_base 25..26: mod_base = OTHER; note = phosphorothioate linkage
  modified_base 45..46: mod_base = OTHER; note = phosphorothioate linkage
  modified_base 64..65: mod_base = OTHER; note = phosphorothioate linkage
  modified_base 98..100: mod_base = OTHER; note = phosphorothioate linkage

SEQ ID NO: 2445 - RNA, 100 nt, synthetic construct; identical to SEQ ID NO: 422
  source 1..100: mol_type = other RNA
  modified_base 1: mod_base = OTHER; note = 2'-O-methyl ribonucleotide
  modified_base 2: mod_base = OTHER; note = 2'-O-methyl ribonucleotide
  modified_base 3: mod_base = OTHER; note = 2'-O-methyl ribonucleotide
  modified_base 21: mod_base = OTHER; note = 2'-O-methyl ribonucleotide
  modified_base 28: mod_base = OTHER; note = 2'-O-methyl ribonucleotide
  modified_base 29: mod_base = OTHER; note = 2'-O-methyl ribonucleotide
  modified_base 30: mod_base = OTHER; note = 2'-O-methyl ribonucleotide
  modified_base 31: mod_base = OTHER; note = 2'-O-methyl ribonucleotide
  modified_base 32: mod_base = OTHER; note = 2'-O-methyl ribonucleotide
  modified_base 33: mod_base = OTHER; note = 2'-O-methyl ribonucleotide
  modified_base 34: mod_base = OTHER; note = 2'-O-methyl ribonucleotide
  modified_base 35: mod_base = OTHER; note = 2'-O-methyl ribonucleotide
  modified_base 36: mod_base = OTHER; note = 2'-O-methyl ribonucleotide
  modified_base 37: mod_base = OTHER; note = 2'-O-methyl ribonucleotide
  modified_base 38: mod_base = OTHER; note = 2'-O-methyl ribonucleotide
  modified_base 39: mod_base = OTHER; note = 2'-O-methyl ribonucleotide
  modified_base 40: mod_base = OTHER; note = 2'-O-methyl ribonucleotide
  modified_base 41: mod_base = OTHER; note = 2'-O-methyl ribonucleotide
  modified_base 42: mod_base = OTHER; note = 2'-O-methyl ribonucleotide
  modified_base 46: mod_base = OTHER; note = 2'-O-methyl ribonucleotide
  modified_base 48: mod_base = OTHER; note = 2'-O-methyl ribonucleotide
  modified_base 50: mod_base = OTHER; note = 2'-O-methyl ribonucleotide
  modified_base 52: mod_base = OTHER; note = 2'-O-methyl ribonucleotide
  modified_base 53: mod_base = OTHER; note = 2'-O-methyl ribonucleotide
  modified_base 54: mod_base = OTHER; note = 2'-O-methyl ribonucleotide
  modified_base 55: mod_base = OTHER; note = 2'-O-methyl ribonucleotide
  modified_base 56: mod_base = OTHER; note = 2'-O-methyl ribonucleotide
  modified_base 57: mod_base = OTHER; note = 2'-O-methyl ribonucleotide
  modified_base 60: mod_base = OTHER; note = 2'-O-methyl ribonucleotide
  modified_base 61: mod_base = OTHER; note = 2'-O-methyl ribonucleotide
  modified_base 66: mod_base = OTHER; note = 2'-O-methyl ribonucleotide
  modified_base 67: mod_base = OTHER; note = 2'-O-methyl ribonucleotide
  modified_base 70: mod_base = OTHER; note = 2'-O-methyl ribonucleotide
  modified_base 71: mod_base = OTHER; note = 2'-O-methyl ribonucleotide
  modified_base 72: mod_base = OTHER; note = 2'-O-methyl ribonucleotide
  modified_base 73: mod_base = OTHER; note = 2'-O-methyl ribonucleotide
  modified_base 74: mod_base = OTHER; note = 2'-O-methyl ribonucleotide
  modified_base 75: mod_base = OTHER; note = 2'-O-methyl ribonucleotide
  modified_base 76: mod_base = OTHER; note = 2'-O-methyl ribonucleotide
  modified_base 77: mod_base = OTHER; note = 2'-O-methyl ribonucleotide
  modified_base 78: mod_base = OTHER; note = 2'-O-methyl ribonucleotide
  modified_base 79: mod_base = OTHER; note = 2'-O-methyl ribonucleotide
  modified_base 80: mod_base = OTHER; note = 2'-O-methyl ribonucleotide
  modified_base 81: mod_base = OTHER; note = 2'-O-methyl ribonucleotide
  modified_base 83: mod_base = OTHER; note = 2'-O-methyl ribonucleotide
  modified_base 84: mod_base = OTHER; note = 2'-O-methyl ribonucleotide
  modified_base 85: mod_base = OTHER; note = 2'-O-methyl ribonucleotide
  modified_base 86: mod_base = OTHER; note = 2'-O-methyl ribonucleotide
  modified_base 87: mod_base = OTHER; note = 2'-O-methyl ribonucleotide
  modified_base 88: mod_base = OTHER; note = 2'-O-methyl ribonucleotide
  modified_base 89: mod_base = OTHER; note = 2'-O-methyl ribonucleotide
  modified_base 90: mod_base = OTHER; note = 2'-O-methyl ribonucleotide
  modified_base 91: mod_base = OTHER; note = 2'-O-methyl ribonucleotide
  modified_base 92: mod_base = OTHER; note = 2'-O-methyl ribonucleotide
  modified_base 93: mod_base = OTHER; note = 2'-O-methyl ribonucleotide
  modified_base 94: mod_base = OTHER; note = 2'-O-methyl ribonucleotide
  modified_base 95: mod_base = OTHER; note = 2'-O-methyl ribonucleotide
  modified_base 96: mod_base = OTHER; note = 2'-O-methyl ribonucleotide
  modified_base 97: mod_base = OTHER; note = 2'-O-methyl ribonucleotide
  modified_base 98: mod_base = OTHER; note = 2'-O-methyl ribonucleotide
  modified_base 99: mod_base = OTHER; note = 2'-O-methyl ribonucleotide
  modified_base 100: mod_base = OTHER; note = 2'-O-methyl ribonucleotide
  modified_base 1..3: mod_base = OTHER; note = phosphorothioate linkage
  modified_base 25..26: mod_base = OTHER; note = phosphorothioate linkage
  modified_base 45..46: mod_base = OTHER; note = phosphorothioate linkage
  modified_base 64..65: mod_base = OTHER; note = phosphorothioate linkage
  modified_base 98..100: mod_base = OTHER; note = phosphorothioate linkage

SEQ ID NO: 2446 - RNA, 100 nt, synthetic construct; identical to SEQ ID NO: 422
  source 1..100: mol_type = other RNA
  modified_base 1: mod_base = OTHER; note = 2'-O-methyl ribonucleotide
  modified_base 2: mod_base = OTHER; note = 2'-O-methyl ribonucleotide
  modified_base 3: mod_base = OTHER; note = 2'-O-methyl ribonucleotide
  modified_base 21: mod_base = OTHER; note = 2'-O-methyl ribonucleotide
  modified_base 28: mod_base = OTHER; note = 2'-O-methyl ribonucleotide
  modified_base 29: mod_base = OTHER; note = 2'-O-methyl ribonucleotide
  modified_base 30: mod_base = OTHER; note = 2'-O-methyl ribonucleotide
  modified_base 31: mod_base = OTHER; note = 2'-O-methyl ribonucleotide
  modified_base 32: mod_base = OTHER; note = 2'-O-methyl ribonucleotide
  modified_base 34: mod_base = OTHER; note = 2'-O-methyl ribonucleotide
  modified_base 35: mod_base = OTHER; note = 2'-O-methyl ribonucleotide
  modified_base 36: mod_base = OTHER; note = 2'-O-methyl ribonucleotide
  modified_base 37: mod_base = OTHER; note = 2'-O-methyl ribonucleotide
  modified_base 38: mod_base = OTHER; note = 2'-O-methyl ribonucleotide
  modified_base 39: mod_base = OTHER; note = 2'-O-methyl ribonucleotide
  modified_base 40: mod_base = OTHER; note = 2'-O-methyl ribonucleotide
  modified_base 41: mod_base = OTHER; note = 2'-O-methyl ribonucleotide
  modified_base 42: mod_base = OTHER; note = 2'-O-methyl ribonucleotide
  modified_base 46: mod_base = OTHER; note = 2'-O-methyl ribonucleotide
  modified_base 48: mod_base = OTHER; note = 2'-O-methyl ribonucleotide
  modified_base 50: mod_base = OTHER; note = 2'-O-methyl ribonucleotide
  modified_base 52: mod_base = OTHER; note = 2'-O-methyl ribonucleotide
  modified_base 53: mod_base = OTHER; note = 2'-O-methyl ribonucleotide
  modified_base 54: mod_base = OTHER; note = 2'-O-methyl ribonucleotide
  modified_base 55: mod_base = OTHER; note = 2'-O-methyl ribonucleotide
  modified_base 56: mod_base = OTHER; note = 2'-O-methyl ribonucleotide
  modified_base 57: mod_base = OTHER; note = 2'-O-methyl ribonucleotide
  modified_base 60: mod_base = OTHER; note = 2'-O-methyl ribonucleotide
  modified_base 61: mod_base = OTHER; note = 2'-O-methyl ribonucleotide
  modified_base 66: mod_base = OTHER; note = 2'-O-methyl ribonucleotide
  modified_base 67: mod_base = OTHER; note = 2'-O-methyl ribonucleotide
  modified_base 70: mod_base = OTHER; note = 2'-O-methyl ribonucleotide
  modified_base 71: mod_base = OTHER; note = 2'-O-methyl ribonucleotide
  modified_base 72: mod_base = OTHER; note = 2'-O-methyl ribonucleotide
  modified_base 74: mod_base = OTHER; note = 2'-O-methyl ribonucleotide
  modified_base 75: mod_base = OTHER; note = 2'-O-methyl ribonucleotide
  modified_base 76: mod_base = OTHER; note = 2'-O-methyl ribonucleotide
  modified_base 77: mod_base = OTHER; note = 2'-O-methyl ribonucleotide
  modified_base 78: mod_base = OTHER; note = 2'-O-methyl ribonucleotide
  modified_base 79: mod_base = OTHER; note = 2'-O-methyl ribonucleotide
  modified_base 80: mod_base = OTHER; note = 2'-O-methyl ribonucleotide
  modified_base 81: mod_base = OTHER; note = 2'-O-methyl ribonucleotide
  modified_base 83: mod_base = OTHER; note = 2'-O-methyl ribonucleotide
  modified_base 84: mod_base = OTHER; note = 2'-O-methyl ribonucleotide
  modified_base 85: mod_base = OTHER; note = 2'-O-methyl ribonucleotide
  modified_base 86: mod_base = OTHER; note = 2'-O-methyl ribonucleotide
  modified_base 87: mod_base = OTHER; note = 2'-O-methyl ribonucleotide
  modified_base 88: mod_base = OTHER; note = 2'-O-methyl ribonucleotide
  modified_base 89: mod_base = OTHER; note = 2'-O-methyl ribonucleotide
  modified_base 90: mod_base = OTHER; note = 2'-O-methyl ribonucleotide
  modified_base 91: mod_base = OTHER; note = 2'-O-methyl ribonucleotide
  modified_base 92: mod_base = OTHER; note = 2'-O-methyl ribonucleotide
  modified_base 93: mod_base = OTHER; note = 2'-O-methyl ribonucleotide
  modified_base 94: mod_base = OTHER; note = 2'-O-methyl ribonucleotide
  modified_base 95: mod_base = OTHER; note = 2'-O-methyl ribonucleotide
  modified_base 96: mod_base = OTHER; note = 2'-O-methyl ribonucleotide
  modified_base 97: mod_base = OTHER; note = 2'-O-methyl ribonucleotide
  modified_base 98: mod_base = OTHER; note = 2'-O-methyl ribonucleotide
  modified_base 99: mod_base = OTHER; note = 2'-O-methyl ribonucleotide
  modified_base 100: mod_base = OTHER; note = 2'-O-methyl ribonucleotide
  modified_base 1..3: mod_base = OTHER; note = phosphorothioate linkage
  modified_base 25..26: mod_base = OTHER; note = phosphorothioate linkage
  modified_base 45..46: mod_base = OTHER; note = phosphorothioate linkage
  modified_base 64..65: mod_base = OTHER; note = phosphorothioate linkage
  modified_base 98..100: mod_base = OTHER; note = phosphorothioate linkage

SEQ ID NO: 2447 - RNA, 100 nt, synthetic construct; identical to SEQ ID NO: 55
  source 1..100: mol_type = other RNA
  modified_base 1: mod_base = OTHER; note = 2'-O-methyl ribonucleotide
  modified_base 2: mod_base = OTHER; note = 2'-O-methyl ribonucleotide
  modified_base 3: mod_base = OTHER; note = 2'-O-methyl ribonucleotide
  modified_base 21: mod_base = OTHER; note = 2'-O-methyl ribonucleotide
  modified_base 28: mod_base = OTHER; note = 2'-O-methyl ribonucleotide
  modified_base 29: mod_base = OTHER; note = 2'-O-methyl ribonucleotide
  modified_base 30: mod_base = OTHER; note = 2'-O-methyl ribonucleotide
  modified_base 31: mod_base = OTHER; note = 2'-O-methyl ribonucleotide
  modified_base 32: mod_base = OTHER; note = 2'-O-methyl ribonucleotide
  modified_base 33: mod_base = OTHER; note = 2'-O-methyl ribonucleotide
  modified_base 34: mod_base = OTHER; note = 2'-O-methyl ribonucleotide
  modified_base 35: mod_base = OTHER; note = 2'-O-methyl ribonucleotide
  modified_base 36: mod_base = OTHER; note = 2'-O-methyl ribonucleotide
  modified_base 37: mod_base = OTHER; note = 2'-O-methyl ribonucleotide
  modified_base 38: mod_base = OTHER; note = 2'-O-methyl ribonucleotide
  modified_base 39: mod_base = OTHER; note = 2'-O-methyl ribonucleotide
  modified_base 40: mod_base = OTHER; note = 2'-O-methyl ribonucleotide
  modified_base 41: mod_base = OTHER; note = 2'-O-methyl ribonucleotide
  modified_base 42: mod_base = OTHER; note = 2'-O-methyl ribonucleotide
  modified_base 46: mod_base = OTHER; note = 2'-O-methyl ribonucleotide
  modified_base 48: mod_base = OTHER; note = 2'-O-methyl ribonucleotide
  modified_base 50: mod_base = OTHER; note = 2'-O-methyl ribonucleotide
  modified_base 52: mod_base = OTHER; note = 2'-O-methyl ribonucleotide
  modified_base 53: mod_base = OTHER; note = 2'-O-methyl ribonucleotide
  modified_base 54: mod_base = OTHER; note = 2'-O-methyl ribonucleotide
  modified_base 57: mod_base = OTHER; note = 2'-O-methyl ribonucleotide
  modified_base 61: mod_base = OTHER; note = 2'-O-methyl ribonucleotide
  modified_base 66: mod_base = OTHER; note = 2'-O-methyl ribonucleotide
  modified_base 67: mod_base = OTHER; note = 2'-O-methyl ribonucleotide
  modified_base 70: mod_base = OTHER; note = 2'-O-methyl ribonucleotide
  modified_base 71: mod_base = OTHER; note = 2'-O-methyl ribonucleotide
  modified_base 72: mod_base = OTHER; note = 2'-O-methyl ribonucleotide
  modified_base 74: mod_base = OTHER; note = 2'-O-methyl ribonucleotide
  modified_base 75: mod_base = OTHER; note = 2'-O-methyl ribonucleotide
  modified_base 76: mod_base = OTHER; note = 2'-O-methyl ribonucleotide
  modified_base 77: mod_base = OTHER; note = 2'-O-methyl ribonucleotide
  modified_base 78: mod_base = OTHER; note = 2'-O-methyl ribonucleotide
  modified_base 79: mod_base = OTHER; note = 2'-O-methyl ribonucleotide
  modified_base 80: mod_base = OTHER; note = 2'-O-methyl ribonucleotide
  modified_base 82: mod_base = OTHER; note = 2'-O-methyl ribonucleotide
  modified_base 83: mod_base = OTHER; note = 2'-O-methyl ribonucleotide
  modified_base 84: mod_base = OTHER; note = 2'-O-methyl ribonucleotide
  modified_base 85: mod_base = OTHER; note = 2'-O-methyl ribonucleotide
  modified_base 86: mod_base = OTHER; note = 2'-O-methyl ribonucleotide
  modified_base 87: mod_base = OTHER; note = 2'-O-methyl ribonucleotide
  modified_base 89: mod_base = OTHER; note = 2'-O-methyl ribonucleotide
  modified_base 92: mod_base = OTHER; note = 2'-O-methyl ribonucleotide
  modified_base 93: mod_base = OTHER; note = 2'-O-methyl ribonucleotide
  modified_base 94: mod_base = OTHER; note = 2'-O-methyl ribonucleotide
  modified_base 95: mod_base = OTHER; note = 2'-O-methyl ribonucleotide
  modified_base 96: mod_base = OTHER; note = 2'-O-methyl ribonucleotide
  modified_base 97: mod_base = OTHER; note = 2'-O-methyl ribonucleotide
  modified_base 98: mod_base = OTHER; note = 2'-O-methyl ribonucleotide
  modified_base 99: mod_base = OTHER; note = 2'-O-methyl ribonucleotide
  modified_base 100: mod_base = OTHER; note = 2'-O-methyl ribonucleotide
  modified_base 1..3: mod_base = OTHER; note = phosphorothioate linkage
  modified_base 25..26: mod_base = OTHER; note = phosphorothioate linkage
  modified_base 45..46: mod_base = OTHER; note = phosphorothioate linkage
  modified_base 64..65: mod_base = OTHER; note = phosphorothioate linkage
  modified_base 98..100: mod_base = OTHER; note = phosphorothioate linkage

SEQ ID NO: 2448 - RNA, 100 nt, synthetic construct; identical to SEQ ID NO: 55
  source 1..100: mol_type = other RNA
  modified_base 1: mod_base = OTHER; note = 2'-O-methyl ribonucleotide
  modified_base 2: mod_base = OTHER; note = 2'-O-methyl ribonucleotide
  modified_base 3: mod_base = OTHER; note = 2'-O-methyl ribonucleotide
  modified_base 21: mod_base = OTHER; note = 2'-O-methyl ribonucleotide
  modified_base 28: mod_base = OTHER; note = 2'-O-methyl ribonucleotide
  modified_base 29: mod_base = OTHER; note = 2'-O-methyl ribonucleotide
  modified_base 30: mod_base = OTHER; note = 2'-O-methyl ribonucleotide
  modified_base 31: mod_base = OTHER; note = 2'-O-methyl ribonucleotide
  modified_base 32: mod_base = OTHER; note = 2'-O-methyl ribonucleotide
  modified_base 33: mod_base = OTHER; note = 2'-O-methyl ribonucleotide
  modified_base 34: mod_base = OTHER; note = 2'-O-methyl ribonucleotide
  modified_base 35: mod_base = OTHER; note = 2'-O-methyl ribonucleotide
  modified_base 36: mod_base = OTHER; note = 2'-O-methyl ribonucleotide
  modified_base 37: mod_base = OTHER; note = 2'-O-methyl ribonucleotide
  modified_base 38: mod_base = OTHER; note = 2'-O-methyl ribonucleotide
  modified_base 39: mod_base = OTHER; note = 2'-O-methyl ribonucleotide
  modified_base 40: mod_base = OTHER; note = 2'-O-methyl ribonucleotide
  modified_base 41: mod_base = OTHER; note = 2'-O-methyl ribonucleotide
  modified_base 42: mod_base = OTHER; note = 2'-O-methyl ribonucleotide
  modified_base 46: mod_base = OTHER; note = 2'-O-methyl ribonucleotide
  modified_base 48: mod_base = OTHER; note = 2'-O-methyl ribonucleotide
  modified_base 50: mod_base = OTHER; note = 2'-O-methyl ribonucleotide
  modified_base 52: mod_base = OTHER; note = 2'-O-methyl ribonucleotide
  modified_base 53: mod_base = OTHER; note = 2'-O-methyl ribonucleotide
  modified_base 54: mod_base = OTHER; note = 2'-O-methyl ribonucleotide
  modified_base 55: mod_base = OTHER; note = 2'-O-methyl ribonucleotide
  modified_base 56: mod_base = OTHER; note = 2'-O-methyl ribonucleotide
  modified_base 57: mod_base = OTHER; note = 2'-O-methyl ribonucleotide
  modified_base 60: mod_base = OTHER; note = 2'-O-methyl ribonucleotide
  modified_base 61: mod_base = OTHER; note = 2'-O-methyl ribonucleotide
  modified_base 66: mod_base = OTHER; note = 2'-O-methyl ribonucleotide
  modified_base 67: mod_base = OTHER; note = 2'-O-methyl ribonucleotide
  modified_base 70: mod_base = OTHER; note = 2'-O-methyl ribonucleotide
  modified_base 71: mod_base = OTHER; note = 2'-O-methyl ribonucleotide
  modified_base 72: mod_base = OTHER; note = 2'-O-methyl ribonucleotide
  modified_base 74: mod_base = OTHER; note = 2'-O-methyl ribonucleotide
  modified_base 75: mod_base = OTHER; note = 2'-O-methyl ribonucleotide
  modified_base 76: mod_base = OTHER; note = 2'-O-methyl ribonucleotide
  modified_base 77: mod_base = OTHER; note = 2'-O-methyl ribonucleotide
  modified_base 78: mod_base = OTHER; note = 2'-O-methyl ribonucleotide
  modified_base 79: mod_base = OTHER; note = 2'-O-methyl ribonucleotide
  modified_base 80: mod_base = OTHER; note = 2'-O-methyl ribonucleotide
  modified_base 82: mod_base = OTHER; note = 2'-O-methyl ribonucleotide
  modified_base 83: mod_base = OTHER; note = 2'-O-methyl ribonucleotide
  modified_base 84: mod_base = OTHER; note = 2'-O-methyl ribonucleotide
  modified_base 85: mod_base = OTHER; note = 2'-O-methyl ribonucleotide
  modified_base 86: mod_base = OTHER; note = 2'-O-methyl ribonucleotide
  modified_base 87: mod_base = OTHER; note = 2'-O-methyl ribonucleotide
  modified_base 89: mod_base = OTHER; note = 2'-O-methyl ribonucleotide
  modified_base 92: mod_base = OTHER; note = 2'-O-methyl ribonucleotide
  modified_base 93: mod_base = OTHER; note = 2'-O-methyl ribonucleotide
  modified_base 94: mod_base = OTHER; note = 2'-O-methyl ribonucleotide
  modified_base 95: mod_base = OTHER; note = 2'-O-methyl ribonucleotide
  modified_base 96: mod_base = OTHER; note = 2'-O-methyl ribonucleotide
  modified_base 97: mod_base = OTHER; note = 2'-O-methyl ribonucleotide
  modified_base 98: mod_base = OTHER; note = 2'-O-methyl ribonucleotide
  modified_base 99: mod_base = OTHER; note = 2'-O-methyl ribonucleotide
  modified_base 100: mod_base = OTHER; note = 2'-O-methyl ribonucleotide
  modified_base 1..3: mod_base = OTHER; note = phosphorothioate linkage
  modified_base 25..26: mod_base = OTHER; note = phosphorothioate linkage
  modified_base 45..46: mod_base = OTHER; note = phosphorothioate linkage
  modified_base 64..65: mod_base = OTHER; note = phosphorothioate linkage
  modified_base 98..100: mod_base = OTHER; note = phosphorothioate linkage

SEQ ID NO: 2449 - RNA, 100 nt, synthetic construct; identical to SEQ ID NO: 55
  source 1..100: mol_type = other RNA
  modified_base 1: mod_base = OTHER; note = 2'-O-methyl ribonucleotide
  modified_base 2: mod_base = OTHER; note = 2'-O-methyl ribonucleotide
  modified_base 3: mod_base = OTHER; note = 2'-O-methyl ribonucleotide
  modified_base 21: mod_base = OTHER; note = 2'-O-methyl ribonucleotide
  modified_base 28: mod_base = OTHER; note = 2'-O-methyl ribonucleotide
  modified_base 29: mod_base = OTHER; note = 2'-O-methyl ribonucleotide
  modified_base 30: mod_base = OTHER; note = 2'-O-methyl ribonucleotide
  modified_base 31: mod_base = OTHER; note = 2'-O-methyl ribonucleotide
  modified_base 32: mod_base = OTHER; note = 2'-O-methyl ribonucleotide
  modified_base 33: mod_base = OTHER; note = 2'-O-methyl ribonucleotide
  modified_base 34: mod_base = OTHER; note = 2'-O-methyl ribonucleotide
  modified_base 35: mod_base = OTHER; note = 2'-O-methyl ribonucleotide
  modified_base 36: mod_base = OTHER; note = 2'-O-methyl ribonucleotide
  modified_base 37: mod_base = OTHER; note = 2'-O-methyl ribonucleotide
  modified_base 38: mod_base = OTHER; note = 2'-O-methyl ribonucleotide
  modified_base 39: mod_base = OTHER; note = 2'-O-methyl ribonucleotide
  modified_base 40: mod_base = OTHER; note = 2'-O-methyl ribonucleotide
  modified_base 41: mod_base = OTHER; note = 2'-O-methyl ribonucleotide
  modified_base 42: mod_base = OTHER; note = 2'-O-methyl ribonucleotide
  modified_base 46: mod_base = OTHER; note = 2'-O-methyl ribonucleotide
  modified_base 48: mod_base = OTHER; note = 2'-O-methyl ribonucleotide
  modified_base 50: mod_base = OTHER; note = 2'-O-methyl ribonucleotide
  modified_base 52: mod_base = OTHER; note = 2'-O-methyl ribonucleotide
  modified_base 53: mod_base = OTHER; note = 2'-O-methyl ribonucleotide
  modified_base 54: mod_base = OTHER; note = 2'-O-methyl ribonucleotide
  modified_base 57: mod_base = OTHER; note = 2'-O-methyl ribonucleotide
  modified_base 61: mod_base = OTHER; note = 2'-O-methyl ribonucleotide
  modified_base 66: mod_base = OTHER; note = 2'-O-methyl ribonucleotide
  modified_base 67: mod_base = OTHER; note = 2'-O-methyl ribonucleotide
  modified_base 70: mod_base = OTHER; note = 2'-O-methyl ribonucleotide
  modified_base 71: mod_base = OTHER; note = 2'-O-methyl ribonucleotide
  modified_base 72: mod_base = OTHER; note = 2'-O-methyl ribonucleotide
  modified_base 73: mod_base = OTHER; note = 2'-O-methyl ribonucleotide
  modified_base 74: mod_base = OTHER; note = 2'-O-methyl ribonucleotide
  modified_base 75: mod_base = OTHER; note = 2'-O-methyl ribonucleotide
  modified_base 76: mod_base = OTHER; note = 2'-O-methyl ribonucleotide
  modified_base 77: mod_base = OTHER; note = 2'-O-methyl ribonucleotide
  modified_base 78: mod_base = OTHER; note = 2'-O-methyl ribonucleotide
  modified_base 79: mod_base = OTHER; note = 2'-O-methyl ribonucleotide
  modified_base 80: mod_base = OTHER; note = 2'-O-methyl ribonucleotide
  modified_base 82: mod_base = OTHER; note = 2'-O-methyl ribonucleotide
  modified_base 83: mod_base = OTHER; note = 2'-O-methyl ribonucleotide
  modified_base 84: mod_base = OTHER; note = 2'-O-methyl ribonucleotide
  modified_base 85: mod_base = OTHER; note = 2'-O-methyl ribonucleotide
  modified_base 86: mod_base = OTHER; note = 2'-O-methyl ribonucleotide
  modified_base 87: mod_base = OTHER; note = 2'-O-methyl ribonucleotide
  modified_base 89: mod_base = OTHER; note = 2'-O-methyl ribonucleotide
  modified_base 92: mod_base = OTHER; note = 2'-O-methyl ribonucleotide
  modified_base 93: mod_base = OTHER; note = 2'-O-methyl ribonucleotide
  modified_base 94: mod_base = OTHER; note = 2'-O-methyl ribonucleotide
  modified_base 95: mod_base = OTHER; note = 2'-O-methyl ribonucleotide
  modified_base 96: mod_base = OTHER; note = 2'-O-methyl ribonucleotide
  modified_base 97: mod_base = OTHER; note = 2'-O-methyl ribonucleotide
  modified_base 98: mod_base = OTHER; note = 2'-O-methyl ribonucleotide
  modified_base 99: mod_base = OTHER; note = 2'-O-methyl ribonucleotide
  modified_base 100: mod_base = OTHER; note = 2'-O-methyl ribonucleotide
  modified_base 1..3: mod_base = OTHER; note = phosphorothioate linkage
  modified_base 25..26: mod_base = OTHER; note = phosphorothioate linkage
  modified_base 45..46: mod_base = OTHER; note = phosphorothioate linkage
  modified_base 64..65: mod_base = OTHER; note = phosphorothioate linkage
  modified_base 98..100: mod_base = OTHER; note = phosphorothioate linkage

SEQ ID NO: 2450 - RNA, 100 nt, synthetic construct; identical to SEQ ID NO: 55
  source 1..100: mol_type = other RNA
  modified_base 1: mod_base = OTHER; note = 2'-O-methyl ribonucleotide
  modified_base 2: mod_base = OTHER; note = 2'-O-methyl ribonucleotide
  modified_base 3: mod_base = OTHER; note = 2'-O-methyl ribonucleotide
  modified_base 21: mod_base = OTHER; note = 2'-O-methyl ribonucleotide
  modified_base 28: mod_base = OTHER; note = 2'-O-methyl ribonucleotide
  modified_base 29: mod_base = OTHER; note = 2'-O-methyl ribonucleotide
  modified_base 30: mod_base = OTHER; note = 2'-O-methyl ribonucleotide
  modified_base 31: mod_base = OTHER; note = 2'-O-methyl ribonucleotide
  modified_base 32: mod_base = OTHER; note = 2'-O-methyl ribonucleotide
  modified_base 33: mod_base = OTHER; note = 2'-O-methyl ribonucleotide
  modified_base 34: mod_base = OTHER; note = 2'-O-methyl ribonucleotide
  modified_base 35: mod_base = OTHER; note = 2'-O-methyl ribonucleotide
  modified_base 36: mod_base = OTHER; note = 2'-O-methyl ribonucleotide
  modified_base 37: mod_base = OTHER; note = 2'-O-methyl ribonucleotide
  modified_base 38: mod_base = OTHER; note = 2'-O-methyl ribonucleotide
  modified_base 39: mod_base = OTHER; note = 2'-O-methyl ribonucleotide
  modified_base 40: mod_base = OTHER; note = 2'-O-methyl ribonucleotide
  modified_base 41: mod_base = OTHER; note = 2'-O-methyl ribonucleotide
  modified_base 42: mod_base = OTHER; note = 2'-O-methyl ribonucleotide
  modified_base 46: mod_base = OTHER; note = 2'-O-methyl ribonucleotide
  modified_base 48: mod_base = OTHER; note = 2'-O-methyl ribonucleotide
  modified_base 50: mod_base = OTHER; note = 2'-O-methyl ribonucleotide
  modified_base 52: mod_base = OTHER; note = 2'-O-methyl ribonucleotide
  modified_base 53: mod_base = OTHER; note = 2'-O-methyl ribonucleotide
  modified_base 54: mod_base = OTHER; note = 2'-O-methyl ribonucleotide
  modified_base 57: mod_base = OTHER; note = 2'-O-methyl ribonucleotide
  modified_base 61: mod_base = OTHER; note = 2'-O-methyl ribonucleotide
  modified_base 66: mod_base = OTHER; note = 2'-O-methyl ribonucleotide
  modified_base 67: mod_base = OTHER; note = 2'-O-methyl ribonucleotide
  modified_base 70: mod_base = OTHER; note = 2'-O-methyl ribonucleotide
  modified_base 71: mod_base = OTHER; note = 2'-O-methyl ribonucleotide
  modified_base 72: mod_base = OTHER; note = 2'-O-methyl ribonucleotide
  modified_base 73: mod_base = OTHER; note = 2'-O-methyl ribonucleotide
  modified_base 74: mod_base = OTHER; note = 2'-O-methyl ribonucleotide
  modified_base 75: mod_base = OTHER; note = 2'-O-methyl ribonucleotide
  modified_base 76: mod_base = OTHER; note = 2'-O-methyl ribonucleotide
  modified_base 77: mod_base = OTHER; note = 2'-O-methyl ribonucleotide
  modified_base 78: mod_base = OTHER; note = 2'-O-methyl ribonucleotide
  modified_base 79: mod_base = OTHER; note = 2'-O-methyl ribonucleotide
  modified_base 80: mod_base = OTHER; note = 2'-O-methyl ribonucleotide
  modified_base 82: mod_base = OTHER; note = 2'-O-methyl ribonucleotide
  modified_base 83: mod_base = OTHER; note = 2'-O-methyl ribonucleotide
  modified_base 84: mod_base = OTHER; note = 2'-O-methyl ribonucleotide
  modified_base 85: mod_base = OTHER; note = 2'-O-methyl ribonucleotide
  modified_base 86: mod_base = OTHER; note = 2'-O-methyl ribonucleotide
  modified_base 87: mod_base = OTHER; note = 2'-O-methyl ribonucleotide
  modified_base 89: mod_base = OTHER; note = 2'-O-methyl ribonucleotide
  modified_base 91: mod_base = OTHER; note = 2'-O-methyl ribonucleotide
  modified_base 92: mod_base = OTHER; note = 2'-O-methyl ribonucleotide
  modified_base 93: mod_base = OTHER; note = 2'-O-methyl ribonucleotide
  modified_base 94: mod_base = OTHER; note = 2'-O-methyl ribonucleotide
  modified_base 95: mod_base = OTHER; note = 2'-O-methyl ribonucleotide
  modified_base 96: mod_base = OTHER; note = 2'-O-methyl ribonucleotide
  modified_base 97: mod_base = OTHER; note = 2'-O-methyl ribonucleotide
  modified_base 98: mod_base = OTHER; note = 2'-O-methyl ribonucleotide
  modified_base 99: mod_base = OTHER; note = 2'-O-methyl ribonucleotide
  modified_base 100: mod_base = OTHER; note = 2'-O-methyl ribonucleotide
  modified_base 1..3: mod_base = OTHER; note = phosphorothioate linkage
  modified_base 25..26: mod_base = OTHER; note = phosphorothioate linkage
  modified_base 45..46: mod_base = OTHER; note = phosphorothioate linkage
  modified_base 64..65: mod_base = OTHER; note = phosphorothioate linkage
  modified_base 98..100: mod_base = OTHER; note = phosphorothioate linkage

SEQ ID NO: 2451 - RNA, 100 nt, synthetic construct; identical to SEQ ID NO: 55
  source 1..100: mol_type = other RNA
  modified_base 1: mod_base = OTHER; note = 2'-O-methyl ribonucleotide
  modified_base 2: mod_base = OTHER; note = 2'-O-methyl ribonucleotide
  modified_base 3: mod_base = OTHER; note = 2'-O-methyl ribonucleotide
  modified_base 21: mod_base = OTHER; note = 2'-O-methyl ribonucleotide
  modified_base 28: mod_base = OTHER; note = 2'-O-methyl ribonucleotide
  modified_base 29: mod_base = OTHER; note = 2'-O-methyl ribonucleotide
  modified_base 30: mod_base = OTHER; note = 2'-O-methyl ribonucleotide
  modified_base 31: mod_base = OTHER; note = 2'-O-methyl ribonucleotide
  modified_base 32: mod_base = OTHER; note = 2'-O-methyl ribonucleotide
  modified_base 34: mod_base = OTHER; note = 2'-O-methyl ribonucleotide
  modified_base 35: mod_base = OTHER; note = 2'-O-methyl ribonucleotide
  modified_base 36: mod_base = OTHER; note = 2'-O-methyl ribonucleotide
  modified_base 37: mod_base = OTHER; note = 2'-O-methyl ribonucleotide
  modified_base 38: mod_base = OTHER; note = 2'-O-methyl ribonucleotide
  modified_base 39: mod_base = OTHER; note = 2'-O-methyl ribonucleotide
  modified_base 40: mod_base = OTHER; note = 2'-O-methyl ribonucleotide
  modified_base 41: mod_base = OTHER; note = 2'-O-methyl ribonucleotide
  modified_base 42: mod_base = OTHER; note = 2'-O-methyl ribonucleotide
  modified_base 46: mod_base = OTHER; note = 2'-O-methyl ribonucleotide
  modified_base 48: mod_base = OTHER; note = 2'-O-methyl ribonucleotide
  modified_base 50: mod_base = OTHER; note = 2'-O-methyl ribonucleotide
  modified_base 52: mod_base = OTHER; note = 2'-O-methyl ribonucleotide
  modified_base 53: mod_base = OTHER; note = 2'-O-methyl ribonucleotide
  modified_base 54: mod_base = OTHER; note = 2'-O-methyl ribonucleotide
  modified_base 57: mod_base = OTHER; note = 2'-O-methyl ribonucleotide
  modified_base 61: mod_base = OTHER; note = 2'-O-methyl ribonucleotide
  modified_base 66: mod_base = OTHER; note = 2'-O-methyl ribonucleotide
  modified_base 67: mod_base = OTHER; note = 2'-O-methyl ribonucleotide
  modified_base 70: mod_base = OTHER; note = 2'-O-methyl ribonucleotide
  modified_base 71: mod_base = OTHER; note = 2'-O-methyl ribonucleotide
  modified_base 72: mod_base = OTHER; note = 2'-O-methyl ribonucleotide
  modified_base 73: mod_base = OTHER; note = 2'-O-methyl ribonucleotide
  modified_base 74: mod_base = OTHER; note = 2'-O-methyl ribonucleotide
  modified_base 75: mod_base = OTHER; note = 2'-O-methyl ribonucleotide
  modified_base 76: mod_base = OTHER; note = 2'-O-methyl ribonucleotide
  modified_base 77: mod_base = OTHER; note = 2'-O-methyl ribonucleotide
  modified_base 78: mod_base = OTHER; note = 2'-O-methyl ribonucleotide
  modified_base 79: mod_base = OTHER; note = 2'-O-methyl ribonucleotide
  modified_base 80: mod_base = OTHER; note = 2'-O-methyl ribonucleotide
  modified_base 82: mod_base = OTHER; note = 2'-O-methyl ribonucleotide
  modified_base 83: mod_base = OTHER; note = 2'-O-methyl ribonucleotide
  modified_base 84: mod_base = OTHER; note = 2'-O-methyl ribonucleotide
  modified_base 85: mod_base = OTHER; note = 2'-O-methyl ribonucleotide
  modified_base 86: mod_base = OTHER; note = 2'-O-methyl ribonucleotide
  modified_base 87: mod_base = OTHER; note = 2'-O-methyl ribonucleotide
  modified_base 89: mod_base = OTHER; note = 2'-O-methyl ribonucleotide
  modified_base 92: mod_base = OTHER; note = 2'-O-methyl ribonucleotide
  modified_base 93: mod_base = OTHER; note = 2'-O-methyl ribonucleotide
  modified_base 94: mod_base = OTHER; note = 2'-O-methyl ribonucleotide
  modified_base 95: mod_base = OTHER; note = 2'-O-methyl ribonucleotide
  modified_base 96: mod_base = OTHER; note = 2'-O-methyl ribonucleotide
  modified_base 97: mod_base = OTHER; note = 2'-O-methyl ribonucleotide
  modified_base 98: mod_base = OTHER; note = 2'-O-methyl ribonucleotide
  modified_base 99: mod_base = OTHER; note = 2'-O-methyl ribonucleotide
  modified_base 100: mod_base = OTHER; note = 2'-O-methyl ribonucleotide
  modified_base 1..3: mod_base = OTHER; note = phosphorothioate linkage
  modified_base 25..26: mod_base = OTHER; note = phosphorothioate linkage
  modified_base 45..46: mod_base = OTHER; note = phosphorothioate linkage
  modified_base 64..65: mod_base = OTHER; note = phosphorothioate linkage
  modified_base 98..100: mod_base = OTHER; note = phosphorothioate linkage

SEQ ID NO: 2452 - RNA, 100 nt, synthetic construct; identical to SEQ ID NO: 55
  source 1..100: mol_type = other RNA
  modified_base 1: mod_base = OTHER; note = 2'-O-methyl ribonucleotide
  modified_base 2: mod_base = OTHER; note = 2'-O-methyl ribonucleotide
  modified_base 3: mod_base = OTHER; note = 2'-O-methyl ribonucleotide
  modified_base 21: mod_base = OTHER; note = 2'-O-methyl ribonucleotide
  modified_base 28: mod_base = OTHER; note = 2'-O-methyl ribonucleotide
  modified_base 29: mod_base = OTHER; note = 2'-O-methyl ribonucleotide
  modified_base 30: mod_base = OTHER; note = 2'-O-methyl ribonucleotide
  modified_base 31: mod_base = OTHER; note = 2'-O-methyl ribonucleotide
  modified_base 32: mod_base = OTHER; note = 2'-O-methyl ribonucleotide
  modified_base 34: mod_base = OTHER; note = 2'-O-methyl ribonucleotide
  modified_base 35: mod_base = OTHER; note = 2'-O-methyl ribonucleotide
  modified_base 36: mod_base = OTHER; note = 2'-O-methyl ribonucleotide
  modified_base 37: mod_base = OTHER; note = 2'-O-methyl ribonucleotide
  modified_base 38: mod_base = OTHER; note = 2'-O-methyl ribonucleotide
  modified_base 39: mod_base = OTHER; note = 2'-O-methyl ribonucleotide
  modified_base 40: mod_base = OTHER; note = 2'-O-methyl ribonucleotide
  modified_base 41: mod_base = OTHER; note = 2'-O-methyl ribonucleotide
  modified_base 42: mod_base = OTHER; note = 2'-O-methyl ribonucleotide
  modified_base 46: mod_base = OTHER; note = 2'-O-methyl ribonucleotide
  modified_base 48: mod_base = OTHER; note = 2'-O-methyl ribonucleotide
  modified_base 50: mod_base = OTHER; note = 2'-O-methyl ribonucleotide
  modified_base 52: mod_base = OTHER; note = 2'-O-methyl ribonucleotide
  modified_base 53: mod_base = OTHER; note = 2'-O-methyl ribonucleotide
  modified_base 54: mod_base = OTHER; note = 2'-O-methyl ribonucleotide
  modified_base 57: mod_base = OTHER; note = 2'-O-methyl ribonucleotide
  modified_base 61: mod_base = OTHER; note = 2'-O-methyl ribonucleotide
  modified_base 66: mod_base = OTHER; note = 2'-O-methyl ribonucleotide
  modified_base 67: mod_base = OTHER; note = 2'-O-methyl ribonucleotide
  modified_base 70: mod_base = OTHER; note = 2'-O-methyl ribonucleotide
  modified_base 71: mod_base = OTHER; note = 2'-O-methyl ribonucleotide
  modified_base 72: mod_base = OTHER; note = 2'-O-methyl ribonucleotide
  modified_base 73: mod_base = OTHER; note = 2'-O-methyl ribonucleotide
  modified_base 74: mod_base = OTHER; note = 2'-O-methyl ribonucleotide
  modified_base 75: mod_base = OTHER; note = 2'-O-methyl ribonucleotide
  modified_base 76: mod_base = OTHER; note = 2'-O-methyl ribonucleotide
  modified_base 77: mod_base = OTHER; note = 2'-O-methyl ribonucleotide
  modified_base 78: mod_base = OTHER; note = 2'-O-methyl ribonucleotide
  modified_base 79: mod_base = OTHER; note = 2'-O-methyl ribonucleotide
  modified_base 80: mod_base = OTHER; note = 2'-O-methyl ribonucleotide
  modified_base 82: mod_base = OTHER; note = 2'-O-methyl ribonucleotide
  modified_base 83: mod_base = OTHER; note = 2'-O-methyl ribonucleotide
  modified_base 84: mod_base = OTHER; note = 2'-O-methyl ribonucleotide
  modified_base 85: mod_base = OTHER; note = 2'-O-methyl ribonucleotide
  modified_base 86: mod_base = OTHER; note = 2'-O-methyl ribonucleotide
  modified_base 87: mod_base = OTHER; note = 2'-O-methyl ribonucleotide
  modified_base 89: mod_base = OTHER; note = 2'-O-methyl ribonucleotide
  modified_base 91: mod_base = OTHER; note = 2'-O-methyl ribonucleotide
  modified_base 92: mod_base = OTHER; note = 2'-O-methyl ribonucleotide
  modified_base 93: mod_base = OTHER; note = 2'-O-methyl ribonucleotide
  modified_base 94: mod_base = OTHER; note = 2'-O-methyl ribonucleotide
  modified_base 95: mod_base = OTHER; note = 2'-O-methyl ribonucleotide
  modified_base 96: mod_base = OTHER; note = 2'-O-methyl ribonucleotide
  modified_base 97: mod_base = OTHER; note = 2'-O-methyl ribonucleotide
  modified_base 98: mod_base = OTHER; note = 2'-O-methyl ribonucleotide
  modified_base 99: mod_base = OTHER; note = 2'-O-methyl ribonucleotide
  modified_base 100: mod_base = OTHER; note = 2'-O-methyl ribonucleotide
  modified_base 1..3: mod_base = OTHER; note = phosphorothioate linkage
  modified_base 25..26: mod_base = OTHER; note = phosphorothioate linkage
  modified_base 45..46: mod_base = OTHER; note = phosphorothioate linkage
  modified_base 64..65: mod_base = OTHER; note = phosphorothioate linkage
  modified_base 98..100: mod_base = OTHER; note = phosphorothioate linkage

SEQ ID NO: 2453 - RNA, 100 nt, synthetic construct; identical to SEQ ID NO: 55
  source 1..100: mol_type = other RNA
  modified_base 1: mod_base = OTHER; note = 2'-O-methyl ribonucleotide
  modified_base 2: mod_base = OTHER; note = 2'-O-methyl ribonucleotide
  modified_base 3: mod_base = OTHER; note = 2'-O-methyl ribonucleotide
  modified_base 21: mod_base = OTHER; note = 2'-O-methyl ribonucleotide
  modified_base 28: mod_base = OTHER; note = 2'-O-methyl ribonucleotide
  modified_base 29: mod_base = OTHER; note = 2'-O-methyl ribonucleotide
  modified_base 30: mod_base = OTHER; note = 2'-O-methyl ribonucleotide
  modified_base 31: mod_base = OTHER; note = 2'-O-methyl ribonucleotide
  modified_base 32: mod_base = OTHER; note = 2'-O-methyl ribonucleotide
  modified_base 34: mod_base = OTHER; note = 2'-O-methyl ribonucleotide
  modified_base 35: mod_base = OTHER; note = 2'-O-methyl ribonucleotide
  modified_base 36: mod_base = OTHER; note = 2'-O-methyl ribonucleotide
  modified_base 37: mod_base = OTHER; note = 2'-O-methyl ribonucleotide
  modified_base 38: mod_base = OTHER; note = 2'-O-methyl ribonucleotide
  modified_base 39: mod_base = OTHER; note = 2'-O-methyl ribonucleotide
  modified_base 40: mod_base = OTHER; note = 2'-O-methyl ribonucleotide
  modified_base 41: mod_base = OTHER; note = 2'-O-methyl ribonucleotide
  modified_base 42: mod_base = OTHER; note = 2'-O-methyl ribonucleotide
  modified_base 46: mod_base = OTHER; note = 2'-O-methyl ribonucleotide
  modified_base 48: mod_base = OTHER; note = 2'-O-methyl ribonucleotide
  modified_base 50: mod_base = OTHER; note = 2'-O-methyl ribonucleotide
  modified_base 52: mod_base = OTHER; note = 2'-O-methyl ribonucleotide
  modified_base 53: mod_base = OTHER; note = 2'-O-methyl ribonucleotide
  modified_base 54: mod_base = OTHER; note = 2'-O-methyl ribonucleotide
  modified_base 55: mod_base = OTHER; note = 2'-O-methyl ribonucleotide
  modified_base 56: mod_base = OTHER; note = 2'-O-methyl ribonucleotide
  modified_base 57: mod_base = OTHER; note = 2'-O-methyl ribonucleotide
  modified_base 60: mod_base = OTHER; note = 2'-O-methyl ribonucleotide
  modified_base 61: mod_base = OTHER; note = 2'-O-methyl ribonucleotide
  modified_base 66: mod_base = OTHER; note = 2'-O-methyl ribonucleotide
  modified_base 67: mod_base = OTHER; note = 2'-O-methyl ribonucleotide
  modified_base 70: mod_base = OTHER; note = 2'-O-methyl ribonucleotide
  modified_base 71: mod_base = OTHER; note = 2'-O-methyl ribonucleotide
  modified_base 72: mod_base = OTHER; note = 2'-O-methyl ribonucleotide
  modified_base 74: mod_base = OTHER; note = 2'-O-methyl ribonucleotide
  modified_base 75: mod_base = OTHER; note = 2'-O-methyl ribonucleotide
  modified_base 76: mod_base = OTHER; note = 2'-O-methyl ribonucleotide
  modified_base 77: mod_base = OTHER; note = 2'-O-methyl ribonucleotide
  modified_base 78: mod_base = OTHER; note = 2'-O-methyl ribonucleotide
  modified_base 79: mod_base = OTHER; note = 2'-O-methyl ribonucleotide
  modified_base 80: mod_base = OTHER; note = 2'-O-methyl ribonucleotide
  modified_base 82: mod_base = OTHER; note = 2'-O-methyl ribonucleotide
  modified_base 83: mod_base = OTHER; note = 2'-O-methyl ribonucleotide
  modified_base 84: mod_base = OTHER; note = 2'-O-methyl ribonucleotide
  modified_base 85: mod_base = OTHER; note = 2'-O-methyl ribonucleotide
  modified_base 86: mod_base = OTHER; note = 2'-O-methyl ribonucleotide
  modified_base 87: mod_base = OTHER; note = 2'-O-methyl ribonucleotide
  modified_base 89: mod_base = OTHER; note = 2'-O-methyl ribonucleotide
  modified_base 92: mod_base = OTHER; note = 2'-O-methyl ribonucleotide
  modified_base 93: mod_base = OTHER; note = 2'-O-methyl ribonucleotide
  modified_base 94: mod_base = OTHER; note = 2'-O-methyl ribonucleotide
  modified_base 95: mod_base = OTHER; note = 2'-O-methyl ribonucleotide
  modified_base 96: mod_base = OTHER; note = 2'-O-methyl ribonucleotide
  modified_base 97: mod_base = OTHER; note = 2'-O-methyl ribonucleotide
  modified_base 98: mod_base = OTHER; note = 2'-O-methyl ribonucleotide
  modified_base 99: mod_base = OTHER; note = 2'-O-methyl ribonucleotide
  modified_base 100: mod_base = OTHER; note = 2'-O-methyl ribonucleotide
  modified_base 1..3: mod_base = OTHER; note = phosphorothioate linkage
  modified_base 25..26: mod_base = OTHER; note = phosphorothioate linkage
  modified_base 45..46: mod_base = OTHER; note = phosphorothioate linkage
  modified_base 64..65: mod_base = OTHER; note = phosphorothioate linkage
  modified_base 98..100: mod_base = OTHER; note = phosphorothioate linkage

SEQ ID NO: 2454 - RNA, 103 nt, synthetic construct; identical to SEQ ID NO: 1699
  source 1..103: mol_type = other RNA
  modified_base 1: mod_base = OTHER; note = 2'-O-methyl ribonucleotide
  modified_base 2: mod_base = OTHER; note = 2'-O-methyl ribonucleotide
  modified_base 3: mod_base = OTHER; note = 2'-O-methyl ribonucleotide
  modified_base 21: mod_base = OTHER; note = 2'-O-methyl ribonucleotide
  modified_base 28: mod_base = OTHER; note = 2'-O-methyl ribonucleotide
  modified_base 29: mod_base = OTHER; note = 2'-O-methyl ribonucleotide
  modified_base 30: mod_base = OTHER; note = 2'-O-methyl ribonucleotide
  modified_base 31: mod_base = OTHER; note = 2'-O-methyl ribonucleotide
  modified_base 32: mod_base = OTHER; note = 2'-O-methyl ribonucleotide
  modified_base 33: mod_base = OTHER; note = 2'-O-methyl ribonucleotide
  modified_base 34: mod_base = OTHER; note = 2'-O-methyl ribonucleotide
  modified_base 35: mod_base = OTHER; note = 2'-O-methyl ribonucleotide
  modified_base 36: mod_base = OTHER; note = 2'-O-methyl ribonucleotide
  modified_base 37: mod_base = OTHER; note = 2'-O-methyl ribonucleotide
  modified_base 38: mod_base = OTHER; note = 2'-O-methyl ribonucleotide
  modified_base 39: mod_base = OTHER; note = 2'-O-methyl ribonucleotide
  modified_base 40: mod_base = OTHER; note = 2'-O-methyl ribonucleotide
  modified_base 41: mod_base = OTHER; note = 2'-O-methyl ribonucleotide
  modified_base 42: mod_base = OTHER; note = 2'-O-methyl ribonucleotide
  modified_base 46: mod_base = OTHER; note = 2'-O-methyl ribonucleotide
  modified_base 48: mod_base = OTHER; note = 2'-O-methyl ribonucleotide
  modified_base 50: mod_base = OTHER; note = 2'-O-methyl ribonucleotide
  modified_base 52: mod_base = OTHER; note = 2'-O-methyl ribonucleotide
  modified_base 53: mod_base = OTHER; note = 2'-O-methyl ribonucleotide
  modified_base 54: mod_base = OTHER; note = 2'-O-methyl ribonucleotide
  modified_base 55: mod_base = OTHER; note = 2'-O-methyl ribonucleotide
  modified_base 56: mod_base = OTHER; note = 2'-O-methyl ribonucleotide
  modified_base 57: mod_base = OTHER; note = 2'-O-methyl ribonucleotide
  modified_base 60: mod_base = OTHER; note = 2'-O-methyl ribonucleotide
  modified_base 61: mod_base = OTHER; note = 2'-O-methyl ribonucleotide
  modified_base 66: mod_base = OTHER; note = 2'-O-methyl ribonucleotide
  modified_base 67: mod_base = OTHER; note = 2'-O-methyl ribonucleotide
  modified_base 70: mod_base = OTHER; note = 2'-O-methyl ribonucleotide
  modified_base 71: mod_base = OTHER; note = 2'-O-methyl ribonucleotide
  modified_base 72: mod_base = OTHER; note = 2'-O-methyl ribonucleotide
  modified_base 73: mod_base = OTHER; note = 2'-O-methyl ribonucleotide
  modified_base 74: mod_base = OTHER; note = 2'-O-methyl ribonucleotide
  modified_base 75: mod_base = OTHER; note = 2'-O-methyl ribonucleotide
  modified_base 76: mod_base = OTHER; note = 2'-O-methyl ribonucleotide
  modified_base 77: mod_base = OTHER; note = 2'-O-methyl ribonucleotide
  modified_base 78: mod_base = OTHER; note = 2'-O-methyl ribonucleotide
  modified_base 79: mod_base = OTHER; note = 2'-O-methyl ribonucleotide
  modified_base 80: mod_base = OTHER; note = 2'-O-methyl ribonucleotide
  modified_base 81: mod_base = OTHER; note = 2'-O-methyl ribonucleotide
  modified_base 83: mod_base = OTHER; note = 2'-O-methyl ribonucleotide
  modified_base 84: mod_base = OTHER; note = 2'-O-methyl ribonucleotide
  modified_base 85: mod_base = OTHER; note = 2'-O-methyl ribonucleotide
  modified_base 86: mod_base = OTHER; note = 2'-O-methyl ribonucleotide
  modified_base 87: mod_base = OTHER; note = 2'-O-methyl ribonucleotide
  modified_base 88: mod_base = OTHER; note = 2'-O-methyl ribonucleotide
  modified_base 89: mod_base = OTHER; note = 2'-O-methyl ribonucleotide
  modified_base 90: mod_base = OTHER; note = 2'-O-methyl ribonucleotide
  modified_base 91: mod_base = OTHER; note = 2'-O-methyl ribonucleotide
  modified_base 92: mod_base = OTHER; note = 2'-O-methyl ribonucleotide
  modified_base 93: mod_base = OTHER; note = 2'-O-methyl ribonucleotide
  modified_base 94: mod_base = OTHER; note = 2'-O-methyl ribonucleotide
  modified_base 95: mod_base = OTHER; note = 2'-O-methyl ribonucleotide
  modified_base 96: mod_base = OTHER; note = 2'-O-methyl ribonucleotide
  modified_base 97: mod_base = OTHER; note = 2'-O-methyl ribonucleotide
  modified_base 98: mod_base = OTHER; note = 2'-O-methyl ribonucleotide
  modified_base 99: mod_base = OTHER; note = 2'-O-methyl ribonucleotide
  modified_base 100: mod_base = OTHER; note = 2'-O-methyl ribonucleotide
  modified_base 1..4: mod_base = OTHER; note = phosphorothioate linkage
  modified_base 97..100: mod_base = OTHER; note = phosphorothioate linkage

SEQ ID NO: 2455 - RNA, 103 nt, synthetic construct; identical to SEQ ID NO: 1699
  source 1..103: mol_type = other RNA
  modified_base 1: mod_base = OTHER; note = 2'-O-methyl ribonucleotide
  modified_base 2: mod_base = OTHER; note = 2'-O-methyl ribonucleotide
  modified_base 3: mod_base = OTHER; note = 2'-O-methyl ribonucleotide
  modified_base 21: mod_base = OTHER; note = 2'-O-methyl ribonucleotide
  modified_base 28: mod_base = OTHER; note = 2'-O-methyl ribonucleotide
  modified_base 29: mod_base = OTHER; note = 2'-O-methyl ribonucleotide
  modified_base 30: mod_base = OTHER; note = 2'-O-methyl ribonucleotide
  modified_base 31: mod_base = OTHER; note = 2'-O-methyl ribonucleotide
  modified_base 32: mod_base = OTHER; note = 2'-O-methyl ribonucleotide
  modified_base 34: mod_base = OTHER; note = 2'-O-methyl ribonucleotide
  modified_base 35: mod_base = OTHER; note = 2'-O-methyl ribonucleotide
  modified_base 36: mod_base = OTHER; note = 2'-O-methyl ribonucleotide
  modified_base 37: mod_base = OTHER; note = 2'-O-methyl ribonucleotide
  modified_base 38: mod_base = OTHER; note = 2'-O-methyl ribonucleotide
  modified_base 39: mod_base = OTHER; note = 2'-O-methyl ribonucleotide
  modified_base 40: mod_base = OTHER; note = 2'-O-methyl ribonucleotide
  modified_base 41: mod_base = OTHER; note = 2'-O-methyl ribonucleotide
  modified_base 42: mod_base = OTHER; note = 2'-O-methyl ribonucleotide
  modified_base 46: mod_base = OTHER; note = 2'-O-methyl ribonucleotide
  modified_base 48: mod_base = OTHER; note = 2'-O-methyl ribonucleotide
  modified_base 50: mod_base = OTHER; note = 2'-O-methyl ribonucleotide
  modified_base 52: mod_base = OTHER; note = 2'-O-methyl ribonucleotide
  modified_base 53: mod_base = OTHER; note = 2'-O-methyl ribonucleotide
  modified_base 54: mod_base = OTHER; note = 2'-O-methyl ribonucleotide
  modified_base 55: mod_base = OTHER; note = 2'-O-methyl ribonucleotide
  modified_base 56: mod_base = OTHER; note = 2'-O-methyl ribonucleotide
  modified_base 57: mod_base = OTHER; note = 2'-O-methyl ribonucleotide
  modified_base 60: mod_base = OTHER; note = 2'-O-methyl ribonucleotide
  modified_base 61: mod_base = OTHER; note = 2'-O-methyl ribonucleotide
  modified_base 66: mod_base = OTHER; note = 2'-O-methyl ribonucleotide
  modified_base 67: mod_base = OTHER; note = 2'-O-methyl ribonucleotide
  modified_base 70: mod_base = OTHER; note = 2'-O-methyl ribonucleotide
  modified_base 71: mod_base = OTHER; note = 2'-O-methyl ribonucleotide
  modified_base 72: mod_base = OTHER; note = 2'-O-methyl ribonucleotide
  modified_base 74: mod_base = OTHER; note = 2'-O-methyl ribonucleotide
  modified_base 75: mod_base = OTHER; note = 2'-O-methyl ribonucleotide
  modified_base 76: mod_base = OTHER; note = 2'-O-methyl ribonucleotide
  modified_base 77: mod_base = OTHER; note = 2'-O-methyl ribonucleotide
  modified_base 78: mod_base = OTHER; note = 2'-O-methyl ribonucleotide
  modified_base 79: mod_base = OTHER; note = 2'-O-methyl ribonucleotide
  modified_base 80: mod_base = OTHER; note = 2'-O-methyl ribonucleotide
  modified_base 81: mod_base = OTHER; note = 2'-O-methyl ribonucleotide
  modified_base 83: mod_base = OTHER; note = 2'-O-methyl ribonucleotide
  modified_base 84: mod_base = OTHER; note = 2'-O-methyl ribonucleotide
  modified_base 85: mod_base = OTHER; note = 2'-O-methyl ribonucleotide
  modified_base 86: mod_base = OTHER; note = 2'-O-methyl ribonucleotide
  modified_base 87: mod_base = OTHER; note = 2'-O-methyl ribonucleotide
  modified_base 88: mod_base = OTHER; note = 2'-O-methyl ribonucleotide
  modified_base 89: mod_base = OTHER; note = 2'-O-methyl ribonucleotide
  modified_base 90: mod_base = OTHER; note = 2'-O-methyl ribonucleotide
  modified_base 91: mod_base = OTHER; note = 2'-O-methyl ribonucleotide
  modified_base 92: mod_base = OTHER; note = 2'-O-methyl ribonucleotide
  modified_base 93: mod_base = OTHER; note = 2'-O-methyl ribonucleotide
  modified_base 94: mod_base = OTHER; note = 2'-O-methyl ribonucleotide
  modified_base 95: mod_base = OTHER; note = 2'-O-methyl ribonucleotide
  modified_base 96: mod_base = OTHER; note = 2'-O-methyl ribonucleotide
  modified_base 97: mod_base = OTHER; note = 2'-O-methyl ribonucleotide
  modified_base 98: mod_base = OTHER; note = 2'-O-methyl ribonucleotide
  modified_base 99: mod_base = OTHER; note = 2'-O-methyl ribonucleotide
  modified_base 100: mod_base = OTHER; note = 2'-O-methyl ribonucleotide
  modified_base 1..4: mod_base = OTHER; note = phosphorothioate linkage
  modified_base 97..100: mod_base = OTHER; note = phosphorothioate linkage

SEQ ID NO: 2456 - RNA, 103 nt, synthetic construct; identical to SEQ ID NO: 1700
  source 1..103: mol_type = other RNA
  modified_base 1: mod_base = OTHER; note = 2'-O-methyl ribonucleotide
  modified_base 2: mod_base = OTHER; note = 2'-O-methyl ribonucleotide
  modified_base 3: mod_base = OTHER; note = 2'-O-methyl ribonucleotide
  modified_base 21: mod_base = OTHER; note = 2'-O-methyl ribonucleotide
  modified_base 28: mod_base = OTHER; note = 2'-O-methyl ribonucleotide
  modified_base 29: mod_base = OTHER; note = 2'-O-methyl ribonucleotide
  modified_base 30: mod_base = OTHER; note = 2'-O-methyl ribonucleotide
  modified_base 31: mod_base = OTHER; note = 2'-O-methyl ribonucleotide
  modified_base 32: mod_base = OTHER; note = 2'-O-methyl ribonucleotide
  modified_base 33: mod_base = OTHER; note = 2'-O-methyl ribonucleotide
  modified_base 34: mod_base = OTHER; note = 2'-O-methyl ribonucleotide
  modified_base 35: mod_base = OTHER; note = 2'-O-methyl ribonucleotide
  modified_base 36: mod_base = OTHER; note = 2'-O-methyl ribonucleotide
  modified_base 37: mod_base = OTHER; note = 2'-O-methyl ribonucleotide
  modified_base 38: mod_base = OTHER; note = 2'-O-methyl ribonucleotide
  modified_base 39: mod_base = OTHER; note = 2'-O-methyl ribonucleotide
  modified_base 40: mod_base = OTHER; note = 2'-O-methyl ribonucleotide
  modified_base 41: mod_base = OTHER; note = 2'-O-methyl ribonucleotide
  modified_base 42: mod_base = OTHER; note = 2'-O-methyl ribonucleotide
  modified_base 46: mod_base = OTHER; note = 2'-O-methyl ribonucleotide
  modified_base 48: mod_base = OTHER; note = 2'-O-methyl ribonucleotide
  modified_base 50: mod_base = OTHER; note = 2'-O-methyl ribonucleotide
  modified_base 52: mod_base = OTHER; note = 2'-O-methyl ribonucleotide
  modified_base 53: mod_base = OTHER; note = 2'-O-methyl ribonucleotide
  modified_base 54: mod_base = OTHER; note = 2'-O-methyl ribonucleotide
  modified_base 57: mod_base = OTHER; note = 2'-O-methyl ribonucleotide
  modified_base 61: mod_base = OTHER; note = 2'-O-methyl ribonucleotide
  modified_base 66: mod_base = OTHER; note = 2'-O-methyl ribonucleotide
  modified_base 67: mod_base = OTHER; note = 2'-O-methyl ribonucleotide
  modified_base 70: mod_base = OTHER; note = 2'-O-methyl ribonucleotide
  modified_base 71: mod_base = OTHER; note = 2'-O-methyl ribonucleotide
  modified_base 72: mod_base = OTHER; note = 2'-O-methyl ribonucleotide
  modified_base 74: mod_base = OTHER; note = 2'-O-methyl ribonucleotide
  modified_base 75: mod_base = OTHER; note = 2'-O-methyl ribonucleotide
  modified_base 76: mod_base = OTHER; note = 2'-O-methyl ribonucleotide
  modified_base 77: mod_base = OTHER; note = 2'-O-methyl ribonucleotide
  modified_base 78: mod_base = OTHER; note = 2'-O-methyl ribonucleotide
  modified_base 79: mod_base = OTHER; note = 2'-O-methyl ribonucleotide
  modified_base 80: mod_base = OTHER; note = 2'-O-methyl ribonucleotide
  modified_base 82: mod_base = OTHER; note = 2'-O-methyl ribonucleotide
  modified_base 83: mod_base = OTHER; note = 2'-O-methyl ribonucleotide
  modified_base 84: mod_base = OTHER; note = 2'-O-methyl ribonucleotide
  modified_base 85: mod_base = OTHER; note = 2'-O-methyl ribonucleotide
  modified_base 86: mod_base = OTHER; note = 2'-O-methyl ribonucleotide
  modified_base 87: mod_base = OTHER; note = 2'-O-methyl ribonucleotide
  modified_base 89: mod_base = OTHER; note = 2'-O-methyl ribonucleotide
  modified_base 92: mod_base = OTHER; note = 2'-O-methyl ribonucleotide
  modified_base 93: mod_base = OTHER; note = 2'-O-methyl ribonucleotide
  modified_base 94: mod_base = OTHER; note = 2'-O-methyl ribonucleotide
  modified_base 95: mod_base = OTHER; note = 2'-O-methyl ribonucleotide
  modified_base 96: mod_base = OTHER; note = 2'-O-methyl ribonucleotide
  modified_base 97: mod_base = OTHER; note = 2'-O-methyl ribonucleotide
  modified_base 98: mod_base = OTHER; note = 2'-O-methyl ribonucleotide
  modified_base 99: mod_base = OTHER; note = 2'-O-methyl ribonucleotide
  modified_base 100: mod_base = OTHER; note = 2'-O-methyl ribonucleotide
  modified_base 1..4: mod_base = OTHER; note = phosphorothioate linkage
  modified_base 97..100: mod_base = OTHER; note = phosphorothioate linkage

SEQ ID NO: 2457 - RNA, 103 nt, synthetic construct; identical to SEQ ID NO: 1700
  source 1..103: mol_type = other RNA
  modified_base 1: mod_base = OTHER; note = 2'-O-methyl ribonucleotide
  modified_base 2: mod_base = OTHER; note = 2'-O-methyl ribonucleotide
  modified_base 3: mod_base = OTHER; note = 2'-O-methyl ribonucleotide
  modified_base 21: mod_base = OTHER; note = 2'-O-methyl ribonucleotide
  modified_base 28: mod_base = OTHER; note = 2'-O-methyl ribonucleotide
  modified_base 29: mod_base = OTHER; note = 2'-O-methyl ribonucleotide
  modified_base 30: mod_base = OTHER; note = 2'-O-methyl ribonucleotide
  modified_base 31: mod_base = OTHER; note = 2'-O-methyl ribonucleotide
  modified_base 32: mod_base = OTHER; note = 2'-O-methyl ribonucleotide
  modified_base 33: mod_base = OTHER; note = 2'-O-methyl ribonucleotide
  modified_base 34: mod_base = OTHER; note = 2'-O-methyl ribonucleotide
  modified_base 35: mod_base = OTHER; note = 2'-O-methyl ribonucleotide
  modified_base 36: mod_base = OTHER; note = 2'-O-methyl ribonucleotide
  modified_base 37: mod_base = OTHER; note = 2'-O-methyl ribonucleotide
  modified_base 38: mod_base = OTHER; note = 2'-O-methyl ribonucleotide
  modified_base 39: mod_base = OTHER; note = 2'-O-methyl ribonucleotide
  modified_base 40: mod_base = OTHER; note = 2'-O-methyl ribonucleotide
  modified_base 41: mod_base = OTHER; note = 2'-O-methyl ribonucleotide
  modified_base 42: mod_base = OTHER; note = 2'-O-methyl ribonucleotide
  modified_base 46: mod_base = OTHER; note = 2'-O-methyl ribonucleotide
  modified_base 48: mod_base = OTHER; note = 2'-O-methyl ribonucleotide
  modified_base 50: mod_base = OTHER; note = 2'-O-methyl ribonucleotide
  modified_base 52: mod_base = OTHER; note = 2'-O-methyl ribonucleotide
  modified_base 53: mod_base = OTHER; note = 2'-O-methyl ribonucleotide
  modified_base 54: mod_base = OTHER; note = 2'-O-methyl ribonucleotide
  modified_base 55: mod_base = OTHER; note = 2'-O-methyl ribonucleotide
  modified_base 56: mod_base = OTHER; note = 2'-O-methyl ribonucleotide
  modified_base 57: mod_base = OTHER; note = 2'-O-methyl ribonucleotide
  modified_base 60: mod_base = OTHER; note = 2'-O-methyl ribonucleotide
  modified_base 61: mod_base = OTHER; note = 2'-O-methyl ribonucleotide
  modified_base 66: mod_base = OTHER; note = 2'-O-methyl ribonucleotide
  modified_base 67: mod_base = OTHER; note = 2'-O-methyl ribonucleotide
  modified_base 70: mod_base = OTHER; note = 2'-O-methyl ribonucleotide
  modified_base 71: mod_base = OTHER; note = 2'-O-methyl ribonucleotide
  modified_base 72: mod_base = OTHER; note = 2'-O-methyl ribonucleotide
  modified_base 74: mod_base = OTHER; note = 2'-O-methyl ribonucleotide
  modified_base 75: mod_base = OTHER; note = 2'-O-methyl ribonucleotide
  modified_base 76: mod_base = OTHER; note = 2'-O-methyl ribonucleotide
  modified_base 77: mod_base = OTHER; note = 2'-O-methyl ribonucleotide
  modified_base 78: mod_base = OTHER; note = 2'-O-methyl ribonucleotide
  modified_base 79: mod_base = OTHER; note = 2'-O-methyl ribonucleotide
  modified_base 80: mod_base = OTHER; note = 2'-O-methyl ribonucleotide
  modified_base 82: mod_base = OTHER; note = 2'-O-methyl ribonucleotide
  modified_base 83: mod_base = OTHER; note = 2'-O-methyl ribonucleotide
  modified_base 84: mod_base = OTHER; note = 2'-O-methyl ribonucleotide
  modified_base 85: mod_base = OTHER; note = 2'-O-methyl ribonucleotide
  modified_base 86: mod_base = OTHER; note = 2'-O-methyl ribonucleotide
  modified_base 87: mod_base = OTHER; note = 2'-O-methyl ribonucleotide
  modified_base 89: mod_base = OTHER; note = 2'-O-methyl ribonucleotide
  modified_base 92: mod_base = OTHER; note = 2'-O-methyl ribonucleotide
  modified_base 93: mod_base = OTHER; note = 2'-O-methyl ribonucleotide
  modified_base 94: mod_base = OTHER; note = 2'-O-methyl ribonucleotide
  modified_base 95: mod_base = OTHER; note = 2'-O-methyl ribonucleotide
  modified_base 96: mod_base = OTHER; note = 2'-O-methyl ribonucleotide
  modified_base 97: mod_base = OTHER; note = 2'-O-methyl ribonucleotide
  modified_base 98: mod_base = OTHER; note = 2'-O-methyl ribonucleotide
  modified_base 99: mod_base = OTHER; note = 2'-O-methyl ribonucleotide
  modified_base 100: mod_base = OTHER; note = 2'-O-methyl ribonucleotide
  modified_base 1..4: mod_base = OTHER; note = phosphorothioate linkage
  modified_base 97..100: mod_base = OTHER; note = phosphorothioate linkage

SEQ ID NO: 2458 - RNA, 103 nt, synthetic construct; identical to SEQ ID NO: 1700
  source 1..103: mol_type = other RNA
  modified_base 1: mod_base = OTHER; note = 2'-O-methyl ribonucleotide
  modified_base 2: mod_base = OTHER; note = 2'-O-methyl ribonucleotide
  modified_base 3: mod_base = OTHER; note = 2'-O-methyl ribonucleotide
  modified_base 21: mod_base = OTHER; note = 2'-O-methyl ribonucleotide
  modified_base 28: mod_base = OTHER; note = 2'-O-methyl ribonucleotide
  modified_base 29: mod_base = OTHER; note = 2'-O-methyl ribonucleotide
  modified_base 30: mod_base = OTHER; note = 2'-O-methyl ribonucleotide
  modified_base 31: mod_base = OTHER; note = 2'-O-methyl ribonucleotide
  modified_base 32: mod_base = OTHER; note = 2'-O-methyl ribonucleotide
  modified_base 33: mod_base = OTHER; note = 2'-O-methyl ribonucleotide
  modified_base 34: mod_base = OTHER; note = 2'-O-methyl ribonucleotide
  modified_base 35: mod_base = OTHER; note = 2'-O-methyl ribonucleotide
  modified_base 36: mod_base = OTHER; note = 2'-O-methyl ribonucleotide
  modified_base 37: mod_base = OTHER; note = 2'-O-methyl ribonucleotide
  modified_base 38: mod_base = OTHER; note = 2'-O-methyl ribonucleotide
  modified_base 39: mod_base = OTHER; note = 2'-O-methyl ribonucleotide
  modified_base 40: mod_base = OTHER; note = 2'-O-methyl ribonucleotide
  modified_base 41: mod_base = OTHER; note = 2'-O-methyl ribonucleotide
  modified_base 42: mod_base = OTHER; note = 2'-O-methyl ribonucleotide
  modified_base 46: mod_base = OTHER; note = 2'-O-methyl ribonucleotide
  modified_base 48: mod_base = OTHER; note = 2'-O-methyl ribonucleotide
  modified_base 50: mod_base = OTHER; note = 2'-O-methyl ribonucleotide
  modified_base 52: mod_base = OTHER; note = 2'-O-methyl ribonucleotide
  modified_base 53: mod_base = OTHER; note = 2'-O-methyl ribonucleotide
  modified_base 54: mod_base = OTHER; note = 2'-O-methyl ribonucleotide
  modified_base 57: mod_base = OTHER; note = 2'-O-methyl ribonucleotide
  modified_base 61: mod_base = OTHER; note = 2'-O-methyl ribonucleotide
  modified_base 66: mod_base = OTHER; note = 2'-O-methyl ribonucleotide
  modified_base 67: mod_base = OTHER; note = 2'-O-methyl ribonucleotide
  modified_base 70: mod_base = OTHER; note = 2'-O-methyl ribonucleotide
  modified_base 71: mod_base = OTHER; note = 2'-O-methyl ribonucleotide
  modified_base 72: mod_base = OTHER; note = 2'-O-methyl ribonucleotide
  modified_base 73: mod_base = OTHER; note = 2'-O-methyl ribonucleotide
  modified_base 74: mod_base = OTHER; note = 2'-O-methyl ribonucleotide
  modified_base 75: mod_base = OTHER; note = 2'-O-methyl ribonucleotide
  modified_base 76: mod_base = OTHER; note = 2'-O-methyl ribonucleotide
  modified_base 77: mod_base = OTHER; note = 2'-O-methyl ribonucleotide
  modified_base 78: mod_base = OTHER; note = 2'-O-methyl ribonucleotide
  modified_base 79: mod_base = OTHER; note = 2'-O-methyl ribonucleotide
  modified_base 80: mod_base = OTHER; note = 2'-O-methyl ribonucleotide
  modified_base 82: mod_base = OTHER; note = 2'-O-methyl ribonucleotide
  modified_base 83: mod_base = OTHER; note = 2'-O-methyl ribonucleotide
  modified_base 84: mod_base = OTHER; note = 2'-O-methyl ribonucleotide
  modified_base 85: mod_base = OTHER; note = 2'-O-methyl ribonucleotide
  modified_base 86: mod_base = OTHER; note = 2'-O-methyl ribonucleotide
  modified_base 87: mod_base = OTHER; note = 2'-O-methyl ribonucleotide
  modified_base 89: mod_base = OTHER; note = 2'-O-methyl ribonucleotide
  modified_base 92: mod_base = OTHER; note = 2'-O-methyl ribonucleotide
  modified_base 93: mod_base = OTHER; note = 2'-O-methyl ribonucleotide
  modified_base 94: mod_base = OTHER; note = 2'-O-methyl ribonucleotide
  modified_base 95: mod_base = OTHER; note = 2'-O-methyl ribonucleotide
  modified_base 96: mod_base = OTHER; note = 2'-O-methyl ribonucleotide
  modified_base 97: mod_base = OTHER; note = 2'-O-methyl ribonucleotide
  modified_base 98: mod_base = OTHER; note = 2'-O-methyl ribonucleotide
  modified_base 99: mod_base = OTHER; note = 2'-O-methyl ribonucleotide
  modified_base 100: mod_base = OTHER; note = 2'-O-methyl ribonucleotide
  modified_base 1..4: mod_base = OTHER; note = phosphorothioate linkage
  modified_base 97..100: mod_base = OTHER; note = phosphorothioate linkage

SEQ ID NO: 2459 - RNA, 103 nt, synthetic construct; identical to SEQ ID NO: 1700
  source 1..103: mol_type = other RNA
  modified_base 1: mod_base = OTHER; note = 2'-O-methyl ribonucleotide
  modified_base 2: mod_base = OTHER; note = 2'-O-methyl ribonucleotide
  modified_base 3: mod_base = OTHER; note = 2'-O-methyl ribonucleotide
  modified_base 21: mod_base = OTHER; note = 2'-O-methyl ribonucleotide
  modified_base 28: mod_base = OTHER; note = 2'-O-methyl ribonucleotide
  modified_base 29: mod_base = OTHER; note = 2'-O-methyl ribonucleotide
  modified_base 30: mod_base = OTHER; note = 2'-O-methyl ribonucleotide
  modified_base 31: mod_base = OTHER; note = 2'-O-methyl ribonucleotide
  modified_base 32: mod_base = OTHER; note = 2'-O-methyl ribonucleotide
  modified_base 33: mod_base = OTHER; note = 2'-O-methyl ribonucleotide
  modified_base 34: mod_base = OTHER; note = 2'-O-methyl ribonucleotide
  modified_base 35: mod_base = OTHER; note = 2'-O-methyl ribonucleotide
  modified_base 36: mod_base = OTHER; note = 2'-O-methyl ribonucleotide
  modified_base 37: mod_base = OTHER; note = 2'-O-methyl ribonucleotide
  modified_base 38: mod_base = OTHER; note = 2'-O-methyl ribonucleotide
  modified_base 39: mod_base = OTHER; note = 2'-O-methyl ribonucleotide
  modified_base 40: mod_base = OTHER; note = 2'-O-methyl ribonucleotide
  modified_base 41: mod_base = OTHER; note = 2'-O-methyl ribonucleotide
  modified_base 42: mod_base = OTHER; note = 2'-O-methyl ribonucleotide
  modified_base 46: mod_base = OTHER; note = 2'-O-methyl ribonucleotide
  modified_base 48: mod_base = OTHER; note = 2'-O-methyl ribonucleotide
  modified_base 50: mod_base = OTHER; note = 2'-O-methyl ribonucleotide
  modified_base 52: mod_base = OTHER; note = 2'-O-methyl ribonucleotide
  modified_base 53: mod_base = OTHER; note = 2'-O-methyl ribonucleotide
  modified_base 54: mod_base = OTHER; note = 2'-O-methyl ribonucleotide
  modified_base 57: mod_base = OTHER; note = 2'-O-methyl ribonucleotide
  modified_base 61: mod_base = OTHER; note = 2'-O-methyl ribonucleotide
  modified_base 66: mod_base = OTHER; note = 2'-O-methyl ribonucleotide
  modified_base 67: mod_base = OTHER; note = 2'-O-methyl ribonucleotide
  modified_base 70: mod_base = OTHER; note = 2'-O-methyl ribonucleotide
  modified_base 71: mod_base = OTHER; note = 2'-O-methyl ribonucleotide
  modified_base 72: mod_base = OTHER; note = 2'-O-methyl ribonucleotide
  modified_base 73: mod_base = OTHER; note = 2'-O-methyl ribonucleotide
  modified_base 74: mod_base = OTHER; note = 2'-O-methyl ribonucleotide
  modified_base 75: mod_base = OTHER; note = 2'-O-methyl ribonucleotide
  modified_base 76: mod_base = OTHER; note = 2'-O-methyl ribonucleotide
  modified_base 77: mod_base = OTHER; note = 2'-O-methyl ribonucleotide
  modified_base 78: mod_base = OTHER; note = 2'-O-methyl ribonucleotide
  modified_base 79: mod_base = OTHER; note = 2'-O-methyl ribonucleotide
  modified_base 80: mod_base = OTHER; note = 2'-O-methyl ribonucleotide
  modified_base 82: mod_base = OTHER; note = 2'-O-methyl ribonucleotide
  modified_base 83: mod_base = OTHER; note = 2'-O-methyl ribonucleotide
  modified_base 84: mod_base = OTHER; note = 2'-O-methyl ribonucleotide
  modified_base 85: mod_base = OTHER; note = 2'-O-methyl ribonucleotide
  modified_base 86: mod_base = OTHER; note = 2'-O-methyl ribonucleotide
  modified_base 87: mod_base = OTHER; note = 2'-O-methyl ribonucleotide
  modified_base 89: mod_base = OTHER; note = 2'-O-methyl ribonucleotide
  modified_base 91: mod_base = OTHER; note = 2'-O-methyl ribonucleotide
  modified_base 92: mod_base = OTHER; note = 2'-O-methyl ribonucleotide
  modified_base 93: mod_base = OTHER; note = 2'-O-methyl ribonucleotide
  modified_base 94: mod_base = OTHER; note = 2'-O-methyl ribonucleotide
  modified_base 95: mod_base = OTHER; note = 2'-O-methyl ribonucleotide
  modified_base 96: mod_base = OTHER; note = 2'-O-methyl ribonucleotide
  modified_base 97: mod_base = OTHER; note = 2'-O-methyl ribonucleotide
  modified_base 98: mod_base = OTHER; note = 2'-O-methyl ribonucleotide
  modified_base 99: mod_base = OTHER; note = 2'-O-methyl ribonucleotide
  modified_base 100: mod_base = OTHER; note = 2'-O-methyl ribonucleotide
  modified_base 1..4: mod_base = OTHER; note = phosphorothioate linkage
  modified_base 97..100: mod_base = OTHER; note = phosphorothioate linkage

SEQ ID NO: 2460 - RNA, 103 nt, synthetic construct; identical to SEQ ID NO: 1700
  source 1..103: mol_type = other RNA
  modified_base 1: mod_base = OTHER; note = 2'-O-methyl ribonucleotide
  modified_base 2: mod_base = OTHER; note = 2'-O-methyl ribonucleotide
  modified_base 3: mod_base = OTHER; note = 2'-O-methyl ribonucleotide
  modified_base 21: mod_base = OTHER; note = 2'-O-methyl ribonucleotide
  modified_base 28: mod_base = OTHER; note = 2'-O-methyl ribonucleotide
  modified_base 29: mod_base = OTHER; note = 2'-O-methyl ribonucleotide
  modified_base 30: mod_base = OTHER; note = 2'-O-methyl ribonucleotide
  modified_base 31: mod_base = OTHER; note = 2'-O-methyl ribonucleotide
  modified_base 32: mod_base = OTHER; note = 2'-O-methyl ribonucleotide
  modified_base 34: mod_base = OTHER; note = 2'-O-methyl ribonucleotide
  modified_base 35: mod_base = OTHER; note = 2'-O-methyl ribonucleotide
  modified_base 36: mod_base = OTHER; note = 2'-O-methyl ribonucleotide
  modified_base 37: mod_base = OTHER; note = 2'-O-methyl ribonucleotide
  modified_base 38: mod_base = OTHER; note = 2'-O-methyl ribonucleotide
  modified_base 39: mod_base = OTHER; note = 2'-O-methyl ribonucleotide
  modified_base 40: mod_base = OTHER; note = 2'-O-methyl ribonucleotide
  modified_base 41: mod_base = OTHER; note = 2'-O-methyl ribonucleotide
  modified_base 42: mod_base = OTHER; note = 2'-O-methyl ribonucleotide
  modified_base 46: mod_base = OTHER; note = 2'-O-methyl ribonucleotide
  modified_base 48: mod_base = OTHER; note = 2'-O-methyl ribonucleotide
  modified_base 50: mod_base = OTHER; note = 2'-O-methyl ribonucleotide
  modified_base 52: mod_base = OTHER; note = 2'-O-methyl ribonucleotide
  modified_base 53: mod_base = OTHER; note = 2'-O-methyl ribonucleotide
  modified_base 54: mod_base = OTHER; note = 2'-O-methyl ribonucleotide
  modified_base 57: mod_base = OTHER; note = 2'-O-methyl ribonucleotide
  modified_base 61: mod_base = OTHER; note = 2'-O-methyl ribonucleotide
  modified_base 66: mod_base = OTHER; note = 2'-O-methyl ribonucleotide
  modified_base 67: mod_base = OTHER; note = 2'-O-methyl ribonucleotide
  modified_base 70: mod_base = OTHER; note = 2'-O-methyl ribonucleotide
  modified_base 71: mod_base = OTHER; note = 2'-O-methyl ribonucleotide
  modified_base 72: mod_base = OTHER; note = 2'-O-methyl ribonucleotide
  modified_base 73: mod_base = OTHER; note = 2'-O-methyl ribonucleotide
  modified_base 74: mod_base = OTHER; note = 2'-O-methyl ribonucleotide
  modified_base 75: mod_base = OTHER; note = 2'-O-methyl ribonucleotide
  modified_base 76: mod_base = OTHER; note = 2'-O-methyl ribonucleotide
  modified_base 77: mod_base = OTHER; note = 2'-O-methyl ribonucleotide
  modified_base 78: mod_base = OTHER; note = 2'-O-methyl ribonucleotide
  modified_base 79: mod_base = OTHER; note = 2'-O-methyl ribonucleotide
  modified_base 80: mod_base = OTHER; note = 2'-O-methyl ribonucleotide
  modified_base 82: mod_base = OTHER; note = 2'-O-methyl ribonucleotide
  modified_base 83: mod_base = OTHER; note = 2'-O-methyl ribonucleotide
  modified_base 84: mod_base = OTHER; note = 2'-O-methyl ribonucleotide
  modified_base 85: mod_base = OTHER; note = 2'-O-methyl ribonucleotide
  modified_base 86: mod_base = OTHER; note = 2'-O-methyl ribonucleotide
  modified_base 87: mod_base = OTHER; note = 2'-O-methyl ribonucleotide
  modified_base 89: mod_base = OTHER; note = 2'-O-methyl ribonucleotide
  modified_base 92: mod_base = OTHER; note = 2'-O-methyl ribonucleotide
  modified_base 93: mod_base = OTHER; note = 2'-O-methyl ribonucleotide
  modified_base 94: mod_base = OTHER; note = 2'-O-methyl ribonucleotide
  modified_base 95: mod_base = OTHER; note = 2'-O-methyl ribonucleotide
  modified_base 96: mod_base = OTHER; note = 2'-O-methyl ribonucleotide
  modified_base 97: mod_base = OTHER; note = 2'-O-methyl ribonucleotide
  modified_base 98: mod_base = OTHER; note = 2'-O-methyl ribonucleotide
  modified_base 99: mod_base = OTHER; note = 2'-O-methyl ribonucleotide
  modified_base 100: mod_base = OTHER; note = 2'-O-methyl ribonucleotide
  modified_base 1..4: mod_base = OTHER; note = phosphorothioate linkage
  modified_base 97..100: mod_base = OTHER; note = phosphorothioate linkage

SEQ ID NO: 2461 - RNA, 103 nt, synthetic construct; identical to SEQ ID NO: 1700
  source 1..103: mol_type = other RNA
  modified_base 1: mod_base = OTHER; note = 2'-O-methyl ribonucleotide
  modified_base 2: mod_base = OTHER; note = 2'-O-methyl ribonucleotide
  modified_base 3: mod_base = OTHER; note = 2'-O-methyl ribonucleotide
  modified_base 21: mod_base = OTHER; note = 2'-O-methyl ribonucleotide
  modified_base 28: mod_base = OTHER; note = 2'-O-methyl ribonucleotide
  modified_base 29: mod_base = OTHER; note = 2'-O-methyl ribonucleotide
  modified_base 30: mod_base = OTHER; note = 2'-O-methyl ribonucleotide
  modified_base 31: mod_base = OTHER; note = 2'-O-methyl ribonucleotide
  modified_base 32: mod_base = OTHER; note = 2'-O-methyl ribonucleotide
  modified_base 34: mod_base = OTHER; note = 2'-O-methyl ribonucleotide
  modified_base 35: mod_base = OTHER; note = 2'-O-methyl ribonucleotide
  modified_base 36: mod_base = OTHER; note = 2'-O-methyl ribonucleotide
  modified_base 37: mod_base = OTHER; note = 2'-O-methyl ribonucleotide
  modified_base 38: mod_base = OTHER; note = 2'-O-methyl ribonucleotide
  modified_base 39: mod_base = OTHER; note = 2'-O-methyl ribonucleotide
  modified_base 40: mod_base = OTHER; note = 2'-O-methyl ribonucleotide
  modified_base 41: mod_base = OTHER; note = 2'-O-methyl ribonucleotide
  modified_base 42: mod_base = OTHER; note = 2'-O-methyl ribonucleotide
  modified_base 46: mod_base = OTHER; note = 2'-O-methyl ribonucleotide
  modified_base 48: mod_base = OTHER; note = 2'-O-methyl ribonucleotide
  modified_base 50: mod_base = OTHER; note = 2'-O-methyl ribonucleotide
  modified_base 52: mod_base = OTHER; note = 2'-O-methyl ribonucleotide
  modified_base 53: mod_base = OTHER; note = 2'-O-methyl ribonucleotide
  modified_base 54: mod_base = OTHER; note = 2'-O-methyl ribonucleotide
  modified_base 57: mod_base = OTHER; note = 2'-O-methyl ribonucleotide
  modified_base 61: mod_base = OTHER; note = 2'-O-methyl ribonucleotide
  modified_base 66: mod_base = OTHER; note = 2'-O-methyl ribonucleotide
  modified_base 67: mod_base = OTHER; note = 2'-O-methyl ribonucleotide
  modified_base 70: mod_base = OTHER; note = 2'-O-methyl ribonucleotide
  modified_base 71: mod_base = OTHER; note = 2'-O-methyl ribonucleotide
  modified_base 72: mod_base = OTHER; note = 2'-O-methyl ribonucleotide
  modified_base 73: mod_base = OTHER; note = 2'-O-methyl ribonucleotide
  modified_base 74: mod_base = OTHER; note = 2'-O-methyl ribonucleotide
  modified_base 75: mod_base = OTHER; note = 2'-O-methyl ribonucleotide
  modified_base 76: mod_base = OTHER; note = 2'-O-methyl ribonucleotide
  modified_base 77: mod_base = OTHER; note = 2'-O-methyl ribonucleotide
  modified_base 78: mod_base = OTHER; note = 2'-O-methyl ribonucleotide
  modified_base 79: mod_base = OTHER; note = 2'-O-methyl ribonucleotide
  modified_base 80: mod_base = OTHER; note = 2'-O-methyl ribonucleotide
  modified_base 82: mod_base = OTHER; note = 2'-O-methyl ribonucleotide
  modified_base 83: mod_base = OTHER; note = 2'-O-methyl ribonucleotide
  modified_base 84: mod_base = OTHER; note = 2'-O-methyl ribonucleotide
  modified_base 85: mod_base = OTHER; note = 2'-O-methyl ribonucleotide
  modified_base 86: mod_base = OTHER; note = 2'-O-methyl ribonucleotide
  modified_base 87: mod_base = OTHER; note = 2'-O-methyl ribonucleotide
  modified_base 89: mod_base = OTHER; note = 2'-O-methyl ribonucleotide
  modified_base 91: mod_base = OTHER; note = 2'-O-methyl ribonucleotide
  modified_base 92: mod_base = OTHER; note = 2'-O-methyl ribonucleotide
  modified_base 93: mod_base = OTHER; note = 2'-O-methyl ribonucleotide
  modified_base 94: mod_base = OTHER; note = 2'-O-methyl ribonucleotide
  modified_base 95: mod_base = OTHER; note = 2'-O-methyl ribonucleotide
  modified_base 96: mod_base = OTHER; note = 2'-O-methyl ribonucleotide
  modified_base 97: mod_base = OTHER; note = 2'-O-methyl ribonucleotide
  modified_base 98: mod_base = OTHER; note = 2'-O-methyl ribonucleotide
  modified_base 99: mod_base = OTHER; note = 2'-O-methyl ribonucleotide
  modified_base 100: mod_base = OTHER; note = 2'-O-methyl ribonucleotide
  modified_base 1..4: mod_base = OTHER; note = phosphorothioate linkage
  modified_base 97..100: mod_base = OTHER; note = phosphorothioate linkage

SEQ ID NO: 2462 - RNA, 103 nt, synthetic construct; identical to SEQ ID NO: 1700
  source 1..103: mol_type = other RNA
  modified_base 1: mod_base = OTHER; note = 2'-O-methyl ribonucleotide
  modified_base 2: mod_base = OTHER; note = 2'-O-methyl ribonucleotide
  modified_base 3: mod_base = OTHER; note = 2'-O-methyl ribonucleotide
  modified_base 21: mod_base = OTHER; note = 2'-O-methyl ribonucleotide
  modified_base 28: mod_base = OTHER; note = 2'-O-methyl ribonucleotide
  modified_base 29: mod_base = OTHER; note = 2'-O-methyl ribonucleotide
  modified_base 30: mod_base = OTHER; note = 2'-O-methyl ribonucleotide
  modified_base 31: mod_base = OTHER; note = 2'-O-methyl ribonucleotide
  modified_base 32: mod_base = OTHER; note = 2'-O-methyl ribonucleotide
  modified_base 34: mod_base = OTHER; note = 2'-O-methyl ribonucleotide
  modified_base 35: mod_base = OTHER; note = 2'-O-methyl ribonucleotide
  modified_base 36: mod_base = OTHER; note = 2'-O-methyl ribonucleotide
  modified_base 37: mod_base = OTHER; note = 2'-O-methyl ribonucleotide
  modified_base 38: mod_base = OTHER; note = 2'-O-methyl ribonucleotide
  modified_base 39: mod_base = OTHER; note = 2'-O-methyl ribonucleotide
  modified_base 40: mod_base = OTHER; note = 2'-O-methyl ribonucleotide
  modified_base 41: mod_base = OTHER; note = 2'-O-methyl ribonucleotide
  modified_base 42: mod_base = OTHER; note = 2'-O-methyl ribonucleotide
  modified_base 46: mod_base = OTHER; note = 2'-O-methyl ribonucleotide
  modified_base 48: mod_base = OTHER; note = 2'-O-methyl ribonucleotide
  modified_base 50: mod_base = OTHER; note = 2'-O-methyl ribonucleotide
  modified_base 52: mod_base = OTHER; note = 2'-O-methyl ribonucleotide
  modified_base 53: mod_base = OTHER; note = 2'-O-methyl ribonucleotide
  modified_base 54: mod_base = OTHER; note = 2'-O-methyl ribonucleotide
  modified_base 55: mod_base = OTHER; note = 2'-O-methyl ribonucleotide
  modified_base 56: mod_base = OTHER; note = 2'-O-methyl ribonucleotide
  modified_base 57: mod_base = OTHER; note = 2'-O-methyl ribonucleotide
  modified_base 60: mod_base = OTHER; note = 2'-O-methyl ribonucleotide
  modified_base 61: mod_base = OTHER; note = 2'-O-methyl ribonucleotide
  modified_base 66: mod_base = OTHER; note = 2'-O-methyl ribonucleotide
  modified_base 67: mod_base = OTHER; note = 2'-O-methyl ribonucleotide
  modified_base 70: mod_base = OTHER; note = 2'-O-methyl ribonucleotide
  modified_base 71: mod_base = OTHER; note = 2'-O-methyl ribonucleotide
  modified_base 72: mod_base = OTHER; note = 2'-O-methyl ribonucleotide
  modified_base 74: mod_base = OTHER; note = 2'-O-methyl ribonucleotide
  modified_base 75: mod_base = OTHER; note = 2'-O-methyl ribonucleotide
  modified_base 76: mod_base = OTHER; note = 2'-O-methyl ribonucleotide
  modified_base 77: mod_base = OTHER; note = 2'-O-methyl ribonucleotide
  modified_base 78: mod_base = OTHER; note = 2'-O-methyl ribonucleotide
  modified_base 79: mod_base = OTHER; note = 2'-O-methyl ribonucleotide
  modified_base 80: mod_base = OTHER; note = 2'-O-methyl ribonucleotide
  modified_base 82: mod_base = OTHER; note = 2'-O-methyl ribonucleotide
  modified_base 83: mod_base = OTHER; note = 2'-O-methyl ribonucleotide
  modified_base 84: mod_base = OTHER; note = 2'-O-methyl ribonucleotide
  modified_base 85: mod_base = OTHER; note = 2'-O-methyl ribonucleotide
  modified_base 86: mod_base = OTHER; note = 2'-O-methyl ribonucleotide
  modified_base 87: mod_base = OTHER; note = 2'-O-methyl ribonucleotide
  modified_base 89: mod_base = OTHER; note = 2'-O-methyl ribonucleotide
  modified_base 92: mod_base = OTHER; note = 2'-O-methyl ribonucleotide
  modified_base 93: mod_base = OTHER; note = 2'-O-methyl ribonucleotide
  modified_base 94: mod_base = OTHER; note = 2'-O-methyl ribonucleotide
  modified_base 95: mod_base = OTHER; note = 2'-O-methyl ribonucleotide
  modified_base 96: mod_base = OTHER; note = 2'-O-methyl ribonucleotide
  modified_base 97: mod_base = OTHER; note = 2'-O-methyl ribonucleotide
  modified_base 98: mod_base = OTHER; note = 2'-O-methyl ribonucleotide
  modified_base 99: mod_base = OTHER; note = 2'-O-methyl ribonucleotide
  modified_base 100: mod_base = OTHER; note = 2'-O-methyl ribonucleotide
  modified_base 1..4: mod_base = OTHER; note = phosphorothioate linkage
  modified_base 97..100: mod_base = OTHER; note = phosphorothioate linkage

SEQ ID NO: 2463 - RNA, 103 nt, synthetic construct; identical to SEQ ID NO: 1643
  source 1..103: mol_type = other RNA
  modified_base 1: mod_base = OTHER; note = 2'-O-methyl ribonucleotide
  modified_base 2: mod_base = OTHER; note = 2'-O-methyl ribonucleotide
  modified_base 3: mod_base = OTHER; note = 2'-O-methyl ribonucleotide
  modified_base 21: mod_base = OTHER; note = 2'-O-methyl ribonucleotide
  modified_base 28: mod_base = OTHER; note = 2'-O-methyl ribonucleotide
  modified_base 29: mod_base = OTHER; note = 2'-O-methyl ribonucleotide
  modified_base 30: mod_base = OTHER; note = 2'-O-methyl ribonucleotide
  modified_base 31: mod_base = OTHER; note = 2'-O-methyl ribonucleotide
  modified_base 32: mod_base = OTHER; note = 2'-O-methyl ribonucleotide
  modified_base 33: mod_base = OTHER; note = 2'-O-methyl ribonucleotide
  modified_base 34: mod_base = OTHER; note = 2'-O-methyl ribonucleotide
  modified_base 35: mod_base = OTHER; note = 2'-O-methyl ribonucleotide
  modified_base 36: mod_base = OTHER; note = 2'-O-methyl ribonucleotide
  modified_base 37: mod_base = OTHER; note = 2'-O-methyl ribonucleotide
  modified_base 38: mod_base = OTHER; note = 2'-O-methyl ribonucleotide
  modified_base 39: mod_base = OTHER; note = 2'-O-methyl ribonucleotide
  modified_base 40: mod_base = OTHER; note = 2'-O-methyl ribonucleotide
  modified_base 41: mod_base = OTHER; note = 2'-O-methyl ribonucleotide
  modified_base 42: mod_base = OTHER; note = 2'-O-methyl ribonucleotide
  modified_base 46: mod_base = OTHER; note = 2'-O-methyl ribonucleotide
  modified_base 48: mod_base = OTHER; note = 2'-O-methyl ribonucleotide
  modified_base 50: mod_base = OTHER; note = 2'-O-methyl ribonucleotide
  modified_base 52: mod_base = OTHER; note = 2'-O-methyl ribonucleotide
  modified_base 53: mod_base = OTHER; note = 2'-O-methyl ribonucleotide
  modified_base 54: mod_base = OTHER; note = 2'-O-methyl ribonucleotide
  modified_base 55: mod_base = OTHER; note = 2'-O-methyl ribonucleotide
  modified_base 56: mod_base = OTHER; note = 2'-O-methyl ribonucleotide
  modified_base 57: mod_base = OTHER; note = 2'-O-methyl ribonucleotide
  modified_base 60: mod_base = OTHER; note = 2'-O-methyl ribonucleotide
  modified_base 61: mod_base = OTHER; note = 2'-O-methyl ribonucleotide
  modified_base 66: mod_base = OTHER; note = 2'-O-methyl ribonucleotide
  modified_base 67: mod_base = OTHER; note = 2'-O-methyl ribonucleotide
  modified_base 70: mod_base = OTHER; note = 2'-O-methyl ribonucleotide
  modified_base 71: mod_base = OTHER; note = 2'-O-methyl ribonucleotide
  modified_base 72: mod_base = OTHER; note = 2'-O-methyl ribonucleotide
  modified_base 73: mod_base = OTHER; note = 2'-O-methyl ribonucleotide
  modified_base 74: mod_base = OTHER; note = 2'-O-methyl ribonucleotide
  modified_base 75: mod_base = OTHER; note = 2'-O-methyl ribonucleotide
  modified_base 76: mod_base = OTHER; note = 2'-O-methyl ribonucleotide
  modified_base 77: mod_base = OTHER; note = 2'-O-methyl ribonucleotide
  modified_base 78: mod_base = OTHER; note = 2'-O-methyl ribonucleotide
  modified_base 79: mod_base = OTHER; note = 2'-O-methyl ribonucleotide
  modified_base 80: mod_base = OTHER; note = 2'-O-methyl ribonucleotide
  modified_base 81: mod_base = OTHER; note = 2'-O-methyl ribonucleotide
  modified_base 83: mod_base = OTHER; note = 2'-O-methyl ribonucleotide
  modified_base 84: mod_base = OTHER; note = 2'-O-methyl ribonucleotide
  modified_base 85: mod_base = OTHER; note = 2'-O-methyl ribonucleotide
  modified_base 86: mod_base = OTHER; note = 2'-O-methyl ribonucleotide
  modified_base 87: mod_base = OTHER; note = 2'-O-methyl ribonucleotide
  modified_base 88: mod_base = OTHER; note = 2'-O-methyl ribonucleotide
  modified_base 89: mod_base = OTHER; note = 2'-O-methyl ribonucleotide
  modified_base 90: mod_base = OTHER; note = 2'-O-methyl ribonucleotide
  modified_base 91: mod_base = OTHER; note = 2'-O-methyl ribonucleotide
  modified_base 92: mod_base = OTHER; note = 2'-O-methyl ribonucleotide
  modified_base 93: mod_base = OTHER; note = 2'-O-methyl ribonucleotide
  modified_base 94: mod_base = OTHER; note = 2'-O-methyl ribonucleotide
  modified_base 95: mod_base = OTHER; note = 2'-O-methyl ribonucleotide
  modified_base 96: mod_base = OTHER; note = 2'-O-methyl ribonucleotide
  modified_base 97: mod_base = OTHER; note = 2'-O-methyl ribonucleotide
  modified_base 98: mod_base = OTHER; note = 2'-O-methyl ribonucleotide
  modified_base 99: mod_base = OTHER; note = 2'-O-methyl ribonucleotide
  modified_base 100: mod_base = OTHER; note = 2'-O-methyl ribonucleotide
  modified_base 1..4: mod_base = OTHER; note = phosphorothioate linkage
  modified_base 64..65: mod_base = OTHER; note = phosphorothioate linkage
  modified_base 97..100: mod_base = OTHER; note = phosphorothioate linkage

SEQ ID NO: 2464 - RNA, 103 nt, synthetic construct; identical to SEQ ID NO: 1643
  source 1..103: mol_type = other RNA
  modified_base 1: mod_base = OTHER; note = 2'-O-methyl ribonucleotide
  modified_base 2: mod_base = OTHER; note = 2'-O-methyl ribonucleotide
  modified_base 3: mod_base = OTHER; note = 2'-O-methyl ribonucleotide
  modified_base 21: mod_base = OTHER; note = 2'-O-methyl ribonucleotide
  modified_base 28: mod_base = OTHER; note = 2'-O-methyl ribonucleotide
  modified_base 29: mod_base = OTHER; note = 2'-O-methyl ribonucleotide
  modified_base 30: mod_base = OTHER; note = 2'-O-methyl ribonucleotide
  modified_base 31: mod_base = OTHER; note = 2'-O-methyl ribonucleotide
  modified_base 32: mod_base = OTHER; note = 2'-O-methyl ribonucleotide
  modified_base 34: mod_base = OTHER; note = 2'-O-methyl ribonucleotide
  modified_base 35: mod_base = OTHER; note = 2'-O-methyl ribonucleotide
  modified_base 36: mod_base = OTHER; note = 2'-O-methyl ribonucleotide
  modified_base 37: mod_base = OTHER; note = 2'-O-methyl ribonucleotide
  modified_base 38: mod_base = OTHER; note = 2'-O-methyl ribonucleotide
  modified_base 39: mod_base = OTHER; note = 2'-O-methyl ribonucleotide
  modified_base 40: mod_base = OTHER; note = 2'-O-methyl ribonucleotide
  modified_base 41: mod_base = OTHER; note = 2'-O-methyl ribonucleotide
  modified_base 42: mod_base = OTHER; note = 2'-O-methyl ribonucleotide
  modified_base 46: mod_base = OTHER; note = 2'-O-methyl ribonucleotide
  modified_base 48: mod_base = OTHER; note = 2'-O-methyl ribonucleotide
  modified_base 50: mod_base = OTHER; note = 2'-O-methyl ribonucleotide
  modified_base 52: mod_base = OTHER; note = 2'-O-methyl ribonucleotide
  modified_base 53: mod_base = OTHER; note = 2'-O-methyl ribonucleotide
  modified_base 54: mod_base = OTHER; note = 2'-O-methyl ribonucleotide
  modified_base 55: mod_base = OTHER; note = 2'-O-methyl ribonucleotide
  modified_base 56: mod_base = OTHER; note = 2'-O-methyl ribonucleotide
  modified_base 57: mod_base = OTHER; note = 2'-O-methyl ribonucleotide
  modified_base 60: mod_base = OTHER; note = 2'-O-methyl ribonucleotide
  modified_base 61: mod_base = OTHER; note = 2'-O-methyl ribonucleotide
  modified_base 66: mod_base = OTHER; note = 2'-O-methyl ribonucleotide
  modified_base 67: mod_base = OTHER; note = 2'-O-methyl ribonucleotide
  modified_base 70: mod_base = OTHER; note = 2'-O-methyl ribonucleotide
  modified_base 71: mod_base = OTHER; note = 2'-O-methyl ribonucleotide
  modified_base 72: mod_base = OTHER; note = 2'-O-methyl ribonucleotide
  modified_base 74: mod_base = OTHER; note = 2'-O-methyl ribonucleotide
  modified_base 75: mod_base = OTHER; note = 2'-O-methyl ribonucleotide
  modified_base 76: mod_base = OTHER; note = 2'-O-methyl ribonucleotide
  modified_base 77: mod_base = OTHER; note = 2'-O-methyl ribonucleotide
  modified_base 78: mod_base = OTHER; note = 2'-O-methyl ribonucleotide
  modified_base 79: mod_base = OTHER; note = 2'-O-methyl ribonucleotide
  modified_base 80: mod_base = OTHER; note = 2'-O-methyl ribonucleotide
  modified_base 81: mod_base = OTHER; note = 2'-O-methyl ribonucleotide
  modified_base 83: mod_base = OTHER; note = 2'-O-methyl ribonucleotide
  modified_base 84: mod_base = OTHER; note = 2'-O-methyl ribonucleotide
  modified_base 85: mod_base = OTHER; note = 2'-O-methyl ribonucleotide
  modified_base 86: mod_base = OTHER; note = 2'-O-methyl ribonucleotide
  modified_base 87: mod_base = OTHER; note = 2'-O-methyl ribonucleotide
  modified_base 88: mod_base = OTHER; note = 2'-O-methyl ribonucleotide
  modified_base 89: mod_base = OTHER; note = 2'-O-methyl ribonucleotide
  modified_base 90: mod_base = OTHER; note = 2'-O-methyl ribonucleotide
  modified_base 91: mod_base = OTHER; note = 2'-O-methyl ribonucleotide
  modified_base 92: mod_base = OTHER; note = 2'-O-methyl ribonucleotide
  modified_base 93: mod_base = OTHER; note = 2'-O-methyl ribonucleotide
  modified_base 94: mod_base = OTHER; note = 2'-O-methyl ribonucleotide
  modified_base 95: mod_base = OTHER; note = 2'-O-methyl ribonucleotide
  modified_base 96: mod_base = OTHER; note = 2'-O-methyl ribonucleotide
  modified_base 97: mod_base = OTHER; note = 2'-O-methyl ribonucleotide
  modified_base 98: mod_base = OTHER; note = 2'-O-methyl ribonucleotide
  modified_base 99: mod_base = OTHER; note = 2'-O-methyl ribonucleotide
  modified_base 100: mod_base = OTHER; note = 2'-O-methyl ribonucleotide
  modified_base 1..4: mod_base = OTHER; note = phosphorothioate linkage
  modified_base 64..65: mod_base = OTHER; note = phosphorothioate linkage
  modified_base 97..100: mod_base = OTHER; note = phosphorothioate linkage

SEQ ID NO: 2465 - RNA, 103 nt, synthetic construct; identical to SEQ ID NO: 1699
  source 1..103: mol_type = other RNA
  modified_base 1: mod_base = OTHER; note = 2'-O-methyl ribonucleotide
  modified_base 2: mod_base = OTHER; note = 2'-O-methyl ribonucleotide
  modified_base 3: mod_base = OTHER; note = 2'-O-methyl ribonucleotide
  modified_base 21: mod_base = OTHER; note = 2'-O-methyl ribonucleotide
  modified_base 28: mod_base = OTHER; note = 2'-O-methyl ribonucleotide
  modified_base 29: mod_base = OTHER; note = 2'-O-methyl ribonucleotide
  modified_base 30: mod_base = OTHER; note = 2'-O-methyl ribonucleotide
  modified_base 31: mod_base = OTHER; note = 2'-O-methyl ribonucleotide
  modified_base 32: mod_base = OTHER; note = 2'-O-methyl ribonucleotide
  modified_base 33: mod_base = OTHER; note = 2'-O-methyl ribonucleotide
  modified_base 34: mod_base = OTHER; note = 2'-O-methyl ribonucleotide
  modified_base 35: mod_base = OTHER; note = 2'-O-methyl ribonucleotide
  modified_base 36: mod_base = OTHER; note = 2'-O-methyl ribonucleotide
  modified_base 37: mod_base = OTHER; note = 2'-O-methyl ribonucleotide
  modified_base 38: mod_base = OTHER; note = 2'-O-methyl ribonucleotide
  modified_base 39: mod_base = OTHER; note = 2'-O-methyl ribonucleotide
  modified_base 40: mod_base = OTHER; note = 2'-O-methyl ribonucleotide
  modified_base 41: mod_base = OTHER; note = 2'-O-methyl ribonucleotide
  modified_base 42: mod_base = OTHER; note = 2'-O-methyl ribonucleotide
  modified_base 46: mod_base = OTHER; note = 2'-O-methyl ribonucleotide
  modified_base 48: mod_base = OTHER; note = 2'-O-methyl ribonucleotide
  modified_base 50: mod_base = OTHER; note = 2'-O-methyl ribonucleotide
  modified_base 52: mod_base = OTHER; note = 2'-O-methyl ribonucleotide
  modified_base 53: mod_base = OTHER; note = 2'-O-methyl ribonucleotide
  modified_base 54: mod_base = OTHER; note = 2'-O-methyl ribonucleotide
  modified_base 55: mod_base = OTHER; note = 2'-O-methyl ribonucleotide
  modified_base 56: mod_base = OTHER; note = 2'-O-methyl ribonucleotide
  modified_base 57: mod_base = OTHER; note = 2'-O-methyl ribonucleotide
  modified_base 60: mod_base = OTHER; note = 2'-O-methyl ribonucleotide
  modified_base 61: mod_base = OTHER; note = 2'-O-methyl ribonucleotide
  modified_base 66: mod_base = OTHER; note = 2'-O-methyl ribonucleotide
  modified_base 67: mod_base = OTHER; note = 2'-O-methyl ribonucleotide
  modified_base 70: mod_base = OTHER; note = 2'-O-methyl ribonucleotide
  modified_base 71: mod_base = OTHER; note = 2'-O-methyl ribonucleotide
  modified_base 72: mod_base = OTHER; note = 2'-O-methyl ribonucleotide
  modified_base 73: mod_base = OTHER; note = 2'-O-methyl ribonucleotide
  modified_base 74: mod_base = OTHER; note = 2'-O-methyl ribonucleotide
  modified_base 75: mod_base = OTHER; note = 2'-O-methyl ribonucleotide
  modified_base 76: mod_base = OTHER; note = 2'-O-methyl ribonucleotide
  modified_base 77: mod_base = OTHER; note = 2'-O-methyl ribonucleotide
  modified_base 78: mod_base = OTHER; note = 2'-O-methyl ribonucleotide
  modified_base 79: mod_base = OTHER; note = 2'-O-methyl ribonucleotide
  modified_base 80: mod_base = OTHER; note = 2'-O-methyl ribonucleotide
  modified_base 81: mod_base = OTHER; note = 2'-O-methyl ribonucleotide
  modified_base 83: mod_base = OTHER; note = 2'-O-methyl ribonucleotide
  modified_base 84: mod_base = OTHER; note = 2'-O-methyl ribonucleotide
  modified_base 85: mod_base = OTHER; note = 2'-O-methyl ribonucleotide
  modified_base 86: mod_base = OTHER; note = 2'-O-methyl ribonucleotide
  modified_base 87: mod_base = OTHER; note = 2'-O-methyl ribonucleotide
  modified_base 88: mod_base = OTHER; note = 2'-O-methyl ribonucleotide
  modified_base 89: mod_base = OTHER; note = 2'-O-methyl ribonucleotide
  modified_base 90: mod_base = OTHER; note = 2'-O-methyl ribonucleotide
  modified_base 91: mod_base = OTHER; note = 2'-O-methyl ribonucleotide
  modified_base 92: mod_base = OTHER; note = 2'-O-methyl ribonucleotide
  modified_base 93: mod_base = OTHER; note = 2'-O-methyl ribonucleotide
  modified_base 94: mod_base = OTHER; note = 2'-O-methyl ribonucleotide
  modified_base 95: mod_base = OTHER; note = 2'-O-methyl ribonucleotide
  modified_base 96: mod_base = OTHER; note = 2'-O-methyl ribonucleotide
  modified_base 97: mod_base = OTHER; note = 2'-O-methyl ribonucleotide
  modified_base 98: mod_base = OTHER; note = 2'-O-methyl ribonucleotide
  modified_base 99: mod_base = OTHER; note = 2'-O-methyl ribonucleotide
  modified_base 100: mod_base = OTHER; note = 2'-O-methyl ribonucleotide
  modified_base 1..4: mod_base = OTHER; note = phosphorothioate linkage
  modified_base 64..65: mod_base = OTHER; note = phosphorothioate linkage
  modified_base 97..100: mod_base = OTHER; note = phosphorothioate linkage

SEQ ID NO: 2466 - RNA, 103 nt, synthetic construct; identical to SEQ ID NO: 1699
  source 1..103: mol_type = other RNA
  modified_base 1: mod_base = OTHER; note = 2'-O-methyl ribonucleotide
  modified_base 2: mod_base = OTHER; note = 2'-O-methyl ribonucleotide
  modified_base 3: mod_base = OTHER; note = 2'-O-methyl ribonucleotide
  modified_base 21: mod_base = OTHER; note = 2'-O-methyl ribonucleotide
  modified_base 28: mod_base = OTHER; note = 2'-O-methyl ribonucleotide
  modified_base 29: mod_base = OTHER; note = 2'-O-methyl ribonucleotide
  modified_base 30: mod_base = OTHER; note = 2'-O-methyl ribonucleotide
  modified_base 31: mod_base = OTHER; note = 2'-O-methyl ribonucleotide
  modified_base 32: mod_base = OTHER; note = 2'-O-methyl ribonucleotide
  modified_base 34: mod_base = OTHER; note = 2'-O-methyl ribonucleotide
  modified_base 35: mod_base = OTHER; note = 2'-O-methyl ribonucleotide
  modified_base 36: mod_base = OTHER; note = 2'-O-methyl ribonucleotide
  modified_base 37: mod_base = OTHER; note = 2'-O-methyl ribonucleotide
  modified_base 38: mod_base = OTHER; note = 2'-O-methyl ribonucleotide
  modified_base 39: mod_base = OTHER; note = 2'-O-methyl ribonucleotide
  modified_base 40: mod_base = OTHER; note = 2'-O-methyl ribonucleotide
  modified_base 41: mod_base = OTHER; note = 2'-O-methyl ribonucleotide
  modified_base 42: mod_base = OTHER; note = 2'-O-methyl ribonucleotide
  modified_base 46: mod_base = OTHER; note = 2'-O-methyl ribonucleotide
  modified_base 48: mod_base = OTHER; note = 2'-O-methyl ribonucleotide
  modified_base 50: mod_base = OTHER; note = 2'-O-methyl ribonucleotide
  modified_base 52: mod_base = OTHER; note = 2'-O-methyl ribonucleotide
  modified_base 53: mod_base = OTHER; note = 2'-O-methyl ribonucleotide
  modified_base 54: mod_base = OTHER; note = 2'-O-methyl ribonucleotide
  modified_base 55: mod_base = OTHER; note = 2'-O-methyl ribonucleotide
  modified_base 56: mod_base = OTHER; note = 2'-O-methyl ribonucleotide
  modified_base 57: mod_base = OTHER; note = 2'-O-methyl ribonucleotide
  modified_base 60: mod_base = OTHER; note = 2'-O-methyl ribonucleotide
  modified_base 61: mod_base = OTHER; note = 2'-O-methyl ribonucleotide
  modified_base 66: mod_base = OTHER; note = 2'-O-methyl ribonucleotide
  modified_base 67: mod_base = OTHER; note = 2'-O-methyl ribonucleotide
  modified_base 70: mod_base = OTHER; note = 2'-O-methyl ribonucleotide
  modified_base 71: mod_base = OTHER; note = 2'-O-methyl ribonucleotide
  modified_base 72: mod_base = OTHER; note = 2'-O-methyl ribonucleotide
  modified_base 74: mod_base = OTHER; note = 2'-O-methyl ribonucleotide
  modified_base 75: mod_base = OTHER; note = 2'-O-methyl ribonucleotide
  modified_base 76: mod_base = OTHER; note = 2'-O-methyl ribonucleotide
  modified_base 77: mod_base = OTHER; note = 2'-O-methyl ribonucleotide
  modified_base 78: mod_base = OTHER; note = 2'-O-methyl ribonucleotide
  modified_base 79: mod_base = OTHER; note = 2'-O-methyl ribonucleotide
  modified_base 80: mod_base = OTHER; note = 2'-O-methyl ribonucleotide
  modified_base 81: mod_base = OTHER; note = 2'-O-methyl ribonucleotide
  modified_base 83: mod_base = OTHER; note = 2'-O-methyl ribonucleotide
  modified_base 84: mod_base = OTHER; note = 2'-O-methyl ribonucleotide
  modified_base 85: mod_base = OTHER; note = 2'-O-methyl ribonucleotide
  modified_base 86: mod_base = OTHER; note = 2'-O-methyl ribonucleotide
  modified_base 87: mod_base = OTHER; note = 2'-O-methyl ribonucleotide
  modified_base 88: mod_base = OTHER; note = 2'-O-methyl ribonucleotide
  modified_base 89: mod_base = OTHER; note = 2'-O-methyl ribonucleotide
  modified_base 90: mod_base = OTHER; note = 2'-O-methyl ribonucleotide
  modified_base 91: mod_base = OTHER; note = 2'-O-methyl ribonucleotide
  modified_base 92: mod_base = OTHER; note = 2'-O-methyl ribonucleotide
  modified_base 93: mod_base = OTHER; note = 2'-O-methyl ribonucleotide
  modified_base 94: mod_base = OTHER; note = 2'-O-methyl ribonucleotide
  modified_base 95: mod_base = OTHER; note = 2'-O-methyl ribonucleotide
  modified_base 96: mod_base = OTHER; note = 2'-O-methyl ribonucleotide
  modified_base 97: mod_base = OTHER; note = 2'-O-methyl ribonucleotide
  modified_base 98: mod_base = OTHER; note = 2'-O-methyl ribonucleotide
  modified_base 99: mod_base = OTHER; note = 2'-O-methyl ribonucleotide
  modified_base 100: mod_base = OTHER; note = 2'-O-methyl ribonucleotide
  modified_base 1..4: mod_base = OTHER; note = phosphorothioate linkage
  modified_base 64..65: mod_base = OTHER; note = phosphorothioate linkage
  modified_base 97..100: mod_base = OTHER; note = phosphorothioate linkage

SEQ ID NO: 2467 - RNA, 103 nt, synthetic construct; identical to SEQ ID NO: 1700
  source 1..103: mol_type = other RNA
  modified_base 1: mod_base = OTHER; note = 2'-O-methyl ribonucleotide
  modified_base 2: mod_base = OTHER; note = 2'-O-methyl ribonucleotide
  modified_base 3: mod_base = OTHER; note = 2'-O-methyl ribonucleotide
  modified_base 21: mod_base = OTHER; note = 2'-O-methyl ribonucleotide
  modified_base 28: mod_base = OTHER; note = 2'-O-methyl ribonucleotide
  modified_base 29: mod_base = OTHER; note = 2'-O-methyl ribonucleotide
  modified_base 30: mod_base = OTHER; note = 2'-O-methyl ribonucleotide
  modified_base 31: mod_base = OTHER; note = 2'-O-methyl ribonucleotide
  modified_base 32: mod_base = OTHER; note = 2'-O-methyl ribonucleotide
  modified_base 33: mod_base = OTHER; note = 2'-O-methyl ribonucleotide
  modified_base 34: mod_base = OTHER; note = 2'-O-methyl ribonucleotide
  modified_base 35: mod_base = OTHER; note = 2'-O-methyl ribonucleotide
  modified_base 36: mod_base = OTHER; note = 2'-O-methyl ribonucleotide
  modified_base 37: mod_base = OTHER; note = 2'-O-methyl ribonucleotide
  modified_base 38: mod_base = OTHER; note = 2'-O-methyl ribonucleotide
  modified_base 39: mod_base = OTHER; note = 2'-O-methyl ribonucleotide
  modified_base 40: mod_base = OTHER; note = 2'-O-methyl ribonucleotide
  modified_base 41: mod_base = OTHER; note = 2'-O-methyl ribonucleotide
  modified_base 42: mod_base = OTHER; note = 2'-O-methyl ribonucleotide
  modified_base 46: mod_base = OTHER; note = 2'-O-methyl ribonucleotide
  modified_base 48: mod_base = OTHER; note = 2'-O-methyl ribonucleotide
  modified_base 50: mod_base = OTHER; note = 2'-O-methyl ribonucleotide
  modified_base 52: mod_base = OTHER; note = 2'-O-methyl ribonucleotide
  modified_base 53: mod_base = OTHER; note = 2'-O-methyl ribonucleotide
  modified_base 54: mod_base = OTHER; note = 2'-O-methyl ribonucleotide
  modified_base 57: mod_base = OTHER; note = 2'-O-methyl ribonucleotide
  modified_base 61: mod_base = OTHER; note = 2'-O-methyl ribonucleotide
  modified_base 66: mod_base = OTHER; note = 2'-O-methyl ribonucleotide
  modified_base 67: mod_base = OTHER; note = 2'-O-methyl ribonucleotide
  modified_base 70: mod_base = OTHER; note = 2'-O-methyl ribonucleotide
  modified_base 71: mod_base = OTHER; note = 2'-O-methyl ribonucleotide
  modified_base 72: mod_base = OTHER; note = 2'-O-methyl ribonucleotide
  modified_base 74: mod_base = OTHER; note = 2'-O-methyl ribonucleotide
  modified_base 75: mod_base = OTHER; note = 2'-O-methyl ribonucleotide
  modified_base 76: mod_base = OTHER; note = 2'-O-methyl ribonucleotide
  modified_base 77: mod_base = OTHER; note = 2'-O-methyl ribonucleotide
  modified_base 78: mod_base = OTHER; note = 2'-O-methyl ribonucleotide
  modified_base 79: mod_base = OTHER; note = 2'-O-methyl ribonucleotide
  modified_base 80: mod_base = OTHER; note = 2'-O-methyl ribonucleotide
  modified_base 82: mod_base = OTHER; note = 2'-O-methyl ribonucleotide
  modified_base 83: mod_base = OTHER; note = 2'-O-methyl ribonucleotide
  modified_base 84: mod_base = OTHER; note = 2'-O-methyl ribonucleotide
  modified_base 85: mod_base = OTHER; note = 2'-O-methyl ribonucleotide
  modified_base 86: mod_base = OTHER; note = 2'-O-methyl ribonucleotide
  modified_base 87: mod_base = OTHER; note = 2'-O-methyl ribonucleotide
  modified_base 89: mod_base = OTHER; note = 2'-O-methyl ribonucleotide
  modified_base 92: mod_base = OTHER; note = 2'-O-methyl ribonucleotide
  modified_base 93: mod_base = OTHER; note = 2'-O-methyl ribonucleotide
  modified_base 94: mod_base = OTHER; note = 2'-O-methyl ribonucleotide
  modified_base 95: mod_base = OTHER; note = 2'-O-methyl ribonucleotide
  modified_base 96: mod_base = OTHER; note = 2'-O-methyl ribonucleotide
  modified_base 97: mod_base = OTHER; note = 2'-O-methyl ribonucleotide
  modified_base 98: mod_base = OTHER; note = 2'-O-methyl ribonucleotide
  modified_base 99: mod_base = OTHER; note = 2'-O-methyl ribonucleotide
  modified_base 100: mod_base = OTHER; note = 2'-O-methyl ribonucleotide
  modified_base 1..4: mod_base = OTHER; note = phosphorothioate linkage
  modified_base 64..65: mod_base = OTHER; note = phosphorothioate linkage
  modified_base 97..100: mod_base = OTHER; note = phosphorothioate linkage

SEQ ID NO: 2468 - RNA, 103 nt, synthetic construct; identical to SEQ ID NO: 1700
  source 1..103: mol_type = other RNA
  modified_base 1: mod_base = OTHER; note = 2'-O-methyl ribonucleotide
  modified_base 2: mod_base = OTHER; note = 2'-O-methyl ribonucleotide
  modified_base 3: mod_base = OTHER; note = 2'-O-methyl ribonucleotide
  modified_base 21: mod_base = OTHER; note = 2'-O-methyl ribonucleotide
  modified_base 28: mod_base = OTHER; note = 2'-O-methyl ribonucleotide
  modified_base 29: mod_base = OTHER; note = 2'-O-methyl ribonucleotide
  modified_base 30: mod_base = OTHER; note = 2'-O-methyl ribonucleotide
  modified_base 31: mod_base = OTHER; note = 2'-O-methyl ribonucleotide
  modified_base 32: mod_base = OTHER; note = 2'-O-methyl ribonucleotide
  modified_base 33: mod_base = OTHER; note = 2'-O-methyl ribonucleotide
  modified_base 34: mod_base = OTHER; note = 2'-O-methyl ribonucleotide
  modified_base 35: mod_base = OTHER; note = 2'-O-methyl ribonucleotide
  modified_base 36: mod_base = OTHER; note = 2'-O-methyl ribonucleotide
  modified_base 37: mod_base = OTHER; note = 2'-O-methyl ribonucleotide
  modified_base 38: mod_base = OTHER; note = 2'-O-methyl ribonucleotide
  modified_base 39: mod_base = OTHER; note = 2'-O-methyl ribonucleotide
  modified_base 40: mod_base = OTHER; note = 2'-O-methyl ribonucleotide
  modified_base 41: mod_base = OTHER; note = 2'-O-methyl ribonucleotide
  modified_base 42: mod_base = OTHER; note = 2'-O-methyl ribonucleotide
  modified_base 46: mod_base = OTHER; note = 2'-O-methyl ribonucleotide
  modified_base 48: mod_base = OTHER; note = 2'-O-methyl ribonucleotide
  modified_base 50: mod_base = OTHER; note = 2'-O-methyl ribonucleotide
  modified_base 52: mod_base = OTHER; note = 2'-O-methyl ribonucleotide
  modified_base 53: mod_base = OTHER; note = 2'-O-methyl ribonucleotide
  modified_base 54: mod_base = OTHER; note = 2'-O-methyl ribonucleotide
  modified_base 55: mod_base = OTHER; note = 2'-O-methyl ribonucleotide
  modified_base 56: mod_base = OTHER; note = 2'-O-methyl ribonucleotide
  modified_base 57: mod_base = OTHER; note = 2'-O-methyl ribonucleotide
  modified_base 60: mod_base = OTHER; note = 2'-O-methyl ribonucleotide
  modified_base 61: mod_base = OTHER; note = 2'-O-methyl ribonucleotide
  modified_base 66: mod_base = OTHER; note = 2'-O-methyl ribonucleotide
  modified_base 67: mod_base = OTHER; note = 2'-O-methyl ribonucleotide
  modified_base 70: mod_base = OTHER; note = 2'-O-methyl ribonucleotide
  modified_base 71: mod_base = OTHER; note = 2'-O-methyl ribonucleotide
  modified_base 72: mod_base = OTHER; note = 2'-O-methyl ribonucleotide
  modified_base 74: mod_base = OTHER; note = 2'-O-methyl ribonucleotide
  modified_base 75: mod_base = OTHER; note = 2'-O-methyl ribonucleotide
  modified_base 76: mod_base = OTHER; note = 2'-O-methyl ribonucleotide
  modified_base 77: mod_base = OTHER; note = 2'-O-methyl ribonucleotide
  modified_base 78: mod_base = OTHER; note = 2'-O-methyl ribonucleotide
  modified_base 79: mod_base = OTHER; note = 2'-O-methyl ribonucleotide
  modified_base 80: mod_base = OTHER; note = 2'-O-methyl ribonucleotide
  modified_base 82: mod_base = OTHER; note = 2'-O-methyl ribonucleotide
  modified_base 83: mod_base = OTHER; note = 2'-O-methyl ribonucleotide
  modified_base 84: mod_base = OTHER; note = 2'-O-methyl ribonucleotide
  modified_base 85: mod_base = OTHER; note = 2'-O-methyl ribonucleotide
  modified_base 86: mod_base = OTHER; note = 2'-O-methyl ribonucleotide
  modified_base 87: mod_base = OTHER; note = 2'-O-methyl ribonucleotide
  modified_base 89: mod_base = OTHER; note = 2'-O-methyl ribonucleotide
  modified_base 92: mod_base = OTHER; note = 2'-O-methyl ribonucleotide
  modified_base 93: mod_base = OTHER; note = 2'-O-methyl ribonucleotide
  modified_base 94: mod_base = OTHER; note = 2'-O-methyl ribonucleotide
  modified_base 95: mod_base = OTHER; note = 2'-O-methyl ribonucleotide
  modified_base 96: mod_base = OTHER; note = 2'-O-methyl ribonucleotide
  modified_base 97: mod_base = OTHER; note = 2'-O-methyl ribonucleotide
  modified_base 98: mod_base = OTHER; note = 2'-O-methyl ribonucleotide
  modified_base 99: mod_base = OTHER; note = 2'-O-methyl ribonucleotide
  modified_base 100: mod_base = OTHER; note = 2'-O-methyl ribonucleotide
  modified_base 1..4: mod_base = OTHER; note = phosphorothioate linkage
  modified_base 64..65: mod_base = OTHER; note = phosphorothioate linkage
  modified_base 97..100: mod_base = OTHER; note = phosphorothioate linkage

SEQ ID NO: 2469 - RNA, 103 nt, synthetic construct; identical to SEQ ID NO: 1700
  source 1..103: mol_type = other RNA
  modified_base 1: mod_base = OTHER; note = 2'-O-methyl ribonucleotide
  modified_base 2: mod_base = OTHER; note = 2'-O-methyl ribonucleotide
  modified_base 3: mod_base = OTHER; note = 2'-O-methyl ribonucleotide
  modified_base 21: mod_base = OTHER; note = 2'-O-methyl ribonucleotide
  modified_base 28: mod_base = OTHER; note = 2'-O-methyl ribonucleotide
  modified_base 29: mod_base = OTHER; note = 2'-O-methyl ribonucleotide
  modified_base 30: mod_base = OTHER; note = 2'-O-methyl ribonucleotide
  modified_base 31: mod_base = OTHER; note = 2'-O-methyl ribonucleotide
  modified_base 32: mod_base = OTHER; note = 2'-O-methyl ribonucleotide
  modified_base 33: mod_base = OTHER; note = 2'-O-methyl ribonucleotide
  modified_base 34: mod_base = OTHER; note = 2'-O-methyl ribonucleotide
  modified_base 35: mod_base = OTHER; note = 2'-O-methyl ribonucleotide
  modified_base 36: mod_base = OTHER; note = 2'-O-methyl ribonucleotide
  modified_base 37: mod_base = OTHER; note = 2'-O-methyl ribonucleotide
  modified_base 38: mod_base = OTHER; note = 2'-O-methyl ribonucleotide
  modified_base 39: mod_base = OTHER; note = 2'-O-methyl ribonucleotide
  modified_base 40: mod_base = OTHER; note = 2'-O-methyl ribonucleotide
  modified_base 41: mod_base = OTHER; note = 2'-O-methyl ribonucleotide
  modified_base 42: mod_base = OTHER; note = 2'-O-methyl ribonucleotide
  modified_base 46: mod_base = OTHER; note = 2'-O-methyl ribonucleotide
  modified_base 48: mod_base = OTHER; note = 2'-O-methyl ribonucleotide
  modified_base 50: mod_base = OTHER; note = 2'-O-methyl ribonucleotide
  modified_base 52: mod_base = OTHER; note = 2'-O-methyl ribonucleotide
  modified_base 53: mod_base = OTHER; note = 2'-O-methyl ribonucleotide
  modified_base 54: mod_base = OTHER; note = 2'-O-methyl ribonucleotide
  modified_base 57: mod_base = OTHER; note = 2'-O-methyl ribonucleotide
  modified_base 61: mod_base = OTHER; note = 2'-O-methyl ribonucleotide
  modified_base 66: mod_base = OTHER; note = 2'-O-methyl ribonucleotide
  modified_base 67: mod_base = OTHER; note = 2'-O-methyl ribonucleotide
  modified_base 70: mod_base = OTHER; note = 2'-O-methyl ribonucleotide
  modified_base 71: mod_base = OTHER; note = 2'-O-methyl ribonucleotide
  modified_base 72: mod_base = OTHER; note = 2'-O-methyl ribonucleotide
  modified_base 73: mod_base = OTHER; note = 2'-O-methyl ribonucleotide
  modified_base 74: mod_base = OTHER; note = 2'-O-methyl ribonucleotide
  modified_base 75: mod_base = OTHER; note = 2'-O-methyl ribonucleotide
  modified_base 76: mod_base = OTHER; note = 2'-O-methyl ribonucleotide
  modified_base 77: mod_base = OTHER; note = 2'-O-methyl ribonucleotide
  modified_base 78: mod_base = OTHER; note = 2'-O-methyl ribonucleotide
  modified_base 79: mod_base = OTHER; note = 2'-O-methyl ribonucleotide
  modified_base 80: mod_base = OTHER; note = 2'-O-methyl ribonucleotide
  modified_base 82: mod_base = OTHER; note = 2'-O-methyl ribonucleotide
  modified_base 83: mod_base = OTHER; note = 2'-O-methyl ribonucleotide
  modified_base 84: mod_base = OTHER; note = 2'-O-methyl ribonucleotide
  modified_base 85: mod_base = OTHER; note = 2'-O-methyl ribonucleotide
  modified_base 86: mod_base = OTHER; note = 2'-O-methyl ribonucleotide
  modified_base 87: mod_base = OTHER; note = 2'-O-methyl ribonucleotide
  modified_base 89: mod_base = OTHER; note = 2'-O-methyl ribonucleotide
  modified_base 92: mod_base = OTHER; note = 2'-O-methyl ribonucleotide
  modified_base 93: mod_base = OTHER; note = 2'-O-methyl ribonucleotide
  modified_base 94: mod_base = OTHER; note = 2'-O-methyl ribonucleotide
  modified_base 95: mod_base = OTHER; note = 2'-O-methyl ribonucleotide
  modified_base 96: mod_base = OTHER; note = 2'-O-methyl ribonucleotide
  modified_base 97: mod_base = OTHER; note = 2'-O-methyl ribonucleotide
  modified_base 98: mod_base = OTHER; note = 2'-O-methyl ribonucleotide
  modified_base 99: mod_base = OTHER; note = 2'-O-methyl ribonucleotide
  modified_base 100: mod_base = OTHER; note = 2'-O-methyl ribonucleotide
  modified_base 1..4: mod_base = OTHER; note = phosphorothioate linkage
  modified_base 64..65: mod_base = OTHER; note = phosphorothioate linkage
  modified_base 97..100: mod_base = OTHER; note = phosphorothioate linkage

SEQ ID NO: 2470 - RNA, 103 nt, synthetic construct; identical to SEQ ID NO: 1700
  source 1..103: mol_type = other RNA
  modified_base 1: mod_base = OTHER; note = 2'-O-methyl ribonucleotide
  modified_base 2: mod_base = OTHER; note = 2'-O-methyl ribonucleotide
  modified_base 3: mod_base = OTHER; note = 2'-O-methyl ribonucleotide
  modified_base 21: mod_base = OTHER; note = 2'-O-methyl ribonucleotide
  modified_base 28: mod_base = OTHER; note = 2'-O-methyl ribonucleotide
  modified_base 29: mod_base = OTHER; note = 2'-O-methyl ribonucleotide
  modified_base 30: mod_base = OTHER; note = 2'-O-methyl ribonucleotide
  modified_base 31: mod_base = OTHER; note = 2'-O-methyl ribonucleotide
  modified_base 32: mod_base = OTHER; note = 2'-O-methyl ribonucleotide
  modified_base 33: mod_base = OTHER; note = 2'-O-methyl ribonucleotide
  modified_base 34: mod_base = OTHER; note = 2'-O-methyl ribonucleotide
  modified_base 35: mod_base = OTHER; note = 2'-O-methyl ribonucleotide
  modified_base 36: mod_base = OTHER; note = 2'-O-methyl ribonucleotide
  modified_base 37: mod_base = OTHER; note = 2'-O-methyl ribonucleotide
  modified_base 38: mod_base = OTHER; note = 2'-O-methyl ribonucleotide
  modified_base 39: mod_base = OTHER; note = 2'-O-methyl ribonucleotide
  modified_base 40: mod_base = OTHER; note = 2'-O-methyl ribonucleotide
  modified_base 41: mod_base = OTHER; note = 2'-O-methyl ribonucleotide
  modified_base 42: mod_base = OTHER; note = 2'-O-methyl ribonucleotide
  modified_base 46: mod_base = OTHER; note = 2'-O-methyl ribonucleotide
  modified_base 48: mod_base = OTHER; note = 2'-O-methyl ribonucleotide
  modified_base 50: mod_base = OTHER; note = 2'-O-methyl ribonucleotide
  modified_base 52: mod_base = OTHER; note = 2'-O-methyl ribonucleotide
  modified_base 53: mod_base = OTHER; note = 2'-O-methyl ribonucleotide
  modified_base 54: mod_base = OTHER; note = 2'-O-methyl ribonucleotide
  modified_base 57: mod_base = OTHER; note = 2'-O-methyl ribonucleotide
  modified_base 61: mod_base = OTHER; note = 2'-O-methyl ribonucleotide
  modified_base 66: mod_base = OTHER; note = 2'-O-methyl ribonucleotide
  modified_base 67: mod_base = OTHER; note = 2'-O-methyl ribonucleotide
  modified_base 70: mod_base = OTHER; note = 2'-O-methyl ribonucleotide
  modified_base 71: mod_base = OTHER; note = 2'-O-methyl ribonucleotide
  modified_base 72: mod_base = OTHER; note = 2'-O-methyl ribonucleotide
  modified_base 73: mod_base = OTHER; note = 2'-O-methyl ribonucleotide
  modified_base 74: mod_base = OTHER; note = 2'-O-methyl ribonucleotide
  modified_base 75: mod_base = OTHER; note = 2'-O-methyl ribonucleotide
  modified_base 76: mod_base = OTHER; note = 2'-O-methyl ribonucleotide
  modified_base 77: mod_base = OTHER; note = 2'-O-methyl ribonucleotide
  modified_base 78: mod_base = OTHER; note = 2'-O-methyl ribonucleotide
  modified_base 79: mod_base = OTHER; note = 2'-O-methyl ribonucleotide
  modified_base 80: mod_base = OTHER; note = 2'-O-methyl ribonucleotide
  modified_base 82: mod_base = OTHER; note = 2'-O-methyl ribonucleotide
  modified_base 83: mod_base = OTHER; note = 2'-O-methyl ribonucleotide
  modified_base 84: mod_base = OTHER; note = 2'-O-methyl ribonucleotide
  modified_base 85: mod_base = OTHER; note = 2'-O-methyl ribonucleotide
  modified_base 86: mod_base = OTHER; note = 2'-O-methyl ribonucleotide
  modified_base 87: mod_base = OTHER; note = 2'-O-methyl ribonucleotide
  modified_base 89: mod_base = OTHER; note = 2'-O-methyl ribonucleotide
  modified_base 91: mod_base = OTHER; note = 2'-O-methyl ribonucleotide
  modified_base 92: mod_base = OTHER; note = 2'-O-methyl ribonucleotide
  modified_base 93: mod_base = OTHER; note = 2'-O-methyl ribonucleotide
  modified_base 94: mod_base = OTHER; note = 2'-O-methyl ribonucleotide
  modified_base 95: mod_base = OTHER; note = 2'-O-methyl ribonucleotide
  modified_base 96: mod_base = OTHER; note = 2'-O-methyl ribonucleotide
  modified_base 97: mod_base = OTHER; note = 2'-O-methyl ribonucleotide
  modified_base 98: mod_base = OTHER; note = 2'-O-methyl ribonucleotide
  modified_base 99: mod_base = OTHER; note = 2'-O-methyl ribonucleotide
  modified_base 100: mod_base = OTHER; note = 2'-O-methyl ribonucleotide
  modified_base 1..4: mod_base = OTHER; note = phosphorothioate linkage
  modified_base 64..65: mod_base = OTHER; note = phosphorothioate linkage
  modified_base 97..100: mod_base = OTHER; note = phosphorothioate linkage

SEQ ID NO: 2471 - RNA, 103 nt, synthetic construct; identical to SEQ ID NO: 1700
  source 1..103: mol_type = other RNA
  modified_base 1: mod_base = OTHER; note = 2'-O-methyl ribonucleotide
  modified_base 2: mod_base = OTHER; note = 2'-O-methyl ribonucleotide
  modified_base 3: mod_base = OTHER; note = 2'-O-methyl ribonucleotide
  modified_base 21: mod_base = OTHER; note = 2'-O-methyl ribonucleotide
  modified_base 28: mod_base = OTHER; note = 2'-O-methyl ribonucleotide
  modified_base 29: mod_base = OTHER; note = 2'-O-methyl ribonucleotide
  modified_base 30: mod_base = OTHER; note = 2'-O-methyl ribonucleotide
  modified_base 31: mod_base = OTHER; note = 2'-O-methyl ribonucleotide
  modified_base 32: mod_base = OTHER; note = 2'-O-methyl ribonucleotide
  modified_base 34: mod_base = OTHER; note = 2'-O-methyl ribonucleotide
  modified_base 35: mod_base = OTHER; note = 2'-O-methyl ribonucleotide
  modified_base 36: mod_base = OTHER; note = 2'-O-methyl ribonucleotide
  modified_base 37: mod_base = OTHER; note = 2'-O-methyl ribonucleotide
  modified_base 38: mod_base = OTHER; note = 2'-O-methyl ribonucleotide
  modified_base 39: mod_base = OTHER; note = 2'-O-methyl ribonucleotide
  modified_base 40: mod_base = OTHER; note = 2'-O-methyl ribonucleotide
  modified_base 41: mod_base = OTHER; note = 2'-O-methyl ribonucleotide
  modified_base 42: mod_base = OTHER; note = 2'-O-methyl ribonucleotide
  modified_base 46: mod_base = OTHER; note = 2'-O-methyl ribonucleotide
  modified_base 48: mod_base = OTHER; note = 2'-O-methyl ribonucleotide
  modified_base 50: mod_base = OTHER; note = 2'-O-methyl ribonucleotide
  modified_base 52: mod_base = OTHER; note = 2'-O-methyl ribonucleotide
  modified_base 53: mod_base = OTHER; note = 2'-O-methyl ribonucleotide
  modified_base 54: mod_base = OTHER; note = 2'-O-methyl ribonucleotide
  modified_base 57: mod_base = OTHER; note = 2'-O-methyl ribonucleotide
  modified_base 61: mod_base = OTHER; note = 2'-O-methyl ribonucleotide
  modified_base 66: mod_base = OTHER; note = 2'-O-methyl ribonucleotide
  modified_base 67: mod_base = OTHER; note = 2'-O-methyl ribonucleotide
  modified_base 70: mod_base = OTHER; note = 2'-O-methyl ribonucleotide
  modified_base 71: mod_base = OTHER; note = 2'-O-methyl ribonucleotide
  modified_base 72: mod_base = OTHER; note = 2'-O-methyl ribonucleotide
  modified_base 73: mod_base = OTHER; note = 2'-O-methyl ribonucleotide
  modified_base 74: mod_base = OTHER; note = 2'-O-methyl ribonucleotide
  modified_base 75: mod_base = OTHER; note = 2'-O-methyl ribonucleotide
  modified_base 76: mod_base = OTHER; note = 2'-O-methyl ribonucleotide
  modified_base 77: mod_base = OTHER; note = 2'-O-methyl ribonucleotide
  modified_base 78: mod_base = OTHER; note = 2'-O-methyl ribonucleotide
  modified_base 79: mod_base = OTHER; note = 2'-O-methyl ribonucleotide
  modified_base 80: mod_base = OTHER; note = 2'-O-methyl ribonucleotide
  modified_base 82: mod_base = OTHER; note = 2'-O-methyl ribonucleotide
  modified_base 83: mod_base = OTHER; note = 2'-O-methyl ribonucleotide
  modified_base 84: mod_base = OTHER; note = 2'-O-methyl ribonucleotide
  modified_base 85: mod_base = OTHER; note = 2'-O-methyl ribonucleotide
  modified_base 86: mod_base = OTHER; note = 2'-O-methyl ribonucleotide
  modified_base 87: mod_base = OTHER; note = 2'-O-methyl ribonucleotide
  modified_base 89: mod_base = OTHER; note = 2'-O-methyl ribonucleotide
  modified_base 92: mod_base = OTHER; note = 2'-O-methyl ribonucleotide
  modified_base 93: mod_base = OTHER; note = 2'-O-methyl ribonucleotide
  modified_base 94: mod_base = OTHER; note = 2'-O-methyl ribonucleotide
  modified_base 95: mod_base = OTHER; note = 2'-O-methyl ribonucleotide
  modified_base 96: mod_base = OTHER; note = 2'-O-methyl ribonucleotide
  modified_base 97: mod_base = OTHER; note = 2'-O-methyl ribonucleotide
  modified_base 98: mod_base = OTHER; note = 2'-O-methyl ribonucleotide
  modified_base 99: mod_base = OTHER; note = 2'-O-methyl ribonucleotide
  modified_base 100: mod_base = OTHER; note = 2'-O-methyl ribonucleotide
  modified_base 1..4: mod_base = OTHER; note = phosphorothioate linkage
  modified_base 64..65: mod_base = OTHER; note = phosphorothioate linkage
  modified_base 97..100: mod_base = OTHER; note = phosphorothioate linkage

SEQ ID NO: 2472 - RNA, 103 nt, synthetic construct; identical to SEQ ID NO: 1700
  source 1..103: mol_type = other RNA
  modified_base 1: mod_base = OTHER; note = 2'-O-methyl ribonucleotide
  modified_base 2: mod_base = OTHER; note = 2'-O-methyl ribonucleotide
  modified_base 3: mod_base = OTHER; note = 2'-O-methyl ribonucleotide
  modified_base 21: mod_base = OTHER; note = 2'-O-methyl ribonucleotide
  modified_base 28: mod_base = OTHER; note = 2'-O-methyl ribonucleotide
  modified_base 29: mod_base = OTHER; note = 2'-O-methyl ribonucleotide
  modified_base 30: mod_base = OTHER; note = 2'-O-methyl ribonucleotide
  modified_base 31: mod_base = OTHER; note = 2'-O-methyl ribonucleotide
  modified_base 32: mod_base = OTHER; note = 2'-O-methyl ribonucleotide
  modified_base 34: mod_base = OTHER; note = 2'-O-methyl ribonucleotide
  modified_base 35: mod_base = OTHER; note = 2'-O-methyl ribonucleotide
  modified_base 36: mod_base = OTHER; note = 2'-O-methyl ribonucleotide
  modified_base 37: mod_base = OTHER; note = 2'-O-methyl ribonucleotide
  modified_base 38: mod_base = OTHER; note = 2'-O-methyl ribonucleotide
  modified_base 39: mod_base = OTHER; note = 2'-O-methyl ribonucleotide
  modified_base 40: mod_base = OTHER; note = 2'-O-methyl ribonucleotide
  modified_base 41: mod_base = OTHER; note = 2'-O-methyl ribonucleotide
  modified_base 42: mod_base = OTHER; note = 2'-O-methyl ribonucleotide
  modified_base 46: mod_base = OTHER; note = 2'-O-methyl ribonucleotide
  modified_base 48: mod_base = OTHER; note = 2'-O-methyl ribonucleotide
  modified_base 50: mod_base = OTHER; note = 2'-O-methyl ribonucleotide
  modified_base 52: mod_base = OTHER; note = 2'-O-methyl ribonucleotide
  modified_base 53: mod_base = OTHER; note = 2'-O-methyl ribonucleotide
  modified_base 54: mod_base = OTHER; note = 2'-O-methyl ribonucleotide
  modified_base 57: mod_base = OTHER; note = 2'-O-methyl ribonucleotide
  modified_base 61: mod_base = OTHER; note = 2'-O-methyl ribonucleotide
  modified_base 66: mod_base = OTHER; note = 2'-O-methyl ribonucleotide
  modified_base 67: mod_base = OTHER; note = 2'-O-methyl ribonucleotide
  modified_base 70: mod_base = OTHER; note = 2'-O-methyl ribonucleotide
  modified_base 71: mod_base = OTHER; note = 2'-O-methyl ribonucleotide
  modified_base 72: mod_base = OTHER; note = 2'-O-methyl ribonucleotide
  modified_base 73: mod_base = OTHER; note = 2'-O-methyl ribonucleotide
  modified_base 74: mod_base = OTHER; note = 2'-O-methyl ribonucleotide
  modified_base 75: mod_base = OTHER; note = 2'-O-methyl ribonucleotide
  modified_base 76: mod_base = OTHER; note = 2'-O-methyl ribonucleotide
  modified_base 77: mod_base = OTHER; note = 2'-O-methyl ribonucleotide
  modified_base 78: mod_base = OTHER; note = 2'-O-methyl ribonucleotide
  modified_base 79: mod_base = OTHER; note = 2'-O-methyl ribonucleotide
  modified_base 80: mod_base = OTHER; note = 2'-O-methyl ribonucleotide
  modified_base 82: mod_base = OTHER; note = 2'-O-methyl ribonucleotide
  modified_base 83: mod_base = OTHER; note = 2'-O-methyl ribonucleotide
  modified_base 84: mod_base = OTHER; note = 2'-O-methyl ribonucleotide
  modified_base 85: mod_base = OTHER; note = 2'-O-methyl ribonucleotide
  modified_base 86: mod_base = OTHER; note = 2'-O-methyl ribonucleotide
  modified_base 87: mod_base = OTHER; note = 2'-O-methyl ribonucleotide
  modified_base 89: mod_base = OTHER; note = 2'-O-methyl ribonucleotide
  modified_base 91: mod_base = OTHER; note = 2'-O-methyl ribonucleotide
  modified_base 92: mod_base = OTHER; note = 2'-O-methyl ribonucleotide
  modified_base 93: mod_base = OTHER; note = 2'-O-methyl ribonucleotide
  modified_base 94: mod_base = OTHER; note = 2'-O-methyl ribonucleotide
  modified_base 95: mod_base = OTHER; note = 2'-O-methyl ribonucleotide
  modified_base 96: mod_base = OTHER; note = 2'-O-methyl ribonucleotide
  modified_base 97: mod_base = OTHER; note = 2'-O-methyl ribonucleotide
  modified_base 98: mod_base = OTHER; note = 2'-O-methyl ribonucleotide
  modified_base 99: mod_base = OTHER; note = 2'-O-methyl ribonucleotide
  modified_base 100: mod_base = OTHER; note = 2'-O-methyl ribonucleotide
  modified_base 1..4: mod_base = OTHER; note = phosphorothioate linkage
  modified_base 64..65: mod_base = OTHER; note = phosphorothioate linkage
  modified_base 97..100: mod_base = OTHER; note = phosphorothioate linkage

SEQ ID NO: 2473 - RNA, 103 nt, synthetic construct; identical to SEQ ID NO: 1700
  source 1..103: mol_type = other RNA
  modified_base 1: mod_base = OTHER; note = 2'-O-methyl ribonucleotide
  modified_base 2: mod_base = OTHER; note = 2'-O-methyl ribonucleotide
  modified_base 3: mod_base = OTHER; note = 2'-O-methyl ribonucleotide
  modified_base 21: mod_base = OTHER; note = 2'-O-methyl ribonucleotide
  modified_base 28: mod_base = OTHER; note = 2'-O-methyl ribonucleotide
  modified_base 29: mod_base = OTHER; note = 2'-O-methyl ribonucleotide
  modified_base 30: mod_base = OTHER; note = 2'-O-methyl ribonucleotide
  modified_base 31: mod_base = OTHER; note = 2'-O-methyl ribonucleotide
  modified_base 32: mod_base = OTHER; note = 2'-O-methyl ribonucleotide
  modified_base 34: mod_base = OTHER; note = 2'-O-methyl ribonucleotide
  modified_base 35: mod_base = OTHER; note = 2'-O-methyl ribonucleotide
  modified_base 36: mod_base = OTHER; note = 2'-O-methyl ribonucleotide
  modified_base 37: mod_base = OTHER; note = 2'-O-methyl ribonucleotide
  modified_base 38: mod_base = OTHER; note = 2'-O-methyl ribonucleotide
  modified_base 39: mod_base = OTHER; note = 2'-O-methyl ribonucleotide
  modified_base 40: mod_base = OTHER; note = 2'-O-methyl ribonucleotide
  modified_base 41: mod_base = OTHER; note = 2'-O-methyl ribonucleotide
  modified_base 42: mod_base = OTHER; note = 2'-O-methyl ribonucleotide
  modified_base 46: mod_base = OTHER; note = 2'-O-methyl ribonucleotide
  modified_base 48: mod_base = OTHER; note = 2'-O-methyl ribonucleotide
  modified_base 50: mod_base = OTHER; note = 2'-O-methyl ribonucleotide
  modified_base 52: mod_base = OTHER; note = 2'-O-methyl ribonucleotide
  modified_base 53: mod_base = OTHER; note = 2'-O-methyl ribonucleotide
  modified_base 54: mod_base = OTHER; note = 2'-O-methyl ribonucleotide
  modified_base 55: mod_base = OTHER; note = 2'-O-methyl ribonucleotide
  modified_base 56: mod_base = OTHER; note = 2'-O-methyl ribonucleotide
  modified_base 57: mod_base = OTHER; note = 2'-O-methyl ribonucleotide
  modified_base 60: mod_base = OTHER; note = 2'-O-methyl ribonucleotide
  modified_base 61: mod_base = OTHER; note = 2'-O-methyl ribonucleotide
  modified_base 66: mod_base = OTHER; note = 2'-O-methyl ribonucleotide
  modified_base 67: mod_base = OTHER; note = 2'-O-methyl ribonucleotide
  modified_base 70: mod_base = OTHER; note = 2'-O-methyl ribonucleotide
  modified_base 71: mod_base = OTHER; note = 2'-O-methyl ribonucleotide
  modified_base 72: mod_base = OTHER; note = 2'-O-methyl ribonucleotide
  modified_base 74: mod_base = OTHER; note = 2'-O-methyl ribonucleotide
  modified_base 75: mod_base = OTHER; note = 2'-O-methyl ribonucleotide
  modified_base 76: mod_base = OTHER; note = 2'-O-methyl ribonucleotide
  modified_base 77: mod_base = OTHER; note = 2'-O-methyl ribonucleotide
  modified_base 78: mod_base = OTHER; note = 2'-O-methyl ribonucleotide
  modified_base 79: mod_base = OTHER; note = 2'-O-methyl ribonucleotide
  modified_base 80: mod_base = OTHER; note = 2'-O-methyl ribonucleotide
  modified_base 82: mod_base = OTHER; note = 2'-O-methyl ribonucleotide
  modified_base 83: mod_base = OTHER; note = 2'-O-methyl ribonucleotide
  modified_base 84: mod_base = OTHER; note = 2'-O-methyl ribonucleotide
  modified_base 85: mod_base = OTHER; note = 2'-O-methyl ribonucleotide
  modified_base 86: mod_base = OTHER; note = 2'-O-methyl ribonucleotide
  modified_base 87: mod_base = OTHER; note = 2'-O-methyl ribonucleotide
  modified_base 89: mod_base = OTHER; note = 2'-O-methyl ribonucleotide
  modified_base 92: mod_base = OTHER; note = 2'-O-methyl ribonucleotide
  modified_base 93: mod_base = OTHER; note = 2'-O-methyl ribonucleotide
  modified_base 94: mod_base = OTHER; note = 2'-O-methyl ribonucleotide
  modified_base 95: mod_base = OTHER; note = 2'-O-methyl ribonucleotide
  modified_base 96: mod_base = OTHER; note = 2'-O-methyl ribonucleotide
  modified_base 97: mod_base = OTHER; note = 2'-O-methyl ribonucleotide
  modified_base 98: mod_base = OTHER; note = 2'-O-methyl ribonucleotide
  modified_base 99: mod_base = OTHER; note = 2'-O-methyl ribonucleotide
  modified_base 100: mod_base = OTHER; note = 2'-O-methyl ribonucleotide
  modified_base 1..4: mod_base = OTHER; note = phosphorothioate linkage
  modified_base 64..65: mod_base = OTHER; note = phosphorothioate linkage
  modified_base 97..100: mod_base = OTHER; note = phosphorothioate linkage

SEQ ID NO: 2474 - RNA, 103 nt, synthetic construct; identical to SEQ ID NO: 1643
  source 1..103: mol_type = other RNA
  modified_base 1: mod_base = OTHER; note = 2'-O-methyl ribonucleotide
  modified_base 2: mod_base = OTHER; note = 2'-O-methyl ribonucleotide
  modified_base 3: mod_base = OTHER; note = 2'-O-methyl ribonucleotide
  modified_base 21: mod_base = OTHER; note = 2'-O-methyl ribonucleotide
  modified_base 28: mod_base = OTHER; note = 2'-O-methyl ribonucleotide
  modified_base 29: mod_base = OTHER; note = 2'-O-methyl ribonucleotide
  modified_base 30: mod_base = OTHER; note = 2'-O-methyl ribonucleotide
  modified_base 31: mod_base = OTHER; note = 2'-O-methyl ribonucleotide
  modified_base 32: mod_base = OTHER; note = 2'-O-methyl ribonucleotide
  modified_base 33: mod_base = OTHER; note = 2'-O-methyl ribonucleotide
  modified_base 34: mod_base = OTHER; note = 2'-O-methyl ribonucleotide
  modified_base 35: mod_base = OTHER; note = 2'-O-methyl ribonucleotide
  modified_base 36: mod_base = OTHER; note = 2'-O-methyl ribonucleotide
  modified_base 37: mod_base = OTHER; note = 2'-O-methyl ribonucleotide
  modified_base 38: mod_base = OTHER; note = 2'-O-methyl ribonucleotide
  modified_base 39: mod_base = OTHER; note = 2'-O-methyl ribonucleotide
  modified_base 40: mod_base = OTHER; note = 2'-O-methyl ribonucleotide
  modified_base 41: mod_base = OTHER; note = 2'-O-methyl ribonucleotide
  modified_base 42: mod_base = OTHER; note = 2'-O-methyl ribonucleotide
  modified_base 46: mod_base = OTHER; note = 2'-O-methyl ribonucleotide
  modified_base 48: mod_base = OTHER; note = 2'-O-methyl ribonucleotide
  modified_base 50: mod_base = OTHER; note = 2'-O-methyl ribonucleotide
  modified_base 52: mod_base = OTHER; note = 2'-O-methyl ribonucleotide
  modified_base 53: mod_base = OTHER; note = 2'-O-methyl ribonucleotide
  modified_base 54: mod_base = OTHER; note = 2'-O-methyl ribonucleotide
  modified_base 55: mod_base = OTHER; note = 2'-O-methyl ribonucleotide
  modified_base 56: mod_base = OTHER; note = 2'-O-methyl ribonucleotide
  modified_base 57: mod_base = OTHER; note = 2'-O-methyl ribonucleotide
  modified_base 60: mod_base = OTHER; note = 2'-O-methyl ribonucleotide
  modified_base 61: mod_base = OTHER; note = 2'-O-methyl ribonucleotide
  modified_base 66: mod_base = OTHER; note = 2'-O-methyl ribonucleotide
  modified_base 67: mod_base = OTHER; note = 2'-O-methyl ribonucleotide
  modified_base 70: mod_base = OTHER; note = 2'-O-methyl ribonucleotide
  modified_base 71: mod_base = OTHER; note = 2'-O-methyl ribonucleotide
  modified_base 72: mod_base = OTHER; note = 2'-O-methyl ribonucleotide
  modified_base 73: mod_base = OTHER; note = 2'-O-methyl ribonucleotide
  modified_base 74: mod_base = OTHER; note = 2'-O-methyl ribonucleotide
  modified_base 75: mod_base = OTHER; note = 2'-O-methyl ribonucleotide
  modified_base 76: mod_base = OTHER; note = 2'-O-methyl ribonucleotide
  modified_base 77: mod_base = OTHER; note = 2'-O-methyl ribonucleotide
  modified_base 78: mod_base = OTHER; note = 2'-O-methyl ribonucleotide
  modified_base 79: mod_base = OTHER; note = 2'-O-methyl ribonucleotide
  modified_base 80: mod_base = OTHER; note = 2'-O-methyl ribonucleotide
  modified_base 81: mod_base = OTHER; note = 2'-O-methyl ribonucleotide
  modified_base 83: mod_base = OTHER; note = 2'-O-methyl ribonucleotide
  modified_base 84: mod_base = OTHER; note = 2'-O-methyl ribonucleotide
  modified_base 85: mod_base = OTHER; note = 2'-O-methyl ribonucleotide
  modified_base 86: mod_base = OTHER; note = 2'-O-methyl ribonucleotide
  modified_base 87: mod_base = OTHER; note = 2'-O-methyl ribonucleotide
  modified_base 88: mod_base = OTHER; note = 2'-O-methyl ribonucleotide
  modified_base 89: mod_base = OTHER; note = 2'-O-methyl ribonucleotide
  modified_base 90: mod_base = OTHER; note = 2'-O-methyl ribonucleotide
  modified_base 91: mod_base = OTHER; note = 2'-O-methyl ribonucleotide
  modified_base 92: mod_base = OTHER; note = 2'-O-methyl ribonucleotide
  modified_base 93: mod_base = OTHER; note = 2'-O-methyl ribonucleotide
  modified_base 94: mod_base = OTHER; note = 2'-O-methyl ribonucleotide
  modified_base 95: mod_base = OTHER; note = 2'-O-methyl ribonucleotide
  modified_base 96: mod_base = OTHER; note = 2'-O-methyl ribonucleotide
  modified_base 97: mod_base = OTHER; note = 2'-O-methyl ribonucleotide
  modified_base 98: mod_base = OTHER; note = 2'-O-methyl ribonucleotide
  modified_base 99: mod_base = OTHER; note = 2'-O-methyl ribonucleotide
  modified_base 100: mod_base = OTHER; note = 2'-O-methyl ribonucleotide
  modified_base 1..4: mod_base = OTHER; note = phosphorothioate linkage
  modified_base 45..46: mod_base = OTHER; note = phosphorothioate linkage
  modified_base 97..100: mod_base = OTHER; note = phosphorothioate linkage

SEQ ID NO: 2475 - RNA, 103 nt, synthetic construct; identical to SEQ ID NO: 1643
  source 1..103: mol_type = other RNA
  modified_base 1: mod_base = OTHER; note = 2'-O-methyl ribonucleotide
  modified_base 2: mod_base = OTHER; note = 2'-O-methyl ribonucleotide
  modified_base 3: mod_base = OTHER; note = 2'-O-methyl ribonucleotide
  modified_base 21: mod_base = OTHER; note = 2'-O-methyl ribonucleotide
  modified_base 28: mod_base = OTHER; note = 2'-O-methyl ribonucleotide
  modified_base 29: mod_base = OTHER; note = 2'-O-methyl ribonucleotide
  modified_base 30: mod_base = OTHER; note = 2'-O-methyl ribonucleotide
  modified_base 31: mod_base = OTHER; note = 2'-O-methyl ribonucleotide
  modified_base 32: mod_base = OTHER; note = 2'-O-methyl ribonucleotide
  modified_base 34: mod_base = OTHER; note = 2'-O-methyl ribonucleotide
  modified_base 35: mod_base = OTHER; note = 2'-O-methyl ribonucleotide
  modified_base 36: mod_base = OTHER; note = 2'-O-methyl ribonucleotide
  modified_base 37: mod_base = OTHER; note = 2'-O-methyl ribonucleotide
  modified_base 38: mod_base = OTHER; note = 2'-O-methyl ribonucleotide
  modified_base 39: mod_base = OTHER; note = 2'-O-methyl ribonucleotide
  modified_base 40: mod_base = OTHER; note = 2'-O-methyl ribonucleotide
  modified_base 41: mod_base = OTHER; note = 2'-O-methyl ribonucleotide
  modified_base 42: mod_base = OTHER; note = 2'-O-methyl ribonucleotide
  modified_base 46: mod_base = OTHER; note = 2'-O-methyl ribonucleotide
  modified_base 48: mod_base = OTHER; note = 2'-O-methyl ribonucleotide
  modified_base 50: mod_base = OTHER; note = 2'-O-methyl ribonucleotide
  modified_base 52: mod_base = OTHER; note = 2'-O-methyl ribonucleotide
  modified_base 53: mod_base = OTHER; note = 2'-O-methyl ribonucleotide
  modified_base 54: mod_base = OTHER; note = 2'-O-methyl ribonucleotide
  modified_base 55: mod_base = OTHER; note = 2'-O-methyl ribonucleotide
  modified_base 56: mod_base = OTHER; note = 2'-O-methyl ribonucleotide
  modified_base 57: mod_base = OTHER; note = 2'-O-methyl ribonucleotide
  modified_base 60: mod_base = OTHER; note = 2'-O-methyl ribonucleotide
  modified_base 61: mod_base = OTHER; note = 2'-O-methyl ribonucleotide
  modified_base 66: mod_base = OTHER; note = 2'-O-methyl ribonucleotide
  modified_base 67: mod_base = OTHER; note = 2'-O-methyl ribonucleotide
  modified_base 70: mod_base = OTHER; note = 2'-O-methyl ribonucleotide
  modified_base 71: mod_base = OTHER; note = 2'-O-methyl ribonucleotide
  modified_base 72: mod_base = OTHER; note = 2'-O-methyl ribonucleotide
  modified_base 74: mod_base = OTHER; note = 2'-O-methyl ribonucleotide
  modified_base 75: mod_base = OTHER; note = 2'-O-methyl ribonucleotide
  modified_base 76: mod_base = OTHER; note = 2'-O-methyl ribonucleotide
  modified_base 77: mod_base = OTHER; note = 2'-O-methyl ribonucleotide
  modified_base 78: mod_base = OTHER; note = 2'-O-methyl ribonucleotide
  modified_base 79: mod_base = OTHER; note = 2'-O-methyl ribonucleotide
  modified_base 80: mod_base = OTHER; note = 2'-O-methyl ribonucleotide
  modified_base 81: mod_base = OTHER; note = 2'-O-methyl ribonucleotide
  modified_base 83: mod_base = OTHER; note = 2'-O-methyl ribonucleotide
  modified_base 84: mod_base = OTHER; note = 2'-O-methyl ribonucleotide
  modified_base 85: mod_base = OTHER; note = 2'-O-methyl ribonucleotide
  modified_base 86: mod_base = OTHER; note = 2'-O-methyl ribonucleotide
  modified_base 87: mod_base = OTHER; note = 2'-O-methyl ribonucleotide
  modified_base 88: mod_base = OTHER; note = 2'-O-methyl ribonucleotide
  modified_base 89: mod_base = OTHER; note = 2'-O-methyl ribonucleotide
  modified_base 90: mod_base = OTHER; note = 2'-O-methyl ribonucleotide
  modified_base 91: mod_base = OTHER; note = 2'-O-methyl ribonucleotide
  modified_base 92: mod_base = OTHER; note = 2'-O-methyl ribonucleotide
  modified_base 93: mod_base = OTHER; note = 2'-O-methyl ribonucleotide
  modified_base 94: mod_base = OTHER; note = 2'-O-methyl ribonucleotide
  modified_base 95: mod_base = OTHER; note = 2'-O-methyl ribonucleotide
  modified_base 96: mod_base = OTHER; note = 2'-O-methyl ribonucleotide
  modified_base 97: mod_base = OTHER; note = 2'-O-methyl ribonucleotide
  modified_base 98: mod_base = OTHER; note = 2'-O-methyl ribonucleotide
  modified_base 99: mod_base = OTHER; note = 2'-O-methyl ribonucleotide
  modified_base 100: mod_base = OTHER; note = 2'-O-methyl ribonucleotide
  modified_base 1..4: mod_base = OTHER; note = phosphorothioate linkage
  modified_base 45..46: mod_base = OTHER; note = phosphorothioate linkage
  modified_base 97..100: mod_base = OTHER; note = phosphorothioate linkage

SEQ ID NO: 2476 - RNA, 103 nt, synthetic construct; identical to SEQ ID NO: 1699
  source 1..103: mol_type = other RNA
  modified_base 1: mod_base = OTHER; note = 2'-O-methyl ribonucleotide
  modified_base 2: mod_base = OTHER; note = 2'-O-methyl ribonucleotide
  modified_base 3: mod_base = OTHER; note = 2'-O-methyl ribonucleotide
  modified_base 21: mod_base = OTHER; note = 2'-O-methyl ribonucleotide
  modified_base 28: mod_base = OTHER; note = 2'-O-methyl ribonucleotide
  modified_base 29: mod_base = OTHER; note = 2'-O-methyl ribonucleotide
  modified_base 30: mod_base = OTHER; note = 2'-O-methyl ribonucleotide
  modified_base 31: mod_base = OTHER; note = 2'-O-methyl ribonucleotide
  modified_base 32: mod_base = OTHER; note = 2'-O-methyl ribonucleotide
  modified_base 33: mod_base = OTHER; note = 2'-O-methyl ribonucleotide
  modified_base 34: mod_base = OTHER; note = 2'-O-methyl ribonucleotide
  modified_base 35: mod_base = OTHER; note = 2'-O-methyl ribonucleotide
  modified_base 36: mod_base = OTHER; note = 2'-O-methyl ribonucleotide
  modified_base 37: mod_base = OTHER; note = 2'-O-methyl ribonucleotide
  modified_base 38: mod_base = OTHER; note = 2'-O-methyl ribonucleotide
  modified_base 39: mod_base = OTHER; note = 2'-O-methyl ribonucleotide
  modified_base 40: mod_base = OTHER; note = 2'-O-methyl ribonucleotide
  modified_base 41: mod_base = OTHER; note = 2'-O-methyl ribonucleotide
  modified_base 42: mod_base = OTHER; note = 2'-O-methyl ribonucleotide
  modified_base 46: mod_base = OTHER; note = 2'-O-methyl ribonucleotide
  modified_base 48: mod_base = OTHER; note = 2'-O-methyl ribonucleotide
  modified_base 50: mod_base = OTHER; note = 2'-O-methyl ribonucleotide
  modified_base 52: mod_base = OTHER; note = 2'-O-methyl ribonucleotide
  modified_base 53: mod_base = OTHER; note = 2'-O-methyl ribonucleotide
  modified_base 54: mod_base = OTHER; note = 2'-O-methyl ribonucleotide
  modified_base 55: mod_base = OTHER; note = 2'-O-methyl ribonucleotide
  modified_base 56: mod_base = OTHER; note = 2'-O-methyl ribonucleotide
  modified_base 57: mod_base = OTHER; note = 2'-O-methyl ribonucleotide
  modified_base 60: mod_base = OTHER; note = 2'-O-methyl ribonucleotide
  modified_base 61: mod_base = OTHER; note = 2'-O-methyl ribonucleotide
  modified_base 66: mod_base = OTHER; note = 2'-O-methyl ribonucleotide
  modified_base 67: mod_base = OTHER; note = 2'-O-methyl ribonucleotide
  modified_base 70: mod_base = OTHER; note = 2'-O-methyl ribonucleotide
  modified_base 71: mod_base = OTHER; note = 2'-O-methyl ribonucleotide
  modified_base 72: mod_base = OTHER; note = 2'-O-methyl ribonucleotide
  modified_base 73: mod_base = OTHER; note = 2'-O-methyl ribonucleotide
  modified_base 74: mod_base = OTHER; note = 2'-O-methyl ribonucleotide
  modified_base 75: mod_base = OTHER; note = 2'-O-methyl ribonucleotide
  modified_base 76: mod_base = OTHER; note = 2'-O-methyl ribonucleotide
  modified_base 77: mod_base = OTHER; note = 2'-O-methyl ribonucleotide
  modified_base 78: mod_base = OTHER; note = 2'-O-methyl ribonucleotide
  modified_base 79: mod_base = OTHER; note = 2'-O-methyl ribonucleotide
  modified_base 80: mod_base = OTHER; note = 2'-O-methyl ribonucleotide
  modified_base 81: mod_base = OTHER; note = 2'-O-methyl ribonucleotide
  modified_base 83: mod_base = OTHER; note = 2'-O-methyl ribonucleotide
  modified_base 84: mod_base = OTHER; note = 2'-O-methyl ribonucleotide
  modified_base 85: mod_base = OTHER; note = 2'-O-methyl ribonucleotide
  modified_base 86: mod_base = OTHER; note = 2'-O-methyl ribonucleotide
  modified_base 87: mod_base = OTHER; note = 2'-O-methyl ribonucleotide
  modified_base 88: mod_base = OTHER; note = 2'-O-methyl ribonucleotide
  modified_base 89: mod_base = OTHER; note = 2'-O-methyl ribonucleotide
  modified_base 90: mod_base = OTHER; note = 2'-O-methyl ribonucleotide
  modified_base 91: mod_base = OTHER; note = 2'-O-methyl ribonucleotide
  modified_base 92: mod_base = OTHER; note = 2'-O-methyl ribonucleotide
  modified_base 93: mod_base = OTHER; note = 2'-O-methyl ribonucleotide
  modified_base 94: mod_base = OTHER; note = 2'-O-methyl ribonucleotide
  modified_base 95: mod_base = OTHER; note = 2'-O-methyl ribonucleotide
  modified_base 96: mod_base = OTHER; note = 2'-O-methyl ribonucleotide
  modified_base 97: mod_base = OTHER; note = 2'-O-methyl ribonucleotide
  modified_base 98: mod_base = OTHER; note = 2'-O-methyl ribonucleotide
  modified_base 99: mod_base = OTHER; note = 2'-O-methyl ribonucleotide
  modified_base 100: mod_base = OTHER; note = 2'-O-methyl ribonucleotide
  modified_base 1..4: mod_base = OTHER; note = phosphorothioate linkage
  modified_base 45..46: mod_base = OTHER; note = phosphorothioate linkage
  modified_base 97..100: mod_base = OTHER; note = phosphorothioate linkage

SEQ ID NO: 2477 - RNA, 103 nt, synthetic construct; identical to SEQ ID NO: 1699
  source 1..103: mol_type = other RNA
  modified_base 1: mod_base = OTHER; note = 2'-O-methyl ribonucleotide
  modified_base 2: mod_base = OTHER; note = 2'-O-methyl ribonucleotide
  modified_base 3: mod_base = OTHER; note = 2'-O-methyl ribonucleotide
  modified_base 21: mod_base = OTHER; note = 2'-O-methyl ribonucleotide
  modified_base 28: mod_base = OTHER; note = 2'-O-methyl ribonucleotide
  modified_base 29: mod_base = OTHER; note = 2'-O-methyl ribonucleotide
  modified_base 30: mod_base = OTHER; note = 2'-O-methyl ribonucleotide
  modified_base 31: mod_base = OTHER; note = 2'-O-methyl ribonucleotide
  modified_base 32: mod_base = OTHER; note = 2'-O-methyl ribonucleotide
  modified_base 34: mod_base = OTHER; note = 2'-O-methyl ribonucleotide
  modified_base 35: mod_base = OTHER; note = 2'-O-methyl ribonucleotide
  modified_base 36: mod_base = OTHER; note = 2'-O-methyl ribonucleotide
  modified_base 37: mod_base = OTHER; note = 2'-O-methyl ribonucleotide
  modified_base 38: mod_base = OTHER; note = 2'-O-methyl ribonucleotide
  modified_base 39: mod_base = OTHER; note = 2'-O-methyl ribonucleotide
  modified_base 40: mod_base = OTHER; note = 2'-O-methyl ribonucleotide
  modified_base 41: mod_base = OTHER; note = 2'-O-methyl ribonucleotide
  modified_base 42: mod_base = OTHER; note = 2'-O-methyl ribonucleotide
  modified_base 46: mod_base = OTHER; note = 2'-O-methyl ribonucleotide
  modified_base 48: mod_base = OTHER; note = 2'-O-methyl ribonucleotide
  modified_base 50: mod_base = OTHER; note = 2'-O-methyl ribonucleotide
  modified_base 52: mod_base = OTHER; note = 2'-O-methyl ribonucleotide
  modified_base 53: mod_base = OTHER; note = 2'-O-methyl ribonucleotide
  modified_base 54: mod_base = OTHER; note = 2'-O-methyl ribonucleotide
  modified_base 55: mod_base = OTHER; note = 2'-O-methyl ribonucleotide
  modified_base 56: mod_base = OTHER; note = 2'-O-methyl ribonucleotide
  modified_base 57: mod_base = OTHER; note = 2'-O-methyl ribonucleotide
  modified_base 60: mod_base = OTHER; note = 2'-O-methyl ribonucleotide
  modified_base 61: mod_base = OTHER; note = 2'-O-methyl ribonucleotide
  modified_base 66: mod_base = OTHER; note = 2'-O-methyl ribonucleotide
  modified_base 67: mod_base = OTHER; note = 2'-O-methyl ribonucleotide
  modified_base 70: mod_base = OTHER; note = 2'-O-methyl ribonucleotide
  modified_base 71: mod_base = OTHER; note = 2'-O-methyl ribonucleotide
  modified_base 72: mod_base = OTHER; note = 2'-O-methyl ribonucleotide
  modified_base 74: mod_base = OTHER; note = 2'-O-methyl ribonucleotide
  modified_base 75: mod_base = OTHER; note = 2'-O-methyl ribonucleotide
  modified_base 76: mod_base = OTHER; note = 2'-O-methyl ribonucleotide
  modified_base 77: mod_base = OTHER; note = 2'-O-methyl ribonucleotide
  modified_base 78: mod_base = OTHER; note = 2'-O-methyl ribonucleotide
  modified_base 79: mod_base = OTHER; note = 2'-O-methyl ribonucleotide
  modified_base 80: mod_base = OTHER; note = 2'-O-methyl ribonucleotide
  modified_base 81: mod_base = OTHER; note = 2'-O-methyl ribonucleotide
  modified_base 83: mod_base = OTHER; note = 2'-O-methyl ribonucleotide
  modified_base 84: mod_base = OTHER; note = 2'-O-methyl ribonucleotide
  modified_base 85: mod_base = OTHER; note = 2'-O-methyl ribonucleotide
  modified_base 86: mod_base = OTHER; note = 2'-O-methyl ribonucleotide
  modified_base 87: mod_base = OTHER; note = 2'-O-methyl ribonucleotide
  modified_base 88: mod_base = OTHER; note = 2'-O-methyl ribonucleotide
  modified_base 89: mod_base = OTHER; note = 2'-O-methyl ribonucleotide
  modified_base 90: mod_base = OTHER; note = 2'-O-methyl ribonucleotide
  modified_base 91: mod_base = OTHER; note = 2'-O-methyl ribonucleotide
  modified_base 92: mod_base = OTHER; note = 2'-O-methyl ribonucleotide
  modified_base 93: mod_base = OTHER; note = 2'-O-methyl ribonucleotide
  modified_base 94: mod_base = OTHER; note = 2'-O-methyl ribonucleotide
  modified_base 95: mod_base = OTHER; note = 2'-O-methyl ribonucleotide
  modified_base 96: mod_base = OTHER; note = 2'-O-methyl ribonucleotide
  modified_base 97: mod_base = OTHER; note = 2'-O-methyl ribonucleotide
  modified_base 98: mod_base = OTHER; note = 2'-O-methyl ribonucleotide
  modified_base 99: mod_base = OTHER; note = 2'-O-methyl ribonucleotide
  modified_base 100: mod_base = OTHER; note = 2'-O-methyl ribonucleotide
  modified_base 1..4: mod_base = OTHER; note = phosphorothioate linkage
  modified_base 45..46: mod_base = OTHER; note = phosphorothioate linkage
  modified_base 97..100: mod_base = OTHER; note = phosphorothioate linkage

SEQ ID NO: 2478 - RNA, 103 nt, synthetic construct; identical to SEQ ID NO: 1700
  source 1..103: mol_type = other RNA
  modified_base 1: mod_base = OTHER; note = 2'-O-methyl ribonucleotide
  modified_base 2: mod_base = OTHER; note = 2'-O-methyl ribonucleotide
  modified_base 3: mod_base = OTHER; note = 2'-O-methyl ribonucleotide
  modified_base 21: mod_base = OTHER; note = 2'-O-methyl ribonucleotide
  modified_base 28: mod_base = OTHER; note = 2'-O-methyl ribonucleotide
  modified_base 29: mod_base = OTHER; note = 2'-O-methyl ribonucleotide
  modified_base 30: mod_base = OTHER; note = 2'-O-methyl ribonucleotide
  modified_base 31: mod_base = OTHER; note = 2'-O-methyl ribonucleotide
  modified_base 32: mod_base = OTHER; note = 2'-O-methyl ribonucleotide
  modified_base 33: mod_base = OTHER; note = 2'-O-methyl ribonucleotide
  modified_base 34: mod_base = OTHER; note = 2'-O-methyl ribonucleotide
  modified_base 35: mod_base = OTHER; note = 2'-O-methyl ribonucleotide
  modified_base 36: mod_base = OTHER; note = 2'-O-methyl ribonucleotide
  modified_base 37: mod_base = OTHER; note = 2'-O-methyl ribonucleotide
  modified_base 38: mod_base = OTHER; note = 2'-O-methyl ribonucleotide
  modified_base 39: mod_base = OTHER; note = 2'-O-methyl ribonucleotide
  modified_base 40: mod_base = OTHER; note = 2'-O-methyl ribonucleotide
  modified_base 41: mod_base = OTHER; note = 2'-O-methyl ribonucleotide
  modified_base 42: mod_base = OTHER; note = 2'-O-methyl ribonucleotide
  modified_base 46: mod_base = OTHER; note = 2'-O-methyl ribonucleotide
  modified_base 48: mod_base = OTHER; note = 2'-O-methyl ribonucleotide
  modified_base 50: mod_base = OTHER; note = 2'-O-methyl ribonucleotide
  modified_base 52: mod_base = OTHER; note = 2'-O-methyl ribonucleotide
  modified_base 53: mod_base = OTHER; note = 2'-O-methyl ribonucleotide
  modified_base 54: mod_base = OTHER; note = 2'-O-methyl ribonucleotide
  modified_base 57: mod_base = OTHER; note = 2'-O-methyl ribonucleotide
  modified_base 61: mod_base = OTHER; note = 2'-O-methyl ribonucleotide
  modified_base 66: mod_base = OTHER; note = 2'-O-methyl ribonucleotide
  modified_base 67: mod_base = OTHER; note = 2'-O-methyl ribonucleotide
  modified_base 70: mod_base = OTHER; note = 2'-O-methyl ribonucleotide
  modified_base 71: mod_base = OTHER; note = 2'-O-methyl ribonucleotide
  modified_base 72: mod_base = OTHER; note = 2'-O-methyl ribonucleotide
  modified_base 74: mod_base = OTHER; note = 2'-O-methyl ribonucleotide
  modified_base 75: mod_base = OTHER; note = 2'-O-methyl ribonucleotide
  modified_base 76: mod_base = OTHER; note = 2'-O-methyl ribonucleotide
  modified_base 77: mod_base = OTHER; note = 2'-O-methyl ribonucleotide
  modified_base 78: mod_base = OTHER; note = 2'-O-methyl ribonucleotide
  modified_base 79: mod_base = OTHER; note = 2'-O-methyl ribonucleotide
  modified_base 80: mod_base = OTHER; note = 2'-O-methyl ribonucleotide
  modified_base 82: mod_base = OTHER; note = 2'-O-methyl ribonucleotide
  modified_base 83: mod_base = OTHER; note = 2'-O-methyl ribonucleotide
  modified_base 84: mod_base = OTHER; note = 2'-O-methyl ribonucleotide
  modified_base 85: mod_base = OTHER; note = 2'-O-methyl ribonucleotide
  modified_base 86: mod_base = OTHER; note = 2'-O-methyl ribonucleotide
  modified_base 87: mod_base = OTHER; note = 2'-O-methyl ribonucleotide
  modified_base 89: mod_base = OTHER; note = 2'-O-methyl ribonucleotide
  modified_base 92: mod_base = OTHER; note = 2'-O-methyl ribonucleotide
  modified_base 93: mod_base = OTHER; note = 2'-O-methyl ribonucleotide
  modified_base 94: mod_base = OTHER; note = 2'-O-methyl ribonucleotide
  modified_base 95: mod_base = OTHER; note = 2'-O-methyl ribonucleotide
  modified_base 96: mod_base = OTHER; note = 2'-O-methyl ribonucleotide
  modified_base 97: mod_base = OTHER; note = 2'-O-methyl ribonucleotide
  modified_base 98: mod_base = OTHER; note = 2'-O-methyl ribonucleotide
  modified_base 99: mod_base = OTHER; note = 2'-O-methyl ribonucleotide
  modified_base 100: mod_base = OTHER; note = 2'-O-methyl ribonucleotide
  modified_base 1..4: mod_base = OTHER; note = phosphorothioate linkage
  modified_base 45..46: mod_base = OTHER; note = phosphorothioate linkage
  modified_base 97..100: mod_base = OTHER; note = phosphorothioate linkage

SEQ ID NO: 2479 - RNA, 103 nt, synthetic construct; identical to SEQ ID NO: 1700
  source 1..103: mol_type = other RNA
  modified_base 1: mod_base = OTHER; note = 2'-O-methyl ribonucleotide
  modified_base 2: mod_base = OTHER; note = 2'-O-methyl ribonucleotide
  modified_base 3: mod_base = OTHER; note = 2'-O-methyl ribonucleotide
  modified_base 21: mod_base = OTHER; note = 2'-O-methyl ribonucleotide
  modified_base 28: mod_base = OTHER; note = 2'-O-methyl ribonucleotide
  modified_base 29: mod_base = OTHER; note = 2'-O-methyl ribonucleotide
  modified_base 30: mod_base = OTHER; note = 2'-O-methyl ribonucleotide
  modified_base 31: mod_base = OTHER; note = 2'-O-methyl ribonucleotide
  modified_base 32: mod_base = OTHER; note = 2'-O-methyl ribonucleotide
  modified_base 33: mod_base = OTHER; note = 2'-O-methyl ribonucleotide
  modified_base 34: mod_base = OTHER; note = 2'-O-methyl ribonucleotide
  modified_base 35: mod_base = OTHER; note = 2'-O-methyl ribonucleotide
  modified_base 36: mod_base = OTHER; note = 2'-O-methyl ribonucleotide
  modified_base 37: mod_base = OTHER; note = 2'-O-methyl ribonucleotide
  modified_base 38: mod_base = OTHER; note = 2'-O-methyl ribonucleotide
  modified_base 39: mod_base = OTHER; note = 2'-O-methyl ribonucleotide
  modified_base 40: mod_base = OTHER; note = 2'-O-methyl ribonucleotide
  modified_base 41: mod_base = OTHER; note = 2'-O-methyl ribonucleotide
  modified_base 42: mod_base = OTHER; note = 2'-O-methyl ribonucleotide
  modified_base 46: mod_base = OTHER; note = 2'-O-methyl ribonucleotide
  modified_base 48: mod_base = OTHER; note = 2'-O-methyl ribonucleotide
  modified_base 50: mod_base = OTHER; note = 2'-O-methyl ribonucleotide
  modified_base 52: mod_base = OTHER; note = 2'-O-methyl ribonucleotide
  modified_base 53: mod_base = OTHER; note = 2'-O-methyl ribonucleotide
  modified_base 54: mod_base = OTHER; note = 2'-O-methyl ribonucleotide
  modified_base 55: mod_base = OTHER; note = 2'-O-methyl ribonucleotide
  modified_base 56: mod_base = OTHER; note = 2'-O-methyl ribonucleotide
  modified_base 57: mod_base = OTHER; note = 2'-O-methyl ribonucleotide
  modified_base 60: mod_base = OTHER; note = 2'-O-methyl ribonucleotide
  modified_base 61: mod_base = OTHER; note = 2'-O-methyl ribonucleotide
  modified_base 66: mod_base = OTHER; note = 2'-O-methyl ribonucleotide
  modified_base 67: mod_base = OTHER; note = 2'-O-methyl ribonucleotide
  modified_base 70: mod_base = OTHER; note = 2'-O-methyl ribonucleotide
  modified_base 71: mod_base = OTHER; note = 2'-O-methyl ribonucleotide
  modified_base 72: mod_base = OTHER; note = 2'-O-methyl ribonucleotide
  modified_base 74: mod_base = OTHER; note = 2'-O-methyl ribonucleotide
  modified_base 75: mod_base = OTHER; note = 2'-O-methyl ribonucleotide
  modified_base 76: mod_base = OTHER; note = 2'-O-methyl ribonucleotide
  modified_base 77: mod_base = OTHER; note = 2'-O-methyl ribonucleotide
  modified_base 78: mod_base = OTHER; note = 2'-O-methyl ribonucleotide
  modified_base 79: mod_base = OTHER; note = 2'-O-methyl ribonucleotide
  modified_base 80: mod_base = OTHER; note = 2'-O-methyl ribonucleotide
  modified_base 82: mod_base = OTHER; note = 2'-O-methyl ribonucleotide
  modified_base 83: mod_base = OTHER; note = 2'-O-methyl ribonucleotide
  modified_base 84: mod_base = OTHER; note = 2'-O-methyl ribonucleotide
  modified_base 85: mod_base = OTHER; note = 2'-O-methyl ribonucleotide
  modified_base 86: mod_base = OTHER; note = 2'-O-methyl ribonucleotide
  modified_base 87: mod_base = OTHER; note = 2'-O-methyl ribonucleotide
  modified_base 89: mod_base = OTHER; note = 2'-O-methyl ribonucleotide
  modified_base 92: mod_base = OTHER; note = 2'-O-methyl ribonucleotide
  modified_base 93: mod_base = OTHER; note = 2'-O-methyl ribonucleotide
  modified_base 94: mod_base = OTHER; note = 2'-O-methyl ribonucleotide
  modified_base 95: mod_base = OTHER; note = 2'-O-methyl ribonucleotide
  modified_base 96: mod_base = OTHER; note = 2'-O-methyl ribonucleotide
  modified_base 97: mod_base = OTHER; note = 2'-O-methyl ribonucleotide
  modified_base 98: mod_base = OTHER; note = 2'-O-methyl ribonucleotide
  modified_base 99: mod_base = OTHER; note = 2'-O-methyl ribonucleotide
  modified_base 100: mod_base = OTHER; note = 2'-O-methyl ribonucleotide
  modified_base 1..4: mod_base = OTHER; note = phosphorothioate linkage
  modified_base 45..46: mod_base = OTHER; note = phosphorothioate linkage
  modified_base 97..100: mod_base = OTHER; note = phosphorothioate linkage

SEQ ID NO: 2480 - RNA, 103 nt, synthetic construct; identical to SEQ ID NO: 1700
  source 1..103: mol_type = other RNA
  modified_base 1: mod_base = OTHER; note = 2'-O-methyl ribonucleotide
  modified_base 2: mod_base = OTHER; note = 2'-O-methyl ribonucleotide
  modified_base 3: mod_base = OTHER; note = 2'-O-methyl ribonucleotide
  modified_base 21: mod_base = OTHER; note = 2'-O-methyl ribonucleotide
  modified_base 28: mod_base = OTHER; note = 2'-O-methyl ribonucleotide
  modified_base 29: mod_base = OTHER; note = 2'-O-methyl ribonucleotide
  modified_base 30: mod_base = OTHER; note = 2'-O-methyl ribonucleotide
  modified_base 31: mod_base = OTHER; note = 2'-O-methyl ribonucleotide
  modified_base 32: mod_base = OTHER; note = 2'-O-methyl ribonucleotide
  modified_base 33: mod_base = OTHER; note = 2'-O-methyl ribonucleotide
  modified_base 34: mod_base = OTHER; note = 2'-O-methyl ribonucleotide
  modified_base 35: mod_base = OTHER; note = 2'-O-methyl ribonucleotide
  modified_base 36: mod_base = OTHER; note = 2'-O-methyl ribonucleotide
  modified_base 37: mod_base = OTHER; note = 2'-O-methyl ribonucleotide
  modified_base 38: mod_base = OTHER; note = 2'-O-methyl ribonucleotide
  modified_base 39: mod_base = OTHER; note = 2'-O-methyl ribonucleotide
  modified_base 40: mod_base = OTHER; note = 2'-O-methyl ribonucleotide
  modified_base 41: mod_base = OTHER; note = 2'-O-methyl ribonucleotide
  modified_base 42: mod_base = OTHER; note = 2'-O-methyl ribonucleotide
  modified_base 46: mod_base = OTHER; note = 2'-O-methyl ribonucleotide
  modified_base 48: mod_base = OTHER; note = 2'-O-methyl ribonucleotide
  modified_base 50: mod_base = OTHER; note = 2'-O-methyl ribonucleotide
  modified_base 52: mod_base = OTHER; note = 2'-O-methyl ribonucleotide
  modified_base 53: mod_base = OTHER; note = 2'-O-methyl ribonucleotide
  modified_base 54: mod_base = OTHER; note = 2'-O-methyl ribonucleotide
  modified_base 57: mod_base = OTHER; note = 2'-O-methyl ribonucleotide
  modified_base 61: mod_base = OTHER; note = 2'-O-methyl ribonucleotide
  modified_base 66: mod_base = OTHER; note = 2'-O-methyl ribonucleotide
  modified_base 67: mod_base = OTHER; note = 2'-O-methyl ribonucleotide
  modified_base 70: mod_base = OTHER; note = 2'-O-methyl ribonucleotide
  modified_base 71: mod_base = OTHER; note = 2'-O-methyl ribonucleotide
  modified_base 72: mod_base = OTHER; note = 2'-O-methyl ribonucleotide
  modified_base 73: mod_base = OTHER; note = 2'-O-methyl ribonucleotide
  modified_base 74: mod_base = OTHER; note = 2'-O-methyl ribonucleotide
  modified_base 75: mod_base = OTHER; note = 2'-O-methyl ribonucleotide
  modified_base 76: mod_base = OTHER; note = 2'-O-methyl ribonucleotide
  modified_base 77: mod_base = OTHER; note = 2'-O-methyl ribonucleotide
  modified_base 78: mod_base = OTHER; note = 2'-O-methyl ribonucleotide
  modified_base 79: mod_base = OTHER; note = 2'-O-methyl ribonucleotide
  modified_base 80: mod_base = OTHER; note = 2'-O-methyl ribonucleotide
  modified_base 82: mod_base = OTHER; note = 2'-O-methyl ribonucleotide
  modified_base 83: mod_base = OTHER; note = 2'-O-methyl ribonucleotide
  modified_base 84: mod_base = OTHER; note = 2'-O-methyl ribonucleotide
  modified_base 85: mod_base = OTHER; note = 2'-O-methyl ribonucleotide
  modified_base 86: mod_base = OTHER; note = 2'-O-methyl ribonucleotide
  modified_base 87: mod_base = OTHER; note = 2'-O-methyl ribonucleotide
  modified_base 89: mod_base = OTHER; note = 2'-O-methyl ribonucleotide
  modified_base 92: mod_base = OTHER; note = 2'-O-methyl ribonucleotide
  modified_base 93: mod_base = OTHER; note = 2'-O-methyl ribonucleotide
  modified_base 94: mod_base = OTHER; note = 2'-O-methyl ribonucleotide
  modified_base 95: mod_base = OTHER; note = 2'-O-methyl ribonucleotide
  modified_base 96: mod_base = OTHER; note = 2'-O-methyl ribonucleotide
  modified_base 97: mod_base = OTHER; note = 2'-O-methyl ribonucleotide
  modified_base 98: mod_base = OTHER; note = 2'-O-methyl ribonucleotide
  modified_base 99: mod_base = OTHER; note = 2'-O-methyl ribonucleotide
  modified_base 100: mod_base = OTHER; note = 2'-O-methyl ribonucleotide
  modified_base 1..4: mod_base = OTHER; note = phosphorothioate linkage
  modified_base 45..46: mod_base = OTHER; note = phosphorothioate linkage
  modified_base 97..100: mod_base = OTHER; note = phosphorothioate linkage

SEQ ID NO: 2481 - RNA, 103 nt, synthetic construct; identical to SEQ ID NO: 1700
  source 1..103: mol_type = other RNA
  modified_base 1: mod_base = OTHER; note = 2'-O-methyl ribonucleotide
  modified_base 2: mod_base = OTHER; note = 2'-O-methyl ribonucleotide
  modified_base 3: mod_base = OTHER; note = 2'-O-methyl ribonucleotide
  modified_base 21: mod_base = OTHER; note = 2'-O-methyl ribonucleotide
  modified_base 28: mod_base = OTHER; note = 2'-O-methyl ribonucleotide
  modified_base 29: mod_base = OTHER; note = 2'-O-methyl ribonucleotide
  modified_base 30: mod_base = OTHER; note = 2'-O-methyl ribonucleotide
  modified_base 31: mod_base = OTHER; note = 2'-O-methyl ribonucleotide
  modified_base 32: mod_base = OTHER; note = 2'-O-methyl ribonucleotide
  modified_base 33: mod_base = OTHER; note = 2'-O-methyl ribonucleotide
  modified_base 34: mod_base = OTHER; note = 2'-O-methyl ribonucleotide
  modified_base 35: mod_base = OTHER; note = 2'-O-methyl ribonucleotide
  modified_base 36: mod_base = OTHER; note = 2'-O-methyl ribonucleotide
  modified_base 37: mod_base = OTHER; note = 2'-O-methyl ribonucleotide
  modified_base 38: mod_base = OTHER; note = 2'-O-methyl ribonucleotide
  modified_base 39: mod_base = OTHER; note = 2'-O-methyl ribonucleotide
  modified_base 40: mod_base = OTHER; note = 2'-O-methyl ribonucleotide
  modified_base 41: mod_base = OTHER; note = 2'-O-methyl ribonucleotide
  modified_base 42: mod_base = OTHER; note = 2'-O-methyl ribonucleotide
  modified_base 46: mod_base = OTHER; note = 2'-O-methyl ribonucleotide
  modified_base 48: mod_base = OTHER; note = 2'-O-methyl ribonucleotide
  modified_base 50: mod_base = OTHER; note = 2'-O-methyl ribonucleotide
  modified_base 52: mod_base = OTHER; note = 2'-O-methyl ribonucleotide
  modified_base 53: mod_base = OTHER; note = 2'-O-methyl ribonucleotide
  modified_base 54: mod_base = OTHER; note = 2'-O-methyl ribonucleotide
  modified_base 57: mod_base = OTHER; note = 2'-O-methyl ribonucleotide
  modified_base 61: mod_base = OTHER; note = 2'-O-methyl ribonucleotide
  modified_base 66: mod_base = OTHER; note = 2'-O-methyl ribonucleotide
  modified_base 67: mod_base = OTHER; note = 2'-O-methyl ribonucleotide
  modified_base 70: mod_base = OTHER; note = 2'-O-methyl ribonucleotide
  modified_base 71: mod_base = OTHER; note = 2'-O-methyl ribonucleotide
  modified_base 72: mod_base = OTHER; note = 2'-O-methyl ribonucleotide
  modified_base 73: mod_base = OTHER; note = 2'-O-methyl ribonucleotide
  modified_base 74: mod_base = OTHER; note = 2'-O-methyl ribonucleotide
  modified_base 75: mod_base = OTHER; note = 2'-O-methyl ribonucleotide
  modified_base 76: mod_base = OTHER; note = 2'-O-methyl ribonucleotide
  modified_base 77: mod_base = OTHER; note = 2'-O-methyl ribonucleotide
  modified_base 78: mod_base = OTHER; note = 2'-O-methyl ribonucleotide
  modified_base 79: mod_base = OTHER; note = 2'-O-methyl ribonucleotide
  modified_base 80: mod_base = OTHER; note = 2'-O-methyl ribonucleotide
  modified_base 82: mod_base = OTHER; note = 2'-O-methyl ribonucleotide
  modified_base 83: mod_base = OTHER; note = 2'-O-methyl ribonucleotide
  modified_base 84: mod_base = OTHER; note = 2'-O-methyl ribonucleotide
  modified_base 85: mod_base = OTHER; note = 2'-O-methyl ribonucleotide
  modified_base 86: mod_base = OTHER; note = 2'-O-methyl ribonucleotide
  modified_base 87: mod_base = OTHER; note = 2'-O-methyl ribonucleotide
  modified_base 89: mod_base = OTHER; note = 2'-O-methyl ribonucleotide
  modified_base 91: mod_base = OTHER; note = 2'-O-methyl ribonucleotide
  modified_base 92: mod_base = OTHER; note = 2'-O-methyl ribonucleotide
  modified_base 93: mod_base = OTHER; note = 2'-O-methyl ribonucleotide
  modified_base 94: mod_base = OTHER; note = 2'-O-methyl ribonucleotide
  modified_base 95: mod_base = OTHER; note = 2'-O-methyl ribonucleotide
  modified_base 96: mod_base = OTHER; note = 2'-O-methyl ribonucleotide
  modified_base 97: mod_base = OTHER; note = 2'-O-methyl ribonucleotide
  modified_base 98: mod_base = OTHER; note = 2'-O-methyl ribonucleotide
  modified_base 99: mod_base = OTHER; note = 2'-O-methyl ribonucleotide
  modified_base 100: mod_base = OTHER; note = 2'-O-methyl ribonucleotide
  modified_base 1..4: mod_base = OTHER; note = phosphorothioate linkage
  modified_base 45..46: mod_base = OTHER; note = phosphorothioate linkage
  modified_base 97..100: mod_base = OTHER; note = phosphorothioate linkage

SEQ ID NO: 2482 - RNA, 103 nt, synthetic construct; identical to SEQ ID NO: 1700
  source 1..103: mol_type = other RNA
  modified_base 1: mod_base = OTHER; note = 2'-O-methyl ribonucleotide
  modified_base 2: mod_base = OTHER; note = 2'-O-methyl ribonucleotide
  modified_base 3: mod_base = OTHER; note = 2'-O-methyl ribonucleotide
  modified_base 21: mod_base = OTHER; note = 2'-O-methyl ribonucleotide
  modified_base 28: mod_base = OTHER; note = 2'-O-methyl ribonucleotide
  modified_base 29: mod_base = OTHER; note = 2'-O-methyl ribonucleotide
  modified_base 30: mod_base = OTHER; note = 2'-O-methyl ribonucleotide
  modified_base 31: mod_base = OTHER; note = 2'-O-methyl ribonucleotide
  modified_base 32: mod_base = OTHER; note = 2'-O-methyl ribonucleotide
  modified_base 34: mod_base = OTHER; note = 2'-O-methyl ribonucleotide
  modified_base 35: mod_base = OTHER; note = 2'-O-methyl ribonucleotide
  modified_base 36: mod_base = OTHER; note = 2'-O-methyl ribonucleotide
  modified_base 37: mod_base = OTHER; note = 2'-O-methyl ribonucleotide
  modified_base 38: mod_base = OTHER; note = 2'-O-methyl ribonucleotide
  modified_base 39: mod_base = OTHER; note = 2'-O-methyl ribonucleotide
  modified_base 40: mod_base = OTHER; note = 2'-O-methyl ribonucleotide
  modified_base 41: mod_base = OTHER; note = 2'-O-methyl ribonucleotide
  modified_base 42: mod_base = OTHER; note = 2'-O-methyl ribonucleotide
  modified_base 46: mod_base = OTHER; note = 2'-O-methyl ribonucleotide
  modified_base 48: mod_base = OTHER; note = 2'-O-methyl ribonucleotide
  modified_base 50: mod_base = OTHER; note = 2'-O-methyl ribonucleotide
  modified_base 52: mod_base = OTHER; note = 2'-O-methyl ribonucleotide
  modified_base 53: mod_base = OTHER; note = 2'-O-methyl ribonucleotide
  modified_base 54: mod_base = OTHER; note = 2'-O-methyl ribonucleotide
  modified_base 57: mod_base = OTHER; note = 2'-O-methyl ribonucleotide
  modified_base 61: mod_base = OTHER; note = 2'-O-methyl ribonucleotide
  modified_base 66: mod_base = OTHER; note = 2'-O-methyl ribonucleotide
  modified_base 67: mod_base = OTHER; note = 2'-O-methyl ribonucleotide
  modified_base 70: mod_base = OTHER; note = 2'-O-methyl ribonucleotide
  modified_base 71: mod_base = OTHER; note = 2'-O-methyl ribonucleotide
  modified_base 72: mod_base = OTHER; note = 2'-O-methyl ribonucleotide
  modified_base 73: mod_base = OTHER; note = 2'-O-methyl ribonucleotide
  modified_base 74: mod_base = OTHER; note = 2'-O-methyl ribonucleotide
  modified_base 75: mod_base = OTHER; note = 2'-O-methyl ribonucleotide
  modified_base 76: mod_base = OTHER; note = 2'-O-methyl ribonucleotide
  modified_base 77: mod_base = OTHER; note = 2'-O-methyl ribonucleotide
  modified_base 78: mod_base = OTHER; note = 2'-O-methyl ribonucleotide
  modified_base 79: mod_base = OTHER; note = 2'-O-methyl ribonucleotide
  modified_base 80: mod_base = OTHER; note = 2'-O-methyl ribonucleotide
  modified_base 82: mod_base = OTHER; note = 2'-O-methyl ribonucleotide
  modified_base 83: mod_base = OTHER; note = 2'-O-methyl ribonucleotide
  modified_base 84: mod_base = OTHER; note = 2'-O-methyl ribonucleotide
  modified_base 85: mod_base = OTHER; note = 2'-O-methyl ribonucleotide
  modified_base 86: mod_base = OTHER; note = 2'-O-methyl ribonucleotide
  modified_base 87: mod_base = OTHER; note = 2'-O-methyl ribonucleotide
  modified_base 89: mod_base = OTHER; note = 2'-O-methyl ribonucleotide
  modified_base 92: mod_base = OTHER; note = 2'-O-methyl ribonucleotide
  modified_base 93: mod_base = OTHER; note = 2'-O-methyl ribonucleotide
  modified_base 94: mod_base = OTHER; note = 2'-O-methyl ribonucleotide
  modified_base 95: mod_base = OTHER; note = 2'-O-methyl ribonucleotide
  modified_base 96: mod_base = OTHER; note = 2'-O-methyl ribonucleotide
  modified_base 97: mod_base = OTHER; note = 2'-O-methyl ribonucleotide
  modified_base 98: mod_base = OTHER; note = 2'-O-methyl ribonucleotide
  modified_base 99: mod_base = OTHER; note = 2'-O-methyl ribonucleotide
  modified_base 100: mod_base = OTHER; note = 2'-O-methyl ribonucleotide
  modified_base 1..4: mod_base = OTHER; note = phosphorothioate linkage
  modified_base 45..46: mod_base = OTHER; note = phosphorothioate linkage
  modified_base 97..100: mod_base = OTHER; note = phosphorothioate linkage

SEQ ID NO: 2483 - RNA, 103 nt, synthetic construct; identical to SEQ ID NO: 1700
  source 1..103: mol_type = other RNA
  modified_base 1: mod_base = OTHER; note = 2'-O-methyl ribonucleotide
  modified_base 2: mod_base = OTHER; note = 2'-O-methyl ribonucleotide
  modified_base 3: mod_base = OTHER; note = 2'-O-methyl ribonucleotide
  modified_base 21: mod_base = OTHER; note = 2'-O-methyl ribonucleotide
  modified_base 28: mod_base = OTHER; note = 2'-O-methyl ribonucleotide
  modified_base 29: mod_base = OTHER; note = 2'-O-methyl ribonucleotide
  modified_base 30: mod_base = OTHER; note = 2'-O-methyl ribonucleotide
  modified_base 31: mod_base = OTHER; note = 2'-O-methyl ribonucleotide
  modified_base 32: mod_base = OTHER; note = 2'-O-methyl ribonucleotide
  modified_base 34: mod_base = OTHER; note = 2'-O-methyl ribonucleotide
  modified_base 35: mod_base = OTHER; note = 2'-O-methyl ribonucleotide
  modified_base 36: mod_base = OTHER; note = 2'-O-methyl ribonucleotide
  modified_base 37: mod_base = OTHER; note = 2'-O-methyl ribonucleotide
  modified_base 38: mod_base = OTHER; note = 2'-O-methyl ribonucleotide
  modified_base 39: mod_base = OTHER; note = 2'-O-methyl ribonucleotide
  modified_base 40: mod_base = OTHER; note = 2'-O-methyl ribonucleotide
  modified_base 41: mod_base = OTHER; note = 2'-O-methyl ribonucleotide
  modified_base 42: mod_base = OTHER; note = 2'-O-methyl ribonucleotide
  modified_base 46: mod_base = OTHER; note = 2'-O-methyl ribonucleotide
  modified_base 48: mod_base = OTHER; note = 2'-O-methyl ribonucleotide
  modified_base 50: mod_base = OTHER; note = 2'-O-methyl ribonucleotide
  modified_base 52: mod_base = OTHER; note = 2'-O-methyl ribonucleotide
  modified_base 53: mod_base = OTHER; note = 2'-O-methyl ribonucleotide
  modified_base 54: mod_base = OTHER; note = 2'-O-methyl ribonucleotide
  modified_base 57: mod_base = OTHER; note = 2'-O-methyl ribonucleotide
  modified_base 61: mod_base = OTHER; note = 2'-O-methyl ribonucleotide
  modified_base 66: mod_base = OTHER; note = 2'-O-methyl ribonucleotide
  modified_base 67: mod_base = OTHER; note = 2'-O-methyl ribonucleotide
  modified_base 70: mod_base = OTHER; note = 2'-O-methyl ribonucleotide
  modified_base 71: mod_base = OTHER; note = 2'-O-methyl ribonucleotide
  modified_base 72: mod_base = OTHER; note = 2'-O-methyl ribonucleotide
  modified_base 73: mod_base = OTHER; note = 2'-O-methyl ribonucleotide
  modified_base 74: mod_base = OTHER; note = 2'-O-methyl ribonucleotide
  modified_base 75: mod_base = OTHER; note = 2'-O-methyl ribonucleotide
  modified_base 76: mod_base = OTHER; note = 2'-O-methyl ribonucleotide
  modified_base 77: mod_base = OTHER; note = 2'-O-methyl ribonucleotide
  modified_base 78: mod_base = OTHER; note = 2'-O-methyl ribonucleotide
  modified_base 79: mod_base = OTHER; note = 2'-O-methyl ribonucleotide
  modified_base 80: mod_base = OTHER; note = 2'-O-methyl ribonucleotide
  modified_base 82: mod_base = OTHER; note = 2'-O-methyl ribonucleotide
  modified_base 83: mod_base = OTHER; note = 2'-O-methyl ribonucleotide
  modified_base 84: mod_base = OTHER; note = 2'-O-methyl ribonucleotide
  modified_base 85: mod_base = OTHER; note = 2'-O-methyl ribonucleotide
  modified_base 86: mod_base = OTHER; note = 2'-O-methyl ribonucleotide
  modified_base 87: mod_base = OTHER; note = 2'-O-methyl ribonucleotide
  modified_base 89: mod_base = OTHER; note = 2'-O-methyl ribonucleotide
  modified_base 91: mod_base = OTHER; note = 2'-O-methyl ribonucleotide
  modified_base 92: mod_base = OTHER; note = 2'-O-methyl ribonucleotide
  modified_base 93: mod_base = OTHER; note = 2'-O-methyl ribonucleotide
  modified_base 94: mod_base = OTHER; note = 2'-O-methyl ribonucleotide
  modified_base 95: mod_base = OTHER; note = 2'-O-methyl ribonucleotide
  modified_base 96: mod_base = OTHER; note = 2'-O-methyl ribonucleotide
  modified_base 97: mod_base = OTHER; note = 2'-O-methyl ribonucleotide
  modified_base 98: mod_base = OTHER; note = 2'-O-methyl ribonucleotide
  modified_base 99: mod_base = OTHER; note = 2'-O-methyl ribonucleotide
  modified_base 100: mod_base = OTHER; note = 2'-O-methyl ribonucleotide
  modified_base 1..4: mod_base = OTHER; note = phosphorothioate linkage
  modified_base 45..46: mod_base = OTHER; note = phosphorothioate linkage
  modified_base 97..100: mod_base = OTHER; note = phosphorothioate linkage

SEQ ID NO: 2484 - RNA, 103 nt, synthetic construct; identical to SEQ ID NO: 1700
  source 1..103: mol_type = other RNA
  modified_base 1: mod_base = OTHER; note = 2'-O-methyl ribonucleotide
  modified_base 2: mod_base = OTHER; note = 2'-O-methyl ribonucleotide
  modified_base 3: mod_base = OTHER; note = 2'-O-methyl ribonucleotide
  modified_base 21: mod_base = OTHER; note = 2'-O-methyl ribonucleotide
  modified_base 28: mod_base = OTHER; note = 2'-O-methyl ribonucleotide
  modified_base 29: mod_base = OTHER; note = 2'-O-methyl ribonucleotide
  modified_base 30: mod_base = OTHER; note = 2'-O-methyl ribonucleotide
  modified_base 31: mod_base = OTHER; note = 2'-O-methyl ribonucleotide
  modified_base 32: mod_base = OTHER; note = 2'-O-methyl ribonucleotide
  modified_base 34: mod_base = OTHER; note = 2'-O-methyl ribonucleotide
  modified_base 35: mod_base = OTHER; note = 2'-O-methyl ribonucleotide
  modified_base 36: mod_base = OTHER; note = 2'-O-methyl ribonucleotide
  modified_base 37: mod_base = OTHER; note = 2'-O-methyl ribonucleotide
  modified_base 38: mod_base = OTHER; note = 2'-O-methyl ribonucleotide
  modified_base 39: mod_base = OTHER; note = 2'-O-methyl ribonucleotide
  modified_base 40: mod_base = OTHER; note = 2'-O-methyl ribonucleotide
  modified_base 41: mod_base = OTHER; note = 2'-O-methyl ribonucleotide
  modified_base 42: mod_base = OTHER; note = 2'-O-methyl ribonucleotide
  modified_base 46: mod_base = OTHER; note = 2'-O-methyl ribonucleotide
  modified_base 48: mod_base = OTHER; note = 2'-O-methyl ribonucleotide
  modified_base 50: mod_base = OTHER; note = 2'-O-methyl ribonucleotide
  modified_base 52: mod_base = OTHER; note = 2'-O-methyl ribonucleotide
  modified_base 53: mod_base = OTHER; note = 2'-O-methyl ribonucleotide
  modified_base 54: mod_base = OTHER; note = 2'-O-methyl ribonucleotide
  modified_base 55: mod_base = OTHER; note = 2'-O-methyl ribonucleotide
  modified_base 56: mod_base = OTHER; note = 2'-O-methyl ribonucleotide
  modified_base 57: mod_base = OTHER; note = 2'-O-methyl ribonucleotide
  modified_base 60: mod_base = OTHER; note = 2'-O-methyl ribonucleotide
  modified_base 61: mod_base = OTHER; note = 2'-O-methyl ribonucleotide
  modified_base 66: mod_base = OTHER; note = 2'-O-methyl ribonucleotide
  modified_base 67: mod_base = OTHER; note = 2'-O-methyl ribonucleotide
  modified_base 70: mod_base = OTHER; note = 2'-O-methyl ribonucleotide
  modified_base 71: mod_base = OTHER; note = 2'-O-methyl ribonucleotide
  modified_base 72: mod_base = OTHER; note = 2'-O-methyl ribonucleotide
  modified_base 74: mod_base = OTHER; note = 2'-O-methyl ribonucleotide
  modified_base 75: mod_base = OTHER; note = 2'-O-methyl ribonucleotide
  modified_base 76: mod_base = OTHER; note = 2'-O-methyl ribonucleotide
  modified_base 77: mod_base = OTHER; note = 2'-O-methyl ribonucleotide
  modified_base 78: mod_base = OTHER; note = 2'-O-methyl ribonucleotide
  modified_base 79: mod_base = OTHER; note = 2'-O-methyl ribonucleotide
  modified_base 80: mod_base = OTHER; note = 2'-O-methyl ribonucleotide
  modified_base 82: mod_base = OTHER; note = 2'-O-methyl ribonucleotide
  modified_base 83: mod_base = OTHER; note = 2'-O-methyl ribonucleotide
  modified_base 84: mod_base = OTHER; note = 2'-O-methyl ribonucleotide
  modified_base 85: mod_base = OTHER; note = 2'-O-methyl ribonucleotide
  modified_base 86: mod_base = OTHER; note = 2'-O-methyl ribonucleotide
  modified_base 87: mod_base = OTHER; note = 2'-O-methyl ribonucleotide
  modified_base 89: mod_base = OTHER; note = 2'-O-methyl ribonucleotide
  modified_base 92: mod_base = OTHER; note = 2'-O-methyl ribonucleotide
  modified_base 93: mod_base = OTHER; note = 2'-O-methyl ribonucleotide
  modified_base 94: mod_base = OTHER; note = 2'-O-methyl ribonucleotide
  modified_base 95: mod_base = OTHER; note = 2'-O-methyl ribonucleotide
  modified_base 96: mod_base = OTHER; note = 2'-O-methyl ribonucleotide
  modified_base 97: mod_base = OTHER; note = 2'-O-methyl ribonucleotide
  modified_base 98: mod_base = OTHER; note = 2'-O-methyl ribonucleotide
  modified_base 99: mod_base = OTHER; note = 2'-O-methyl ribonucleotide
  modified_base 100: mod_base = OTHER; note = 2'-O-methyl ribonucleotide
  modified_base 1..4: mod_base = OTHER; note = phosphorothioate linkage
  modified_base 45..46: mod_base = OTHER; note = phosphorothioate linkage
  modified_base 97..100: mod_base = OTHER; note = phosphorothioate linkage

SEQ ID NO: 2485 - RNA, 103 nt, synthetic construct; identical to SEQ ID NO: 1643
  source 1..103: mol_type = other RNA
  modified_base 1: mod_base = OTHER; note = 2'-O-methyl ribonucleotide
  modified_base 2: mod_base = OTHER; note = 2'-O-methyl ribonucleotide
  modified_base 3: mod_base = OTHER; note = 2'-O-methyl ribonucleotide
  modified_base 21: mod_base = OTHER; note = 2'-O-methyl ribonucleotide
  modified_base 28: mod_base = OTHER; note = 2'-O-methyl ribonucleotide
  modified_base 29: mod_base = OTHER; note = 2'-O-methyl ribonucleotide
  modified_base 30: mod_base = OTHER; note = 2'-O-methyl ribonucleotide
  modified_base 31: mod_base = OTHER; note = 2'-O-methyl ribonucleotide
  modified_base 32: mod_base = OTHER; note = 2'-O-methyl ribonucleotide
  modified_base 33: mod_base = OTHER; note = 2'-O-methyl ribonucleotide
  modified_base 34: mod_base = OTHER; note = 2'-O-methyl ribonucleotide
  modified_base 35: mod_base = OTHER; note = 2'-O-methyl ribonucleotide
  modified_base 36: mod_base = OTHER; note = 2'-O-methyl ribonucleotide
  modified_base 37: mod_base = OTHER; note = 2'-O-methyl ribonucleotide
  modified_base 38: mod_base = OTHER; note = 2'-O-methyl ribonucleotide
  modified_base 39: mod_base = OTHER; note = 2'-O-methyl ribonucleotide
  modified_base 40: mod_base = OTHER; note = 2'-O-methyl ribonucleotide
  modified_base 41: mod_base = OTHER; note = 2'-O-methyl ribonucleotide
  modified_base 42: mod_base = OTHER; note = 2'-O-methyl ribonucleotide
  modified_base 46: mod_base = OTHER; note = 2'-O-methyl ribonucleotide
  modified_base 48: mod_base = OTHER; note = 2'-O-methyl ribonucleotide
  modified_base 50: mod_base = OTHER; note = 2'-O-methyl ribonucleotide
  modified_base 52: mod_base = OTHER; note = 2'-O-methyl ribonucleotide
  modified_base 53: mod_base = OTHER; note = 2'-O-methyl ribonucleotide
  modified_base 54: mod_base = OTHER; note = 2'-O-methyl ribonucleotide
  modified_base 55: mod_base = OTHER; note = 2'-O-methyl ribonucleotide
  modified_base 56: mod_base = OTHER; note = 2'-O-methyl ribonucleotide
  modified_base 57: mod_base = OTHER; note = 2'-O-methyl ribonucleotide
  modified_base 60: mod_base = OTHER; note = 2'-O-methyl ribonucleotide
  modified_base 61: mod_base = OTHER; note = 2'-O-methyl ribonucleotide
  modified_base 66: mod_base = OTHER; note = 2'-O-methyl ribonucleotide
  modified_base 67: mod_base = OTHER; note = 2'-O-methyl ribonucleotide
  modified_base 70: mod_base = OTHER; note = 2'-O-methyl ribonucleotide
  modified_base 71: mod_base = OTHER; note = 2'-O-methyl ribonucleotide
  modified_base 72: mod_base = OTHER; note = 2'-O-methyl ribonucleotide
  modified_base 73: mod_base = OTHER; note = 2'-O-methyl ribonucleotide
  modified_base 74: mod_base = OTHER; note = 2'-O-methyl ribonucleotide
  modified_base 75: mod_base = OTHER; note = 2'-O-methyl ribonucleotide
  modified_base 76: mod_base = OTHER; note = 2'-O-methyl ribonucleotide
  modified_base 77: mod_base = OTHER; note = 2'-O-methyl ribonucleotide
  modified_base 78: mod_base = OTHER; note = 2'-O-methyl ribonucleotide
  modified_base 79: mod_base = OTHER; note = 2'-O-methyl ribonucleotide
  modified_base 80: mod_base = OTHER; note = 2'-O-methyl ribonucleotide
  modified_base 81: mod_base = OTHER; note = 2'-O-methyl ribonucleotide
  modified_base 83: mod_base = OTHER; note = 2'-O-methyl ribonucleotide
  modified_base 84: mod_base = OTHER; note = 2'-O-methyl ribonucleotide
  modified_base 85: mod_base = OTHER; note = 2'-O-methyl ribonucleotide
  modified_base 86: mod_base = OTHER; note = 2'-O-methyl ribonucleotide
  modified_base 87: mod_base = OTHER; note = 2'-O-methyl ribonucleotide
  modified_base 88: mod_base = OTHER; note = 2'-O-methyl ribonucleotide
  modified_base 89: mod_base = OTHER; note = 2'-O-methyl ribonucleotide
  modified_base 90: mod_base = OTHER; note = 2'-O-methyl ribonucleotide
  modified_base 91: mod_base = OTHER; note = 2'-O-methyl ribonucleotide
  modified_base 92: mod_base = OTHER; note = 2'-O-methyl ribonucleotide
  modified_base 93: mod_base = OTHER; note = 2'-O-methyl ribonucleotide
  modified_base 94: mod_base = OTHER; note = 2'-O-methyl ribonucleotide
  modified_base 95: mod_base = OTHER; note = 2'-O-methyl ribonucleotide
  modified_base 96: mod_base = OTHER; note = 2'-O-methyl ribonucleotide
  modified_base 97: mod_base = OTHER; note = 2'-O-methyl ribonucleotide
  modified_base 98: mod_base = OTHER; note = 2'-O-methyl ribonucleotide
  modified_base 99: mod_base = OTHER; note = 2'-O-methyl ribonucleotide
  modified_base 100: mod_base = OTHER; note = 2'-O-methyl ribonucleotide
  modified_base 1..4: mod_base = OTHER; note = phosphorothioate linkage
  modified_base 25..26: mod_base = OTHER; note = phosphorothioate linkage
  modified_base 97..100: mod_base = OTHER; note = phosphorothioate linkage

SEQ ID NO: 2486 - RNA, 103 nt, synthetic construct; identical to SEQ ID NO: 1643
  source 1..103: mol_type = other RNA
  modified_base 1: mod_base = OTHER; note = 2'-O-methyl ribonucleotide
  modified_base 2: mod_base = OTHER; note = 2'-O-methyl ribonucleotide
  modified_base 3: mod_base = OTHER; note = 2'-O-methyl ribonucleotide
  modified_base 21: mod_base = OTHER; note = 2'-O-methyl ribonucleotide
  modified_base 28: mod_base = OTHER; note = 2'-O-methyl ribonucleotide
  modified_base 29: mod_base = OTHER; note = 2'-O-methyl ribonucleotide
  modified_base 30: mod_base = OTHER; note = 2'-O-methyl ribonucleotide
  modified_base 31: mod_base = OTHER; note = 2'-O-methyl ribonucleotide
  modified_base 32: mod_base = OTHER; note = 2'-O-methyl ribonucleotide
  modified_base 34: mod_base = OTHER; note = 2'-O-methyl ribonucleotide
  modified_base 35: mod_base = OTHER; note = 2'-O-methyl ribonucleotide
  modified_base 36: mod_base = OTHER; note = 2'-O-methyl ribonucleotide
  modified_base 37: mod_base = OTHER; note = 2'-O-methyl ribonucleotide
  modified_base 38: mod_base = OTHER; note = 2'-O-methyl ribonucleotide
  modified_base 39: mod_base = OTHER; note = 2'-O-methyl ribonucleotide
  modified_base 40: mod_base = OTHER; note = 2'-O-methyl ribonucleotide
  modified_base 41: mod_base = OTHER; note = 2'-O-methyl ribonucleotide
  modified_base 42: mod_base = OTHER; note = 2'-O-methyl ribonucleotide
  modified_base 46: mod_base = OTHER; note = 2'-O-methyl ribonucleotide
  modified_base 48: mod_base = OTHER; note = 2'-O-methyl ribonucleotide
  modified_base 50: mod_base = OTHER; note = 2'-O-methyl ribonucleotide
  modified_base 52: mod_base = OTHER; note = 2'-O-methyl ribonucleotide
  modified_base 53: mod_base = OTHER; note = 2'-O-methyl ribonucleotide
  modified_base 54: mod_base = OTHER; note = 2'-O-methyl ribonucleotide
  modified_base 55: mod_base = OTHER; note = 2'-O-methyl ribonucleotide
  modified_base 56: mod_base = OTHER; note = 2'-O-methyl ribonucleotide
  modified_base 57: mod_base = OTHER; note = 2'-O-methyl ribonucleotide
  modified_base 60: mod_base = OTHER; note = 2'-O-methyl ribonucleotide
  modified_base 61: mod_base = OTHER; note = 2'-O-methyl ribonucleotide
  modified_base 66: mod_base = OTHER; note = 2'-O-methyl ribonucleotide
  modified_base 67: mod_base = OTHER; note = 2'-O-methyl ribonucleotide
  modified_base 70: mod_base = OTHER; note = 2'-O-methyl ribonucleotide
  modified_base 71: mod_base = OTHER; note = 2'-O-methyl ribonucleotide
  modified_base 72: mod_base = OTHER; note = 2'-O-methyl ribonucleotide
  modified_base 74: mod_base = OTHER; note = 2'-O-methyl ribonucleotide
  modified_base 75: mod_base = OTHER; note = 2'-O-methyl ribonucleotide
  modified_base 76: mod_base = OTHER; note = 2'-O-methyl ribonucleotide
  modified_base 77: mod_base = OTHER; note = 2'-O-methyl ribonucleotide
  modified_base 78: mod_base = OTHER; note = 2'-O-methyl ribonucleotide
  modified_base 79: mod_base = OTHER; note = 2'-O-methyl ribonucleotide
  modified_base 80: mod_base = OTHER; note = 2'-O-methyl ribonucleotide
  modified_base 81: mod_base = OTHER; note = 2'-O-methyl ribonucleotide
  modified_base 83: mod_base = OTHER; note = 2'-O-methyl ribonucleotide
  modified_base 84: mod_base = OTHER; note = 2'-O-methyl ribonucleotide
  modified_base 85: mod_base = OTHER; note = 2'-O-methyl ribonucleotide
  modified_base 86: mod_base = OTHER; note = 2'-O-methyl ribonucleotide
  modified_base 87: mod_base = OTHER; note = 2'-O-methyl ribonucleotide
  modified_base 88: mod_base = OTHER; note = 2'-O-methyl ribonucleotide
  modified_base 89: mod_base = OTHER; note = 2'-O-methyl ribonucleotide
  modified_base 90: mod_base = OTHER; note = 2'-O-methyl ribonucleotide
  modified_base 91: mod_base = OTHER; note = 2'-O-methyl ribonucleotide
  modified_base 92: mod_base = OTHER; note = 2'-O-methyl ribonucleotide
  modified_base 93: mod_base = OTHER; note = 2'-O-methyl ribonucleotide
  modified_base 94: mod_base = OTHER; note = 2'-O-methyl ribonucleotide
  modified_base 95: mod_base = OTHER; note = 2'-O-methyl ribonucleotide
  modified_base 96: mod_base = OTHER; note = 2'-O-methyl ribonucleotide
  modified_base 97: mod_base = OTHER; note = 2'-O-methyl ribonucleotide
  modified_base 98: mod_base = OTHER; note = 2'-O-methyl ribonucleotide
  modified_base 99: mod_base = OTHER; note = 2'-O-methyl ribonucleotide
  modified_base 100: mod_base = OTHER; note = 2'-O-methyl ribonucleotide
  modified_base 1..4: mod_base = OTHER; note = phosphorothioate linkage
  modified_base 25..26: mod_base = OTHER; note = phosphorothioate linkage
  modified_base 97..100: mod_base = OTHER; note = phosphorothioate linkage

SEQ ID NO: 2487 - RNA, 103 nt, synthetic construct; identical to SEQ ID NO: 1699
  source 1..103: mol_type = other RNA
  modified_base 1: mod_base = OTHER; note = 2'-O-methyl ribonucleotide
  modified_base 2: mod_base = OTHER; note = 2'-O-methyl ribonucleotide
  modified_base 3: mod_base = OTHER; note = 2'-O-methyl ribonucleotide
  modified_base 21: mod_base = OTHER; note = 2'-O-methyl ribonucleotide
  modified_base 28: mod_base = OTHER; note = 2'-O-methyl ribonucleotide
  modified_base 29: mod_base = OTHER; note = 2'-O-methyl ribonucleotide
  modified_base 30: mod_base = OTHER; note = 2'-O-methyl ribonucleotide
  modified_base 31: mod_base = OTHER; note = 2'-O-methyl ribonucleotide
  modified_base 32: mod_base = OTHER; note = 2'-O-methyl ribonucleotide
  modified_base 33: mod_base = OTHER; note = 2'-O-methyl ribonucleotide
  modified_base 34: mod_base = OTHER; note = 2'-O-methyl ribonucleotide
  modified_base 35: mod_base = OTHER; note = 2'-O-methyl ribonucleotide
  modified_base 36: mod_base = OTHER; note = 2'-O-methyl ribonucleotide
  modified_base 37: mod_base = OTHER; note = 2'-O-methyl ribonucleotide
  modified_base 38: mod_base = OTHER; note = 2'-O-methyl ribonucleotide
  modified_base 39: mod_base = OTHER; note = 2'-O-methyl ribonucleotide
  modified_base 40: mod_base = OTHER; note = 2'-O-methyl ribonucleotide
  modified_base 41: mod_base = OTHER; note = 2'-O-methyl ribonucleotide
  modified_base 42: mod_base = OTHER; note = 2'-O-methyl ribonucleotide
  modified_base 46: mod_base = OTHER; note = 2'-O-methyl ribonucleotide
  modified_base 48: mod_base = OTHER; note = 2'-O-methyl ribonucleotide
  modified_base 50: mod_base = OTHER; note = 2'-O-methyl ribonucleotide
  modified_base 52: mod_base = OTHER; note = 2'-O-methyl ribonucleotide
  modified_base 53: mod_base = OTHER; note = 2'-O-methyl ribonucleotide
  modified_base 54: mod_base = OTHER; note = 2'-O-methyl ribonucleotide
  modified_base 55: mod_base = OTHER; note = 2'-O-methyl ribonucleotide
  modified_base 56: mod_base = OTHER; note = 2'-O-methyl ribonucleotide
  modified_base 57: mod_base = OTHER; note = 2'-O-methyl ribonucleotide
  modified_base 60: mod_base = OTHER; note = 2'-O-methyl ribonucleotide
  modified_base 61: mod_base = OTHER; note = 2'-O-methyl ribonucleotide
  modified_base 66: mod_base = OTHER; note = 2'-O-methyl ribonucleotide
  modified_base 67: mod_base = OTHER; note = 2'-O-methyl ribonucleotide
  modified_base 70: mod_base = OTHER; note = 2'-O-methyl ribonucleotide
  modified_base 71: mod_base = OTHER; note = 2'-O-methyl ribonucleotide
  modified_base 72: mod_base = OTHER; note = 2'-O-methyl ribonucleotide
  modified_base 73: mod_base = OTHER; note = 2'-O-methyl ribonucleotide
  modified_base 74: mod_base = OTHER; note = 2'-O-methyl ribonucleotide
  modified_base 75: mod_base = OTHER; note = 2'-O-methyl ribonucleotide
  modified_base 76: mod_base = OTHER; note = 2'-O-methyl ribonucleotide
  modified_base 77: mod_base = OTHER; note = 2'-O-methyl ribonucleotide
  modified_base 78: mod_base = OTHER; note = 2'-O-methyl ribonucleotide
  modified_base 79: mod_base = OTHER; note = 2'-O-methyl ribonucleotide
  modified_base 80: mod_base = OTHER; note = 2'-O-methyl ribonucleotide
  modified_base 81: mod_base = OTHER; note = 2'-O-methyl ribonucleotide
  modified_base 83: mod_base = OTHER; note = 2'-O-methyl ribonucleotide
  modified_base 84: mod_base = OTHER; note = 2'-O-methyl ribonucleotide
  modified_base 85: mod_base = OTHER; note = 2'-O-methyl ribonucleotide
  modified_base 86: mod_base = OTHER; note = 2'-O-methyl ribonucleotide
  modified_base 87: mod_base = OTHER; note = 2'-O-methyl ribonucleotide
  modified_base 88: mod_base = OTHER; note = 2'-O-methyl ribonucleotide
  modified_base 89: mod_base = OTHER; note = 2'-O-methyl ribonucleotide
  modified_base 90: mod_base = OTHER; note = 2'-O-methyl ribonucleotide
  modified_base 91: mod_base = OTHER; note = 2'-O-methyl ribonucleotide
  modified_base 92: mod_base = OTHER; note = 2'-O-methyl ribonucleotide
  modified_base 93: mod_base = OTHER; note = 2'-O-methyl ribonucleotide
  modified_base 94: mod_base = OTHER; note = 2'-O-methyl ribonucleotide
  modified_base 95: mod_base = OTHER; note = 2'-O-methyl ribonucleotide
  modified_base 96: mod_base = OTHER; note = 2'-O-methyl ribonucleotide
  modified_base 97: mod_base = OTHER; note = 2'-O-methyl ribonucleotide
  modified_base 98: mod_base = OTHER; note = 2'-O-methyl ribonucleotide
  modified_base 99: mod_base = OTHER; note = 2'-O-methyl ribonucleotide
  modified_base 100: mod_base = OTHER; note = 2'-O-methyl ribonucleotide
  modified_base 1..4: mod_base = OTHER; note = phosphorothioate linkage
  modified_base 25..26: mod_base = OTHER; note = phosphorothioate linkage
  modified_base 97..100: mod_base = OTHER; note = phosphorothioate linkage

SEQ ID NO: 2488 - RNA, 103 nt, synthetic construct; identical to SEQ ID NO: 1699
  source 1..103: mol_type = other RNA
  modified_base 1: mod_base = OTHER; note = 2'-O-methyl ribonucleotide
  modified_base 2: mod_base = OTHER; note = 2'-O-methyl ribonucleotide
  modified_base 3: mod_base = OTHER; note = 2'-O-methyl ribonucleotide
  modified_base 21: mod_base = OTHER; note = 2'-O-methyl ribonucleotide
  modified_base 28: mod_base = OTHER; note = 2'-O-methyl ribonucleotide
  modified_base 29: mod_base = OTHER; note = 2'-O-methyl ribonucleotide
  modified_base 30: mod_base = OTHER; note = 2'-O-methyl ribonucleotide
  modified_base 31: mod_base = OTHER; note = 2'-O-methyl ribonucleotide
  modified_base 32: mod_base = OTHER; note = 2'-O-methyl ribonucleotide
  modified_base 34: mod_base = OTHER; note = 2'-O-methyl ribonucleotide
  modified_base 35: mod_base = OTHER; note = 2'-O-methyl ribonucleotide
  modified_base 36: mod_base = OTHER; note = 2'-O-methyl ribonucleotide
  modified_base 37: mod_base = OTHER; note = 2'-O-methyl ribonucleotide
  modified_base 38: mod_base = OTHER; note = 2'-O-methyl ribonucleotide
  modified_base 39: mod_base = OTHER; note = 2'-O-methyl ribonucleotide
  modified_base 40: mod_base = OTHER; note = 2'-O-methyl ribonucleotide
  modified_base 41: mod_base = OTHER; note = 2'-O-methyl ribonucleotide
  modified_base 42: mod_base = OTHER; note = 2'-O-methyl ribonucleotide
  modified_base 46: mod_base = OTHER; note = 2'-O-methyl ribonucleotide
  modified_base 48: mod_base = OTHER; note = 2'-O-methyl ribonucleotide
  modified_base 50: mod_base = OTHER; note = 2'-O-methyl ribonucleotide
  modified_base 52: mod_base = OTHER; note = 2'-O-methyl ribonucleotide
  modified_base 53: mod_base = OTHER; note = 2'-O-methyl ribonucleotide
  modified_base 54: mod_base = OTHER; note = 2'-O-methyl ribonucleotide
  modified_base 55: mod_base = OTHER; note = 2'-O-methyl ribonucleotide
  modified_base 56: mod_base = OTHER; note = 2'-O-methyl ribonucleotide
  modified_base 57: mod_base = OTHER; note = 2'-O-methyl ribonucleotide
  modified_base 60: mod_base = OTHER; note = 2'-O-methyl ribonucleotide
  modified_base 61: mod_base = OTHER; note = 2'-O-methyl ribonucleotide
  modified_base 66: mod_base = OTHER; note = 2'-O-methyl ribonucleotide
  modified_base 67: mod_base = OTHER; note = 2'-O-methyl ribonucleotide
  modified_base 70: mod_base = OTHER; note = 2'-O-methyl ribonucleotide
  modified_base 71: mod_base = OTHER; note = 2'-O-methyl ribonucleotide
  modified_base 72: mod_base = OTHER; note = 2'-O-methyl ribonucleotide
  modified_base 74: mod_base = OTHER; note = 2'-O-methyl ribonucleotide
  modified_base 75: mod_base = OTHER; note = 2'-O-methyl ribonucleotide
  modified_base 76: mod_base = OTHER; note = 2'-O-methyl ribonucleotide
  modified_base 77: mod_base = OTHER; note = 2'-O-methyl ribonucleotide
  modified_base 78: mod_base = OTHER; note = 2'-O-methyl ribonucleotide
  modified_base 79: mod_base = OTHER; note = 2'-O-methyl ribonucleotide
  modified_base 80: mod_base = OTHER; note = 2'-O-methyl ribonucleotide
  modified_base 81: mod_base = OTHER; note = 2'-O-methyl ribonucleotide
  modified_base 83: mod_base = OTHER; note = 2'-O-methyl ribonucleotide
  modified_base 84: mod_base = OTHER; note = 2'-O-methyl ribonucleotide
  modified_base 85: mod_base = OTHER; note = 2'-O-methyl ribonucleotide
  modified_base 86: mod_base = OTHER; note = 2'-O-methyl ribonucleotide
  modified_base 87: mod_base = OTHER; note = 2'-O-methyl ribonucleotide
  modified_base 88: mod_base = OTHER; note = 2'-O-methyl ribonucleotide
  modified_base 89: mod_base = OTHER; note = 2'-O-methyl ribonucleotide
  modified_base 90: mod_base = OTHER; note = 2'-O-methyl ribonucleotide
  modified_base 91: mod_base = OTHER; note = 2'-O-methyl ribonucleotide
  modified_base 92: mod_base = OTHER; note = 2'-O-methyl ribonucleotide
  modified_base 93: mod_base = OTHER; note = 2'-O-methyl ribonucleotide
  modified_base 94: mod_base = OTHER; note = 2'-O-methyl ribonucleotide
  modified_base 95: mod_base = OTHER; note = 2'-O-methyl ribonucleotide
  modified_base 96: mod_base = OTHER; note = 2'-O-methyl ribonucleotide
  modified_base 97: mod_base = OTHER; note = 2'-O-methyl ribonucleotide
  modified_base 98: mod_base = OTHER; note = 2'-O-methyl ribonucleotide
  modified_base 99: mod_base = OTHER; note = 2'-O-methyl ribonucleotide
  modified_base 100: mod_base = OTHER; note = 2'-O-methyl ribonucleotide
  modified_base 1..4: mod_base = OTHER; note = phosphorothioate linkage
  modified_base 25..26: mod_base = OTHER; note = phosphorothioate linkage
  modified_base 97..100: mod_base = OTHER; note = phosphorothioate linkage

SEQ ID NO: 2489 - RNA, 103 nt, synthetic construct; identical to SEQ ID NO: 1700
  source 1..103: mol_type = other RNA
  modified_base 1: mod_base = OTHER; note = 2'-O-methyl ribonucleotide
  modified_base 2: mod_base = OTHER; note = 2'-O-methyl ribonucleotide
  modified_base 3: mod_base = OTHER; note = 2'-O-methyl ribonucleotide
  modified_base 21: mod_base = OTHER; note = 2'-O-methyl ribonucleotide
  modified_base 28: mod_base = OTHER; note = 2'-O-methyl ribonucleotide
  modified_base 29: mod_base = OTHER; note = 2'-O-methyl ribonucleotide
  modified_base 30: mod_base = OTHER; note = 2'-O-methyl ribonucleotide
  modified_base 31: mod_base = OTHER; note = 2'-O-methyl ribonucleotide
  modified_base 32: mod_base = OTHER; note = 2'-O-methyl ribonucleotide
  modified_base 33: mod_base = OTHER; note = 2'-O-methyl ribonucleotide
  modified_base 34: mod_base = OTHER; note = 2'-O-methyl ribonucleotide
  modified_base 35: mod_base = OTHER; note = 2'-O-methyl ribonucleotide
  modified_base 36: mod_base = OTHER; note = 2'-O-methyl ribonucleotide
  modified_base 37: mod_base = OTHER; note = 2'-O-methyl ribonucleotide
  modified_base 38: mod_base = OTHER; note = 2'-O-methyl ribonucleotide
  modified_base 39: mod_base = OTHER; note = 2'-O-methyl ribonucleotide
  modified_base 40: mod_base = OTHER; note = 2'-O-methyl ribonucleotide
  modified_base 41: mod_base = OTHER; note = 2'-O-methyl ribonucleotide
  modified_base 42: mod_base = OTHER; note = 2'-O-methyl ribonucleotide
  modified_base 46: mod_base = OTHER; note = 2'-O-methyl ribonucleotide
  modified_base 48: mod_base = OTHER; note = 2'-O-methyl ribonucleotide
  modified_base 50: mod_base = OTHER; note = 2'-O-methyl ribonucleotide
  modified_base 52: mod_base = OTHER; note = 2'-O-methyl ribonucleotide
  modified_base 53: mod_base = OTHER; note = 2'-O-methyl ribonucleotide
  modified_base 54: mod_base = OTHER; note = 2'-O-methyl ribonucleotide
  modified_base 57: mod_base = OTHER; note = 2'-O-methyl ribonucleotide
  modified_base 61: mod_base = OTHER; note = 2'-O-methyl ribonucleotide
  modified_base 66: mod_base = OTHER; note = 2'-O-methyl ribonucleotide
  modified_base 67: mod_base = OTHER; note = 2'-O-methyl ribonucleotide
  modified_base 70: mod_base = OTHER; note = 2'-O-methyl ribonucleotide
  modified_base 71: mod_base = OTHER; note = 2'-O-methyl ribonucleotide
  modified_base 72: mod_base = OTHER; note = 2'-O-methyl ribonucleotide
  modified_base 74: mod_base = OTHER; note = 2'-O-methyl ribonucleotide
  modified_base 75: mod_base = OTHER; note = 2'-O-methyl ribonucleotide
  modified_base 76: mod_base = OTHER; note = 2'-O-methyl ribonucleotide
  modified_base 77: mod_base = OTHER; note = 2'-O-methyl ribonucleotide
  modified_base 78: mod_base = OTHER; note = 2'-O-methyl ribonucleotide
  modified_base 79: mod_base = OTHER; note = 2'-O-methyl ribonucleotide
  modified_base 80: mod_base = OTHER; note = 2'-O-methyl ribonucleotide
  modified_base 82: mod_base = OTHER; note = 2'-O-methyl ribonucleotide
  modified_base 83: mod_base = OTHER; note = 2'-O-methyl ribonucleotide
  modified_base 84: mod_base = OTHER; note = 2'-O-methyl ribonucleotide
  modified_base 85: mod_base = OTHER; note = 2'-O-methyl ribonucleotide
  modified_base 86: mod_base = OTHER; note = 2'-O-methyl ribonucleotide
  modified_base 87: mod_base = OTHER; note = 2'-O-methyl ribonucleotide
  modified_base 89: mod_base = OTHER; note = 2'-O-methyl ribonucleotide
  modified_base 92: mod_base = OTHER; note = 2'-O-methyl ribonucleotide
  modified_base 93: mod_base = OTHER; note = 2'-O-methyl ribonucleotide
  modified_base 94: mod_base = OTHER; note = 2'-O-methyl ribonucleotide
  modified_base 95: mod_base = OTHER; note = 2'-O-methyl ribonucleotide
  modified_base 96: mod_base = OTHER; note = 2'-O-methyl ribonucleotide
  modified_base 97: mod_base = OTHER; note = 2'-O-methyl ribonucleotide
  modified_base 98: mod_base = OTHER; note = 2'-O-methyl ribonucleotide
  modified_base 99: mod_base = OTHER; note = 2'-O-methyl ribonucleotide
  modified_base 100: mod_base = OTHER; note = 2'-O-methyl ribonucleotide
  modified_base 1..4: mod_base = OTHER; note = phosphorothioate linkage
  modified_base 25..26: mod_base = OTHER; note = phosphorothioate linkage
  modified_base 97..100: mod_base = OTHER; note = phosphorothioate linkage

SEQ ID NO: 2490 - RNA, 103 nt, synthetic construct; identical to SEQ ID NO: 1700
  source 1..103: mol_type = other RNA
  modified_base 1: mod_base = OTHER; note = 2'-O-methyl ribonucleotide
  modified_base 2: mod_base = OTHER; note = 2'-O-methyl ribonucleotide
  modified_base 3: mod_base = OTHER; note = 2'-O-methyl ribonucleotide
  modified_base 21: mod_base = OTHER; note = 2'-O-methyl ribonucleotide
  modified_base 28: mod_base = OTHER; note = 2'-O-methyl ribonucleotide
  modified_base 29: mod_base = OTHER; note = 2'-O-methyl ribonucleotide
  modified_base 30: mod_base = OTHER; note = 2'-O-methyl ribonucleotide
  modified_base 31: mod_base = OTHER; note = 2'-O-methyl ribonucleotide
  modified_base 32: mod_base = OTHER; note = 2'-O-methyl ribonucleotide
  modified_base 33: mod_base = OTHER; note = 2'-O-methyl ribonucleotide
  modified_base 34: mod_base = OTHER; note = 2'-O-methyl ribonucleotide
  modified_base 35: mod_base = OTHER; note = 2'-O-methyl ribonucleotide
  modified_base 36: mod_base = OTHER; note = 2'-O-methyl ribonucleotide
  modified_base 37: mod_base = OTHER; note = 2'-O-methyl ribonucleotide
  modified_base 38: mod_base = OTHER; note = 2'-O-methyl ribonucleotide
  modified_base 39: mod_base = OTHER; note = 2'-O-methyl ribonucleotide
  modified_base 40: mod_base = OTHER; note = 2'-O-methyl ribonucleotide
  modified_base 41: mod_base = OTHER; note = 2'-O-methyl ribonucleotide
  modified_base 42: mod_base = OTHER; note = 2'-O-methyl ribonucleotide
  modified_base 46: mod_base = OTHER; note = 2'-O-methyl ribonucleotide
  modified_base 48: mod_base = OTHER; note = 2'-O-methyl ribonucleotide
  modified_base 50: mod_base = OTHER; note = 2'-O-methyl ribonucleotide
  modified_base 52: mod_base = OTHER; note = 2'-O-methyl ribonucleotide
  modified_base 53: mod_base = OTHER; note = 2'-O-methyl ribonucleotide
  modified_base 54: mod_base = OTHER; note = 2'-O-methyl ribonucleotide
  modified_base 55: mod_base = OTHER; note = 2'-O-methyl ribonucleotide
  modified_base 56: mod_base = OTHER; note = 2'-O-methyl ribonucleotide
  modified_base 57: mod_base = OTHER; note = 2'-O-methyl ribonucleotide
  modified_base 60: mod_base = OTHER; note = 2'-O-methyl ribonucleotide
  modified_base 61: mod_base = OTHER; note = 2'-O-methyl ribonucleotide
  modified_base 66: mod_base = OTHER; note = 2'-O-methyl ribonucleotide
  modified_base 67: mod_base = OTHER; note = 2'-O-methyl ribonucleotide
  modified_base 70: mod_base = OTHER; note = 2'-O-methyl ribonucleotide
  modified_base 71: mod_base = OTHER; note = 2'-O-methyl ribonucleotide
  modified_base 72: mod_base = OTHER; note = 2'-O-methyl ribonucleotide
  modified_base 74: mod_base = OTHER; note = 2'-O-methyl ribonucleotide
  modified_base 75: mod_base = OTHER; note = 2'-O-methyl ribonucleotide
  modified_base 76: mod_base = OTHER; note = 2'-O-methyl ribonucleotide
  modified_base 77: mod_base = OTHER; note = 2'-O-methyl ribonucleotide
  modified_base 78: mod_base = OTHER; note = 2'-O-methyl ribonucleotide
  modified_base 79: mod_base = OTHER; note = 2'-O-methyl ribonucleotide
  modified_base 80: mod_base = OTHER; note = 2'-O-methyl ribonucleotide
  modified_base 82: mod_base = OTHER; note = 2'-O-methyl ribonucleotide
  modified_base 83: mod_base = OTHER; note = 2'-O-methyl ribonucleotide
  modified_base 84: mod_base = OTHER; note = 2'-O-methyl ribonucleotide
  modified_base 85: mod_base = OTHER; note = 2'-O-methyl ribonucleotide
  modified_base 86: mod_base = OTHER; note = 2'-O-methyl ribonucleotide
  modified_base 87: mod_base = OTHER; note = 2'-O-methyl ribonucleotide
  modified_base 89: mod_base = OTHER; note = 2'-O-methyl ribonucleotide
  modified_base 92: mod_base = OTHER; note = 2'-O-methyl ribonucleotide
  modified_base 93: mod_base = OTHER; note = 2'-O-methyl ribonucleotide
  modified_base 94: mod_base = OTHER; note = 2'-O-methyl ribonucleotide
  modified_base 95: mod_base = OTHER; note = 2'-O-methyl ribonucleotide
  modified_base 96: mod_base = OTHER; note = 2'-O-methyl ribonucleotide
  modified_base 97: mod_base = OTHER; note = 2'-O-methyl ribonucleotide
  modified_base 98: mod_base = OTHER; note = 2'-O-methyl ribonucleotide
  modified_base 99: mod_base = OTHER; note = 2'-O-methyl ribonucleotide
  modified_base 100: mod_base = OTHER; note = 2'-O-methyl ribonucleotide
  modified_base 1..4: mod_base = OTHER; note = phosphorothioate linkage
  modified_base 25..26: mod_base = OTHER; note = phosphorothioate linkage
  modified_base 97..100: mod_base = OTHER; note = phosphorothioate linkage

SEQ ID NO: 2491 - RNA, 103 nt, synthetic construct; identical to SEQ ID NO: 1700
  source 1..103: mol_type = other RNA
  modified_base 1: mod_base = OTHER; note = 2'-O-methyl ribonucleotide
  modified_base 2: mod_base = OTHER; note = 2'-O-methyl ribonucleotide
  modified_base 3: mod_base = OTHER; note = 2'-O-methyl ribonucleotide
  modified_base 21: mod_base = OTHER; note = 2'-O-methyl ribonucleotide
  modified_base 28: mod_base = OTHER; note = 2'-O-methyl ribonucleotide
  modified_base 29: mod_base = OTHER; note = 2'-O-methyl ribonucleotide
  modified_base 30: mod_base = OTHER; note = 2'-O-methyl ribonucleotide
  modified_base 31: mod_base = OTHER; note = 2'-O-methyl ribonucleotide
  modified_base 32: mod_base = OTHER; note = 2'-O-methyl ribonucleotide
  modified_base 33: mod_base = OTHER; note = 2'-O-methyl ribonucleotide
  modified_base 34: mod_base = OTHER; note = 2'-O-methyl ribonucleotide
  modified_base 35: mod_base = OTHER; note = 2'-O-methyl ribonucleotide
  modified_base 36: mod_base = OTHER; note = 2'-O-methyl ribonucleotide
  modified_base 37: mod_base = OTHER; note = 2'-O-methyl ribonucleotide
  modified_base 38: mod_base = OTHER; note = 2'-O-methyl ribonucleotide
  modified_base 39: mod_base = OTHER; note = 2'-O-methyl ribonucleotide
  modified_base 40: mod_base = OTHER; note = 2'-O-methyl ribonucleotide
  modified_base 41: mod_base = OTHER; note = 2'-O-methyl ribonucleotide
  modified_base 42: mod_base = OTHER; note = 2'-O-methyl ribonucleotide
  modified_base 46: mod_base = OTHER; note = 2'-O-methyl ribonucleotide
  modified_base 48: mod_base = OTHER; note = 2'-O-methyl ribonucleotide
  modified_base 50: mod_base = OTHER; note = 2'-O-methyl ribonucleotide
  modified_base 52: mod_base = OTHER; note = 2'-O-methyl ribonucleotide
  modified_base 53: mod_base = OTHER; note = 2'-O-methyl ribonucleotide
  modified_base 54: mod_base = OTHER; note = 2'-O-methyl ribonucleotide
  modified_base 57: mod_base = OTHER; note = 2'-O-methyl ribonucleotide
  modified_base 61: mod_base = OTHER; note = 2'-O-methyl ribonucleotide
  modified_base 66: mod_base = OTHER; note = 2'-O-methyl ribonucleotide
  modified_base 67: mod_base = OTHER; note = 2'-O-methyl ribonucleotide
  modified_base 70: mod_base = OTHER; note = 2'-O-methyl ribonucleotide
  modified_base 71: mod_base = OTHER; note = 2'-O-methyl ribonucleotide
  modified_base 72: mod_base = OTHER; note = 2'-O-methyl ribonucleotide
  modified_base 73: mod_base = OTHER; note = 2'-O-methyl ribonucleotide
  modified_base 74: mod_base = OTHER; note = 2'-O-methyl ribonucleotide
  modified_base 75: mod_base = OTHER; note = 2'-O-methyl ribonucleotide
  modified_base 76: mod_base = OTHER; note = 2'-O-methyl ribonucleotide
  modified_base 77: mod_base = OTHER; note = 2'-O-methyl ribonucleotide
  modified_base 78: mod_base = OTHER; note = 2'-O-methyl ribonucleotide
  modified_base 79: mod_base = OTHER; note = 2'-O-methyl ribonucleotide
  modified_base 80: mod_base = OTHER; note = 2'-O-methyl ribonucleotide
  modified_base 82: mod_base = OTHER; note = 2'-O-methyl ribonucleotide
  modified_base 83: mod_base = OTHER; note = 2'-O-methyl ribonucleotide
  modified_base 84: mod_base = OTHER; note = 2'-O-methyl ribonucleotide
  modified_base 85: mod_base = OTHER; note = 2'-O-methyl ribonucleotide
  modified_base 86: mod_base = OTHER; note = 2'-O-methyl ribonucleotide
  modified_base 87: mod_base = OTHER; note = 2'-O-methyl ribonucleotide
  modified_base 89: mod_base = OTHER; note = 2'-O-methyl ribonucleotide
  modified_base 92: mod_base = OTHER; note = 2'-O-methyl ribonucleotide
  modified_base 93: mod_base = OTHER; note = 2'-O-methyl ribonucleotide
  modified_base 94: mod_base = OTHER; note = 2'-O-methyl ribonucleotide
  modified_base 95: mod_base = OTHER; note = 2'-O-methyl ribonucleotide
  modified_base 96: mod_base = OTHER; note = 2'-O-methyl ribonucleotide
  modified_base 97: mod_base = OTHER; note = 2'-O-methyl ribonucleotide
  modified_base 98: mod_base = OTHER; note = 2'-O-methyl ribonucleotide
  modified_base 99: mod_base = OTHER; note = 2'-O-methyl ribonucleotide
  modified_base 100: mod_base = OTHER; note = 2'-O-methyl ribonucleotide
  modified_base 1..4: mod_base = OTHER; note = phosphorothioate linkage
  modified_base 25..26: mod_base = OTHER; note = phosphorothioate linkage
  modified_base 97..100: mod_base = OTHER; note = phosphorothioate linkage

SEQ ID NO: 2492 - RNA, 103 nt, synthetic construct; identical to SEQ ID NO: 1700
  source 1..103: mol_type = other RNA
  modified_base 1: mod_base = OTHER; note = 2'-O-methyl ribonucleotide
  modified_base 2: mod_base = OTHER; note = 2'-O-methyl ribonucleotide
  modified_base 3: mod_base = OTHER; note = 2'-O-methyl ribonucleotide
  modified_base 21: mod_base = OTHER; note = 2'-O-methyl ribonucleotide
  modified_base 28: mod_base = OTHER; note = 2'-O-methyl ribonucleotide
  modified_base 29: mod_base = OTHER; note = 2'-O-methyl ribonucleotide
  modified_base 30: mod_base = OTHER; note = 2'-O-methyl ribonucleotide
  modified_base 31: mod_base = OTHER; note = 2'-O-methyl ribonucleotide
  modified_base 32: mod_base = OTHER; note = 2'-O-methyl ribonucleotide
  modified_base 33: mod_base = OTHER; note = 2'-O-methyl ribonucleotide
  modified_base 34: mod_base = OTHER; note = 2'-O-methyl ribonucleotide
  modified_base 35: mod_base = OTHER; note = 2'-O-methyl ribonucleotide
  modified_base 36: mod_base = OTHER; note = 2'-O-methyl ribonucleotide
  modified_base 37: mod_base = OTHER; note = 2'-O-methyl ribonucleotide
  modified_base 38: mod_base = OTHER; note = 2'-O-methyl ribonucleotide
  modified_base 39: mod_base = OTHER; note = 2'-O-methyl ribonucleotide
  modified_base 40: mod_base = OTHER; note = 2'-O-methyl ribonucleotide
  modified_base 41: mod_base = OTHER; note = 2'-O-methyl ribonucleotide
  modified_base 42: mod_base = OTHER; note = 2'-O-methyl ribonucleotide
  modified_base 46: mod_base = OTHER; note = 2'-O-methyl ribonucleotide
  modified_base 48: mod_base = OTHER; note = 2'-O-methyl ribonucleotide
  modified_base 50: mod_base = OTHER; note = 2'-O-methyl ribonucleotide
  modified_base 52: mod_base = OTHER; note = 2'-O-methyl ribonucleotide
  modified_base 53: mod_base = OTHER; note = 2'-O-methyl ribonucleotide
  modified_base 54: mod_base = OTHER; note = 2'-O-methyl ribonucleotide
  modified_base 57: mod_base = OTHER; note = 2'-O-methyl ribonucleotide
  modified_base 61: mod_base = OTHER; note = 2'-O-methyl ribonucleotide
  modified_base 66: mod_base = OTHER; note = 2'-O-methyl ribonucleotide
  modified_base 67: mod_base = OTHER; note = 2'-O-methyl ribonucleotide
  modified_base 70: mod_base = OTHER; note = 2'-O-methyl ribonucleotide
  modified_base 71: mod_base = OTHER; note = 2'-O-methyl ribonucleotide
  modified_base 72: mod_base = OTHER; note = 2'-O-methyl ribonucleotide
  modified_base 73: mod_base = OTHER; note = 2'-O-methyl ribonucleotide
  modified_base 74: mod_base = OTHER; note = 2'-O-methyl ribonucleotide
  modified_base 75: mod_base = OTHER; note = 2'-O-methyl ribonucleotide
  modified_base 76: mod_base = OTHER; note = 2'-O-methyl ribonucleotide
  modified_base 77: mod_base = OTHER; note = 2'-O-methyl ribonucleotide
  modified_base 78: mod_base = OTHER; note = 2'-O-methyl ribonucleotide
  modified_base 79: mod_base = OTHER; note = 2'-O-methyl ribonucleotide
  modified_base 80: mod_base = OTHER; note = 2'-O-methyl ribonucleotide
  modified_base 82: mod_base = OTHER; note = 2'-O-methyl ribonucleotide
  modified_base 83: mod_base = OTHER; note = 2'-O-methyl ribonucleotide
  modified_base 84: mod_base = OTHER; note = 2'-O-methyl ribonucleotide
  modified_base 85: mod_base = OTHER; note = 2'-O-methyl ribonucleotide
  modified_base 86: mod_base = OTHER; note = 2'-O-methyl ribonucleotide
  modified_base 87: mod_base = OTHER; note = 2'-O-methyl ribonucleotide
  modified_base 89: mod_base = OTHER; note = 2'-O-methyl ribonucleotide
  modified_base 91: mod_base = OTHER; note = 2'-O-methyl ribonucleotide
  modified_base 92: mod_base = OTHER; note = 2'-O-methyl ribonucleotide
  modified_base 93: mod_base = OTHER; note = 2'-O-methyl ribonucleotide
  modified_base 94: mod_base = OTHER; note = 2'-O-methyl ribonucleotide
  modified_base 95: mod_base = OTHER; note = 2'-O-methyl ribonucleotide
  modified_base 96: mod_base = OTHER; note = 2'-O-methyl ribonucleotide
  modified_base 97: mod_base = OTHER; note = 2'-O-methyl ribonucleotide
  modified_base 98: mod_base = OTHER; note = 2'-O-methyl ribonucleotide
  modified_base 99: mod_base = OTHER; note = 2'-O-methyl ribonucleotide
  modified_base 100: mod_base = OTHER; note = 2'-O-methyl ribonucleotide
  modified_base 1..4: mod_base = OTHER; note = phosphorothioate linkage
  modified_base 25..26: mod_base = OTHER; note = phosphorothioate linkage
  modified_base 97..100: mod_base = OTHER; note = phosphorothioate linkage

SEQ ID NO: 2493 - RNA, 103 nt, synthetic construct; identical to SEQ ID NO: 1700
  source 1..103: mol_type = other RNA
  modified_base 1: mod_base = OTHER; note = 2'-O-methyl ribonucleotide
  modified_base 2: mod_base = OTHER; note = 2'-O-methyl ribonucleotide
  modified_base 3: mod_base = OTHER; note = 2'-O-methyl ribonucleotide
  modified_base 21: mod_base = OTHER; note = 2'-O-methyl ribonucleotide
  modified_base 28: mod_base = OTHER; note = 2'-O-methyl ribonucleotide
  modified_base 29: mod_base = OTHER; note = 2'-O-methyl ribonucleotide
  modified_base 30: mod_base = OTHER; note = 2'-O-methyl ribonucleotide
  modified_base 31: mod_base = OTHER; note = 2'-O-methyl ribonucleotide
  modified_base 32: mod_base = OTHER; note = 2'-O-methyl ribonucleotide
  modified_base 34: mod_base = OTHER; note = 2'-O-methyl ribonucleotide
  modified_base 35: mod_base = OTHER; note = 2'-O-methyl ribonucleotide
  modified_base 36: mod_base = OTHER; note = 2'-O-methyl ribonucleotide
  modified_base 37: mod_base = OTHER; note = 2'-O-methyl ribonucleotide
  modified_base 38: mod_base = OTHER; note = 2'-O-methyl ribonucleotide
  modified_base 39: mod_base = OTHER; note = 2'-O-methyl ribonucleotide
  modified_base 40: mod_base = OTHER; note = 2'-O-methyl ribonucleotide
  modified_base 41: mod_base = OTHER; note = 2'-O-methyl ribonucleotide
  modified_base 42: mod_base = OTHER; note = 2'-O-methyl ribonucleotide
  modified_base 46: mod_base = OTHER; note = 2'-O-methyl ribonucleotide
  modified_base 48: mod_base = OTHER; note = 2'-O-methyl ribonucleotide
  modified_base 50: mod_base = OTHER; note = 2'-O-methyl ribonucleotide
  modified_base 52: mod_base = OTHER; note = 2'-O-methyl ribonucleotide
  modified_base 53: mod_base = OTHER; note = 2'-O-methyl ribonucleotide
  modified_base 54: mod_base = OTHER; note = 2'-O-methyl ribonucleotide
  modified_base 57: mod_base = OTHER; note = 2'-O-methyl ribonucleotide
  modified_base 61: mod_base = OTHER; note = 2'-O-methyl ribonucleotide
  modified_base 66: mod_base = OTHER; note = 2'-O-methyl ribonucleotide
  modified_base 67: mod_base = OTHER; note = 2'-O-methyl ribonucleotide
  modified_base 70: mod_base = OTHER; note = 2'-O-methyl ribonucleotide
  modified_base 71: mod_base = OTHER; note = 2'-O-methyl ribonucleotide
  modified_base 72: mod_base = OTHER; note = 2'-O-methyl ribonucleotide
  modified_base 73: mod_base = OTHER; note = 2'-O-methyl ribonucleotide
  modified_base 74: mod_base = OTHER; note = 2'-O-methyl ribonucleotide
  modified_base 75: mod_base = OTHER; note = 2'-O-methyl ribonucleotide
  modified_base 76: mod_base = OTHER; note = 2'-O-methyl ribonucleotide
  modified_base 77: mod_base = OTHER; note = 2'-O-methyl ribonucleotide
  modified_base 78: mod_base = OTHER; note = 2'-O-methyl ribonucleotide
  modified_base 79: mod_base = OTHER; note = 2'-O-methyl ribonucleotide
  modified_base 80: mod_base = OTHER; note = 2'-O-methyl ribonucleotide
  modified_base 82: mod_base = OTHER; note = 2'-O-methyl ribonucleotide
  modified_base 83: mod_base = OTHER; note = 2'-O-methyl ribonucleotide
  modified_base 84: mod_base = OTHER; note = 2'-O-methyl ribonucleotide
  modified_base 85: mod_base = OTHER; note = 2'-O-methyl ribonucleotide
  modified_base 86: mod_base = OTHER; note = 2'-O-methyl ribonucleotide
  modified_base 87: mod_base = OTHER; note = 2'-O-methyl ribonucleotide
  modified_base 89: mod_base = OTHER; note = 2'-O-methyl ribonucleotide
  modified_base 92: mod_base = OTHER; note = 2'-O-methyl ribonucleotide
  modified_base 93: mod_base = OTHER; note = 2'-O-methyl ribonucleotide
  modified_base 94: mod_base = OTHER; note = 2'-O-methyl ribonucleotide
  modified_base 95: mod_base = OTHER; note = 2'-O-methyl ribonucleotide
  modified_base 96: mod_base = OTHER; note = 2'-O-methyl ribonucleotide
  modified_base 97: mod_base = OTHER; note = 2'-O-methyl ribonucleotide
  modified_base 98: mod_base = OTHER; note = 2'-O-methyl ribonucleotide
  modified_base 99: mod_base = OTHER; note = 2'-O-methyl ribonucleotide
  modified_base 100: mod_base = OTHER; note = 2'-O-methyl ribonucleotide
  modified_base 1..4: mod_base = OTHER; note = phosphorothioate linkage
  modified_base 25..26: mod_base = OTHER; note = phosphorothioate linkage
  modified_base 97..100: mod_base = OTHER; note = phosphorothioate linkage

SEQ ID NO: 2494 - RNA, 103 nt, synthetic construct; identical to SEQ ID NO: 1700
  source 1..103: mol_type = other RNA
  modified_base 1: mod_base = OTHER; note = 2'-O-methyl ribonucleotide
  modified_base 2: mod_base = OTHER; note = 2'-O-methyl ribonucleotide
  modified_base 3: mod_base = OTHER; note = 2'-O-methyl ribonucleotide
  modified_base 21: mod_base = OTHER; note = 2'-O-methyl ribonucleotide
  modified_base 28: mod_base = OTHER; note = 2'-O-methyl ribonucleotide
  modified_base 29: mod_base = OTHER; note = 2'-O-methyl ribonucleotide
  modified_base 30: mod_base = OTHER; note = 2'-O-methyl ribonucleotide
  modified_base 31: mod_base = OTHER; note = 2'-O-methyl ribonucleotide
  modified_base 32: mod_base = OTHER; note = 2'-O-methyl ribonucleotide
  modified_base 34: mod_base = OTHER; note = 2'-O-methyl ribonucleotide
  modified_base 35: mod_base = OTHER; note = 2'-O-methyl ribonucleotide
  modified_base 36: mod_base = OTHER; note = 2'-O-methyl ribonucleotide
  modified_base 37: mod_base = OTHER; note = 2'-O-methyl ribonucleotide
  modified_base 38: mod_base = OTHER; note = 2'-O-methyl ribonucleotide
  modified_base 39: mod_base = OTHER; note = 2'-O-methyl ribonucleotide
  modified_base 40: mod_base = OTHER; note = 2'-O-methyl ribonucleotide
  modified_base 41: mod_base = OTHER; note = 2'-O-methyl ribonucleotide
  modified_base 42: mod_base = OTHER; note = 2'-O-methyl ribonucleotide
  modified_base 46: mod_base = OTHER; note = 2'-O-methyl ribonucleotide
  modified_base 48: mod_base = OTHER; note = 2'-O-methyl ribonucleotide
  modified_base 50: mod_base = OTHER; note = 2'-O-methyl ribonucleotide
  modified_base 52: mod_base = OTHER; note = 2'-O-methyl ribonucleotide
  modified_base 53: mod_base = OTHER; note = 2'-O-methyl ribonucleotide
  modified_base 54: mod_base = OTHER; note = 2'-O-methyl ribonucleotide
  modified_base 57: mod_base = OTHER; note = 2'-O-methyl ribonucleotide
  modified_base 61: mod_base = OTHER; note = 2'-O-methyl ribonucleotide
  modified_base 66: mod_base = OTHER; note = 2'-O-methyl ribonucleotide
  modified_base 67: mod_base = OTHER; note = 2'-O-methyl ribonucleotide
  modified_base 70: mod_base = OTHER; note = 2'-O-methyl ribonucleotide
  modified_base 71: mod_base = OTHER; note = 2'-O-methyl ribonucleotide
  modified_base 72: mod_base = OTHER; note = 2'-O-methyl ribonucleotide
  modified_base 73: mod_base = OTHER; note = 2'-O-methyl ribonucleotide
  modified_base 74: mod_base = OTHER; note = 2'-O-methyl ribonucleotide
  modified_base 75: mod_base = OTHER; note = 2'-O-methyl ribonucleotide
  modified_base 76: mod_base = OTHER; note = 2'-O-methyl ribonucleotide
  modified_base 77: mod_base = OTHER; note = 2'-O-methyl ribonucleotide
  modified_base 78: mod_base = OTHER; note = 2'-O-methyl ribonucleotide
  modified_base 79: mod_base = OTHER; note = 2'-O-methyl ribonucleotide
  modified_base 80: mod_base = OTHER; note = 2'-O-methyl ribonucleotide
  modified_base 82: mod_base = OTHER; note = 2'-O-methyl ribonucleotide
  modified_base 83: mod_base = OTHER; note = 2'-O-methyl ribonucleotide
  modified_base 84: mod_base = OTHER; note = 2'-O-methyl ribonucleotide
  modified_base 85: mod_base = OTHER; note = 2'-O-methyl ribonucleotide
  modified_base 86: mod_base = OTHER; note = 2'-O-methyl ribonucleotide
  modified_base 87: mod_base = OTHER; note = 2'-O-methyl ribonucleotide
  modified_base 89: mod_base = OTHER; note = 2'-O-methyl ribonucleotide
  modified_base 91: mod_base = OTHER; note = 2'-O-methyl ribonucleotide
  modified_base 92: mod_base = OTHER; note = 2'-O-methyl ribonucleotide
  modified_base 93: mod_base = OTHER; note = 2'-O-methyl ribonucleotide
  modified_base 94: mod_base = OTHER; note = 2'-O-methyl ribonucleotide
  modified_base 95: mod_base = OTHER; note = 2'-O-methyl ribonucleotide
  modified_base 96: mod_base = OTHER; note = 2'-O-methyl ribonucleotide
  modified_base 97: mod_base = OTHER; note = 2'-O-methyl ribonucleotide
  modified_base 98: mod_base = OTHER; note = 2'-O-methyl ribonucleotide
  modified_base 99: mod_base = OTHER; note = 2'-O-methyl ribonucleotide
  modified_base 100: mod_base = OTHER; note = 2'-O-methyl ribonucleotide
  modified_base 1..4: mod_base = OTHER; note = phosphorothioate linkage
  modified_base 25..26: mod_base = OTHER; note = phosphorothioate linkage
  modified_base 97..100: mod_base = OTHER; note = phosphorothioate linkage

SEQ ID NO: 2495 - RNA, 103 nt, synthetic construct; identical to SEQ ID NO: 1700
  source 1..103: mol_type = other RNA
  modified_base 1: mod_base = OTHER; note = 2'-O-methyl ribonucleotide
  modified_base 2: mod_base = OTHER; note = 2'-O-methyl ribonucleotide
  modified_base 3: mod_base = OTHER; note = 2'-O-methyl ribonucleotide
  modified_base 21: mod_base = OTHER; note = 2'-O-methyl ribonucleotide
  modified_base 28: mod_base = OTHER; note = 2'-O-methyl ribonucleotide
  modified_base 29: mod_base = OTHER; note = 2'-O-methyl ribonucleotide
  modified_base 30: mod_base = OTHER; note = 2'-O-methyl ribonucleotide
  modified_base 31: mod_base = OTHER; note = 2'-O-methyl ribonucleotide
  modified_base 32: mod_base = OTHER; note = 2'-O-methyl ribonucleotide
  modified_base 34: mod_base = OTHER; note = 2'-O-methyl ribonucleotide
  modified_base 35: mod_base = OTHER; note = 2'-O-methyl ribonucleotide
  modified_base 36: mod_base = OTHER; note = 2'-O-methyl ribonucleotide
  modified_base 37: mod_base = OTHER; note = 2'-O-methyl ribonucleotide
  modified_base 38: mod_base = OTHER; note = 2'-O-methyl ribonucleotide
  modified_base 39: mod_base = OTHER; note = 2'-O-methyl ribonucleotide
  modified_base 40: mod_base = OTHER; note = 2'-O-methyl ribonucleotide
  modified_base 41: mod_base = OTHER; note = 2'-O-methyl ribonucleotide
  modified_base 42: mod_base = OTHER; note = 2'-O-methyl ribonucleotide
  modified_base 46: mod_base = OTHER; note = 2'-O-methyl ribonucleotide
  modified_base 48: mod_base = OTHER; note = 2'-O-methyl ribonucleotide
  modified_base 50: mod_base = OTHER; note = 2'-O-methyl ribonucleotide
  modified_base 52: mod_base = OTHER; note = 2'-O-methyl ribonucleotide
  modified_base 53: mod_base = OTHER; note = 2'-O-methyl ribonucleotide
  modified_base 54: mod_base = OTHER; note = 2'-O-methyl ribonucleotide
  modified_base 55: mod_base = OTHER; note = 2'-O-methyl ribonucleotide
  modified_base 56: mod_base = OTHER; note = 2'-O-methyl ribonucleotide
  modified_base 57: mod_base = OTHER; note = 2'-O-methyl ribonucleotide
  modified_base 60: mod_base = OTHER; note = 2'-O-methyl ribonucleotide
  modified_base 61: mod_base = OTHER; note = 2'-O-methyl ribonucleotide
  modified_base 66: mod_base = OTHER; note = 2'-O-methyl ribonucleotide
  modified_base 67: mod_base = OTHER; note = 2'-O-methyl ribonucleotide
  modified_base 70: mod_base = OTHER; note = 2'-O-methyl ribonucleotide
  modified_base 71: mod_base = OTHER; note = 2'-O-methyl ribonucleotide
  modified_base 72: mod_base = OTHER; note = 2'-O-methyl ribonucleotide
  modified_base 74: mod_base = OTHER; note = 2'-O-methyl ribonucleotide
  modified_base 75: mod_base = OTHER; note = 2'-O-methyl ribonucleotide
  modified_base 76: mod_base = OTHER; note = 2'-O-methyl ribonucleotide
  modified_base 77: mod_base = OTHER; note = 2'-O-methyl ribonucleotide
  modified_base 78: mod_base = OTHER; note = 2'-O-methyl ribonucleotide
  modified_base 79: mod_base = OTHER; note = 2'-O-methyl ribonucleotide
  modified_base 80: mod_base = OTHER; note = 2'-O-methyl ribonucleotide
  modified_base 82: mod_base = OTHER; note = 2'-O-methyl ribonucleotide
  modified_base 83: mod_base = OTHER; note = 2'-O-methyl ribonucleotide
  modified_base 84: mod_base = OTHER; note = 2'-O-methyl ribonucleotide
  modified_base 85: mod_base = OTHER; note = 2'-O-methyl ribonucleotide
  modified_base 86: mod_base = OTHER; note = 2'-O-methyl ribonucleotide
  modified_base 87: mod_base = OTHER; note = 2'-O-methyl ribonucleotide
  modified_base 89: mod_base = OTHER; note = 2'-O-methyl ribonucleotide
  modified_base 92: mod_base = OTHER; note = 2'-O-methyl ribonucleotide
  modified_base 93: mod_base = OTHER; note = 2'-O-methyl ribonucleotide
  modified_base 94: mod_base = OTHER; note = 2'-O-methyl ribonucleotide
  modified_base 95: mod_base = OTHER; note = 2'-O-methyl ribonucleotide
  modified_base 96: mod_base = OTHER; note = 2'-O-methyl ribonucleotide
  modified_base 97: mod_base = OTHER; note = 2'-O-methyl ribonucleotide
  modified_base 98: mod_base = OTHER; note = 2'-O-methyl ribonucleotide
  modified_base 99: mod_base = OTHER; note = 2'-O-methyl ribonucleotide
  modified_base 100: mod_base = OTHER; note = 2'-O-methyl ribonucleotide
  modified_base 1..4: mod_base = OTHER; note = phosphorothioate linkage
  modified_base 25..26: mod_base = OTHER; note = phosphorothioate linkage
  modified_base 97..100: mod_base = OTHER; note = phosphorothioate linkage

SEQ ID NO: 2496 - RNA, 103 nt, synthetic construct; identical to SEQ ID NO: 1643
  source 1..103: mol_type = other RNA
  modified_base 1: mod_base = OTHER; note = 2'-O-methyl ribonucleotide
  modified_base 2: mod_base = OTHER; note = 2'-O-methyl ribonucleotide
  modified_base 3: mod_base = OTHER; note = 2'-O-methyl ribonucleotide
  modified_base 21: mod_base = OTHER; note = 2'-O-methyl ribonucleotide
  modified_base 28: mod_base = OTHER; note = 2'-O-methyl ribonucleotide
  modified_base 29: mod_base = OTHER; note = 2'-O-methyl ribonucleotide
  modified_base 30: mod_base = OTHER; note = 2'-O-methyl ribonucleotide
  modified_base 31: mod_base = OTHER; note = 2'-O-methyl ribonucleotide
  modified_base 32: mod_base = OTHER; note = 2'-O-methyl ribonucleotide
  modified_base 33: mod_base = OTHER; note = 2'-O-methyl ribonucleotide
  modified_base 34: mod_base = OTHER; note = 2'-O-methyl ribonucleotide
  modified_base 35: mod_base = OTHER; note = 2'-O-methyl ribonucleotide
  modified_base 36: mod_base = OTHER; note = 2'-O-methyl ribonucleotide
  modified_base 37: mod_base = OTHER; note = 2'-O-methyl ribonucleotide
  modified_base 38: mod_base = OTHER; note = 2'-O-methyl ribonucleotide
  modified_base 39: mod_base = OTHER; note = 2'-O-methyl ribonucleotide
  modified_base 40: mod_base = OTHER; note = 2'-O-methyl ribonucleotide
  modified_base 41: mod_base = OTHER; note = 2'-O-methyl ribonucleotide
  modified_base 42: mod_base = OTHER; note = 2'-O-methyl ribonucleotide
  modified_base 46: mod_base = OTHER; note = 2'-O-methyl ribonucleotide
  modified_base 48: mod_base = OTHER; note = 2'-O-methyl ribonucleotide
  modified_base 50: mod_base = OTHER; note = 2'-O-methyl ribonucleotide
  modified_base 52: mod_base = OTHER; note = 2'-O-methyl ribonucleotide
  modified_base 53: mod_base = OTHER; note = 2'-O-methyl ribonucleotide
  modified_base 54: mod_base = OTHER; note = 2'-O-methyl ribonucleotide
  modified_base 55: mod_base = OTHER; note = 2'-O-methyl ribonucleotide
  modified_base 56: mod_base = OTHER; note = 2'-O-methyl ribonucleotide
  modified_base 57: mod_base = OTHER; note = 2'-O-methyl ribonucleotide
  modified_base 60: mod_base = OTHER; note = 2'-O-methyl ribonucleotide
  modified_base 61: mod_base = OTHER; note = 2'-O-methyl ribonucleotide
  modified_base 66: mod_base = OTHER; note = 2'-O-methyl ribonucleotide
  modified_base 67: mod_base = OTHER; note = 2'-O-methyl ribonucleotide
  modified_base 70: mod_base = OTHER; note = 2'-O-methyl ribonucleotide
  modified_base 71: mod_base = OTHER; note = 2'-O-methyl ribonucleotide
  modified_base 72: mod_base = OTHER; note = 2'-O-methyl ribonucleotide
  modified_base 73: mod_base = OTHER; note = 2'-O-methyl ribonucleotide
  modified_base 74: mod_base = OTHER; note = 2'-O-methyl ribonucleotide
  modified_base 75: mod_base = OTHER; note = 2'-O-methyl ribonucleotide
  modified_base 76: mod_base = OTHER; note = 2'-O-methyl ribonucleotide
  modified_base 77: mod_base = OTHER; note = 2'-O-methyl ribonucleotide
  modified_base 78: mod_base = OTHER; note = 2'-O-methyl ribonucleotide
  modified_base 79: mod_base = OTHER; note = 2'-O-methyl ribonucleotide
  modified_base 80: mod_base = OTHER; note = 2'-O-methyl ribonucleotide
  modified_base 81: mod_base = OTHER; note = 2'-O-methyl ribonucleotide
  modified_base 83: mod_base = OTHER; note = 2'-O-methyl ribonucleotide
  modified_base 84: mod_base = OTHER; note = 2'-O-methyl ribonucleotide
  modified_base 85: mod_base = OTHER; note = 2'-O-methyl ribonucleotide
  modified_base 86: mod_base = OTHER; note = 2'-O-methyl ribonucleotide
  modified_base 87: mod_base = OTHER; note = 2'-O-methyl ribonucleotide
  modified_base 88: mod_base = OTHER; note = 2'-O-methyl ribonucleotide
  modified_base 89: mod_base = OTHER; note = 2'-O-methyl ribonucleotide
  modified_base 90: mod_base = OTHER; note = 2'-O-methyl ribonucleotide
  modified_base 91: mod_base = OTHER; note = 2'-O-methyl ribonucleotide
  modified_base 92: mod_base = OTHER; note = 2'-O-methyl ribonucleotide
  modified_base 93: mod_base = OTHER; note = 2'-O-methyl ribonucleotide
  modified_base 94: mod_base = OTHER; note = 2'-O-methyl ribonucleotide
  modified_base 95: mod_base = OTHER; note = 2'-O-methyl ribonucleotide
  modified_base 96: mod_base = OTHER; note = 2'-O-methyl ribonucleotide
  modified_base 97: mod_base = OTHER; note = 2'-O-methyl ribonucleotide
  modified_base 98: mod_base = OTHER; note = 2'-O-methyl ribonucleotide
  modified_base 99: mod_base = OTHER; note = 2'-O-methyl ribonucleotide
  modified_base 100: mod_base = OTHER; note = 2'-O-methyl ribonucleotide
  modified_base 1..4: mod_base = OTHER; note = phosphorothioate linkage
  modified_base 45..46: mod_base = OTHER; note = phosphorothioate linkage
  modified_base 64..65: mod_base = OTHER; note = phosphorothioate linkage
  modified_base 97..100: mod_base = OTHER; note = phosphorothioate linkage

SEQ ID NO: 2497 - RNA, 103 nt, synthetic construct; identical to SEQ ID NO: 1643
  source 1..103: mol_type = other RNA
  modified_base 1: mod_base = OTHER; note = 2'-O-methyl ribonucleotide
  modified_base 2: mod_base = OTHER; note = 2'-O-methyl ribonucleotide
  modified_base 3: mod_base = OTHER; note = 2'-O-methyl ribonucleotide
  modified_base 21: mod_base = OTHER; note = 2'-O-methyl ribonucleotide
  modified_base 28: mod_base = OTHER; note = 2'-O-methyl ribonucleotide
  modified_base 29: mod_base = OTHER; note = 2'-O-methyl ribonucleotide
  modified_base 30: mod_base = OTHER; note = 2'-O-methyl ribonucleotide
  modified_base 31: mod_base = OTHER; note = 2'-O-methyl ribonucleotide
  modified_base 32: mod_base = OTHER; note = 2'-O-methyl ribonucleotide
  modified_base 34: mod_base = OTHER; note = 2'-O-methyl ribonucleotide
  modified_base 35: mod_base = OTHER; note = 2'-O-methyl ribonucleotide
  modified_base 36: mod_base = OTHER; note = 2'-O-methyl ribonucleotide
  modified_base 37: mod_base = OTHER; note = 2'-O-methyl ribonucleotide
  modified_base 38: mod_base = OTHER; note = 2'-O-methyl ribonucleotide
  modified_base 39: mod_base = OTHER; note = 2'-O-methyl ribonucleotide
  modified_base 40: mod_base = OTHER; note = 2'-O-methyl ribonucleotide
  modified_base 41: mod_base = OTHER; note = 2'-O-methyl ribonucleotide
  modified_base 42: mod_base = OTHER; note = 2'-O-methyl ribonucleotide
  modified_base 46: mod_base = OTHER; note = 2'-O-methyl ribonucleotide
  modified_base 48: mod_base = OTHER; note = 2'-O-methyl ribonucleotide
  modified_base 50: mod_base = OTHER; note = 2'-O-methyl ribonucleotide
  modified_base 52: mod_base = OTHER; note = 2'-O-methyl ribonucleotide
  modified_base 53: mod_base = OTHER; note = 2'-O-methyl ribonucleotide
  modified_base 54: mod_base = OTHER; note = 2'-O-methyl ribonucleotide
  modified_base 55: mod_base = OTHER; note = 2'-O-methyl ribonucleotide
  modified_base 56: mod_base = OTHER; note = 2'-O-methyl ribonucleotide
  modified_base 57: mod_base = OTHER; note = 2'-O-methyl ribonucleotide
  modified_base 60: mod_base = OTHER; note = 2'-O-methyl ribonucleotide
  modified_base 61: mod_base = OTHER; note = 2'-O-methyl ribonucleotide
  modified_base 66: mod_base = OTHER; note = 2'-O-methyl ribonucleotide
  modified_base 67: mod_base = OTHER; note = 2'-O-methyl ribonucleotide
  modified_base 70: mod_base = OTHER; note = 2'-O-methyl ribonucleotide
  modified_base 71: mod_base = OTHER; note = 2'-O-methyl ribonucleotide
  modified_base 72: mod_base = OTHER; note = 2'-O-methyl ribonucleotide
  modified_base 74: mod_base = OTHER; note = 2'-O-methyl ribonucleotide
  modified_base 75: mod_base = OTHER; note = 2'-O-methyl ribonucleotide
  modified_base 76: mod_base = OTHER; note = 2'-O-methyl ribonucleotide
  modified_base 77: mod_base = OTHER; note = 2'-O-methyl ribonucleotide
  modified_base 78: mod_base = OTHER; note = 2'-O-methyl ribonucleotide
  modified_base 79: mod_base = OTHER; note = 2'-O-methyl ribonucleotide
  modified_base 80: mod_base = OTHER; note = 2'-O-methyl ribonucleotide
  modified_base 81: mod_base = OTHER; note = 2'-O-methyl ribonucleotide
  modified_base 83: mod_base = OTHER; note = 2'-O-methyl ribonucleotide
  modified_base 84: mod_base = OTHER; note = 2'-O-methyl ribonucleotide
  modified_base 85: mod_base = OTHER; note = 2'-O-methyl ribonucleotide
  modified_base 86: mod_base = OTHER; note = 2'-O-methyl ribonucleotide
  modified_base 87: mod_base = OTHER; note = 2'-O-methyl ribonucleotide
  modified_base 88: mod_base = OTHER; note = 2'-O-methyl ribonucleotide
  modified_base 89: mod_base = OTHER; note = 2'-O-methyl ribonucleotide
  modified_base 90: mod_base = OTHER; note = 2'-O-methyl ribonucleotide
  modified_base 91: mod_base = OTHER; note = 2'-O-methyl ribonucleotide
  modified_base 92: mod_base = OTHER; note = 2'-O-methyl ribonucleotide
  modified_base 93: mod_base = OTHER; note = 2'-O-methyl ribonucleotide
  modified_base 94: mod_base = OTHER; note = 2'-O-methyl ribonucleotide
  modified_base 95: mod_base = OTHER; note = 2'-O-methyl ribonucleotide
  modified_base 96: mod_base = OTHER; note = 2'-O-methyl ribonucleotide
  modified_base 97: mod_base = OTHER; note = 2'-O-methyl ribonucleotide
  modified_base 98: mod_base = OTHER; note = 2'-O-methyl ribonucleotide
  modified_base 99: mod_base = OTHER; note = 2'-O-methyl ribonucleotide
  modified_base 100: mod_base = OTHER; note = 2'-O-methyl ribonucleotide
  modified_base 1..4: mod_base = OTHER; note = phosphorothioate linkage
  modified_base 45..46: mod_base = OTHER; note = phosphorothioate linkage
  modified_base 64..65: mod_base = OTHER; note = phosphorothioate linkage
  modified_base 97..100: mod_base = OTHER; note = phosphorothioate linkage

SEQ ID NO: 2498 - RNA, 103 nt, synthetic construct; identical to SEQ ID NO: 1699
  source 1..103: mol_type = other RNA
  modified_base 1: mod_base = OTHER; note = 2'-O-methyl ribonucleotide
  modified_base 2: mod_base = OTHER; note = 2'-O-methyl ribonucleotide
  modified_base 3: mod_base = OTHER; note = 2'-O-methyl ribonucleotide
  modified_base 21: mod_base = OTHER; note = 2'-O-methyl ribonucleotide
  modified_base 28: mod_base = OTHER; note = 2'-O-methyl ribonucleotide
  modified_base 29: mod_base = OTHER; note = 2'-O-methyl ribonucleotide
  modified_base 30: mod_base = OTHER; note = 2'-O-methyl ribonucleotide
  modified_base 31: mod_base = OTHER; note = 2'-O-methyl ribonucleotide
  modified_base 32: mod_base = OTHER; note = 2'-O-methyl ribonucleotide
  modified_base 33: mod_base = OTHER; note = 2'-O-methyl ribonucleotide
  modified_base 34: mod_base = OTHER; note = 2'-O-methyl ribonucleotide
  modified_base 35: mod_base = OTHER; note = 2'-O-methyl ribonucleotide
  modified_base 36: mod_base = OTHER; note = 2'-O-methyl ribonucleotide
  modified_base 37: mod_base = OTHER; note = 2'-O-methyl ribonucleotide
  modified_base 38: mod_base = OTHER; note = 2'-O-methyl ribonucleotide
  modified_base 39: mod_base = OTHER; note = 2'-O-methyl ribonucleotide
  modified_base 40: mod_base = OTHER; note = 2'-O-methyl ribonucleotide
  modified_base 41: mod_base = OTHER; note = 2'-O-methyl ribonucleotide
  modified_base 42: mod_base = OTHER; note = 2'-O-methyl ribonucleotide
  modified_base 46: mod_base = OTHER; note = 2'-O-methyl ribonucleotide
  modified_base 48: mod_base = OTHER; note = 2'-O-methyl ribonucleotide
  modified_base 50: mod_base = OTHER; note = 2'-O-methyl ribonucleotide
  modified_base 52: mod_base = OTHER; note = 2'-O-methyl ribonucleotide
  modified_base 53: mod_base = OTHER; note = 2'-O-methyl ribonucleotide
  modified_base 54: mod_base = OTHER; note = 2'-O-methyl ribonucleotide
  modified_base 55: mod_base = OTHER; note = 2'-O-methyl ribonucleotide
  modified_base 56: mod_base = OTHER; note = 2'-O-methyl ribonucleotide
  modified_base 57: mod_base = OTHER; note = 2'-O-methyl ribonucleotide
  modified_base 60: mod_base = OTHER; note = 2'-O-methyl ribonucleotide
  modified_base 61: mod_base = OTHER; note = 2'-O-methyl ribonucleotide
  modified_base 66: mod_base = OTHER; note = 2'-O-methyl ribonucleotide
  modified_base 67: mod_base = OTHER; note = 2'-O-methyl ribonucleotide
  modified_base 70: mod_base = OTHER; note = 2'-O-methyl ribonucleotide
  modified_base 71: mod_base = OTHER; note = 2'-O-methyl ribonucleotide
  modified_base 72: mod_base = OTHER; note = 2'-O-methyl ribonucleotide
  modified_base 73: mod_base = OTHER; note = 2'-O-methyl ribonucleotide
  modified_base 74: mod_base = OTHER; note = 2'-O-methyl ribonucleotide
  modified_base 75: mod_base = OTHER; note = 2'-O-methyl ribonucleotide
  modified_base 76: mod_base = OTHER; note = 2'-O-methyl ribonucleotide
  modified_base 77: mod_base = OTHER; note = 2'-O-methyl ribonucleotide
  modified_base 78: mod_base = OTHER; note = 2'-O-methyl ribonucleotide
  modified_base 79: mod_base = OTHER; note = 2'-O-methyl ribonucleotide
  modified_base 80: mod_base = OTHER; note = 2'-O-methyl ribonucleotide
  modified_base 81: mod_base = OTHER; note = 2'-O-methyl ribonucleotide
  modified_base 83: mod_base = OTHER; note = 2'-O-methyl ribonucleotide
  modified_base 84: mod_base = OTHER; note = 2'-O-methyl ribonucleotide
  modified_base 85: mod_base = OTHER; note = 2'-O-methyl ribonucleotide
  modified_base 86: mod_base = OTHER; note = 2'-O-methyl ribonucleotide
  modified_base 87: mod_base = OTHER; note = 2'-O-methyl ribonucleotide
  modified_base 88: mod_base = OTHER; note = 2'-O-methyl ribonucleotide
  modified_base 89: mod_base = OTHER; note = 2'-O-methyl ribonucleotide
  modified_base 90: mod_base = OTHER; note = 2'-O-methyl ribonucleotide
  modified_base 91: mod_base = OTHER; note = 2'-O-methyl ribonucleotide
  modified_base 92: mod_base = OTHER; note = 2'-O-methyl ribonucleotide
  modified_base 93: mod_base = OTHER; note = 2'-O-methyl ribonucleotide
  modified_base 94: mod_base = OTHER; note = 2'-O-methyl ribonucleotide
  modified_base 95: mod_base = OTHER; note = 2'-O-methyl ribonucleotide
  modified_base 96: mod_base = OTHER; note = 2'-O-methyl ribonucleotide
  modified_base 97: mod_base = OTHER; note = 2'-O-methyl ribonucleotide
  modified_base 98: mod_base = OTHER; note = 2'-O-methyl ribonucleotide
  modified_base 99: mod_base = OTHER; note = 2'-O-methyl ribonucleotide
  modified_base 100: mod_base = OTHER; note = 2'-O-methyl ribonucleotide
  modified_base 1..4: mod_base = OTHER; note = phosphorothioate linkage
  modified_base 45..46: mod_base = OTHER; note = phosphorothioate linkage
  modified_base 64..65: mod_base = OTHER; note = phosphorothioate linkage
  modified_base 97..100: mod_base = OTHER; note = phosphorothioate linkage

SEQ ID NO: 2499 - RNA, 103 nt, synthetic construct; identical to SEQ ID NO: 1699
  source 1..103: mol_type = other RNA
  modified_base 1: mod_base = OTHER; note = 2'-O-methyl ribonucleotide
  modified_base 2: mod_base = OTHER; note = 2'-O-methyl ribonucleotide
  modified_base 3: mod_base = OTHER; note = 2'-O-methyl ribonucleotide
  modified_base 21: mod_base = OTHER; note = 2'-O-methyl ribonucleotide
  modified_base 28: mod_base = OTHER; note = 2'-O-methyl ribonucleotide
  modified_base 29: mod_base = OTHER; note = 2'-O-methyl ribonucleotide
  modified_base 30: mod_base = OTHER; note = 2'-O-methyl ribonucleotide
  modified_base 31: mod_base = OTHER; note = 2'-O-methyl ribonucleotide
  modified_base 32: mod_base = OTHER; note = 2'-O-methyl ribonucleotide
  modified_base 34: mod_base = OTHER; note = 2'-O-methyl ribonucleotide
  modified_base 35: mod_base = OTHER; note = 2'-O-methyl ribonucleotide
  modified_base 36: mod_base = OTHER; note = 2'-O-methyl ribonucleotide
  modified_base 37: mod_base = OTHER; note = 2'-O-methyl ribonucleotide
  modified_base 38: mod_base = OTHER; note = 2'-O-methyl ribonucleotide
  modified_base 39: mod_base = OTHER; note = 2'-O-methyl ribonucleotide
  modified_base 40: mod_base = OTHER; note = 2'-O-methyl ribonucleotide
  modified_base 41: mod_base = OTHER; note = 2'-O-methyl ribonucleotide
  modified_base 42: mod_base = OTHER; note = 2'-O-methyl ribonucleotide
  modified_base 46: mod_base = OTHER; note = 2'-O-methyl ribonucleotide
  modified_base 48: mod_base = OTHER; note = 2'-O-methyl ribonucleotide
  modified_base 50: mod_base = OTHER; note = 2'-O-methyl ribonucleotide
  modified_base 52: mod_base = OTHER; note = 2'-O-methyl ribonucleotide
  modified_base 53: mod_base = OTHER; note = 2'-O-methyl ribonucleotide
  modified_base 54: mod_base = OTHER; note = 2'-O-methyl ribonucleotide
  modified_base 55: mod_base = OTHER; note = 2'-O-methyl ribonucleotide
  modified_base 56: mod_base = OTHER; note = 2'-O-methyl ribonucleotide
  modified_base 57: mod_base = OTHER; note = 2'-O-methyl ribonucleotide
  modified_base 60: mod_base = OTHER; note = 2'-O-methyl ribonucleotide
  modified_base 61: mod_base = OTHER; note = 2'-O-methyl ribonucleotide
  modified_base 66: mod_base = OTHER; note = 2'-O-methyl ribonucleotide
  modified_base 67: mod_base = OTHER; note = 2'-O-methyl ribonucleotide
  modified_base 70: mod_base = OTHER; note = 2'-O-methyl ribonucleotide
  modified_base 71: mod_base = OTHER; note = 2'-O-methyl ribonucleotide
  modified_base 72: mod_base = OTHER; note = 2'-O-methyl ribonucleotide
  modified_base 74: mod_base = OTHER; note = 2'-O-methyl ribonucleotide
  modified_base 75: mod_base = OTHER; note = 2'-O-methyl ribonucleotide
  modified_base 76: mod_base = OTHER; note = 2'-O-methyl ribonucleotide
  modified_base 77: mod_base = OTHER; note = 2'-O-methyl ribonucleotide
  modified_base 78: mod_base = OTHER; note = 2'-O-methyl ribonucleotide
  modified_base 79: mod_base = OTHER; note = 2'-O-methyl ribonucleotide
  modified_base 80: mod_base = OTHER; note = 2'-O-methyl ribonucleotide
  modified_base 81: mod_base = OTHER; note = 2'-O-methyl ribonucleotide
  modified_base 83: mod_base = OTHER; note = 2'-O-methyl ribonucleotide
  modified_base 84: mod_base = OTHER; note = 2'-O-methyl ribonucleotide
  modified_base 85: mod_base = OTHER; note = 2'-O-methyl ribonucleotide
  modified_base 86: mod_base = OTHER; note = 2'-O-methyl ribonucleotide
  modified_base 87: mod_base = OTHER; note = 2'-O-methyl ribonucleotide
  modified_base 88: mod_base = OTHER; note = 2'-O-methyl ribonucleotide
  modified_base 89: mod_base = OTHER; note = 2'-O-methyl ribonucleotide
  modified_base 90: mod_base = OTHER; note = 2'-O-methyl ribonucleotide
  modified_base 91: mod_base = OTHER; note = 2'-O-methyl ribonucleotide
  modified_base 92: mod_base = OTHER; note = 2'-O-methyl ribonucleotide
  modified_base 93: mod_base = OTHER; note = 2'-O-methyl ribonucleotide
  modified_base 94: mod_base = OTHER; note = 2'-O-methyl ribonucleotide
  modified_base 95: mod_base = OTHER; note = 2'-O-methyl ribonucleotide
  modified_base 96: mod_base = OTHER; note = 2'-O-methyl ribonucleotide
  modified_base 97: mod_base = OTHER; note = 2'-O-methyl ribonucleotide
  modified_base 98: mod_base = OTHER; note = 2'-O-methyl ribonucleotide
  modified_base 99: mod_base = OTHER; note = 2'-O-methyl ribonucleotide
  modified_base 100: mod_base = OTHER; note = 2'-O-methyl ribonucleotide
  modified_base 1..4: mod_base = OTHER; note = phosphorothioate linkage
  modified_base 45..46: mod_base = OTHER; note = phosphorothioate linkage
  modified_base 64..65: mod_base = OTHER; note = phosphorothioate linkage
  modified_base 97..100: mod_base = OTHER; note = phosphorothioate linkage

SEQ ID NO: 2500 - RNA, 103 nt, synthetic construct; identical to SEQ ID NO: 1700
  source 1..103: mol_type = other RNA
  modified_base 1: mod_base = OTHER; note = 2'-O-methyl ribonucleotide
  modified_base 2: mod_base = OTHER; note = 2'-O-methyl ribonucleotide
  modified_base 3: mod_base = OTHER; note = 2'-O-methyl ribonucleotide
  modified_base 21: mod_base = OTHER; note = 2'-O-methyl ribonucleotide
  modified_base 28: mod_base = OTHER; note = 2'-O-methyl ribonucleotide
  modified_base 29: mod_base = OTHER; note = 2'-O-methyl ribonucleotide
  modified_base 30: mod_base = OTHER; note = 2'-O-methyl ribonucleotide
  modified_base 31: mod_base = OTHER; note = 2'-O-methyl ribonucleotide
  modified_base 32: mod_base = OTHER; note = 2'-O-methyl ribonucleotide
  modified_base 33: mod_base = OTHER; note = 2'-O-methyl ribonucleotide
  modified_base 34: mod_base = OTHER; note = 2'-O-methyl ribonucleotide
  modified_base 35: mod_base = OTHER; note = 2'-O-methyl ribonucleotide
  modified_base 36: mod_base = OTHER; note = 2'-O-methyl ribonucleotide
  modified_base 37: mod_base = OTHER; note = 2'-O-methyl ribonucleotide
  modified_base 38: mod_base = OTHER; note = 2'-O-methyl ribonucleotide
  modified_base 39: mod_base = OTHER; note = 2'-O-methyl ribonucleotide
  modified_base 40: mod_base = OTHER; note = 2'-O-methyl ribonucleotide
  modified_base 41: mod_base = OTHER; note = 2'-O-methyl ribonucleotide
  modified_base 42: mod_base = OTHER; note = 2'-O-methyl ribonucleotide
  modified_base 46: mod_base = OTHER; note = 2'-O-methyl ribonucleotide
  modified_base 48: mod_base = OTHER; note = 2'-O-methyl ribonucleotide
  modified_base 50: mod_base = OTHER; note = 2'-O-methyl ribonucleotide
  modified_base 52: mod_base = OTHER; note = 2'-O-methyl ribonucleotide
  modified_base 53: mod_base = OTHER; note = 2'-O-methyl ribonucleotide
  modified_base 54: mod_base = OTHER; note = 2'-O-methyl ribonucleotide
  modified_base 57: mod_base = OTHER; note = 2'-O-methyl ribonucleotide
  modified_base 61: mod_base = OTHER; note = 2'-O-methyl ribonucleotide
  modified_base 66: mod_base = OTHER; note = 2'-O-methyl ribonucleotide
  modified_base 67: mod_base = OTHER; note = 2'-O-methyl ribonucleotide
  modified_base 70: mod_base = OTHER; note = 2'-O-methyl ribonucleotide
  modified_base 71: mod_base = OTHER; note = 2'-O-methyl ribonucleotide
  modified_base 72: mod_base = OTHER; note = 2'-O-methyl ribonucleotide
  modified_base 74: mod_base = OTHER; note = 2'-O-methyl ribonucleotide
  modified_base 75: mod_base = OTHER; note = 2'-O-methyl ribonucleotide
  modified_base 76: mod_base = OTHER; note = 2'-O-methyl ribonucleotide
  modified_base 77: mod_base = OTHER; note = 2'-O-methyl ribonucleotide
  modified_base 78: mod_base = OTHER; note = 2'-O-methyl ribonucleotide
  modified_base 79: mod_base = OTHER; note = 2'-O-methyl ribonucleotide
  modified_base 80: mod_base = OTHER; note = 2'-O-methyl ribonucleotide
  modified_base 82: mod_base = OTHER; note = 2'-O-methyl ribonucleotide
  modified_base 83: mod_base = OTHER; note = 2'-O-methyl ribonucleotide
  modified_base 84: mod_base = OTHER; note = 2'-O-methyl ribonucleotide
  modified_base 85: mod_base = OTHER; note = 2'-O-methyl ribonucleotide
  modified_base 86: mod_base = OTHER; note = 2'-O-methyl ribonucleotide
  modified_base 87: mod_base = OTHER; note = 2'-O-methyl ribonucleotide
  modified_base 89: mod_base = OTHER; note = 2'-O-methyl ribonucleotide
  modified_base 92: mod_base = OTHER; note = 2'-O-methyl ribonucleotide
  modified_base 93: mod_base = OTHER; note = 2'-O-methyl ribonucleotide
  modified_base 94: mod_base = OTHER; note = 2'-O-methyl ribonucleotide
  modified_base 95: mod_base = OTHER; note = 2'-O-methyl ribonucleotide
  modified_base 96: mod_base = OTHER; note = 2'-O-methyl ribonucleotide
  modified_base 97: mod_base = OTHER; note = 2'-O-methyl ribonucleotide
  modified_base 98: mod_base = OTHER; note = 2'-O-methyl ribonucleotide
  modified_base 99: mod_base = OTHER; note = 2'-O-methyl ribonucleotide
  modified_base 100: mod_base = OTHER; note = 2'-O-methyl ribonucleotide
  modified_base 1..4: mod_base = OTHER; note = phosphorothioate linkage
  modified_base 45..46: mod_base = OTHER; note = phosphorothioate linkage
  modified_base 64..65: mod_base = OTHER; note = phosphorothioate linkage
  modified_base 97..100: mod_base = OTHER; note = phosphorothioate linkage

SEQ ID NO: 2501 - RNA, 103 nt, synthetic construct; identical to SEQ ID NO: 1700
  source 1..103: mol_type = other RNA
  modified_base 1: mod_base = OTHER; note = 2'-O-methyl ribonucleotide
  modified_base 2: mod_base = OTHER; note = 2'-O-methyl ribonucleotide
  modified_base 3: mod_base = OTHER; note = 2'-O-methyl ribonucleotide
  modified_base 21: mod_base = OTHER; note = 2'-O-methyl ribonucleotide
  modified_base 28: mod_base = OTHER; note = 2'-O-methyl ribonucleotide
  modified_base 29: mod_base = OTHER; note = 2'-O-methyl ribonucleotide
  modified_base 30: mod_base = OTHER; note = 2'-O-methyl ribonucleotide
  modified_base 31: mod_base = OTHER; note = 2'-O-methyl ribonucleotide
  modified_base 32: mod_base = OTHER; note = 2'-O-methyl ribonucleotide
  modified_base 33: mod_base = OTHER; note = 2'-O-methyl ribonucleotide
  modified_base 34: mod_base = OTHER; note = 2'-O-methyl ribonucleotide
  modified_base 35: mod_base = OTHER; note = 2'-O-methyl ribonucleotide
  modified_base 36: mod_base = OTHER; note = 2'-O-methyl ribonucleotide
  modified_base 37: mod_base = OTHER; note = 2'-O-methyl ribonucleotide
  modified_base 38: mod_base = OTHER; note = 2'-O-methyl ribonucleotide
  modified_base 39: mod_base = OTHER; note = 2'-O-methyl ribonucleotide
  modified_base 40: mod_base = OTHER; note = 2'-O-methyl ribonucleotide
  modified_base 41: mod_base = OTHER; note = 2'-O-methyl ribonucleotide
  modified_base 42: mod_base = OTHER; note = 2'-O-methyl ribonucleotide
  modified_base 46: mod_base = OTHER; note = 2'-O-methyl ribonucleotide
  modified_base 48: mod_base = OTHER; note = 2'-O-methyl ribonucleotide
  modified_base 50: mod_base = OTHER; note = 2'-O-methyl ribonucleotide
  modified_base 52: mod_base = OTHER; note = 2'-O-methyl ribonucleotide
  modified_base 53: mod_base = OTHER; note = 2'-O-methyl ribonucleotide
  modified_base 54: mod_base = OTHER; note = 2'-O-methyl ribonucleotide
  modified_base 55: mod_base = OTHER; note = 2'-O-methyl ribonucleotide
  modified_base 56: mod_base = OTHER; note = 2'-O-methyl ribonucleotide
  modified_base 57: mod_base = OTHER; note = 2'-O-methyl ribonucleotide
  modified_base 60: mod_base = OTHER; note = 2'-O-methyl ribonucleotide
  modified_base 61: mod_base = OTHER; note = 2'-O-methyl ribonucleotide
  modified_base 66: mod_base = OTHER; note = 2'-O-methyl ribonucleotide
  modified_base 67: mod_base = OTHER; note = 2'-O-methyl ribonucleotide
  modified_base 70: mod_base = OTHER; note = 2'-O-methyl ribonucleotide
  modified_base 71: mod_base = OTHER; note = 2'-O-methyl ribonucleotide
  modified_base 72: mod_base = OTHER; note = 2'-O-methyl ribonucleotide
  modified_base 74: mod_base = OTHER; note = 2'-O-methyl ribonucleotide
  modified_base 75: mod_base = OTHER; note = 2'-O-methyl ribonucleotide
  modified_base 76: mod_base = OTHER; note = 2'-O-methyl ribonucleotide
  modified_base 77: mod_base = OTHER; note = 2'-O-methyl ribonucleotide
  modified_base 78: mod_base = OTHER; note = 2'-O-methyl ribonucleotide
  modified_base 79: mod_base = OTHER; note = 2'-O-methyl ribonucleotide
  modified_base 80: mod_base = OTHER; note = 2'-O-methyl ribonucleotide
  modified_base 82: mod_base = OTHER; note = 2'-O-methyl ribonucleotide
  modified_base 83: mod_base = OTHER; note = 2'-O-methyl ribonucleotide
  modified_base 84: mod_base = OTHER; note = 2'-O-methyl ribonucleotide
  modified_base 85: mod_base = OTHER; note = 2'-O-methyl ribonucleotide
  modified_base 86: mod_base = OTHER; note = 2'-O-methyl ribonucleotide
  modified_base 87: mod_base = OTHER; note = 2'-O-methyl ribonucleotide
  modified_base 89: mod_base = OTHER; note = 2'-O-methyl ribonucleotide
  modified_base 92: mod_base = OTHER; note = 2'-O-methyl ribonucleotide
  modified_base 93: mod_base = OTHER; note = 2'-O-methyl ribonucleotide
  modified_base 94: mod_base = OTHER; note = 2'-O-methyl ribonucleotide
  modified_base 95: mod_base = OTHER; note = 2'-O-methyl ribonucleotide
  modified_base 96: mod_base = OTHER; note = 2'-O-methyl ribonucleotide
  modified_base 97: mod_base = OTHER; note = 2'-O-methyl ribonucleotide
  modified_base 98: mod_base = OTHER; note = 2'-O-methyl ribonucleotide
  modified_base 99: mod_base = OTHER; note = 2'-O-methyl ribonucleotide
  modified_base 100: mod_base = OTHER; note = 2'-O-methyl ribonucleotide
  modified_base 1..4: mod_base = OTHER; note = phosphorothioate linkage
  modified_base 45..46: mod_base = OTHER; note = phosphorothioate linkage
  modified_base 64..65: mod_base = OTHER; note = phosphorothioate linkage
  modified_base 97..100: mod_base = OTHER; note = phosphorothioate linkage

SEQ ID NO: 2502 - RNA, 103 nt, synthetic construct; identical to SEQ ID NO: 1700
  source 1..103: mol_type = other RNA
  modified_base 1: mod_base = OTHER; note = 2'-O-methyl ribonucleotide
  modified_base 2: mod_base = OTHER; note = 2'-O-methyl ribonucleotide
  modified_base 3: mod_base = OTHER; note = 2'-O-methyl ribonucleotide
  modified_base 21: mod_base = OTHER; note = 2'-O-methyl ribonucleotide
  modified_base 28: mod_base = OTHER; note = 2'-O-methyl ribonucleotide
  modified_base 29: mod_base = OTHER; note = 2'-O-methyl ribonucleotide
  modified_base 30: mod_base = OTHER; note = 2'-O-methyl ribonucleotide
  modified_base 31: mod_base = OTHER; note = 2'-O-methyl ribonucleotide
  modified_base 32: mod_base = OTHER; note = 2'-O-methyl ribonucleotide
  modified_base 33: mod_base = OTHER; note = 2'-O-methyl ribonucleotide
  modified_base 34: mod_base = OTHER; note = 2'-O-methyl ribonucleotide
  modified_base 35: mod_base = OTHER; note = 2'-O-methyl ribonucleotide
  modified_base 36: mod_base = OTHER; note = 2'-O-methyl ribonucleotide
  modified_base 37: mod_base = OTHER; note = 2'-O-methyl ribonucleotide
  modified_base 38: mod_base = OTHER; note = 2'-O-methyl ribonucleotide
  modified_base 39: mod_base = OTHER; note = 2'-O-methyl ribonucleotide
  modified_base 40: mod_base = OTHER; note = 2'-O-methyl ribonucleotide
  modified_base 41: mod_base = OTHER; note = 2'-O-methyl ribonucleotide
  modified_base 42: mod_base = OTHER; note = 2'-O-methyl ribonucleotide
  modified_base 46: mod_base = OTHER; note = 2'-O-methyl ribonucleotide
  modified_base 48: mod_base = OTHER; note = 2'-O-methyl ribonucleotide
  modified_base 50: mod_base = OTHER; note = 2'-O-methyl ribonucleotide
  modified_base 52: mod_base = OTHER; note = 2'-O-methyl ribonucleotide
  modified_base 53: mod_base = OTHER; note = 2'-O-methyl ribonucleotide
  modified_base 54: mod_base = OTHER; note = 2'-O-methyl ribonucleotide
  modified_base 57: mod_base = OTHER; note = 2'-O-methyl ribonucleotide
  modified_base 61: mod_base = OTHER; note = 2'-O-methyl ribonucleotide
  modified_base 66: mod_base = OTHER; note = 2'-O-methyl ribonucleotide
  modified_base 67: mod_base = OTHER; note = 2'-O-methyl ribonucleotide
  modified_base 70: mod_base = OTHER; note = 2'-O-methyl ribonucleotide
  modified_base 71: mod_base = OTHER; note = 2'-O-methyl ribonucleotide
  modified_base 72: mod_base = OTHER; note = 2'-O-methyl ribonucleotide
  modified_base 73: mod_base = OTHER; note = 2'-O-methyl ribonucleotide
  modified_base 74: mod_base = OTHER; note = 2'-O-methyl ribonucleotide
  modified_base 75: mod_base = OTHER; note = 2'-O-methyl ribonucleotide
  modified_base 76: mod_base = OTHER; note = 2'-O-methyl ribonucleotide
  modified_base 77: mod_base = OTHER; note = 2'-O-methyl ribonucleotide
  modified_base 78: mod_base = OTHER; note = 2'-O-methyl ribonucleotide
  modified_base 79: mod_base = OTHER; note = 2'-O-methyl ribonucleotide
  modified_base 80: mod_base = OTHER; note = 2'-O-methyl ribonucleotide
  modified_base 82: mod_base = OTHER; note = 2'-O-methyl ribonucleotide
  modified_base 83: mod_base = OTHER; note = 2'-O-methyl ribonucleotide
  modified_base 84: mod_base = OTHER; note = 2'-O-methyl ribonucleotide
  modified_base 85: mod_base = OTHER; note = 2'-O-methyl ribonucleotide
  modified_base 86: mod_base = OTHER; note = 2'-O-methyl ribonucleotide
  modified_base 87: mod_base = OTHER; note = 2'-O-methyl ribonucleotide
  modified_base 89: mod_base = OTHER; note = 2'-O-methyl ribonucleotide
  modified_base 92: mod_base = OTHER; note = 2'-O-methyl ribonucleotide
  modified_base 93: mod_base = OTHER; note = 2'-O-methyl ribonucleotide
  modified_base 94: mod_base = OTHER; note = 2'-O-methyl ribonucleotide
  modified_base 95: mod_base = OTHER; note = 2'-O-methyl ribonucleotide
  modified_base 96: mod_base = OTHER; note = 2'-O-methyl ribonucleotide
  modified_base 97: mod_base = OTHER; note = 2'-O-methyl ribonucleotide
  modified_base 98: mod_base = OTHER; note = 2'-O-methyl ribonucleotide
  modified_base 99: mod_base = OTHER; note = 2'-O-methyl ribonucleotide
  modified_base 100: mod_base = OTHER; note = 2'-O-methyl ribonucleotide
  modified_base 1..4: mod_base = OTHER; note = phosphorothioate linkage
  modified_base 45..46: mod_base = OTHER; note = phosphorothioate linkage
  modified_base 64..65: mod_base = OTHER; note = phosphorothioate linkage
  modified_base 97..100: mod_base = OTHER; note = phosphorothioate linkage

SEQ ID NO: 2503 - RNA, 103 nt, synthetic construct; identical to SEQ ID NO: 1700
  source 1..103: mol_type = other RNA
  modified_base 1: mod_base = OTHER; note = 2'-O-methyl ribonucleotide
  modified_base 2: mod_base = OTHER; note = 2'-O-methyl ribonucleotide
  modified_base 3: mod_base = OTHER; note = 2'-O-methyl ribonucleotide
  modified_base 21: mod_base = OTHER; note = 2'-O-methyl ribonucleotide
  modified_base 28: mod_base = OTHER; note = 2'-O-methyl ribonucleotide
  modified_base 29: mod_base = OTHER; note = 2'-O-methyl ribonucleotide
  modified_base 30: mod_base = OTHER; note = 2'-O-methyl ribonucleotide
  modified_base 31: mod_base = OTHER; note = 2'-O-methyl ribonucleotide
  modified_base 32: mod_base = OTHER; note = 2'-O-methyl ribonucleotide
  modified_base 33: mod_base = OTHER; note = 2'-O-methyl ribonucleotide
  modified_base 34: mod_base = OTHER; note = 2'-O-methyl ribonucleotide
  modified_base 35: mod_base = OTHER; note = 2'-O-methyl ribonucleotide
  modified_base 36: mod_base = OTHER; note = 2'-O-methyl ribonucleotide
  modified_base 37: mod_base = OTHER; note = 2'-O-methyl ribonucleotide
  modified_base 38: mod_base = OTHER; note = 2'-O-methyl ribonucleotide
  modified_base 39: mod_base = OTHER; note = 2'-O-methyl ribonucleotide
  modified_base 40: mod_base = OTHER; note = 2'-O-methyl ribonucleotide
  modified_base 41: mod_base = OTHER; note = 2'-O-methyl ribonucleotide
  modified_base 42: mod_base = OTHER; note = 2'-O-methyl ribonucleotide
  modified_base 46: mod_base = OTHER; note = 2'-O-methyl ribonucleotide
  modified_base 48: mod_base = OTHER; note = 2'-O-methyl ribonucleotide
  modified_base 50: mod_base = OTHER; note = 2'-O-methyl ribonucleotide
  modified_base 52: mod_base = OTHER; note = 2'-O-methyl ribonucleotide
  modified_base 53: mod_base = OTHER; note = 2'-O-methyl ribonucleotide
  modified_base 54: mod_base = OTHER; note = 2'-O-methyl ribonucleotide
  modified_base 57: mod_base = OTHER; note = 2'-O-methyl ribonucleotide
  modified_base 61: mod_base = OTHER; note = 2'-O-methyl ribonucleotide
  modified_base 66: mod_base = OTHER; note = 2'-O-methyl ribonucleotide
  modified_base 67: mod_base = OTHER; note = 2'-O-methyl ribonucleotide
  modified_base 70: mod_base = OTHER; note = 2'-O-methyl ribonucleotide
  modified_base 71: mod_base = OTHER; note = 2'-O-methyl ribonucleotide
  modified_base 72: mod_base = OTHER; note = 2'-O-methyl ribonucleotide
  modified_base 73: mod_base = OTHER; note = 2'-O-methyl ribonucleotide
  modified_base 74: mod_base = OTHER; note = 2'-O-methyl ribonucleotide
  modified_base 75: mod_base = OTHER; note = 2'-O-methyl ribonucleotide
  modified_base 76: mod_base = OTHER; note = 2'-O-methyl ribonucleotide
  modified_base 77: mod_base = OTHER; note = 2'-O-methyl ribonucleotide
  modified_base 78: mod_base = OTHER; note = 2'-O-methyl ribonucleotide
  modified_base 79: mod_base = OTHER; note = 2'-O-methyl ribonucleotide
  modified_base 80: mod_base = OTHER; note = 2'-O-methyl ribonucleotide
  modified_base 82: mod_base = OTHER; note = 2'-O-methyl ribonucleotide
  modified_base 83: mod_base = OTHER; note = 2'-O-methyl ribonucleotide
  modified_base 84: mod_base = OTHER; note = 2'-O-methyl ribonucleotide
  modified_base 85: mod_base = OTHER; note = 2'-O-methyl ribonucleotide
  modified_base 86: mod_base = OTHER; note = 2'-O-methyl ribonucleotide
  modified_base 87: mod_base = OTHER; note = 2'-O-methyl ribonucleotide
  modified_base 89: mod_base = OTHER; note = 2'-O-methyl ribonucleotide
  modified_base 91: mod_base = OTHER; note = 2'-O-methyl ribonucleotide
  modified_base 92: mod_base = OTHER; note = 2'-O-methyl ribonucleotide
  modified_base 93: mod_base = OTHER; note = 2'-O-methyl ribonucleotide
  modified_base 94: mod_base = OTHER; note = 2'-O-methyl ribonucleotide
  modified_base 95: mod_base = OTHER; note = 2'-O-methyl ribonucleotide
  modified_base 96: mod_base = OTHER; note = 2'-O-methyl ribonucleotide
  modified_base 97: mod_base = OTHER; note = 2'-O-methyl ribonucleotide
  modified_base 98: mod_base = OTHER; note = 2'-O-methyl ribonucleotide
  modified_base 99: mod_base = OTHER; note = 2'-O-methyl ribonucleotide
  modified_base 100: mod_base = OTHER; note = 2'-O-methyl ribonucleotide
  modified_base 1..4: mod_base = OTHER; note = phosphorothioate linkage
  modified_base 45..46: mod_base = OTHER; note = phosphorothioate linkage
  modified_base 64..65: mod_base = OTHER; note = phosphorothioate linkage
  modified_base 97..100: mod_base = OTHER; note = phosphorothioate linkage

SEQ ID NO: 2504 - RNA, 103 nt, synthetic construct; identical to SEQ ID NO: 1700
  source 1..103: mol_type = other RNA
  modified_base 1: mod_base = OTHER; note = 2'-O-methyl ribonucleotide
  modified_base 2: mod_base = OTHER; note = 2'-O-methyl ribonucleotide
  modified_base 3: mod_base = OTHER; note = 2'-O-methyl ribonucleotide
  modified_base 21: mod_base = OTHER; note = 2'-O-methyl ribonucleotide
  modified_base 28: mod_base = OTHER; note = 2'-O-methyl ribonucleotide
  modified_base 29: mod_base = OTHER; note = 2'-O-methyl ribonucleotide
  modified_base 30: mod_base = OTHER; note = 2'-O-methyl ribonucleotide
  modified_base 31: mod_base = OTHER; note = 2'-O-methyl ribonucleotide
  modified_base 32: mod_base = OTHER; note = 2'-O-methyl ribonucleotide
  modified_base 34: mod_base = OTHER; note = 2'-O-methyl ribonucleotide
  modified_base 35: mod_base = OTHER; note = 2'-O-methyl ribonucleotide
  modified_base 36: mod_base = OTHER; note = 2'-O-methyl ribonucleotide
  modified_base 37: mod_base = OTHER; note = 2'-O-methyl ribonucleotide
  modified_base 38: mod_base = OTHER; note = 2'-O-methyl ribonucleotide
  modified_base 39: mod_base = OTHER; note = 2'-O-methyl ribonucleotide
  modified_base 40: mod_base = OTHER; note = 2'-O-methyl ribonucleotide
  modified_base 41: mod_base = OTHER; note = 2'-O-methyl ribonucleotide
  modified_base 42: mod_base = OTHER; note = 2'-O-methyl ribonucleotide
  modified_base 46: mod_base = OTHER; note = 2'-O-methyl ribonucleotide
  modified_base 48: mod_base = OTHER; note = 2'-O-methyl ribonucleotide
  modified_base 50: mod_base = OTHER; note = 2'-O-methyl ribonucleotide
  modified_base 52: mod_base = OTHER; note = 2'-O-methyl ribonucleotide
  modified_base 53: mod_base = OTHER; note = 2'-O-methyl ribonucleotide
  modified_base 54: mod_base = OTHER; note = 2'-O-methyl ribonucleotide
  modified_base 57: mod_base = OTHER; note = 2'-O-methyl ribonucleotide
  modified_base 61: mod_base = OTHER; note = 2'-O-methyl ribonucleotide
  modified_base 66: mod_base = OTHER; note = 2'-O-methyl ribonucleotide
  modified_base 67: mod_base = OTHER; note = 2'-O-methyl ribonucleotide
  modified_base 70: mod_base = OTHER; note = 2'-O-methyl ribonucleotide
  modified_base 71: mod_base = OTHER; note = 2'-O-methyl ribonucleotide
  modified_base 72: mod_base = OTHER; note = 2'-O-methyl ribonucleotide
  modified_base 73: mod_base = OTHER; note = 2'-O-methyl ribonucleotide
  modified_base 74: mod_base = OTHER; note = 2'-O-methyl ribonucleotide
  modified_base 75: mod_base = OTHER; note = 2'-O-methyl ribonucleotide
  modified_base 76: mod_base = OTHER; note = 2'-O-methyl ribonucleotide
  modified_base 77: mod_base = OTHER; note = 2'-O-methyl ribonucleotide
  modified_base 78: mod_base = OTHER; note = 2'-O-methyl ribonucleotide
  modified_base 79: mod_base = OTHER; note = 2'-O-methyl ribonucleotide
  modified_base 80: mod_base = OTHER; note = 2'-O-methyl ribonucleotide
  modified_base 82: mod_base = OTHER; note = 2'-O-methyl ribonucleotide
  modified_base 83: mod_base = OTHER; note = 2'-O-methyl ribonucleotide
  modified_base 84: mod_base = OTHER; note = 2'-O-methyl ribonucleotide
  modified_base 85: mod_base = OTHER; note = 2'-O-methyl ribonucleotide
  modified_base 86: mod_base = OTHER; note = 2'-O-methyl ribonucleotide
  modified_base 87: mod_base = OTHER; note = 2'-O-methyl ribonucleotide
  modified_base 89: mod_base = OTHER; note = 2'-O-methyl ribonucleotide
  modified_base 92: mod_base = OTHER; note = 2'-O-methyl ribonucleotide
  modified_base 93: mod_base = OTHER; note = 2'-O-methyl ribonucleotide
  modified_base 94: mod_base = OTHER; note = 2'-O-methyl ribonucleotide
  modified_base 95: mod_base = OTHER; note = 2'-O-methyl ribonucleotide
  modified_base 96: mod_base = OTHER; note = 2'-O-methyl ribonucleotide
  modified_base 97: mod_base = OTHER; note = 2'-O-methyl ribonucleotide
  modified_base 98: mod_base = OTHER; note = 2'-O-methyl ribonucleotide
  modified_base 99: mod_base = OTHER; note = 2'-O-methyl ribonucleotide
  modified_base 100: mod_base = OTHER; note = 2'-O-methyl ribonucleotide
  modified_base 1..4: mod_base = OTHER; note = phosphorothioate linkage
  modified_base 45..46: mod_base = OTHER; note = phosphorothioate linkage
  modified_base 64..65: mod_base = OTHER; note = phosphorothioate linkage
  modified_base 97..100: mod_base = OTHER; note = phosphorothioate linkage

SEQ ID NO: 2505 - RNA, 103 nt, synthetic construct; identical to SEQ ID NO: 1700
  source 1..103: mol_type = other RNA
  modified_base 1: mod_base = OTHER; note = 2'-O-methyl ribonucleotide
  modified_base 2: mod_base = OTHER; note = 2'-O-methyl ribonucleotide
  modified_base 3: mod_base = OTHER; note = 2'-O-methyl ribonucleotide
  modified_base 21: mod_base = OTHER; note = 2'-O-methyl ribonucleotide
  modified_base 28: mod_base = OTHER; note = 2'-O-methyl ribonucleotide
  modified_base 29: mod_base = OTHER; note = 2'-O-methyl ribonucleotide
  modified_base 30: mod_base = OTHER; note = 2'-O-methyl ribonucleotide
  modified_base 31: mod_base = OTHER; note = 2'-O-methyl ribonucleotide
  modified_base 32: mod_base = OTHER; note = 2'-O-methyl ribonucleotide
  modified_base 34: mod_base = OTHER; note = 2'-O-methyl ribonucleotide
  modified_base 35: mod_base = OTHER; note = 2'-O-methyl ribonucleotide
  modified_base 36: mod_base = OTHER; note = 2'-O-methyl ribonucleotide
  modified_base 37: mod_base = OTHER; note = 2'-O-methyl ribonucleotide
  modified_base 38: mod_base = OTHER; note = 2'-O-methyl ribonucleotide
  modified_base 39: mod_base = OTHER; note = 2'-O-methyl ribonucleotide
  modified_base 40: mod_base = OTHER; note = 2'-O-methyl ribonucleotide
  modified_base 41: mod_base = OTHER; note = 2'-O-methyl ribonucleotide
  modified_base 42: mod_base = OTHER; note = 2'-O-methyl ribonucleotide
  modified_base 46: mod_base = OTHER; note = 2'-O-methyl ribonucleotide
  modified_base 48: mod_base = OTHER; note = 2'-O-methyl ribonucleotide
  modified_base 50: mod_base = OTHER; note = 2'-O-methyl ribonucleotide
  modified_base 52: mod_base = OTHER; note = 2'-O-methyl ribonucleotide
  modified_base 53: mod_base = OTHER; note = 2'-O-methyl ribonucleotide
  modified_base 54: mod_base = OTHER; note = 2'-O-methyl ribonucleotide
  modified_base 57: mod_base = OTHER; note = 2'-O-methyl ribonucleotide
  modified_base 61: mod_base = OTHER; note = 2'-O-methyl ribonucleotide
  modified_base 66: mod_base = OTHER; note = 2'-O-methyl ribonucleotide
  modified_base 67: mod_base = OTHER; note = 2'-O-methyl ribonucleotide
  modified_base 70: mod_base = OTHER; note = 2'-O-methyl ribonucleotide
  modified_base 71: mod_base = OTHER; note = 2'-O-methyl ribonucleotide
  modified_base 72: mod_base = OTHER; note = 2'-O-methyl ribonucleotide
  modified_base 73: mod_base = OTHER; note = 2'-O-methyl ribonucleotide
  modified_base 74: mod_base = OTHER; note = 2'-O-methyl ribonucleotide
  modified_base 75: mod_base = OTHER; note = 2'-O-methyl ribonucleotide
  modified_base 76: mod_base = OTHER; note = 2'-O-methyl ribonucleotide
  modified_base 77: mod_base = OTHER; note = 2'-O-methyl ribonucleotide
  modified_base 78: mod_base = OTHER; note = 2'-O-methyl ribonucleotide
  modified_base 79: mod_base = OTHER; note = 2'-O-methyl ribonucleotide
  modified_base 80: mod_base = OTHER; note = 2'-O-methyl ribonucleotide
  modified_base 82: mod_base = OTHER; note = 2'-O-methyl ribonucleotide
  modified_base 83: mod_base = OTHER; note = 2'-O-methyl ribonucleotide
  modified_base 84: mod_base = OTHER; note = 2'-O-methyl ribonucleotide
  modified_base 85: mod_base = OTHER; note = 2'-O-methyl ribonucleotide
  modified_base 86: mod_base = OTHER; note = 2'-O-methyl ribonucleotide
  modified_base 87: mod_base = OTHER; note = 2'-O-methyl ribonucleotide
  modified_base 89: mod_base = OTHER; note = 2'-O-methyl ribonucleotide
  modified_base 91: mod_base = OTHER; note = 2'-O-methyl ribonucleotide
  modified_base 92: mod_base = OTHER; note = 2'-O-methyl ribonucleotide
  modified_base 93: mod_base = OTHER; note = 2'-O-methyl ribonucleotide
  modified_base 94: mod_base = OTHER; note = 2'-O-methyl ribonucleotide
  modified_base 95: mod_base = OTHER; note = 2'-O-methyl ribonucleotide
  modified_base 96: mod_base = OTHER; note = 2'-O-methyl ribonucleotide
  modified_base 97: mod_base = OTHER; note = 2'-O-methyl ribonucleotide
  modified_base 98: mod_base = OTHER; note = 2'-O-methyl ribonucleotide
  modified_base 99: mod_base = OTHER; note = 2'-O-methyl ribonucleotide
  modified_base 100: mod_base = OTHER; note = 2'-O-methyl ribonucleotide
  modified_base 1..4: mod_base = OTHER; note = phosphorothioate linkage
  modified_base 45..46: mod_base = OTHER; note = phosphorothioate linkage
  modified_base 64..65: mod_base = OTHER; note = phosphorothioate linkage
  modified_base 97..100: mod_base = OTHER; note = phosphorothioate linkage

SEQ ID NO: 2506 - RNA, 103 nt, synthetic construct; identical to SEQ ID NO: 1700
  source 1..103: mol_type = other RNA
  modified_base 1: mod_base = OTHER; note = 2'-O-methyl ribonucleotide
  modified_base 2: mod_base = OTHER; note = 2'-O-methyl ribonucleotide
  modified_base 3: mod_base = OTHER; note = 2'-O-methyl ribonucleotide
  modified_base 21: mod_base = OTHER; note = 2'-O-methyl ribonucleotide
  modified_base 28: mod_base = OTHER; note = 2'-O-methyl ribonucleotide
  modified_base 29: mod_base = OTHER; note = 2'-O-methyl ribonucleotide
  modified_base 30: mod_base = OTHER; note = 2'-O-methyl ribonucleotide
  modified_base 31: mod_base = OTHER; note = 2'-O-methyl ribonucleotide
  modified_base 32: mod_base = OTHER; note = 2'-O-methyl ribonucleotide
  modified_base 34: mod_base = OTHER; note = 2'-O-methyl ribonucleotide
  modified_base 35: mod_base = OTHER; note = 2'-O-methyl ribonucleotide
  modified_base 36: mod_base = OTHER; note = 2'-O-methyl ribonucleotide
  modified_base 37: mod_base = OTHER; note = 2'-O-methyl ribonucleotide
  modified_base 38: mod_base = OTHER; note = 2'-O-methyl ribonucleotide
  modified_base 39: mod_base = OTHER; note = 2'-O-methyl ribonucleotide
  modified_base 40: mod_base = OTHER; note = 2'-O-methyl ribonucleotide
  modified_base 41: mod_base = OTHER; note = 2'-O-methyl ribonucleotide
  modified_base 42: mod_base = OTHER; note = 2'-O-methyl ribonucleotide
  modified_base 46: mod_base = OTHER; note = 2'-O-methyl ribonucleotide
  modified_base 48: mod_base = OTHER; note = 2'-O-methyl ribonucleotide
  modified_base 50: mod_base = OTHER; note = 2'-O-methyl ribonucleotide
  modified_base 52: mod_base = OTHER; note = 2'-O-methyl ribonucleotide
  modified_base 53: mod_base = OTHER; note = 2'-O-methyl ribonucleotide
  modified_base 54: mod_base = OTHER; note = 2'-O-methyl ribonucleotide
  modified_base 55: mod_base = OTHER; note = 2'-O-methyl ribonucleotide
  modified_base 56: mod_base = OTHER; note = 2'-O-methyl ribonucleotide
  modified_base 57: mod_base = OTHER; note = 2'-O-methyl ribonucleotide
  modified_base 60: mod_base = OTHER; note = 2'-O-methyl ribonucleotide
  modified_base 61: mod_base = OTHER; note = 2'-O-methyl ribonucleotide
  modified_base 66: mod_base = OTHER; note = 2'-O-methyl ribonucleotide
  modified_base 67: mod_base = OTHER; note = 2'-O-methyl ribonucleotide
  modified_base 70: mod_base = OTHER; note = 2'-O-methyl ribonucleotide
  modified_base 71: mod_base = OTHER; note = 2'-O-methyl ribonucleotide
  modified_base 72: mod_base = OTHER; note = 2'-O-methyl ribonucleotide
  modified_base 74: mod_base = OTHER; note = 2'-O-methyl ribonucleotide
  modified_base 75: mod_base = OTHER; note = 2'-O-methyl ribonucleotide
  modified_base 76: mod_base = OTHER; note = 2'-O-methyl ribonucleotide
  modified_base 77: mod_base = OTHER; note = 2'-O-methyl ribonucleotide
  modified_base 78: mod_base = OTHER; note = 2'-O-methyl ribonucleotide
  modified_base 79: mod_base = OTHER; note = 2'-O-methyl ribonucleotide
  modified_base 80: mod_base = OTHER; note = 2'-O-methyl ribonucleotide
  modified_base 82: mod_base = OTHER; note = 2'-O-methyl ribonucleotide
  modified_base 83: mod_base = OTHER; note = 2'-O-methyl ribonucleotide
  modified_base 84: mod_base = OTHER; note = 2'-O-methyl ribonucleotide
  modified_base 85: mod_base = OTHER; note = 2'-O-methyl ribonucleotide
  modified_base 86: mod_base = OTHER; note = 2'-O-methyl ribonucleotide
  modified_base 87: mod_base = OTHER; note = 2'-O-methyl ribonucleotide
  modified_base 89: mod_base = OTHER; note = 2'-O-methyl ribonucleotide
  modified_base 92: mod_base = OTHER; note = 2'-O-methyl ribonucleotide
  modified_base 93: mod_base = OTHER; note = 2'-O-methyl ribonucleotide
  modified_base 94: mod_base = OTHER; note = 2'-O-methyl ribonucleotide
  modified_base 95: mod_base = OTHER; note = 2'-O-methyl ribonucleotide
  modified_base 96: mod_base = OTHER; note = 2'-O-methyl ribonucleotide
  modified_base 97: mod_base = OTHER; note = 2'-O-methyl ribonucleotide
  modified_base 98: mod_base = OTHER; note = 2'-O-methyl ribonucleotide
  modified_base 99: mod_base = OTHER; note = 2'-O-methyl ribonucleotide
  modified_base 100: mod_base = OTHER; note = 2'-O-methyl ribonucleotide
  modified_base 1..4: mod_base = OTHER; note = phosphorothioate linkage
  modified_base 45..46: mod_base = OTHER; note = phosphorothioate linkage
  modified_base 64..65: mod_base = OTHER; note = phosphorothioate linkage
  modified_base 97..100: mod_base = OTHER; note = phosphorothioate linkage

SEQ ID NO: 2507 - RNA, 103 nt, synthetic construct; identical to SEQ ID NO: 1643
  source 1..103: mol_type = other RNA
  modified_base 1: mod_base = OTHER; note = 2'-O-methyl ribonucleotide
  modified_base 2: mod_base = OTHER; note = 2'-O-methyl ribonucleotide
  modified_base 3: mod_base = OTHER; note = 2'-O-methyl ribonucleotide
  modified_base 21: mod_base = OTHER; note = 2'-O-methyl ribonucleotide
  modified_base 28: mod_base = OTHER; note = 2'-O-methyl ribonucleotide
  modified_base 29: mod_base = OTHER; note = 2'-O-methyl ribonucleotide
  modified_base 30: mod_base = OTHER; note = 2'-O-methyl ribonucleotide
  modified_base 31: mod_base = OTHER; note = 2'-O-methyl ribonucleotide
  modified_base 32: mod_base = OTHER; note = 2'-O-methyl ribonucleotide
  modified_base 33: mod_base = OTHER; note = 2'-O-methyl ribonucleotide
  modified_base 34: mod_base = OTHER; note = 2'-O-methyl ribonucleotide
  modified_base 35: mod_base = OTHER; note = 2'-O-methyl ribonucleotide
  modified_base 36: mod_base = OTHER; note = 2'-O-methyl ribonucleotide
  modified_base 37: mod_base = OTHER; note = 2'-O-methyl ribonucleotide
  modified_base 38: mod_base = OTHER; note = 2'-O-methyl ribonucleotide
  modified_base 39: mod_base = OTHER; note = 2'-O-methyl ribonucleotide
  modified_base 40: mod_base = OTHER; note = 2'-O-methyl ribonucleotide
  modified_base 41: mod_base = OTHER; note = 2'-O-methyl ribonucleotide
  modified_base 42: mod_base = OTHER; note = 2'-O-methyl ribonucleotide
  modified_base 46: mod_base = OTHER; note = 2'-O-methyl ribonucleotide
  modified_base 48: mod_base = OTHER; note = 2'-O-methyl ribonucleotide
  modified_base 50: mod_base = OTHER; note = 2'-O-methyl ribonucleotide
  modified_base 52: mod_base = OTHER; note = 2'-O-methyl ribonucleotide
  modified_base 53: mod_base = OTHER; note = 2'-O-methyl ribonucleotide
  modified_base 54: mod_base = OTHER; note = 2'-O-methyl ribonucleotide
  modified_base 55: mod_base = OTHER; note = 2'-O-methyl ribonucleotide
  modified_base 56: mod_base = OTHER; note = 2'-O-methyl ribonucleotide
  modified_base 57: mod_base = OTHER; note = 2'-O-methyl ribonucleotide
  modified_base 60: mod_base = OTHER; note = 2'-O-methyl ribonucleotide
  modified_base 61: mod_base = OTHER; note = 2'-O-methyl ribonucleotide
  modified_base 66: mod_base = OTHER; note = 2'-O-methyl ribonucleotide
  modified_base 67: mod_base = OTHER; note = 2'-O-methyl ribonucleotide
  modified_base 70: mod_base = OTHER; note = 2'-O-methyl ribonucleotide
  modified_base 71: mod_base = OTHER; note = 2'-O-methyl ribonucleotide
  modified_base 72: mod_base = OTHER; note = 2'-O-methyl ribonucleotide
  modified_base 73: mod_base = OTHER; note = 2'-O-methyl ribonucleotide
  modified_base 74: mod_base = OTHER; note = 2'-O-methyl ribonucleotide
  modified_base 75: mod_base = OTHER; note = 2'-O-methyl ribonucleotide
  modified_base 76: mod_base = OTHER; note = 2'-O-methyl ribonucleotide
  modified_base 77: mod_base = OTHER; note = 2'-O-methyl ribonucleotide
  modified_base 78: mod_base = OTHER; note = 2'-O-methyl ribonucleotide
  modified_base 79: mod_base = OTHER; note = 2'-O-methyl ribonucleotide
  modified_base 80: mod_base = OTHER; note = 2'-O-methyl ribonucleotide
  modified_base 81: mod_base = OTHER; note = 2'-O-methyl ribonucleotide
  modified_base 83: mod_base = OTHER; note = 2'-O-methyl ribonucleotide
  modified_base 84: mod_base = OTHER; note = 2'-O-methyl ribonucleotide
  modified_base 85: mod_base = OTHER; note = 2'-O-methyl ribonucleotide
  modified_base 86: mod_base = OTHER; note = 2'-O-methyl ribonucleotide
  modified_base 87: mod_base = OTHER; note = 2'-O-methyl ribonucleotide
  modified_base 88: mod_base = OTHER; note = 2'-O-methyl ribonucleotide
  modified_base 89: mod_base = OTHER; note = 2'-O-methyl ribonucleotide
  modified_base 90: mod_base = OTHER; note = 2'-O-methyl ribonucleotide
  modified_base 91: mod_base = OTHER; note = 2'-O-methyl ribonucleotide
  modified_base 92: mod_base = OTHER; note = 2'-O-methyl ribonucleotide
  modified_base 93: mod_base = OTHER; note = 2'-O-methyl ribonucleotide
  modified_base 94: mod_base = OTHER; note = 2'-O-methyl ribonucleotide
  modified_base 95: mod_base = OTHER; note = 2'-O-methyl ribonucleotide
  modified_base 96: mod_base = OTHER; note = 2'-O-methyl ribonucleotide
  modified_base 97: mod_base = OTHER; note = 2'-O-methyl ribonucleotide
  modified_base 98: mod_base = OTHER; note = 2'-O-methyl ribonucleotide
  modified_base 99: mod_base = OTHER; note = 2'-O-methyl ribonucleotide
  modified_base 100: mod_base = OTHER; note = 2'-O-methyl ribonucleotide
  modified_base 1..4: mod_base = OTHER; note = phosphorothioate linkage
  modified_base 25..26: mod_base = OTHER; note = phosphorothioate linkage
  modified_base 45..46: mod_base = OTHER; note = phosphorothioate linkage
  modified_base 97..100: mod_base = OTHER; note = phosphorothioate linkage

SEQ ID NO: 2508 - RNA, 103 nt, synthetic construct; identical to SEQ ID NO: 1643
  source 1..103: mol_type = other RNA
  modified_base 1: mod_base = OTHER; note = 2'-O-methyl ribonucleotide
  modified_base 2: mod_base = OTHER; note = 2'-O-methyl ribonucleotide
  modified_base 3: mod_base = OTHER; note = 2'-O-methyl ribonucleotide
  modified_base 21: mod_base = OTHER; note = 2'-O-methyl ribonucleotide
  modified_base 28: mod_base = OTHER; note = 2'-O-methyl ribonucleotide
  modified_base 29: mod_base = OTHER; note = 2'-O-methyl ribonucleotide
  modified_base 30: mod_base = OTHER; note = 2'-O-methyl ribonucleotide
  modified_base 31: mod_base = OTHER; note = 2'-O-methyl ribonucleotide
  modified_base 32: mod_base = OTHER; note = 2'-O-methyl ribonucleotide
  modified_base 34: mod_base = OTHER; note = 2'-O-methyl ribonucleotide
  modified_base 35: mod_base = OTHER; note = 2'-O-methyl ribonucleotide
  modified_base 36: mod_base = OTHER; note = 2'-O-methyl ribonucleotide
  modified_base 37: mod_base = OTHER; note = 2'-O-methyl ribonucleotide
  modified_base 38: mod_base = OTHER; note = 2'-O-methyl ribonucleotide
  modified_base 39: mod_base = OTHER; note = 2'-O-methyl ribonucleotide
  modified_base 40: mod_base = OTHER; note = 2'-O-methyl ribonucleotide
  modified_base 41: mod_base = OTHER; note = 2'-O-methyl ribonucleotide
  modified_base 42: mod_base = OTHER; note = 2'-O-methyl ribonucleotide
  modified_base 46: mod_base = OTHER; note = 2'-O-methyl ribonucleotide
  modified_base 48: mod_base = OTHER; note = 2'-O-methyl ribonucleotide
  modified_base 50: mod_base = OTHER; note = 2'-O-methyl ribonucleotide
  modified_base 52: mod_base = OTHER; note = 2'-O-methyl ribonucleotide
  modified_base 53: mod_base = OTHER; note = 2'-O-methyl ribonucleotide
  modified_base 54: mod_base = OTHER; note = 2'-O-methyl ribonucleotide
  modified_base 55: mod_base = OTHER; note = 2'-O-methyl ribonucleotide
  modified_base 56: mod_base = OTHER; note = 2'-O-methyl ribonucleotide
  modified_base 57: mod_base = OTHER; note = 2'-O-methyl ribonucleotide
  modified_base 60: mod_base = OTHER; note = 2'-O-methyl ribonucleotide
  modified_base 61: mod_base = OTHER; note = 2'-O-methyl ribonucleotide
  modified_base 66: mod_base = OTHER; note = 2'-O-methyl ribonucleotide
  modified_base 67: mod_base = OTHER; note = 2'-O-methyl ribonucleotide
  modified_base 70: mod_base = OTHER; note = 2'-O-methyl ribonucleotide
  modified_base 71: mod_base = OTHER; note = 2'-O-methyl ribonucleotide
  modified_base 72: mod_base = OTHER; note = 2'-O-methyl ribonucleotide
  modified_base 74: mod_base = OTHER; note = 2'-O-methyl ribonucleotide
  modified_base 75: mod_base = OTHER; note = 2'-O-methyl ribonucleotide
  modified_base 76: mod_base = OTHER; note = 2'-O-methyl ribonucleotide
  modified_base 77: mod_base = OTHER; note = 2'-O-methyl ribonucleotide
  modified_base 78: mod_base = OTHER; note = 2'-O-methyl ribonucleotide
  modified_base 79: mod_base = OTHER; note = 2'-O-methyl ribonucleotide
  modified_base 80: mod_base = OTHER; note = 2'-O-methyl ribonucleotide
  modified_base 81: mod_base = OTHER; note = 2'-O-methyl ribonucleotide
  modified_base 83: mod_base = OTHER; note = 2'-O-methyl ribonucleotide
  modified_base 84: mod_base = OTHER; note = 2'-O-methyl ribonucleotide
  modified_base 85: mod_base = OTHER; note = 2'-O-methyl ribonucleotide
  modified_base 86: mod_base = OTHER; note = 2'-O-methyl ribonucleotide
  modified_base 87: mod_base = OTHER; note = 2'-O-methyl ribonucleotide
  modified_base 88: mod_base = OTHER; note = 2'-O-methyl ribonucleotide
  modified_base 89: mod_base = OTHER; note = 2'-O-methyl ribonucleotide
  modified_base 90: mod_base = OTHER; note = 2'-O-methyl ribonucleotide
  modified_base 91: mod_base = OTHER; note = 2'-O-methyl ribonucleotide
  modified_base 92: mod_base = OTHER; note = 2'-O-methyl ribonucleotide
  modified_base 93: mod_base = OTHER; note = 2'-O-methyl ribonucleotide
  modified_base 94: mod_base = OTHER; note = 2'-O-methyl ribonucleotide
  modified_base 95: mod_base = OTHER; note = 2'-O-methyl ribonucleotide
  modified_base 96: mod_base = OTHER; note = 2'-O-methyl ribonucleotide
  modified_base 97: mod_base = OTHER; note = 2'-O-methyl ribonucleotide
  modified_base 98: mod_base = OTHER; note = 2'-O-methyl ribonucleotide
  modified_base 99: mod_base = OTHER; note = 2'-O-methyl ribonucleotide
  modified_base 100: mod_base = OTHER; note = 2'-O-methyl ribonucleotide
  modified_base 1..4: mod_base = OTHER; note = phosphorothioate linkage
  modified_base 25..26: mod_base = OTHER; note = phosphorothioate linkage
  modified_base 45..46: mod_base = OTHER; note = phosphorothioate linkage
  modified_base 97..100: mod_base = OTHER; note = phosphorothioate linkage

SEQ ID NO: 2509 - RNA, 103 nt, synthetic construct; identical to SEQ ID NO: 1699
  source 1..103: mol_type = other RNA
  modified_base 1: mod_base = OTHER; note = 2'-O-methyl ribonucleotide
  modified_base 2: mod_base = OTHER; note = 2'-O-methyl ribonucleotide
  modified_base 3: mod_base = OTHER; note = 2'-O-methyl ribonucleotide
  modified_base 21: mod_base = OTHER; note = 2'-O-methyl ribonucleotide
  modified_base 28: mod_base = OTHER; note = 2'-O-methyl ribonucleotide
  modified_base 29: mod_base = OTHER; note = 2'-O-methyl ribonucleotide
  modified_base 30: mod_base = OTHER; note = 2'-O-methyl ribonucleotide
  modified_base 31: mod_base = OTHER; note = 2'-O-methyl ribonucleotide
  modified_base 32: mod_base = OTHER; note = 2'-O-methyl ribonucleotide
  modified_base 33: mod_base = OTHER; note = 2'-O-methyl ribonucleotide
  modified_base 34: mod_base = OTHER; note = 2'-O-methyl ribonucleotide
  modified_base 35: mod_base = OTHER; note = 2'-O-methyl ribonucleotide
  modified_base 36: mod_base = OTHER; note = 2'-O-methyl ribonucleotide
  modified_base 37: mod_base = OTHER; note = 2'-O-methyl ribonucleotide
  modified_base 38: mod_base = OTHER; note = 2'-O-methyl ribonucleotide
  modified_base 39: mod_base = OTHER; note = 2'-O-methyl ribonucleotide
  modified_base 40: mod_base = OTHER; note = 2'-O-methyl ribonucleotide
  modified_base 41: mod_base = OTHER; note = 2'-O-methyl ribonucleotide
  modified_base 42: mod_base = OTHER; note = 2'-O-methyl ribonucleotide
  modified_base 46: mod_base = OTHER; note = 2'-O-methyl ribonucleotide
  modified_base 48: mod_base = OTHER; note = 2'-O-methyl ribonucleotide
  modified_base 50: mod_base = OTHER; note = 2'-O-methyl ribonucleotide
  modified_base 52: mod_base = OTHER; note = 2'-O-methyl ribonucleotide
  modified_base 53: mod_base = OTHER; note = 2'-O-methyl ribonucleotide
  modified_base 54: mod_base = OTHER; note = 2'-O-methyl ribonucleotide
  modified_base 55: mod_base = OTHER; note = 2'-O-methyl ribonucleotide
  modified_base 56: mod_base = OTHER; note = 2'-O-methyl ribonucleotide
  modified_base 57: mod_base = OTHER; note = 2'-O-methyl ribonucleotide
  modified_base 60: mod_base = OTHER; note = 2'-O-methyl ribonucleotide
  modified_base 61: mod_base = OTHER; note = 2'-O-methyl ribonucleotide
  modified_base 66: mod_base = OTHER; note = 2'-O-methyl ribonucleotide
  modified_base 67: mod_base = OTHER; note = 2'-O-methyl ribonucleotide
  modified_base 70: mod_base = OTHER; note = 2'-O-methyl ribonucleotide
  modified_base 71: mod_base = OTHER; note = 2'-O-methyl ribonucleotide
  modified_base 72: mod_base = OTHER; note = 2'-O-methyl ribonucleotide
  modified_base 73: mod_base = OTHER; note = 2'-O-methyl ribonucleotide
  modified_base 74: mod_base = OTHER; note = 2'-O-methyl ribonucleotide
  modified_base 75: mod_base = OTHER; note = 2'-O-methyl ribonucleotide
  modified_base 76: mod_base = OTHER; note = 2'-O-methyl ribonucleotide
  modified_base 77: mod_base = OTHER; note = 2'-O-methyl ribonucleotide
  modified_base 78: mod_base = OTHER; note = 2'-O-methyl ribonucleotide
  modified_base 79: mod_base = OTHER; note = 2'-O-methyl ribonucleotide
  modified_base 80: mod_base = OTHER; note = 2'-O-methyl ribonucleotide
  modified_base 81: mod_base = OTHER; note = 2'-O-methyl ribonucleotide
  modified_base 83: mod_base = OTHER; note = 2'-O-methyl ribonucleotide
  modified_base 84: mod_base = OTHER; note = 2'-O-methyl ribonucleotide
  modified_base 85: mod_base = OTHER; note = 2'-O-methyl ribonucleotide
  modified_base 86: mod_base = OTHER; note = 2'-O-methyl ribonucleotide
  modified_base 87: mod_base = OTHER; note = 2'-O-methyl ribonucleotide
  modified_base 88: mod_base = OTHER; note = 2'-O-methyl ribonucleotide
  modified_base 89: mod_base = OTHER; note = 2'-O-methyl ribonucleotide
  modified_base 90: mod_base = OTHER; note = 2'-O-methyl ribonucleotide
  modified_base 91: mod_base = OTHER; note = 2'-O-methyl ribonucleotide
  modified_base 92: mod_base = OTHER; note = 2'-O-methyl ribonucleotide
  modified_base 93: mod_base = OTHER; note = 2'-O-methyl ribonucleotide
  modified_base 94: mod_base = OTHER; note = 2'-O-methyl ribonucleotide
  modified_base 95: mod_base = OTHER; note = 2'-O-methyl ribonucleotide
  modified_base 96: mod_base = OTHER; note = 2'-O-methyl ribonucleotide
  modified_base 97: mod_base = OTHER; note = 2'-O-methyl ribonucleotide
  modified_base 98: mod_base = OTHER; note = 2'-O-methyl ribonucleotide
  modified_base 99: mod_base = OTHER; note = 2'-O-methyl ribonucleotide
  modified_base 100: mod_base = OTHER; note = 2'-O-methyl ribonucleotide
  modified_base 1..4: mod_base = OTHER; note = phosphorothioate linkage
  modified_base 25..26: mod_base = OTHER; note = phosphorothioate linkage
  modified_base 45..46: mod_base = OTHER; note = phosphorothioate linkage
  modified_base 97..100: mod_base = OTHER; note = phosphorothioate linkage

SEQ ID NO: 2510 - RNA, 103 nt, synthetic construct; identical to SEQ ID NO: 1699
  source 1..103: mol_type = other RNA
  modified_base 1: mod_base = OTHER; note = 2'-O-methyl ribonucleotide
  modified_base 2: mod_base = OTHER; note = 2'-O-methyl ribonucleotide
  modified_base 3: mod_base = OTHER; note = 2'-O-methyl ribonucleotide
  modified_base 21: mod_base = OTHER; note = 2'-O-methyl ribonucleotide
  modified_base 28: mod_base = OTHER; note = 2'-O-methyl ribonucleotide
  modified_base 29: mod_base = OTHER; note = 2'-O-methyl ribonucleotide
  modified_base 30: mod_base = OTHER; note = 2'-O-methyl ribonucleotide
  modified_base 31: mod_base = OTHER; note = 2'-O-methyl ribonucleotide
  modified_base 32: mod_base = OTHER; note = 2'-O-methyl ribonucleotide
  modified_base 34: mod_base = OTHER; note = 2'-O-methyl ribonucleotide
  modified_base 35: mod_base = OTHER; note = 2'-O-methyl ribonucleotide
  modified_base 36: mod_base = OTHER; note = 2'-O-methyl ribonucleotide
  modified_base 37: mod_base = OTHER; note = 2'-O-methyl ribonucleotide
  modified_base 38: mod_base = OTHER; note = 2'-O-methyl ribonucleotide
  modified_base 39: mod_base = OTHER; note = 2'-O-methyl ribonucleotide
  modified_base 40: mod_base = OTHER; note = 2'-O-methyl ribonucleotide
  modified_base 41: mod_base = OTHER; note = 2'-O-methyl ribonucleotide
  modified_base 42: mod_base = OTHER; note = 2'-O-methyl ribonucleotide
  modified_base 46: mod_base = OTHER; note = 2'-O-methyl ribonucleotide
  modified_base 48: mod_base = OTHER; note = 2'-O-methyl ribonucleotide
  modified_base 50: mod_base = OTHER; note = 2'-O-methyl ribonucleotide
  modified_base 52: mod_base = OTHER; note = 2'-O-methyl ribonucleotide
  modified_base 53: mod_base = OTHER; note = 2'-O-methyl ribonucleotide
  modified_base 54: mod_base = OTHER; note = 2'-O-methyl ribonucleotide
  modified_base 55: mod_base = OTHER; note = 2'-O-methyl ribonucleotide
  modified_base 56: mod_base = OTHER; note = 2'-O-methyl ribonucleotide
  modified_base 57: mod_base = OTHER; note = 2'-O-methyl ribonucleotide
  modified_base 60: mod_base = OTHER; note = 2'-O-methyl ribonucleotide
  modified_base 61: mod_base = OTHER; note = 2'-O-methyl ribonucleotide
  modified_base 66: mod_base = OTHER; note = 2'-O-methyl ribonucleotide
  modified_base 67: mod_base = OTHER; note = 2'-O-methyl ribonucleotide
  modified_base 70: mod_base = OTHER; note = 2'-O-methyl ribonucleotide
  modified_base 71: mod_base = OTHER; note = 2'-O-methyl ribonucleotide
  modified_base 72: mod_base = OTHER; note = 2'-O-methyl ribonucleotide
  modified_base 74: mod_base = OTHER; note = 2'-O-methyl ribonucleotide
  modified_base 75: mod_base = OTHER; note = 2'-O-methyl ribonucleotide
  modified_base 76: mod_base = OTHER; note = 2'-O-methyl ribonucleotide
  modified_base 77: mod_base = OTHER; note = 2'-O-methyl ribonucleotide
  modified_base 78: mod_base = OTHER; note = 2'-O-methyl ribonucleotide
  modified_base 79: mod_base = OTHER; note = 2'-O-methyl ribonucleotide
  modified_base 80: mod_base = OTHER; note = 2'-O-methyl ribonucleotide
  modified_base 81: mod_base = OTHER; note = 2'-O-methyl ribonucleotide
  modified_base 83: mod_base = OTHER; note = 2'-O-methyl ribonucleotide
  modified_base 84: mod_base = OTHER; note = 2'-O-methyl ribonucleotide
  modified_base 85: mod_base = OTHER; note = 2'-O-methyl ribonucleotide
  modified_base 86: mod_base = OTHER; note = 2'-O-methyl ribonucleotide
  modified_base 87: mod_base = OTHER; note = 2'-O-methyl ribonucleotide
  modified_base 88: mod_base = OTHER; note = 2'-O-methyl ribonucleotide
  modified_base 89: mod_base = OTHER; note = 2'-O-methyl ribonucleotide
  modified_base 90: mod_base = OTHER; note = 2'-O-methyl ribonucleotide
  modified_base 91: mod_base = OTHER; note = 2'-O-methyl ribonucleotide
  modified_base 92: mod_base = OTHER; note = 2'-O-methyl ribonucleotide
  modified_base 93: mod_base = OTHER; note = 2'-O-methyl ribonucleotide
  modified_base 94: mod_base = OTHER; note = 2'-O-methyl ribonucleotide
  modified_base 95: mod_base = OTHER; note = 2'-O-methyl ribonucleotide
  modified_base 96: mod_base = OTHER; note = 2'-O-methyl ribonucleotide
  modified_base 97: mod_base = OTHER; note = 2'-O-methyl ribonucleotide
  modified_base 98: mod_base = OTHER; note = 2'-O-methyl ribonucleotide
  modified_base 99: mod_base = OTHER; note = 2'-O-methyl ribonucleotide
  modified_base 100: mod_base = OTHER; note = 2'-O-methyl ribonucleotide
  modified_base 1..4: mod_base = OTHER; note = phosphorothioate linkage
  modified_base 25..26: mod_base = OTHER; note = phosphorothioate linkage
  modified_base 45..46: mod_base = OTHER; note = phosphorothioate linkage
  modified_base 97..100: mod_base = OTHER; note = phosphorothioate linkage

SEQ ID NO: 2511 - RNA, 103 nt, synthetic construct; identical to SEQ ID NO: 1700
  source 1..103: mol_type = other RNA
  modified_base 1: mod_base = OTHER; note = 2'-O-methyl ribonucleotide
  modified_base 2: mod_base = OTHER; note = 2'-O-methyl ribonucleotide
  modified_base 3: mod_base = OTHER; note = 2'-O-methyl ribonucleotide
  modified_base 21: mod_base = OTHER; note = 2'-O-methyl ribonucleotide
  modified_base 28: mod_base = OTHER; note = 2'-O-methyl ribonucleotide
  modified_base 29: mod_base = OTHER; note = 2'-O-methyl ribonucleotide
  modified_base 30: mod_base = OTHER; note = 2'-O-methyl ribonucleotide
  modified_base 31: mod_base = OTHER; note = 2'-O-methyl ribonucleotide
  modified_base 32: mod_base = OTHER; note = 2'-O-methyl ribonucleotide
  modified_base 33: mod_base = OTHER; note = 2'-O-methyl ribonucleotide
  modified_base 34: mod_base = OTHER; note = 2'-O-methyl ribonucleotide
  modified_base 35: mod_base = OTHER; note = 2'-O-methyl ribonucleotide
  modified_base 36: mod_base = OTHER; note = 2'-O-methyl ribonucleotide
  modified_base 37: mod_base = OTHER; note = 2'-O-methyl ribonucleotide
  modified_base 38: mod_base = OTHER; note = 2'-O-methyl ribonucleotide
  modified_base 39: mod_base = OTHER; note = 2'-O-methyl ribonucleotide
  modified_base 40: mod_base = OTHER; note = 2'-O-methyl ribonucleotide
  modified_base 41: mod_base = OTHER; note = 2'-O-methyl ribonucleotide
  modified_base 42: mod_base = OTHER; note = 2'-O-methyl ribonucleotide
  modified_base 46: mod_base = OTHER; note = 2'-O-methyl ribonucleotide
  modified_base 48: mod_base = OTHER; note = 2'-O-methyl ribonucleotide
  modified_base 50: mod_base = OTHER; note = 2'-O-methyl ribonucleotide
  modified_base 52: mod_base = OTHER; note = 2'-O-methyl ribonucleotide
  modified_base 53: mod_base = OTHER; note = 2'-O-methyl ribonucleotide
  modified_base 54: mod_base = OTHER; note = 2'-O-methyl ribonucleotide
  modified_base 57: mod_base = OTHER; note = 2'-O-methyl ribonucleotide
  modified_base 61: mod_base = OTHER; note = 2'-O-methyl ribonucleotide
  modified_base 66: mod_base = OTHER; note = 2'-O-methyl ribonucleotide
  modified_base 67: mod_base = OTHER; note = 2'-O-methyl ribonucleotide
  modified_base 70: mod_base = OTHER; note = 2'-O-methyl ribonucleotide
  modified_base 71: mod_base = OTHER; note = 2'-O-methyl ribonucleotide
  modified_base 72: mod_base = OTHER; note = 2'-O-methyl ribonucleotide
  modified_base 74: mod_base = OTHER; note = 2'-O-methyl ribonucleotide
  modified_base 75: mod_base = OTHER; note = 2'-O-methyl ribonucleotide
  modified_base 76: mod_base = OTHER; note = 2'-O-methyl ribonucleotide
  modified_base 77: mod_base = OTHER; note = 2'-O-methyl ribonucleotide
  modified_base 78: mod_base = OTHER; note = 2'-O-methyl ribonucleotide
  modified_base 79: mod_base = OTHER; note = 2'-O-methyl ribonucleotide
  modified_base 80: mod_base = OTHER; note = 2'-O-methyl ribonucleotide
  modified_base 82: mod_base = OTHER; note = 2'-O-methyl ribonucleotide
  modified_base 83: mod_base = OTHER; note = 2'-O-methyl ribonucleotide
  modified_base 84: mod_base = OTHER; note = 2'-O-methyl ribonucleotide
  modified_base 85: mod_base = OTHER; note = 2'-O-methyl ribonucleotide
  modified_base 86: mod_base = OTHER; note = 2'-O-methyl ribonucleotide
  modified_base 87: mod_base = OTHER; note = 2'-O-methyl ribonucleotide
  modified_base 89: mod_base = OTHER; note = 2'-O-methyl ribonucleotide
  modified_base 92: mod_base = OTHER; note = 2'-O-methyl ribonucleotide
  modified_base 93: mod_base = OTHER; note = 2'-O-methyl ribonucleotide
  modified_base 94: mod_base = OTHER; note = 2'-O-methyl ribonucleotide
  modified_base 95: mod_base = OTHER; note = 2'-O-methyl ribonucleotide
  modified_base 96: mod_base = OTHER; note = 2'-O-methyl ribonucleotide
  modified_base 97: mod_base = OTHER; note = 2'-O-methyl ribonucleotide
  modified_base 98: mod_base = OTHER; note = 2'-O-methyl ribonucleotide
  modified_base 99: mod_base = OTHER; note = 2'-O-methyl ribonucleotide
  modified_base 100: mod_base = OTHER; note = 2'-O-methyl ribonucleotide
  modified_base 1..4: mod_base = OTHER; note = phosphorothioate linkage
  modified_base 25..26: mod_base = OTHER; note = phosphorothioate linkage
  modified_base 45..46: mod_base = OTHER; note = phosphorothioate linkage
  modified_base 97..100: mod_base = OTHER; note = phosphorothioate linkage

SEQ ID NO: 2512 - RNA, 103 nt, synthetic construct; identical to SEQ ID NO: 1700
  source 1..103: mol_type = other RNA
  modified_base 1: mod_base = OTHER; note = 2'-O-methyl ribonucleotide
  modified_base 2: mod_base = OTHER; note = 2'-O-methyl ribonucleotide
  modified_base 3: mod_base = OTHER; note = 2'-O-methyl ribonucleotide
  modified_base 21: mod_base = OTHER; note = 2'-O-methyl ribonucleotide
  modified_base 28: mod_base = OTHER; note = 2'-O-methyl ribonucleotide
  modified_base 29: mod_base = OTHER; note = 2'-O-methyl ribonucleotide
  modified_base 30: mod_base = OTHER; note = 2'-O-methyl ribonucleotide
  modified_base 31: mod_base = OTHER; note = 2'-O-methyl ribonucleotide
  modified_base 32: mod_base = OTHER; note = 2'-O-methyl ribonucleotide
  modified_base 33: mod_base = OTHER; note = 2'-O-methyl ribonucleotide
  modified_base 34: mod_base = OTHER; note = 2'-O-methyl ribonucleotide
  modified_base 35: mod_base = OTHER; note = 2'-O-methyl ribonucleotide
  modified_base 36: mod_base = OTHER; note = 2'-O-methyl ribonucleotide
  modified_base 37: mod_base = OTHER; note = 2'-O-methyl ribonucleotide
  modified_base 38: mod_base = OTHER; note = 2'-O-methyl ribonucleotide
  modified_base 39: mod_base = OTHER; note = 2'-O-methyl ribonucleotide
  modified_base 40: mod_base = OTHER; note = 2'-O-methyl ribonucleotide
  modified_base 41: mod_base = OTHER; note = 2'-O-methyl ribonucleotide
  modified_base 42: mod_base = OTHER; note = 2'-O-methyl ribonucleotide
  modified_base 46: mod_base = OTHER; note = 2'-O-methyl ribonucleotide
  modified_base 48: mod_base = OTHER; note = 2'-O-methyl ribonucleotide
  modified_base 50: mod_base = OTHER; note = 2'-O-methyl ribonucleotide
  modified_base 52: mod_base = OTHER; note = 2'-O-methyl ribonucleotide
  modified_base 53: mod_base = OTHER; note = 2'-O-methyl ribonucleotide
  modified_base 54: mod_base = OTHER; note = 2'-O-methyl ribonucleotide
  modified_base 55: mod_base = OTHER; note = 2'-O-methyl ribonucleotide
  modified_base 56: mod_base = OTHER; note = 2'-O-methyl ribonucleotide
  modified_base 57: mod_base = OTHER; note = 2'-O-methyl ribonucleotide
  modified_base 60: mod_base = OTHER; note = 2'-O-methyl ribonucleotide
  modified_base 61: mod_base = OTHER; note = 2'-O-methyl ribonucleotide
  modified_base 66: mod_base = OTHER; note = 2'-O-methyl ribonucleotide
  modified_base 67: mod_base = OTHER; note = 2'-O-methyl ribonucleotide
  modified_base 70: mod_base = OTHER; note = 2'-O-methyl ribonucleotide
  modified_base 71: mod_base = OTHER; note = 2'-O-methyl ribonucleotide
  modified_base 72: mod_base = OTHER; note = 2'-O-methyl ribonucleotide
  modified_base 74: mod_base = OTHER; note = 2'-O-methyl ribonucleotide
  modified_base 75: mod_base = OTHER; note = 2'-O-methyl ribonucleotide
  modified_base 76: mod_base = OTHER; note = 2'-O-methyl ribonucleotide
  modified_base 77: mod_base = OTHER; note = 2'-O-methyl ribonucleotide
  modified_base 78: mod_base = OTHER; note = 2'-O-methyl ribonucleotide
  modified_base 79: mod_base = OTHER; note = 2'-O-methyl ribonucleotide
  modified_base 80: mod_base = OTHER; note = 2'-O-methyl ribonucleotide
  modified_base 82: mod_base = OTHER; note = 2'-O-methyl ribonucleotide
  modified_base 83: mod_base = OTHER; note = 2'-O-methyl ribonucleotide
  modified_base 84: mod_base = OTHER; note = 2'-O-methyl ribonucleotide
  modified_base 85: mod_base = OTHER; note = 2'-O-methyl ribonucleotide
  modified_base 86: mod_base = OTHER; note = 2'-O-methyl ribonucleotide
  modified_base 87: mod_base = OTHER; note = 2'-O-methyl ribonucleotide
  modified_base 89: mod_base = OTHER; note = 2'-O-methyl ribonucleotide
  modified_base 92: mod_base = OTHER; note = 2'-O-methyl ribonucleotide
  modified_base 93: mod_base = OTHER; note = 2'-O-methyl ribonucleotide
  modified_base 94: mod_base = OTHER; note = 2'-O-methyl ribonucleotide
  modified_base 95: mod_base = OTHER; note = 2'-O-methyl ribonucleotide
  modified_base 96: mod_base = OTHER; note = 2'-O-methyl ribonucleotide
  modified_base 97: mod_base = OTHER; note = 2'-O-methyl ribonucleotide
  modified_base 98: mod_base = OTHER; note = 2'-O-methyl ribonucleotide
  modified_base 99: mod_base = OTHER; note = 2'-O-methyl ribonucleotide
  modified_base 100: mod_base = OTHER; note = 2'-O-methyl ribonucleotide
  modified_base 1..4: mod_base = OTHER; note = phosphorothioate linkage
  modified_base 25..26: mod_base = OTHER; note = phosphorothioate linkage
  modified_base 45..46: mod_base = OTHER; note = phosphorothioate linkage
  modified_base 97..100: mod_base = OTHER; note = phosphorothioate linkage

SEQ ID NO: 2513 - RNA, 103 nt, synthetic construct; identical to SEQ ID NO: 1700
  source 1..103: mol_type = other RNA
  modified_base 1: mod_base = OTHER; note = 2'-O-methyl ribonucleotide
  modified_base 2: mod_base = OTHER; note = 2'-O-methyl ribonucleotide
  modified_base 3: mod_base = OTHER; note = 2'-O-methyl ribonucleotide
  modified_base 21: mod_base = OTHER; note = 2'-O-methyl ribonucleotide
  modified_base 28: mod_base = OTHER; note = 2'-O-methyl ribonucleotide
  modified_base 29: mod_base = OTHER; note = 2'-O-methyl ribonucleotide
  modified_base 30: mod_base = OTHER; note = 2'-O-methyl ribonucleotide
  modified_base 31: mod_base = OTHER; note = 2'-O-methyl ribonucleotide
  modified_base 32: mod_base = OTHER; note = 2'-O-methyl ribonucleotide
  modified_base 33: mod_base = OTHER; note = 2'-O-methyl ribonucleotide
  modified_base 34: mod_base = OTHER; note = 2'-O-methyl ribonucleotide
  modified_base 35: mod_base = OTHER; note = 2'-O-methyl ribonucleotide
  modified_base 36: mod_base = OTHER; note = 2'-O-methyl ribonucleotide
  modified_base 37: mod_base = OTHER; note = 2'-O-methyl ribonucleotide
  modified_base 38: mod_base = OTHER; note = 2'-O-methyl ribonucleotide
  modified_base 39: mod_base = OTHER; note = 2'-O-methyl ribonucleotide
  modified_base 40: mod_base = OTHER; note = 2'-O-methyl ribonucleotide
  modified_base 41: mod_base = OTHER; note = 2'-O-methyl ribonucleotide
  modified_base 42: mod_base = OTHER; note = 2'-O-methyl ribonucleotide
  modified_base 46: mod_base = OTHER; note = 2'-O-methyl ribonucleotide
  modified_base 48: mod_base = OTHER; note = 2'-O-methyl ribonucleotide
  modified_base 50: mod_base = OTHER; note = 2'-O-methyl ribonucleotide
  modified_base 52: mod_base = OTHER; note = 2'-O-methyl ribonucleotide
  modified_base 53: mod_base = OTHER; note = 2'-O-methyl ribonucleotide
  modified_base 54: mod_base = OTHER; note = 2'-O-methyl ribonucleotide
  modified_base 57: mod_base = OTHER; note = 2'-O-methyl ribonucleotide
  modified_base 61: mod_base = OTHER; note = 2'-O-methyl ribonucleotide
  modified_base 66: mod_base = OTHER; note = 2'-O-methyl ribonucleotide
  modified_base 67: mod_base = OTHER; note = 2'-O-methyl ribonucleotide
  modified_base 70: mod_base = OTHER; note = 2'-O-methyl ribonucleotide
  modified_base 71: mod_base = OTHER; note = 2'-O-methyl ribonucleotide
  modified_base 72: mod_base = OTHER; note = 2'-O-methyl ribonucleotide
  modified_base 73: mod_base = OTHER; note = 2'-O-methyl ribonucleotide
  modified_base 74: mod_base = OTHER; note = 2'-O-methyl ribonucleotide
  modified_base 75: mod_base = OTHER; note = 2'-O-methyl ribonucleotide
  modified_base 76: mod_base = OTHER; note = 2'-O-methyl ribonucleotide
  modified_base 77: mod_base = OTHER; note = 2'-O-methyl ribonucleotide
  modified_base 78: mod_base = OTHER; note = 2'-O-methyl ribonucleotide
  modified_base 79: mod_base = OTHER; note = 2'-O-methyl ribonucleotide
  modified_base 80: mod_base = OTHER; note = 2'-O-methyl ribonucleotide
  modified_base 82: mod_base = OTHER; note = 2'-O-methyl ribonucleotide
  modified_base 83: mod_base = OTHER; note = 2'-O-methyl ribonucleotide
  modified_base 84: mod_base = OTHER; note = 2'-O-methyl ribonucleotide
  modified_base 85: mod_base = OTHER; note = 2'-O-methyl ribonucleotide
  modified_base 86: mod_base = OTHER; note = 2'-O-methyl ribonucleotide
  modified_base 87: mod_base = OTHER; note = 2'-O-methyl ribonucleotide
  modified_base 89: mod_base = OTHER; note = 2'-O-methyl ribonucleotide
  modified_base 92: mod_base = OTHER; note = 2'-O-methyl ribonucleotide
  modified_base 93: mod_base = OTHER; note = 2'-O-methyl ribonucleotide
  modified_base 94: mod_base = OTHER; note = 2'-O-methyl ribonucleotide
  modified_base 95: mod_base = OTHER; note = 2'-O-methyl ribonucleotide
  modified_base 96: mod_base = OTHER; note = 2'-O-methyl ribonucleotide
  modified_base 97: mod_base = OTHER; note = 2'-O-methyl ribonucleotide
  modified_base 98: mod_base = OTHER; note = 2'-O-methyl ribonucleotide
  modified_base 99: mod_base = OTHER; note = 2'-O-methyl ribonucleotide
  modified_base 100: mod_base = OTHER; note = 2'-O-methyl ribonucleotide
  modified_base 1..4: mod_base = OTHER; note = phosphorothioate linkage
  modified_base 25..26: mod_base = OTHER; note = phosphorothioate linkage
  modified_base 45..46: mod_base = OTHER; note = phosphorothioate linkage
  modified_base 97..100: mod_base = OTHER; note = phosphorothioate linkage

SEQ ID NO: 2514 - RNA, 103 nt, synthetic construct; identical to SEQ ID NO: 1700
  source 1..103: mol_type = other RNA
  modified_base 1: mod_base = OTHER; note = 2'-O-methyl ribonucleotide
  modified_base 2: mod_base = OTHER; note = 2'-O-methyl ribonucleotide
  modified_base 3: mod_base = OTHER; note = 2'-O-methyl ribonucleotide
  modified_base 21: mod_base = OTHER; note = 2'-O-methyl ribonucleotide
  modified_base 28: mod_base = OTHER; note = 2'-O-methyl ribonucleotide
  modified_base 29: mod_base = OTHER; note = 2'-O-methyl ribonucleotide
  modified_base 30: mod_base = OTHER; note = 2'-O-methyl ribonucleotide
  modified_base 31: mod_base = OTHER; note = 2'-O-methyl ribonucleotide
  modified_base 32: mod_base = OTHER; note = 2'-O-methyl ribonucleotide
  modified_base 33: mod_base = OTHER; note = 2'-O-methyl ribonucleotide
  modified_base 34: mod_base = OTHER; note = 2'-O-methyl ribonucleotide
  modified_base 35: mod_base = OTHER; note = 2'-O-methyl ribonucleotide
  modified_base 36: mod_base = OTHER; note = 2'-O-methyl ribonucleotide
  modified_base 37: mod_base = OTHER; note = 2'-O-methyl ribonucleotide
  modified_base 38: mod_base = OTHER; note = 2'-O-methyl ribonucleotide
  modified_base 39: mod_base = OTHER; note = 2'-O-methyl ribonucleotide
  modified_base 40: mod_base = OTHER; note = 2'-O-methyl ribonucleotide
  modified_base 41: mod_base = OTHER; note = 2'-O-methyl ribonucleotide
  modified_base 42: mod_base = OTHER; note = 2'-O-methyl ribonucleotide
  modified_base 46: mod_base = OTHER; note = 2'-O-methyl ribonucleotide
  modified_base 48: mod_base = OTHER; note = 2'-O-methyl ribonucleotide
  modified_base 50: mod_base = OTHER; note = 2'-O-methyl ribonucleotide
  modified_base 52: mod_base = OTHER; note = 2'-O-methyl ribonucleotide
  modified_base 53: mod_base = OTHER; note = 2'-O-methyl ribonucleotide
  modified_base 54: mod_base = OTHER; note = 2'-O-methyl ribonucleotide
  modified_base 57: mod_base = OTHER; note = 2'-O-methyl ribonucleotide
  modified_base 61: mod_base = OTHER; note = 2'-O-methyl ribonucleotide
  modified_base 66: mod_base = OTHER; note = 2'-O-methyl ribonucleotide
  modified_base 67: mod_base = OTHER; note = 2'-O-methyl ribonucleotide
  modified_base 70: mod_base = OTHER; note = 2'-O-methyl ribonucleotide
  modified_base 71: mod_base = OTHER; note = 2'-O-methyl ribonucleotide
  modified_base 72: mod_base = OTHER; note = 2'-O-methyl ribonucleotide
  modified_base 73: mod_base = OTHER; note = 2'-O-methyl ribonucleotide
  modified_base 74: mod_base = OTHER; note = 2'-O-methyl ribonucleotide
  modified_base 75: mod_base = OTHER; note = 2'-O-methyl ribonucleotide
  modified_base 76: mod_base = OTHER; note = 2'-O-methyl ribonucleotide
  modified_base 77: mod_base = OTHER; note = 2'-O-methyl ribonucleotide
  modified_base 78: mod_base = OTHER; note = 2'-O-methyl ribonucleotide
  modified_base 79: mod_base = OTHER; note = 2'-O-methyl ribonucleotide
  modified_base 80: mod_base = OTHER; note = 2'-O-methyl ribonucleotide
  modified_base 82: mod_base = OTHER; note = 2'-O-methyl ribonucleotide
  modified_base 83: mod_base = OTHER; note = 2'-O-methyl ribonucleotide
  modified_base 84: mod_base = OTHER; note = 2'-O-methyl ribonucleotide
  modified_base 85: mod_base = OTHER; note = 2'-O-methyl ribonucleotide
  modified_base 86: mod_base = OTHER; note = 2'-O-methyl ribonucleotide
  modified_base 87: mod_base = OTHER; note = 2'-O-methyl ribonucleotide
  modified_base 89: mod_base = OTHER; note = 2'-O-methyl ribonucleotide
  modified_base 91: mod_base = OTHER; note = 2'-O-methyl ribonucleotide
  modified_base 92: mod_base = OTHER; note = 2'-O-methyl ribonucleotide
  modified_base 93: mod_base = OTHER; note = 2'-O-methyl ribonucleotide
  modified_base 94: mod_base = OTHER; note = 2'-O-methyl ribonucleotide
  modified_base 95: mod_base = OTHER; note = 2'-O-methyl ribonucleotide
  modified_base 96: mod_base = OTHER; note = 2'-O-methyl ribonucleotide
  modified_base 97: mod_base = OTHER; note = 2'-O-methyl ribonucleotide
  modified_base 98: mod_base = OTHER; note = 2'-O-methyl ribonucleotide
  modified_base 99: mod_base = OTHER; note = 2'-O-methyl ribonucleotide
  modified_base 100: mod_base = OTHER; note = 2'-O-methyl ribonucleotide
  modified_base 1..4: mod_base = OTHER; note = phosphorothioate linkage
  modified_base 25..26: mod_base = OTHER; note = phosphorothioate linkage
  modified_base 45..46: mod_base = OTHER; note = phosphorothioate linkage
  modified_base 97..100: mod_base = OTHER; note = phosphorothioate linkage

SEQ ID NO: 2515 - RNA, 103 nt, synthetic construct; identical to SEQ ID NO: 1700
  source 1..103: mol_type = other RNA
  modified_base 1: mod_base = OTHER; note = 2'-O-methyl ribonucleotide
  modified_base 2: mod_base = OTHER; note = 2'-O-methyl ribonucleotide
  modified_base 3: mod_base = OTHER; note = 2'-O-methyl ribonucleotide
  modified_base 21: mod_base = OTHER; note = 2'-O-methyl ribonucleotide
  modified_base 28: mod_base = OTHER; note = 2'-O-methyl ribonucleotide
  modified_base 29: mod_base = OTHER; note = 2'-O-methyl ribonucleotide
  modified_base 30: mod_base = OTHER; note = 2'-O-methyl ribonucleotide
  modified_base 31: mod_base = OTHER; note = 2'-O-methyl ribonucleotide
  modified_base 32: mod_base = OTHER; note = 2'-O-methyl ribonucleotide
  modified_base 34: mod_base = OTHER; note = 2'-O-methyl ribonucleotide
  modified_base 35: mod_base = OTHER; note = 2'-O-methyl ribonucleotide
  modified_base 36: mod_base = OTHER; note = 2'-O-methyl ribonucleotide
  modified_base 37: mod_base = OTHER; note = 2'-O-methyl ribonucleotide
  modified_base 38: mod_base = OTHER; note = 2'-O-methyl ribonucleotide
  modified_base 39: mod_base = OTHER; note = 2'-O-methyl ribonucleotide
  modified_base 40: mod_base = OTHER; note = 2'-O-methyl ribonucleotide
  modified_base 41: mod_base = OTHER; note = 2'-O-methyl ribonucleotide
  modified_base 42: mod_base = OTHER; note = 2'-O-methyl ribonucleotide
  modified_base 46: mod_base = OTHER; note = 2'-O-methyl ribonucleotide
  modified_base 48: mod_base = OTHER; note = 2'-O-methyl ribonucleotide
  modified_base 50: mod_base = OTHER; note = 2'-O-methyl ribonucleotide
  modified_base 52: mod_base = OTHER; note = 2'-O-methyl ribonucleotide
  modified_base 53: mod_base = OTHER; note = 2'-O-methyl ribonucleotide
  modified_base 54: mod_base = OTHER; note = 2'-O-methyl ribonucleotide
  modified_base 57: mod_base = OTHER; note = 2'-O-methyl ribonucleotide
  modified_base 61: mod_base = OTHER; note = 2'-O-methyl ribonucleotide
  modified_base 66: mod_base = OTHER; note = 2'-O-methyl ribonucleotide
  modified_base 67: mod_base = OTHER; note = 2'-O-methyl ribonucleotide
  modified_base 70: mod_base = OTHER; note = 2'-O-methyl ribonucleotide
  modified_base 71: mod_base = OTHER; note = 2'-O-methyl ribonucleotide
  modified_base 72: mod_base = OTHER; note = 2'-O-methyl ribonucleotide
  modified_base 73: mod_base = OTHER; note = 2'-O-methyl ribonucleotide
  modified_base 74: mod_base = OTHER; note = 2'-O-methyl ribonucleotide
  modified_base 75: mod_base = OTHER; note = 2'-O-methyl ribonucleotide
  modified_base 76: mod_base = OTHER; note = 2'-O-methyl ribonucleotide
  modified_base 77: mod_base = OTHER; note = 2'-O-methyl ribonucleotide
  modified_base 78: mod_base = OTHER; note = 2'-O-methyl ribonucleotide
  modified_base 79: mod_base = OTHER; note = 2'-O-methyl ribonucleotide
  modified_base 80: mod_base = OTHER; note = 2'-O-methyl ribonucleotide
  modified_base 82: mod_base = OTHER; note = 2'-O-methyl ribonucleotide
  modified_base 83: mod_base = OTHER; note = 2'-O-methyl ribonucleotide
  modified_base 84: mod_base = OTHER; note = 2'-O-methyl ribonucleotide
  modified_base 85: mod_base = OTHER; note = 2'-O-methyl ribonucleotide
  modified_base 86: mod_base = OTHER; note = 2'-O-methyl ribonucleotide
  modified_base 87: mod_base = OTHER; note = 2'-O-methyl ribonucleotide
  modified_base 89: mod_base = OTHER; note = 2'-O-methyl ribonucleotide
  modified_base 92: mod_base = OTHER; note = 2'-O-methyl ribonucleotide
  modified_base 93: mod_base = OTHER; note = 2'-O-methyl ribonucleotide
  modified_base 94: mod_base = OTHER; note = 2'-O-methyl ribonucleotide
  modified_base 95: mod_base = OTHER; note = 2'-O-methyl ribonucleotide
  modified_base 96: mod_base = OTHER; note = 2'-O-methyl ribonucleotide
  modified_base 97: mod_base = OTHER; note = 2'-O-methyl ribonucleotide
  modified_base 98: mod_base = OTHER; note = 2'-O-methyl ribonucleotide
  modified_base 99: mod_base = OTHER; note = 2'-O-methyl ribonucleotide
  modified_base 100: mod_base = OTHER; note = 2'-O-methyl ribonucleotide
  modified_base 1..4: mod_base = OTHER; note = phosphorothioate linkage
  modified_base 25..26: mod_base = OTHER; note = phosphorothioate linkage
  modified_base 45..46: mod_base = OTHER; note = phosphorothioate linkage
  modified_base 97..100: mod_base = OTHER; note = phosphorothioate linkage

SEQ ID NO: 2516 - RNA, 103 nt, synthetic construct; identical to SEQ ID NO: 1700
  source 1..103: mol_type = other RNA
  modified_base 1: mod_base = OTHER; note = 2'-O-methyl ribonucleotide
  modified_base 2: mod_base = OTHER; note = 2'-O-methyl ribonucleotide
  modified_base 3: mod_base = OTHER; note = 2'-O-methyl ribonucleotide
  modified_base 21: mod_base = OTHER; note = 2'-O-methyl ribonucleotide
  modified_base 28: mod_base = OTHER; note = 2'-O-methyl ribonucleotide
  modified_base 29: mod_base = OTHER; note = 2'-O-methyl ribonucleotide
  modified_base 30: mod_base = OTHER; note = 2'-O-methyl ribonucleotide
  modified_base 31: mod_base = OTHER; note = 2'-O-methyl ribonucleotide
  modified_base 32: mod_base = OTHER; note = 2'-O-methyl ribonucleotide
  modified_base 34: mod_base = OTHER; note = 2'-O-methyl ribonucleotide
  modified_base 35: mod_base = OTHER; note = 2'-O-methyl ribonucleotide
  modified_base 36: mod_base = OTHER; note = 2'-O-methyl ribonucleotide
  modified_base 37: mod_base = OTHER; note = 2'-O-methyl ribonucleotide
  modified_base 38: mod_base = OTHER; note = 2'-O-methyl ribonucleotide
  modified_base 39: mod_base = OTHER; note = 2'-O-methyl ribonucleotide
  modified_base 40: mod_base = OTHER; note = 2'-O-methyl ribonucleotide
  modified_base 41: mod_base = OTHER; note = 2'-O-methyl ribonucleotide
  modified_base 42: mod_base = OTHER; note = 2'-O-methyl ribonucleotide
  modified_base 46: mod_base = OTHER; note = 2'-O-methyl ribonucleotide
  modified_base 48: mod_base = OTHER; note = 2'-O-methyl ribonucleotide
  modified_base 50: mod_base = OTHER; note = 2'-O-methyl ribonucleotide
  modified_base 52: mod_base = OTHER; note = 2'-O-methyl ribonucleotide
  modified_base 53: mod_base = OTHER; note = 2'-O-methyl ribonucleotide
  modified_base 54: mod_base = OTHER; note = 2'-O-methyl ribonucleotide
  modified_base 57: mod_base = OTHER; note = 2'-O-methyl ribonucleotide
  modified_base 61: mod_base = OTHER; note = 2'-O-methyl ribonucleotide
  modified_base 66: mod_base = OTHER; note = 2'-O-methyl ribonucleotide
  modified_base 67: mod_base = OTHER; note = 2'-O-methyl ribonucleotide
  modified_base 70: mod_base = OTHER; note = 2'-O-methyl ribonucleotide
  modified_base 71: mod_base = OTHER; note = 2'-O-methyl ribonucleotide
  modified_base 72: mod_base = OTHER; note = 2'-O-methyl ribonucleotide
  modified_base 73: mod_base = OTHER; note = 2'-O-methyl ribonucleotide
  modified_base 74: mod_base = OTHER; note = 2'-O-methyl ribonucleotide
  modified_base 75: mod_base = OTHER; note = 2'-O-methyl ribonucleotide
  modified_base 76: mod_base = OTHER; note = 2'-O-methyl ribonucleotide
  modified_base 77: mod_base = OTHER; note = 2'-O-methyl ribonucleotide
  modified_base 78: mod_base = OTHER; note = 2'-O-methyl ribonucleotide
  modified_base 79: mod_base = OTHER; note = 2'-O-methyl ribonucleotide
  modified_base 80: mod_base = OTHER; note = 2'-O-methyl ribonucleotide
  modified_base 82: mod_base = OTHER; note = 2'-O-methyl ribonucleotide
  modified_base 83: mod_base = OTHER; note = 2'-O-methyl ribonucleotide
  modified_base 84: mod_base = OTHER; note = 2'-O-methyl ribonucleotide
  modified_base 85: mod_base = OTHER; note = 2'-O-methyl ribonucleotide
  modified_base 86: mod_base = OTHER; note = 2'-O-methyl ribonucleotide
  modified_base 87: mod_base = OTHER; note = 2'-O-methyl ribonucleotide
  modified_base 89: mod_base = OTHER; note = 2'-O-methyl ribonucleotide
  modified_base 91: mod_base = OTHER; note = 2'-O-methyl ribonucleotide
  modified_base 92: mod_base = OTHER; note = 2'-O-methyl ribonucleotide
  modified_base 93: mod_base = OTHER; note = 2'-O-methyl ribonucleotide
  modified_base 94: mod_base = OTHER; note = 2'-O-methyl ribonucleotide
  modified_base 95: mod_base = OTHER; note = 2'-O-methyl ribonucleotide
  modified_base 96: mod_base = OTHER; note = 2'-O-methyl ribonucleotide
  modified_base 97: mod_base = OTHER; note = 2'-O-methyl ribonucleotide
  modified_base 98: mod_base = OTHER; note = 2'-O-methyl ribonucleotide
  modified_base 99: mod_base = OTHER; note = 2'-O-methyl ribonucleotide
  modified_base 100: mod_base = OTHER; note = 2'-O-methyl ribonucleotide
  modified_base 1..4: mod_base = OTHER; note = phosphorothioate linkage
  modified_base 25..26: mod_base = OTHER; note = phosphorothioate linkage
  modified_base 45..46: mod_base = OTHER; note = phosphorothioate linkage
  modified_base 97..100: mod_base = OTHER; note = phosphorothioate linkage

SEQ ID NO: 2517 - RNA, 103 nt, synthetic construct; identical to SEQ ID NO: 1700
  source 1..103: mol_type = other RNA
  modified_base 1: mod_base = OTHER; note = 2'-O-methyl ribonucleotide
  modified_base 2: mod_base = OTHER; note = 2'-O-methyl ribonucleotide
  modified_base 3: mod_base = OTHER; note = 2'-O-methyl ribonucleotide
  modified_base 21: mod_base = OTHER; note = 2'-O-methyl ribonucleotide
  modified_base 28: mod_base = OTHER; note = 2'-O-methyl ribonucleotide
  modified_base 29: mod_base = OTHER; note = 2'-O-methyl ribonucleotide
  modified_base 30: mod_base = OTHER; note = 2'-O-methyl ribonucleotide
  modified_base 31: mod_base = OTHER; note = 2'-O-methyl ribonucleotide
  modified_base 32: mod_base = OTHER; note = 2'-O-methyl ribonucleotide
  modified_base 34: mod_base = OTHER; note = 2'-O-methyl ribonucleotide
  modified_base 35: mod_base = OTHER; note = 2'-O-methyl ribonucleotide
  modified_base 36: mod_base = OTHER; note = 2'-O-methyl ribonucleotide
  modified_base 37: mod_base = OTHER; note = 2'-O-methyl ribonucleotide
  modified_base 38: mod_base = OTHER; note = 2'-O-methyl ribonucleotide
  modified_base 39: mod_base = OTHER; note = 2'-O-methyl ribonucleotide
  modified_base 40: mod_base = OTHER; note = 2'-O-methyl ribonucleotide
  modified_base 41: mod_base = OTHER; note = 2'-O-methyl ribonucleotide
  modified_base 42: mod_base = OTHER; note = 2'-O-methyl ribonucleotide
  modified_base 46: mod_base = OTHER; note = 2'-O-methyl ribonucleotide
  modified_base 48: mod_base = OTHER; note = 2'-O-methyl ribonucleotide
  modified_base 50: mod_base = OTHER; note = 2'-O-methyl ribonucleotide
  modified_base 52: mod_base = OTHER; note = 2'-O-methyl ribonucleotide
  modified_base 53: mod_base = OTHER; note = 2'-O-methyl ribonucleotide
  modified_base 54: mod_base = OTHER; note = 2'-O-methyl ribonucleotide
  modified_base 55: mod_base = OTHER; note = 2'-O-methyl ribonucleotide
  modified_base 56: mod_base = OTHER; note = 2'-O-methyl ribonucleotide
  modified_base 57: mod_base = OTHER; note = 2'-O-methyl ribonucleotide
  modified_base 60: mod_base = OTHER; note = 2'-O-methyl ribonucleotide
  modified_base 61: mod_base = OTHER; note = 2'-O-methyl ribonucleotide
  modified_base 66: mod_base = OTHER; note = 2'-O-methyl ribonucleotide
  modified_base 67: mod_base = OTHER; note = 2'-O-methyl ribonucleotide
  modified_base 70: mod_base = OTHER; note = 2'-O-methyl ribonucleotide
  modified_base 71: mod_base = OTHER; note = 2'-O-methyl ribonucleotide
  modified_base 72: mod_base = OTHER; note = 2'-O-methyl ribonucleotide
  modified_base 74: mod_base = OTHER; note = 2'-O-methyl ribonucleotide
  modified_base 75: mod_base = OTHER; note = 2'-O-methyl ribonucleotide
  modified_base 76: mod_base = OTHER; note = 2'-O-methyl ribonucleotide
  modified_base 77: mod_base = OTHER; note = 2'-O-methyl ribonucleotide
  modified_base 78: mod_base = OTHER; note = 2'-O-methyl ribonucleotide
  modified_base 79: mod_base = OTHER; note = 2'-O-methyl ribonucleotide
  modified_base 80: mod_base = OTHER; note = 2'-O-methyl ribonucleotide
  modified_base 82: mod_base = OTHER; note = 2'-O-methyl ribonucleotide
  modified_base 83: mod_base = OTHER; note = 2'-O-methyl ribonucleotide
  modified_base 84: mod_base = OTHER; note = 2'-O-methyl ribonucleotide
  modified_base 85: mod_base = OTHER; note = 2'-O-methyl ribonucleotide
  modified_base 86: mod_base = OTHER; note = 2'-O-methyl ribonucleotide
  modified_base 87: mod_base = OTHER; note = 2'-O-methyl ribonucleotide
  modified_base 89: mod_base = OTHER; note = 2'-O-methyl ribonucleotide
  modified_base 92: mod_base = OTHER; note = 2'-O-methyl ribonucleotide
  modified_base 93: mod_base = OTHER; note = 2'-O-methyl ribonucleotide
  modified_base 94: mod_base = OTHER; note = 2'-O-methyl ribonucleotide
  modified_base 95: mod_base = OTHER; note = 2'-O-methyl ribonucleotide
  modified_base 96: mod_base = OTHER; note = 2'-O-methyl ribonucleotide
  modified_base 97: mod_base = OTHER; note = 2'-O-methyl ribonucleotide
  modified_base 98: mod_base = OTHER; note = 2'-O-methyl ribonucleotide
  modified_base 99: mod_base = OTHER; note = 2'-O-methyl ribonucleotide
  modified_base 100: mod_base = OTHER; note = 2'-O-methyl ribonucleotide
  modified_base 1..4: mod_base = OTHER; note = phosphorothioate linkage
  modified_base 25..26: mod_base = OTHER; note = phosphorothioate linkage
  modified_base 45..46: mod_base = OTHER; note = phosphorothioate linkage
  modified_base 97..100: mod_base = OTHER; note = phosphorothioate linkage

SEQ ID NO: 2518 - RNA, 103 nt, synthetic construct; identical to SEQ ID NO: 1643
  source 1..103: mol_type = other RNA
  modified_base 1: mod_base = OTHER; note = 2'-O-methyl ribonucleotide
  modified_base 2: mod_base = OTHER; note = 2'-O-methyl ribonucleotide
  modified_base 3: mod_base = OTHER; note = 2'-O-methyl ribonucleotide
  modified_base 21: mod_base = OTHER; note = 2'-O-methyl ribonucleotide
  modified_base 28: mod_base = OTHER; note = 2'-O-methyl ribonucleotide
  modified_base 29: mod_base = OTHER; note = 2'-O-methyl ribonucleotide
  modified_base 30: mod_base = OTHER; note = 2'-O-methyl ribonucleotide
  modified_base 31: mod_base = OTHER; note = 2'-O-methyl ribonucleotide
  modified_base 32: mod_base = OTHER; note = 2'-O-methyl ribonucleotide
  modified_base 33: mod_base = OTHER; note = 2'-O-methyl ribonucleotide
  modified_base 34: mod_base = OTHER; note = 2'-O-methyl ribonucleotide
  modified_base 35: mod_base = OTHER; note = 2'-O-methyl ribonucleotide
  modified_base 36: mod_base = OTHER; note = 2'-O-methyl ribonucleotide
  modified_base 37: mod_base = OTHER; note = 2'-O-methyl ribonucleotide
  modified_base 38: mod_base = OTHER; note = 2'-O-methyl ribonucleotide
  modified_base 39: mod_base = OTHER; note = 2'-O-methyl ribonucleotide
  modified_base 40: mod_base = OTHER; note = 2'-O-methyl ribonucleotide
  modified_base 41: mod_base = OTHER; note = 2'-O-methyl ribonucleotide
  modified_base 42: mod_base = OTHER; note = 2'-O-methyl ribonucleotide
  modified_base 46: mod_base = OTHER; note = 2'-O-methyl ribonucleotide
  modified_base 48: mod_base = OTHER; note = 2'-O-methyl ribonucleotide
  modified_base 50: mod_base = OTHER; note = 2'-O-methyl ribonucleotide
  modified_base 52: mod_base = OTHER; note = 2'-O-methyl ribonucleotide
  modified_base 53: mod_base = OTHER; note = 2'-O-methyl ribonucleotide
  modified_base 54: mod_base = OTHER; note = 2'-O-methyl ribonucleotide
  modified_base 55: mod_base = OTHER; note = 2'-O-methyl ribonucleotide
  modified_base 56: mod_base = OTHER; note = 2'-O-methyl ribonucleotide
  modified_base 57: mod_base = OTHER; note = 2'-O-methyl ribonucleotide
  modified_base 60: mod_base = OTHER; note = 2'-O-methyl ribonucleotide
  modified_base 61: mod_base = OTHER; note = 2'-O-methyl ribonucleotide
  modified_base 66: mod_base = OTHER; note = 2'-O-methyl ribonucleotide
  modified_base 67: mod_base = OTHER; note = 2'-O-methyl ribonucleotide
  modified_base 70: mod_base = OTHER; note = 2'-O-methyl ribonucleotide
  modified_base 71: mod_base = OTHER; note = 2'-O-methyl ribonucleotide
  modified_base 72: mod_base = OTHER; note = 2'-O-methyl ribonucleotide
  modified_base 73: mod_base = OTHER; note = 2'-O-methyl ribonucleotide
  modified_base 74: mod_base = OTHER; note = 2'-O-methyl ribonucleotide
  modified_base 75: mod_base = OTHER; note = 2'-O-methyl ribonucleotide
  modified_base 76: mod_base = OTHER; note = 2'-O-methyl ribonucleotide
  modified_base 77: mod_base = OTHER; note = 2'-O-methyl ribonucleotide
  modified_base 78: mod_base = OTHER; note = 2'-O-methyl ribonucleotide
  modified_base 79: mod_base = OTHER; note = 2'-O-methyl ribonucleotide
  modified_base 80: mod_base = OTHER; note = 2'-O-methyl ribonucleotide
  modified_base 81: mod_base = OTHER; note = 2'-O-methyl ribonucleotide
  modified_base 83: mod_base = OTHER; note = 2'-O-methyl ribonucleotide
  modified_base 84: mod_base = OTHER; note = 2'-O-methyl ribonucleotide
  modified_base 85: mod_base = OTHER; note = 2'-O-methyl ribonucleotide
  modified_base 86: mod_base = OTHER; note = 2'-O-methyl ribonucleotide
  modified_base 87: mod_base = OTHER; note = 2'-O-methyl ribonucleotide
  modified_base 88: mod_base = OTHER; note = 2'-O-methyl ribonucleotide
  modified_base 89: mod_base = OTHER; note = 2'-O-methyl ribonucleotide
  modified_base 90: mod_base = OTHER; note = 2'-O-methyl ribonucleotide
  modified_base 91: mod_base = OTHER; note = 2'-O-methyl ribonucleotide
  modified_base 92: mod_base = OTHER; note = 2'-O-methyl ribonucleotide
  modified_base 93: mod_base = OTHER; note = 2'-O-methyl ribonucleotide
  modified_base 94: mod_base = OTHER; note = 2'-O-methyl ribonucleotide
  modified_base 95: mod_base = OTHER; note = 2'-O-methyl ribonucleotide
  modified_base 96: mod_base = OTHER; note = 2'-O-methyl ribonucleotide
  modified_base 97: mod_base = OTHER; note = 2'-O-methyl ribonucleotide
  modified_base 98: mod_base = OTHER; note = 2'-O-methyl ribonucleotide
  modified_base 99: mod_base = OTHER; note = 2'-O-methyl ribonucleotide
  modified_base 100: mod_base = OTHER; note = 2'-O-methyl ribonucleotide
  modified_base 1..4: mod_base = OTHER; note = phosphorothioate linkage
  modified_base 25..26: mod_base = OTHER; note = phosphorothioate linkage
  modified_base 64..65: mod_base = OTHER; note = phosphorothioate linkage
  modified_base 97..100: mod_base = OTHER; note = phosphorothioate linkage

SEQ ID NO: 2519 - RNA, 103 nt, synthetic construct; identical to SEQ ID NO: 1643
  source 1..103: mol_type = other RNA
  modified_base 1: mod_base = OTHER; note = 2'-O-methyl ribonucleotide
  modified_base 2: mod_base = OTHER; note = 2'-O-methyl ribonucleotide
  modified_base 3: mod_base = OTHER; note = 2'-O-methyl ribonucleotide
  modified_base 21: mod_base = OTHER; note = 2'-O-methyl ribonucleotide
  modified_base 28: mod_base = OTHER; note = 2'-O-methyl ribonucleotide
  modified_base 29: mod_base = OTHER; note = 2'-O-methyl ribonucleotide
  modified_base 30: mod_base = OTHER; note = 2'-O-methyl ribonucleotide
  modified_base 31: mod_base = OTHER; note = 2'-O-methyl ribonucleotide
  modified_base 32: mod_base = OTHER; note = 2'-O-methyl ribonucleotide
  modified_base 34: mod_base = OTHER; note = 2'-O-methyl ribonucleotide
  modified_base 35: mod_base = OTHER; note = 2'-O-methyl ribonucleotide
  modified_base 36: mod_base = OTHER; note = 2'-O-methyl ribonucleotide
  modified_base 37: mod_base = OTHER; note = 2'-O-methyl ribonucleotide
  modified_base 38: mod_base = OTHER; note = 2'-O-methyl ribonucleotide
  modified_base 39: mod_base = OTHER; note = 2'-O-methyl ribonucleotide
  modified_base 40: mod_base = OTHER; note = 2'-O-methyl ribonucleotide
  modified_base 41: mod_base = OTHER; note = 2'-O-methyl ribonucleotide
  modified_base 42: mod_base = OTHER; note = 2'-O-methyl ribonucleotide
  modified_base 46: mod_base = OTHER; note = 2'-O-methyl ribonucleotide
  modified_base 48: mod_base = OTHER; note = 2'-O-methyl ribonucleotide
  modified_base 50: mod_base = OTHER; note = 2'-O-methyl ribonucleotide
  modified_base 52: mod_base = OTHER; note = 2'-O-methyl ribonucleotide
  modified_base 53: mod_base = OTHER; note = 2'-O-methyl ribonucleotide
  modified_base 54: mod_base = OTHER; note = 2'-O-methyl ribonucleotide
  modified_base 55: mod_base = OTHER; note = 2'-O-methyl ribonucleotide
  modified_base 56: mod_base = OTHER; note = 2'-O-methyl ribonucleotide
  modified_base 57: mod_base = OTHER; note = 2'-O-methyl ribonucleotide
  modified_base 60: mod_base = OTHER; note = 2'-O-methyl ribonucleotide
  modified_base 61: mod_base = OTHER; note = 2'-O-methyl ribonucleotide
  modified_base 66: mod_base = OTHER; note = 2'-O-methyl ribonucleotide
  modified_base 67: mod_base = OTHER; note = 2'-O-methyl ribonucleotide
  modified_base 70: mod_base = OTHER; note = 2'-O-methyl ribonucleotide
  modified_base 71: mod_base = OTHER; note = 2'-O-methyl ribonucleotide
  modified_base 72: mod_base = OTHER; note = 2'-O-methyl ribonucleotide
  modified_base 74: mod_base = OTHER; note = 2'-O-methyl ribonucleotide
  modified_base 75: mod_base = OTHER; note = 2'-O-methyl ribonucleotide
  modified_base 76: mod_base = OTHER; note = 2'-O-methyl ribonucleotide
  modified_base 77: mod_base = OTHER; note = 2'-O-methyl ribonucleotide
  modified_base 78: mod_base = OTHER; note = 2'-O-methyl ribonucleotide
  modified_base 79: mod_base = OTHER; note = 2'-O-methyl ribonucleotide
  modified_base 80: mod_base = OTHER; note = 2'-O-methyl ribonucleotide
  modified_base 81: mod_base = OTHER; note = 2'-O-methyl ribonucleotide
  modified_base 83: mod_base = OTHER; note = 2'-O-methyl ribonucleotide
  modified_base 84: mod_base = OTHER; note = 2'-O-methyl ribonucleotide
  modified_base 85: mod_base = OTHER; note = 2'-O-methyl ribonucleotide
  modified_base 86: mod_base = OTHER; note = 2'-O-methyl ribonucleotide
  modified_base 87: mod_base = OTHER; note = 2'-O-methyl ribonucleotide
  modified_base 88: mod_base = OTHER; note = 2'-O-methyl ribonucleotide
  modified_base 89: mod_base = OTHER; note = 2'-O-methyl ribonucleotide
  modified_base 90: mod_base = OTHER; note = 2'-O-methyl ribonucleotide
  modified_base 91: mod_base = OTHER; note = 2'-O-methyl ribonucleotide
  modified_base 92: mod_base = OTHER; note = 2'-O-methyl ribonucleotide
  modified_base 93: mod_base = OTHER; note = 2'-O-methyl ribonucleotide
  modified_base 94: mod_base = OTHER; note = 2'-O-methyl ribonucleotide
  modified_base 95: mod_base = OTHER; note = 2'-O-methyl ribonucleotide
  modified_base 96: mod_base = OTHER; note = 2'-O-methyl ribonucleotide
  modified_base 97: mod_base = OTHER; note = 2'-O-methyl ribonucleotide
  modified_base 98: mod_base = OTHER; note = 2'-O-methyl ribonucleotide
  modified_base 99: mod_base = OTHER; note = 2'-O-methyl ribonucleotide
  modified_base 100: mod_base = OTHER; note = 2'-O-methyl ribonucleotide
  modified_base 1..4: mod_base = OTHER; note = phosphorothioate linkage
  modified_base 25..26: mod_base = OTHER; note = phosphorothioate linkage
  modified_base 64..65: mod_base = OTHER; note = phosphorothioate linkage
  modified_base 97..100: mod_base = OTHER; note = phosphorothioate linkage

SEQ ID NO: 2520 - RNA, 103 nt, synthetic construct; identical to SEQ ID NO: 1699
  source 1..103: mol_type = other RNA
  modified_base 1: mod_base = OTHER; note = 2'-O-methyl ribonucleotide
  modified_base 2: mod_base = OTHER; note = 2'-O-methyl ribonucleotide
  modified_base 3: mod_base = OTHER; note = 2'-O-methyl ribonucleotide
  modified_base 21: mod_base = OTHER; note = 2'-O-methyl ribonucleotide
  modified_base 28: mod_base = OTHER; note = 2'-O-methyl ribonucleotide
  modified_base 29: mod_base = OTHER; note = 2'-O-methyl ribonucleotide
  modified_base 30: mod_base = OTHER; note = 2'-O-methyl ribonucleotide
  modified_base 31: mod_base = OTHER; note = 2'-O-methyl ribonucleotide
  modified_base 32: mod_base = OTHER; note = 2'-O-methyl ribonucleotide
  modified_base 33: mod_base = OTHER; note = 2'-O-methyl ribonucleotide
  modified_base 34: mod_base = OTHER; note = 2'-O-methyl ribonucleotide
  modified_base 35: mod_base = OTHER; note = 2'-O-methyl ribonucleotide
  modified_base 36: mod_base = OTHER; note = 2'-O-methyl ribonucleotide
  modified_base 37: mod_base = OTHER; note = 2'-O-methyl ribonucleotide
  modified_base 38: mod_base = OTHER; note = 2'-O-methyl ribonucleotide
  modified_base 39: mod_base = OTHER; note = 2'-O-methyl ribonucleotide
  modified_base 40: mod_base = OTHER; note = 2'-O-methyl ribonucleotide
  modified_base 41: mod_base = OTHER; note = 2'-O-methyl ribonucleotide
  modified_base 42: mod_base = OTHER; note = 2'-O-methyl ribonucleotide
  modified_base 46: mod_base = OTHER; note = 2'-O-methyl ribonucleotide
  modified_base 48: mod_base = OTHER; note = 2'-O-methyl ribonucleotide
  modified_base 50: mod_base = OTHER; note = 2'-O-methyl ribonucleotide
  modified_base 52: mod_base = OTHER; note = 2'-O-methyl ribonucleotide
  modified_base 53: mod_base = OTHER; note = 2'-O-methyl ribonucleotide
  modified_base 54: mod_base = OTHER; note = 2'-O-methyl ribonucleotide
  modified_base 55: mod_base = OTHER; note = 2'-O-methyl ribonucleotide
  modified_base 56: mod_base = OTHER; note = 2'-O-methyl ribonucleotide
  modified_base 57: mod_base = OTHER; note = 2'-O-methyl ribonucleotide
  modified_base 60: mod_base = OTHER; note = 2'-O-methyl ribonucleotide
  modified_base 61: mod_base = OTHER; note = 2'-O-methyl ribonucleotide
  modified_base 66: mod_base = OTHER; note = 2'-O-methyl ribonucleotide
  modified_base 67: mod_base = OTHER; note = 2'-O-methyl ribonucleotide
  modified_base 70: mod_base = OTHER; note = 2'-O-methyl ribonucleotide
  modified_base 71: mod_base = OTHER; note = 2'-O-methyl ribonucleotide
  modified_base 72: mod_base = OTHER; note = 2'-O-methyl ribonucleotide
  modified_base 73: mod_base = OTHER; note = 2'-O-methyl ribonucleotide
  modified_base 74: mod_base = OTHER; note = 2'-O-methyl ribonucleotide
  modified_base 75: mod_base = OTHER; note = 2'-O-methyl ribonucleotide
  modified_base 76: mod_base = OTHER; note = 2'-O-methyl ribonucleotide
  modified_base 77: mod_base = OTHER; note = 2'-O-methyl ribonucleotide
  modified_base 78: mod_base = OTHER; note = 2'-O-methyl ribonucleotide
  modified_base 79: mod_base = OTHER; note = 2'-O-methyl ribonucleotide
  modified_base 80: mod_base = OTHER; note = 2'-O-methyl ribonucleotide
  modified_base 81: mod_base = OTHER; note = 2'-O-methyl ribonucleotide
  modified_base 83: mod_base = OTHER; note = 2'-O-methyl ribonucleotide
  modified_base 84: mod_base = OTHER; note = 2'-O-methyl ribonucleotide
  modified_base 85: mod_base = OTHER; note = 2'-O-methyl ribonucleotide
  modified_base 86: mod_base = OTHER; note = 2'-O-methyl ribonucleotide
  modified_base 87: mod_base = OTHER; note = 2'-O-methyl ribonucleotide
  modified_base 88: mod_base = OTHER; note = 2'-O-methyl ribonucleotide
  modified_base 89: mod_base = OTHER; note = 2'-O-methyl ribonucleotide
  modified_base 90: mod_base = OTHER; note = 2'-O-methyl ribonucleotide
  modified_base 91: mod_base = OTHER; note = 2'-O-methyl ribonucleotide
  modified_base 92: mod_base = OTHER; note = 2'-O-methyl ribonucleotide
  modified_base 93: mod_base = OTHER; note = 2'-O-methyl ribonucleotide
  modified_base 94: mod_base = OTHER; note = 2'-O-methyl ribonucleotide
  modified_base 95: mod_base = OTHER; note = 2'-O-methyl ribonucleotide
  modified_base 96: mod_base = OTHER; note = 2'-O-methyl ribonucleotide
  modified_base 97: mod_base = OTHER; note = 2'-O-methyl ribonucleotide
  modified_base 98: mod_base = OTHER; note = 2'-O-methyl ribonucleotide
  modified_base 99: mod_base = OTHER; note = 2'-O-methyl ribonucleotide
  modified_base 100: mod_base = OTHER; note = 2'-O-methyl ribonucleotide
  modified_base 1..4: mod_base = OTHER; note = phosphorothioate linkage
  modified_base 25..26: mod_base = OTHER; note = phosphorothioate linkage
  modified_base 64..65: mod_base = OTHER; note = phosphorothioate linkage
  modified_base 97..100: mod_base = OTHER; note = phosphorothioate linkage

SEQ ID NO: 2521 - RNA, 103 nt, synthetic construct; identical to SEQ ID NO: 1699
  source 1..103: mol_type = other RNA
  modified_base 1: mod_base = OTHER; note = 2'-O-methyl ribonucleotide
  modified_base 2: mod_base = OTHER; note = 2'-O-methyl ribonucleotide
  modified_base 3: mod_base = OTHER; note = 2'-O-methyl ribonucleotide
  modified_base 21: mod_base = OTHER; note = 2'-O-methyl ribonucleotide
  modified_base 28: mod_base = OTHER; note = 2'-O-methyl ribonucleotide
  modified_base 29: mod_base = OTHER; note = 2'-O-methyl ribonucleotide
  modified_base 30: mod_base = OTHER; note = 2'-O-methyl ribonucleotide
  modified_base 31: mod_base = OTHER; note = 2'-O-methyl ribonucleotide
  modified_base 32: mod_base = OTHER; note = 2'-O-methyl ribonucleotide
  modified_base 34: mod_base = OTHER; note = 2'-O-methyl ribonucleotide
  modified_base 35: mod_base = OTHER; note = 2'-O-methyl ribonucleotide
  modified_base 36: mod_base = OTHER; note = 2'-O-methyl ribonucleotide
  modified_base 37: mod_base = OTHER; note = 2'-O-methyl ribonucleotide
  modified_base 38: mod_base = OTHER; note = 2'-O-methyl ribonucleotide
  modified_base 39: mod_base = OTHER; note = 2'-O-methyl ribonucleotide
  modified_base 40: mod_base = OTHER; note = 2'-O-methyl ribonucleotide
  modified_base 41: mod_base = OTHER; note = 2'-O-methyl ribonucleotide
  modified_base 42: mod_base = OTHER; note = 2'-O-methyl ribonucleotide
  modified_base 46: mod_base = OTHER; note = 2'-O-methyl ribonucleotide
  modified_base 48: mod_base = OTHER; note = 2'-O-methyl ribonucleotide
  modified_base 50: mod_base = OTHER; note = 2'-O-methyl ribonucleotide
  modified_base 52: mod_base = OTHER; note = 2'-O-methyl ribonucleotide
  modified_base 53: mod_base = OTHER; note = 2'-O-methyl ribonucleotide
  modified_base 54: mod_base = OTHER; note = 2'-O-methyl ribonucleotide
  modified_base 55: mod_base = OTHER; note = 2'-O-methyl ribonucleotide
  modified_base 56: mod_base = OTHER; note = 2'-O-methyl ribonucleotide
  modified_base 57: mod_base = OTHER; note = 2'-O-methyl ribonucleotide
  modified_base 60: mod_base = OTHER; note = 2'-O-methyl ribonucleotide
  modified_base 61: mod_base = OTHER; note = 2'-O-methyl ribonucleotide
  modified_base 66: mod_base = OTHER; note = 2'-O-methyl ribonucleotide
  modified_base 67: mod_base = OTHER; note = 2'-O-methyl ribonucleotide
  modified_base 70: mod_base = OTHER; note = 2'-O-methyl ribonucleotide
  modified_base 71: mod_base = OTHER; note = 2'-O-methyl ribonucleotide
  modified_base 72: mod_base = OTHER; note = 2'-O-methyl ribonucleotide
  modified_base 74: mod_base = OTHER; note = 2'-O-methyl ribonucleotide
  modified_base 75: mod_base = OTHER; note = 2'-O-methyl ribonucleotide
  modified_base 76: mod_base = OTHER; note = 2'-O-methyl ribonucleotide
  modified_base 77: mod_base = OTHER; note = 2'-O-methyl ribonucleotide
  modified_base 78: mod_base = OTHER; note = 2'-O-methyl ribonucleotide
  modified_base 79: mod_base = OTHER; note = 2'-O-methyl ribonucleotide
  modified_base 80: mod_base = OTHER; note = 2'-O-methyl ribonucleotide
  modified_base 81: mod_base = OTHER; note = 2'-O-methyl ribonucleotide
  modified_base 83: mod_base = OTHER; note = 2'-O-methyl ribonucleotide
  modified_base 84: mod_base = OTHER; note = 2'-O-methyl ribonucleotide
  modified_base 85: mod_base = OTHER; note = 2'-O-methyl ribonucleotide
  modified_base 86: mod_base = OTHER; note = 2'-O-methyl ribonucleotide
  modified_base 87: mod_base = OTHER; note = 2'-O-methyl ribonucleotide
  modified_base 88: mod_base = OTHER; note = 2'-O-methyl ribonucleotide
  modified_base 89: mod_base = OTHER; note = 2'-O-methyl ribonucleotide
  modified_base 90: mod_base = OTHER; note = 2'-O-methyl ribonucleotide
  modified_base 91: mod_base = OTHER; note = 2'-O-methyl ribonucleotide
  modified_base 92: mod_base = OTHER; note = 2'-O-methyl ribonucleotide
  modified_base 93: mod_base = OTHER; note = 2'-O-methyl ribonucleotide
  modified_base 94: mod_base = OTHER; note = 2'-O-methyl ribonucleotide
  modified_base 95: mod_base = OTHER; note = 2'-O-methyl ribonucleotide
  modified_base 96: mod_base = OTHER; note = 2'-O-methyl ribonucleotide
  modified_base 97: mod_base = OTHER; note = 2'-O-methyl ribonucleotide
  modified_base 98: mod_base = OTHER; note = 2'-O-methyl ribonucleotide
  modified_base 99: mod_base = OTHER; note = 2'-O-methyl ribonucleotide
  modified_base 100: mod_base = OTHER; note = 2'-O-methyl ribonucleotide
  modified_base 1..4: mod_base = OTHER; note = phosphorothioate linkage
  modified_base 25..26: mod_base = OTHER; note = phosphorothioate linkage
  modified_base 64..65: mod_base = OTHER; note = phosphorothioate linkage
  modified_base 97..100: mod_base = OTHER; note = phosphorothioate linkage

SEQ ID NO: 2522 - RNA, 103 nt, synthetic construct; identical to SEQ ID NO: 1700
  source 1..103: mol_type = other RNA
  modified_base 1: mod_base = OTHER; note = 2'-O-methyl ribonucleotide
  modified_base 2: mod_base = OTHER; note = 2'-O-methyl ribonucleotide
  modified_base 3: mod_base = OTHER; note = 2'-O-methyl ribonucleotide
  modified_base 21: mod_base = OTHER; note = 2'-O-methyl ribonucleotide
  modified_base 28: mod_base = OTHER; note = 2'-O-methyl ribonucleotide
  modified_base 29: mod_base = OTHER; note = 2'-O-methyl ribonucleotide
  modified_base 30: mod_base = OTHER; note = 2'-O-methyl ribonucleotide
  modified_base 31: mod_base = OTHER; note = 2'-O-methyl ribonucleotide
  modified_base 32: mod_base = OTHER; note = 2'-O-methyl ribonucleotide
  modified_base 33: mod_base = OTHER; note = 2'-O-methyl ribonucleotide
  modified_base 34: mod_base = OTHER; note = 2'-O-methyl ribonucleotide
  modified_base 35: mod_base = OTHER; note = 2'-O-methyl ribonucleotide
  modified_base 36: mod_base = OTHER; note = 2'-O-methyl ribonucleotide
  modified_base 37: mod_base = OTHER; note = 2'-O-methyl ribonucleotide
  modified_base 38: mod_base = OTHER; note = 2'-O-methyl ribonucleotide
  modified_base 39: mod_base = OTHER; note = 2'-O-methyl ribonucleotide
  modified_base 40: mod_base = OTHER; note = 2'-O-methyl ribonucleotide
  modified_base 41: mod_base = OTHER; note = 2'-O-methyl ribonucleotide
  modified_base 42: mod_base = OTHER; note = 2'-O-methyl ribonucleotide
  modified_base 46: mod_base = OTHER; note = 2'-O-methyl ribonucleotide
  modified_base 48: mod_base = OTHER; note = 2'-O-methyl ribonucleotide
  modified_base 50: mod_base = OTHER; note = 2'-O-methyl ribonucleotide
  modified_base 52: mod_base = OTHER; note = 2'-O-methyl ribonucleotide
  modified_base 53: mod_base = OTHER; note = 2'-O-methyl ribonucleotide
  modified_base 54: mod_base = OTHER; note = 2'-O-methyl ribonucleotide
  modified_base 57: mod_base = OTHER; note = 2'-O-methyl ribonucleotide
  modified_base 61: mod_base = OTHER; note = 2'-O-methyl ribonucleotide
  modified_base 66: mod_base = OTHER; note = 2'-O-methyl ribonucleotide
  modified_base 67: mod_base = OTHER; note = 2'-O-methyl ribonucleotide
  modified_base 70: mod_base = OTHER; note = 2'-O-methyl ribonucleotide
  modified_base 71: mod_base = OTHER; note = 2'-O-methyl ribonucleotide
  modified_base 72: mod_base = OTHER; note = 2'-O-methyl ribonucleotide
  modified_base 74: mod_base = OTHER; note = 2'-O-methyl ribonucleotide
  modified_base 75: mod_base = OTHER; note = 2'-O-methyl ribonucleotide
  modified_base 76: mod_base = OTHER; note = 2'-O-methyl ribonucleotide
  modified_base 77: mod_base = OTHER; note = 2'-O-methyl ribonucleotide
  modified_base 78: mod_base = OTHER; note = 2'-O-methyl ribonucleotide
  modified_base 79: mod_base = OTHER; note = 2'-O-methyl ribonucleotide
  modified_base 80: mod_base = OTHER; note = 2'-O-methyl ribonucleotide
  modified_base 82: mod_base = OTHER; note = 2'-O-methyl ribonucleotide
  modified_base 83: mod_base = OTHER; note = 2'-O-methyl ribonucleotide
  modified_base 84: mod_base = OTHER; note = 2'-O-methyl ribonucleotide
  modified_base 85: mod_base = OTHER; note = 2'-O-methyl ribonucleotide
  modified_base 86: mod_base = OTHER; note = 2'-O-methyl ribonucleotide
  modified_base 87: mod_base = OTHER; note = 2'-O-methyl ribonucleotide
  modified_base 89: mod_base = OTHER; note = 2'-O-methyl ribonucleotide
  modified_base 92: mod_base = OTHER; note = 2'-O-methyl ribonucleotide
  modified_base 93: mod_base = OTHER; note = 2'-O-methyl ribonucleotide
  modified_base 94: mod_base = OTHER; note = 2'-O-methyl ribonucleotide
  modified_base 95: mod_base = OTHER; note = 2'-O-methyl ribonucleotide
  modified_base 96: mod_base = OTHER; note = 2'-O-methyl ribonucleotide
  modified_base 97: mod_base = OTHER; note = 2'-O-methyl ribonucleotide
  modified_base 98: mod_base = OTHER; note = 2'-O-methyl ribonucleotide
  modified_base 99: mod_base = OTHER; note = 2'-O-methyl ribonucleotide
  modified_base 100: mod_base = OTHER; note = 2'-O-methyl ribonucleotide
  modified_base 1..4: mod_base = OTHER; note = phosphorothioate linkage
  modified_base 25..26: mod_base = OTHER; note = phosphorothioate linkage
  modified_base 64..65: mod_base = OTHER; note = phosphorothioate linkage
  modified_base 97..100: mod_base = OTHER; note = phosphorothioate linkage

SEQ ID NO: 2523 - RNA, 103 nt, synthetic construct; identical to SEQ ID NO: 1700
  source 1..103: mol_type = other RNA
  modified_base 1: mod_base = OTHER; note = 2'-O-methyl ribonucleotide
  modified_base 2: mod_base = OTHER; note = 2'-O-methyl ribonucleotide
  modified_base 3: mod_base = OTHER; note = 2'-O-methyl ribonucleotide
  modified_base 21: mod_base = OTHER; note = 2'-O-methyl ribonucleotide
  modified_base 28: mod_base = OTHER; note = 2'-O-methyl ribonucleotide
  modified_base 29: mod_base = OTHER; note = 2'-O-methyl ribonucleotide
  modified_base 30: mod_base = OTHER; note = 2'-O-methyl ribonucleotide
  modified_base 31: mod_base = OTHER; note = 2'-O-methyl ribonucleotide
  modified_base 32: mod_base = OTHER; note = 2'-O-methyl ribonucleotide
  modified_base 33: mod_base = OTHER; note = 2'-O-methyl ribonucleotide
  modified_base 34: mod_base = OTHER; note = 2'-O-methyl ribonucleotide
  modified_base 35: mod_base = OTHER; note = 2'-O-methyl ribonucleotide
  modified_base 36: mod_base = OTHER; note = 2'-O-methyl ribonucleotide
  modified_base 37: mod_base = OTHER; note = 2'-O-methyl ribonucleotide
  modified_base 38: mod_base = OTHER; note = 2'-O-methyl ribonucleotide
  modified_base 39: mod_base = OTHER; note = 2'-O-methyl ribonucleotide
  modified_base 40: mod_base = OTHER; note = 2'-O-methyl ribonucleotide
  modified_base 41: mod_base = OTHER; note = 2'-O-methyl ribonucleotide
  modified_base 42: mod_base = OTHER; note = 2'-O-methyl ribonucleotide
  modified_base 46: mod_base = OTHER; note = 2'-O-methyl ribonucleotide
  modified_base 48: mod_base = OTHER; note = 2'-O-methyl ribonucleotide
  modified_base 50: mod_base = OTHER; note = 2'-O-methyl ribonucleotide
  modified_base 52: mod_base = OTHER; note = 2'-O-methyl ribonucleotide
  modified_base 53: mod_base = OTHER; note = 2'-O-methyl ribonucleotide
  modified_base 54: mod_base = OTHER; note = 2'-O-methyl ribonucleotide
  modified_base 55: mod_base = OTHER; note = 2'-O-methyl ribonucleotide
  modified_base 56: mod_base = OTHER; note = 2'-O-methyl ribonucleotide
  modified_base 57: mod_base = OTHER; note = 2'-O-methyl ribonucleotide
  modified_base 60: mod_base = OTHER; note = 2'-O-methyl ribonucleotide
  modified_base 61: mod_base = OTHER; note = 2'-O-methyl ribonucleotide
  modified_base 66: mod_base = OTHER; note = 2'-O-methyl ribonucleotide
  modified_base 67: mod_base = OTHER; note = 2'-O-methyl ribonucleotide
  modified_base 70: mod_base = OTHER; note = 2'-O-methyl ribonucleotide
  modified_base 71: mod_base = OTHER; note = 2'-O-methyl ribonucleotide
  modified_base 72: mod_base = OTHER; note = 2'-O-methyl ribonucleotide
  modified_base 74: mod_base = OTHER; note = 2'-O-methyl ribonucleotide
  modified_base 75: mod_base = OTHER; note = 2'-O-methyl ribonucleotide
  modified_base 76: mod_base = OTHER; note = 2'-O-methyl ribonucleotide
  modified_base 77: mod_base = OTHER; note = 2'-O-methyl ribonucleotide
  modified_base 78: mod_base = OTHER; note = 2'-O-methyl ribonucleotide
  modified_base 79: mod_base = OTHER; note = 2'-O-methyl ribonucleotide
  modified_base 80: mod_base = OTHER; note = 2'-O-methyl ribonucleotide
  modified_base 82: mod_base = OTHER; note = 2'-O-methyl ribonucleotide
  modified_base 83: mod_base = OTHER; note = 2'-O-methyl ribonucleotide
  modified_base 84: mod_base = OTHER; note = 2'-O-methyl ribonucleotide
  modified_base 85: mod_base = OTHER; note = 2'-O-methyl ribonucleotide
  modified_base 86: mod_base = OTHER; note = 2'-O-methyl ribonucleotide
  modified_base 87: mod_base = OTHER; note = 2'-O-methyl ribonucleotide
  modified_base 89: mod_base = OTHER; note = 2'-O-methyl ribonucleotide
  modified_base 92: mod_base = OTHER; note = 2'-O-methyl ribonucleotide
  modified_base 93: mod_base = OTHER; note = 2'-O-methyl ribonucleotide
  modified_base 94: mod_base = OTHER; note = 2'-O-methyl ribonucleotide
  modified_base 95: mod_base = OTHER; note = 2'-O-methyl ribonucleotide
  modified_base 96: mod_base = OTHER; note = 2'-O-methyl ribonucleotide
  modified_base 97: mod_base = OTHER; note = 2'-O-methyl ribonucleotide
  modified_base 98: mod_base = OTHER; note = 2'-O-methyl ribonucleotide
  modified_base 99: mod_base = OTHER; note = 2'-O-methyl ribonucleotide
  modified_base 100: mod_base = OTHER; note = 2'-O-methyl ribonucleotide
  modified_base 1..4: mod_base = OTHER; note = phosphorothioate linkage
  modified_base 25..26: mod_base = OTHER; note = phosphorothioate linkage
  modified_base 64..65: mod_base = OTHER; note = phosphorothioate linkage
  modified_base 97..100: mod_base = OTHER; note = phosphorothioate linkage

SEQ ID NO: 2524 - RNA, 103 nt, synthetic construct; identical to SEQ ID NO: 1700
  source 1..103: mol_type = other RNA
  modified_base 1: mod_base = OTHER; note = 2'-O-methyl ribonucleotide
  modified_base 2: mod_base = OTHER; note = 2'-O-methyl ribonucleotide
  modified_base 3: mod_base = OTHER; note = 2'-O-methyl ribonucleotide
  modified_base 21: mod_base = OTHER; note = 2'-O-methyl ribonucleotide
  modified_base 28: mod_base = OTHER; note = 2'-O-methyl ribonucleotide
  modified_base 29: mod_base = OTHER; note = 2'-O-methyl ribonucleotide
  modified_base 30: mod_base = OTHER; note = 2'-O-methyl ribonucleotide
  modified_base 31: mod_base = OTHER; note = 2'-O-methyl ribonucleotide
  modified_base 32: mod_base = OTHER; note = 2'-O-methyl ribonucleotide
  modified_base 33: mod_base = OTHER; note = 2'-O-methyl ribonucleotide
  modified_base 34: mod_base = OTHER; note = 2'-O-methyl ribonucleotide
  modified_base 35: mod_base = OTHER; note = 2'-O-methyl ribonucleotide
  modified_base 36: mod_base = OTHER; note = 2'-O-methyl ribonucleotide
  modified_base 37: mod_base = OTHER; note = 2'-O-methyl ribonucleotide
  modified_base 38: mod_base = OTHER; note = 2'-O-methyl ribonucleotide
  modified_base 39: mod_base = OTHER; note = 2'-O-methyl ribonucleotide
  modified_base 40: mod_base = OTHER; note = 2'-O-methyl ribonucleotide
  modified_base 41: mod_base = OTHER; note = 2'-O-methyl ribonucleotide
  modified_base 42: mod_base = OTHER; note = 2'-O-methyl ribonucleotide
  modified_base 46: mod_base = OTHER; note = 2'-O-methyl ribonucleotide
  modified_base 48: mod_base = OTHER; note = 2'-O-methyl ribonucleotide
  modified_base 50: mod_base = OTHER; note = 2'-O-methyl ribonucleotide
  modified_base 52: mod_base = OTHER; note = 2'-O-methyl ribonucleotide
  modified_base 53: mod_base = OTHER; note = 2'-O-methyl ribonucleotide
  modified_base 54: mod_base = OTHER; note = 2'-O-methyl ribonucleotide
  modified_base 57: mod_base = OTHER; note = 2'-O-methyl ribonucleotide
  modified_base 61: mod_base = OTHER; note = 2'-O-methyl ribonucleotide
  modified_base 66: mod_base = OTHER; note = 2'-O-methyl ribonucleotide
  modified_base 67: mod_base = OTHER; note = 2'-O-methyl ribonucleotide
  modified_base 70: mod_base = OTHER; note = 2'-O-methyl ribonucleotide
  modified_base 71: mod_base = OTHER; note = 2'-O-methyl ribonucleotide
  modified_base 72: mod_base = OTHER; note = 2'-O-methyl ribonucleotide
  modified_base 73: mod_base = OTHER; note = 2'-O-methyl ribonucleotide
  modified_base 74: mod_base = OTHER; note = 2'-O-methyl ribonucleotide
  modified_base 75: mod_base = OTHER; note = 2'-O-methyl ribonucleotide
  modified_base 76: mod_base = OTHER; note = 2'-O-methyl ribonucleotide
  modified_base 77: mod_base = OTHER; note = 2'-O-methyl ribonucleotide
  modified_base 78: mod_base = OTHER; note = 2'-O-methyl ribonucleotide
  modified_base 79: mod_base = OTHER; note = 2'-O-methyl ribonucleotide
  modified_base 80: mod_base = OTHER; note = 2'-O-methyl ribonucleotide
  modified_base 82: mod_base = OTHER; note = 2'-O-methyl ribonucleotide
  modified_base 83: mod_base = OTHER; note = 2'-O-methyl ribonucleotide
  modified_base 84: mod_base = OTHER; note = 2'-O-methyl ribonucleotide
  modified_base 85: mod_base = OTHER; note = 2'-O-methyl ribonucleotide
  modified_base 86: mod_base = OTHER; note = 2'-O-methyl ribonucleotide
  modified_base 87: mod_base = OTHER; note = 2'-O-methyl ribonucleotide
  modified_base 89: mod_base = OTHER; note = 2'-O-methyl ribonucleotide
  modified_base 92: mod_base = OTHER; note = 2'-O-methyl ribonucleotide
  modified_base 93: mod_base = OTHER; note = 2'-O-methyl ribonucleotide
  modified_base 94: mod_base = OTHER; note = 2'-O-methyl ribonucleotide
  modified_base 95: mod_base = OTHER; note = 2'-O-methyl ribonucleotide
  modified_base 96: mod_base = OTHER; note = 2'-O-methyl ribonucleotide
  modified_base 97: mod_base = OTHER; note = 2'-O-methyl ribonucleotide
  modified_base 98: mod_base = OTHER; note = 2'-O-methyl ribonucleotide
  modified_base 99: mod_base = OTHER; note = 2'-O-methyl ribonucleotide
  modified_base 100: mod_base = OTHER; note = 2'-O-methyl ribonucleotide
  modified_base 1..4: mod_base = OTHER; note = phosphorothioate linkage
  modified_base 25..26: mod_base = OTHER; note = phosphorothioate linkage
  modified_base 64..65: mod_base = OTHER; note = phosphorothioate linkage
  modified_base 97..100: mod_base = OTHER; note = phosphorothioate linkage

SEQ ID NO: 2525 - RNA, 103 nt, synthetic construct; identical to SEQ ID NO: 1700
  source 1..103: mol_type = other RNA
  modified_base 1: mod_base = OTHER; note = 2'-O-methyl ribonucleotide
  modified_base 2: mod_base = OTHER; note = 2'-O-methyl ribonucleotide
  modified_base 3: mod_base = OTHER; note = 2'-O-methyl ribonucleotide
  modified_base 21: mod_base = OTHER; note = 2'-O-methyl ribonucleotide
  modified_base 28: mod_base = OTHER; note = 2'-O-methyl ribonucleotide
  modified_base 29: mod_base = OTHER; note = 2'-O-methyl ribonucleotide
  modified_base 30: mod_base = OTHER; note = 2'-O-methyl ribonucleotide
  modified_base 31: mod_base = OTHER; note = 2'-O-methyl ribonucleotide
  modified_base 32: mod_base = OTHER; note = 2'-O-methyl ribonucleotide
  modified_base 33: mod_base = OTHER; note = 2'-O-methyl ribonucleotide
  modified_base 34: mod_base = OTHER; note = 2'-O-methyl ribonucleotide
  modified_base 35: mod_base = OTHER; note = 2'-O-methyl ribonucleotide
  modified_base 36: mod_base = OTHER; note = 2'-O-methyl ribonucleotide
  modified_base 37: mod_base = OTHER; note = 2'-O-methyl ribonucleotide
  modified_base 38: mod_base = OTHER; note = 2'-O-methyl ribonucleotide
  modified_base 39: mod_base = OTHER; note = 2'-O-methyl ribonucleotide
  modified_base 40: mod_base = OTHER; note = 2'-O-methyl ribonucleotide
  modified_base 41: mod_base = OTHER; note = 2'-O-methyl ribonucleotide
  modified_base 42: mod_base = OTHER; note = 2'-O-methyl ribonucleotide
  modified_base 46: mod_base = OTHER; note = 2'-O-methyl ribonucleotide
  modified_base 48: mod_base = OTHER; note = 2'-O-methyl ribonucleotide
  modified_base 50: mod_base = OTHER; note = 2'-O-methyl ribonucleotide
  modified_base 52: mod_base = OTHER; note = 2'-O-methyl ribonucleotide
  modified_base 53: mod_base = OTHER; note = 2'-O-methyl ribonucleotide
  modified_base 54: mod_base = OTHER; note = 2'-O-methyl ribonucleotide
  modified_base 57: mod_base = OTHER; note = 2'-O-methyl ribonucleotide
  modified_base 61: mod_base = OTHER; note = 2'-O-methyl ribonucleotide
  modified_base 66: mod_base = OTHER; note = 2'-O-methyl ribonucleotide
  modified_base 67: mod_base = OTHER; note = 2'-O-methyl ribonucleotide
  modified_base 70: mod_base = OTHER; note = 2'-O-methyl ribonucleotide
  modified_base 71: mod_base = OTHER; note = 2'-O-methyl ribonucleotide
  modified_base 72: mod_base = OTHER; note = 2'-O-methyl ribonucleotide
  modified_base 73: mod_base = OTHER; note = 2'-O-methyl ribonucleotide
  modified_base 74: mod_base = OTHER; note = 2'-O-methyl ribonucleotide
  modified_base 75: mod_base = OTHER; note = 2'-O-methyl ribonucleotide
  modified_base 76: mod_base = OTHER; note = 2'-O-methyl ribonucleotide
  modified_base 77: mod_base = OTHER; note = 2'-O-methyl ribonucleotide
  modified_base 78: mod_base = OTHER; note = 2'-O-methyl ribonucleotide
  modified_base 79: mod_base = OTHER; note = 2'-O-methyl ribonucleotide
  modified_base 80: mod_base = OTHER; note = 2'-O-methyl ribonucleotide
  modified_base 82: mod_base = OTHER; note = 2'-O-methyl ribonucleotide
  modified_base 83: mod_base = OTHER; note = 2'-O-methyl ribonucleotide
  modified_base 84: mod_base = OTHER; note = 2'-O-methyl ribonucleotide
  modified_base 85: mod_base = OTHER; note = 2'-O-methyl ribonucleotide
  modified_base 86: mod_base = OTHER; note = 2'-O-methyl ribonucleotide
  modified_base 87: mod_base = OTHER; note = 2'-O-methyl ribonucleotide
  modified_base 89: mod_base = OTHER; note = 2'-O-methyl ribonucleotide
  modified_base 91: mod_base = OTHER; note = 2'-O-methyl ribonucleotide
  modified_base 92: mod_base = OTHER; note = 2'-O-methyl ribonucleotide
  modified_base 93: mod_base = OTHER; note = 2'-O-methyl ribonucleotide
  modified_base 94: mod_base = OTHER; note = 2'-O-methyl ribonucleotide
  modified_base 95: mod_base = OTHER; note = 2'-O-methyl ribonucleotide
  modified_base 96: mod_base = OTHER; note = 2'-O-methyl ribonucleotide
  modified_base 97: mod_base = OTHER; note = 2'-O-methyl ribonucleotide
  modified_base 98: mod_base = OTHER; note = 2'-O-methyl ribonucleotide
  modified_base 99: mod_base = OTHER; note = 2'-O-methyl ribonucleotide
  modified_base 100: mod_base = OTHER; note = 2'-O-methyl ribonucleotide
  modified_base 1..4: mod_base = OTHER; note = phosphorothioate linkage
  modified_base 25..26: mod_base = OTHER; note = phosphorothioate linkage
  modified_base 64..65: mod_base = OTHER; note = phosphorothioate linkage
  modified_base 97..100: mod_base = OTHER; note = phosphorothioate linkage

SEQ ID NO: 2526 - RNA, 103 nt, synthetic construct; identical to SEQ ID NO: 1700
  source 1..103: mol_type = other RNA
  modified_base 1: mod_base = OTHER; note = 2'-O-methyl ribonucleotide
  modified_base 2: mod_base = OTHER; note = 2'-O-methyl ribonucleotide
  modified_base 3: mod_base = OTHER; note = 2'-O-methyl ribonucleotide
  modified_base 21: mod_base = OTHER; note = 2'-O-methyl ribonucleotide
  modified_base 28: mod_base = OTHER; note = 2'-O-methyl ribonucleotide
  modified_base 29: mod_base = OTHER; note = 2'-O-methyl ribonucleotide
  modified_base 30: mod_base = OTHER; note = 2'-O-methyl ribonucleotide
  modified_base 31: mod_base = OTHER; note = 2'-O-methyl ribonucleotide
  modified_base 32: mod_base = OTHER; note = 2'-O-methyl ribonucleotide
  modified_base 34: mod_base = OTHER; note = 2'-O-methyl ribonucleotide
  modified_base 35: mod_base = OTHER; note = 2'-O-methyl ribonucleotide
  modified_base 36: mod_base = OTHER; note = 2'-O-methyl ribonucleotide
  modified_base 37: mod_base = OTHER; note = 2'-O-methyl ribonucleotide
  modified_base 38: mod_base = OTHER; note = 2'-O-methyl ribonucleotide
  modified_base 39: mod_base = OTHER; note = 2'-O-methyl ribonucleotide
  modified_base 40: mod_base = OTHER; note = 2'-O-methyl ribonucleotide
  modified_base 41: mod_base = OTHER; note = 2'-O-methyl ribonucleotide
  modified_base 42: mod_base = OTHER; note = 2'-O-methyl ribonucleotide
  modified_base 46: mod_base = OTHER; note = 2'-O-methyl ribonucleotide
  modified_base 48: mod_base = OTHER; note = 2'-O-methyl ribonucleotide
  modified_base 50: mod_base = OTHER; note = 2'-O-methyl ribonucleotide
  modified_base 52: mod_base = OTHER; note = 2'-O-methyl ribonucleotide
  modified_base 53: mod_base = OTHER; note = 2'-O-methyl ribonucleotide
  modified_base 54: mod_base = OTHER; note = 2'-O-methyl ribonucleotide
  modified_base 57: mod_base = OTHER; note = 2'-O-methyl ribonucleotide
  modified_base 61: mod_base = OTHER; note = 2'-O-methyl ribonucleotide
  modified_base 66: mod_base = OTHER; note = 2'-O-methyl ribonucleotide
  modified_base 67: mod_base = OTHER; note = 2'-O-methyl ribonucleotide
  modified_base 70: mod_base = OTHER; note = 2'-O-methyl ribonucleotide
  modified_base 71: mod_base = OTHER; note = 2'-O-methyl ribonucleotide
  modified_base 72: mod_base = OTHER; note = 2'-O-methyl ribonucleotide
  modified_base 73: mod_base = OTHER; note = 2'-O-methyl ribonucleotide
  modified_base 74: mod_base = OTHER; note = 2'-O-methyl ribonucleotide
  modified_base 75: mod_base = OTHER; note = 2'-O-methyl ribonucleotide
  modified_base 76: mod_base = OTHER; note = 2'-O-methyl ribonucleotide
  modified_base 77: mod_base = OTHER; note = 2'-O-methyl ribonucleotide
  modified_base 78: mod_base = OTHER; note = 2'-O-methyl ribonucleotide
  modified_base 79: mod_base = OTHER; note = 2'-O-methyl ribonucleotide
  modified_base 80: mod_base = OTHER; note = 2'-O-methyl ribonucleotide
  modified_base 82: mod_base = OTHER; note = 2'-O-methyl ribonucleotide
  modified_base 83: mod_base = OTHER; note = 2'-O-methyl ribonucleotide
  modified_base 84: mod_base = OTHER; note = 2'-O-methyl ribonucleotide
  modified_base 85: mod_base = OTHER; note = 2'-O-methyl ribonucleotide
  modified_base 86: mod_base = OTHER; note = 2'-O-methyl ribonucleotide
  modified_base 87: mod_base = OTHER; note = 2'-O-methyl ribonucleotide
  modified_base 89: mod_base = OTHER; note = 2'-O-methyl ribonucleotide
  modified_base 92: mod_base = OTHER; note = 2'-O-methyl ribonucleotide
  modified_base 93: mod_base = OTHER; note = 2'-O-methyl ribonucleotide
  modified_base 94: mod_base = OTHER; note = 2'-O-methyl ribonucleotide
  modified_base 95: mod_base = OTHER; note = 2'-O-methyl ribonucleotide
  modified_base 96: mod_base = OTHER; note = 2'-O-methyl ribonucleotide
  modified_base 97: mod_base = OTHER; note = 2'-O-methyl ribonucleotide
  modified_base 98: mod_base = OTHER; note = 2'-O-methyl ribonucleotide
  modified_base 99: mod_base = OTHER; note = 2'-O-methyl ribonucleotide
  modified_base 100: mod_base = OTHER; note = 2'-O-methyl ribonucleotide
  modified_base 1..4: mod_base = OTHER; note = phosphorothioate linkage
  modified_base 25..26: mod_base = OTHER; note = phosphorothioate linkage
  modified_base 64..65: mod_base = OTHER; note = phosphorothioate linkage
  modified_base 97..100: mod_base = OTHER; note = phosphorothioate linkage

SEQ ID NO: 2527 - RNA, 103 nt, synthetic construct; identical to SEQ ID NO: 1700
  source 1..103: mol_type = other RNA
  modified_base 1: mod_base = OTHER; note = 2'-O-methyl ribonucleotide
  modified_base 2: mod_base = OTHER; note = 2'-O-methyl ribonucleotide
  modified_base 3: mod_base = OTHER; note = 2'-O-methyl ribonucleotide
  modified_base 21: mod_base = OTHER; note = 2'-O-methyl ribonucleotide
  modified_base 28: mod_base = OTHER; note = 2'-O-methyl ribonucleotide
  modified_base 29: mod_base = OTHER; note = 2'-O-methyl ribonucleotide
  modified_base 30: mod_base = OTHER; note = 2'-O-methyl ribonucleotide
  modified_base 31: mod_base = OTHER; note = 2'-O-methyl ribonucleotide
  modified_base 32: mod_base = OTHER; note = 2'-O-methyl ribonucleotide
  modified_base 34: mod_base = OTHER; note = 2'-O-methyl ribonucleotide
  modified_base 35: mod_base = OTHER; note = 2'-O-methyl ribonucleotide
  modified_base 36: mod_base = OTHER; note = 2'-O-methyl ribonucleotide
  modified_base 37: mod_base = OTHER; note = 2'-O-methyl ribonucleotide
  modified_base 38: mod_base = OTHER; note = 2'-O-methyl ribonucleotide
  modified_base 39: mod_base = OTHER; note = 2'-O-methyl ribonucleotide
  modified_base 40: mod_base = OTHER; note = 2'-O-methyl ribonucleotide
  modified_base 41: mod_base = OTHER; note = 2'-O-methyl ribonucleotide
  modified_base 42: mod_base = OTHER; note = 2'-O-methyl ribonucleotide
  modified_base 46: mod_base = OTHER; note = 2'-O-methyl ribonucleotide
  modified_base 48: mod_base = OTHER; note = 2'-O-methyl ribonucleotide
  modified_base 50: mod_base = OTHER; note = 2'-O-methyl ribonucleotide
  modified_base 52: mod_base = OTHER; note = 2'-O-methyl ribonucleotide
  modified_base 53: mod_base = OTHER; note = 2'-O-methyl ribonucleotide
  modified_base 54: mod_base = OTHER; note = 2'-O-methyl ribonucleotide
  modified_base 57: mod_base = OTHER; note = 2'-O-methyl ribonucleotide
  modified_base 61: mod_base = OTHER; note = 2'-O-methyl ribonucleotide
  modified_base 66: mod_base = OTHER; note = 2'-O-methyl ribonucleotide
  modified_base 67: mod_base = OTHER; note = 2'-O-methyl ribonucleotide
  modified_base 70: mod_base = OTHER; note = 2'-O-methyl ribonucleotide
  modified_base 71: mod_base = OTHER; note = 2'-O-methyl ribonucleotide
  modified_base 72: mod_base = OTHER; note = 2'-O-methyl ribonucleotide
  modified_base 73: mod_base = OTHER; note = 2'-O-methyl ribonucleotide
  modified_base 74: mod_base = OTHER; note = 2'-O-methyl ribonucleotide
  modified_base 75: mod_base = OTHER; note = 2'-O-methyl ribonucleotide
  modified_base 76: mod_base = OTHER; note = 2'-O-methyl ribonucleotide
  modified_base 77: mod_base = OTHER; note = 2'-O-methyl ribonucleotide
  modified_base 78: mod_base = OTHER; note = 2'-O-methyl ribonucleotide
  modified_base 79: mod_base = OTHER; note = 2'-O-methyl ribonucleotide
  modified_base 80: mod_base = OTHER; note = 2'-O-methyl ribonucleotide
  modified_base 82: mod_base = OTHER; note = 2'-O-methyl ribonucleotide
  modified_base 83: mod_base = OTHER; note = 2'-O-methyl ribonucleotide
  modified_base 84: mod_base = OTHER; note = 2'-O-methyl ribonucleotide
  modified_base 85: mod_base = OTHER; note = 2'-O-methyl ribonucleotide
  modified_base 86: mod_base = OTHER; note = 2'-O-methyl ribonucleotide
  modified_base 87: mod_base = OTHER; note = 2'-O-methyl ribonucleotide
  modified_base 89: mod_base = OTHER; note = 2'-O-methyl ribonucleotide
  modified_base 91: mod_base = OTHER; note = 2'-O-methyl ribonucleotide
  modified_base 92: mod_base = OTHER; note = 2'-O-methyl ribonucleotide
  modified_base 93: mod_base = OTHER; note = 2'-O-methyl ribonucleotide
  modified_base 94: mod_base = OTHER; note = 2'-O-methyl ribonucleotide
  modified_base 95: mod_base = OTHER; note = 2'-O-methyl ribonucleotide
  modified_base 96: mod_base = OTHER; note = 2'-O-methyl ribonucleotide
  modified_base 97: mod_base = OTHER; note = 2'-O-methyl ribonucleotide
  modified_base 98: mod_base = OTHER; note = 2'-O-methyl ribonucleotide
  modified_base 99: mod_base = OTHER; note = 2'-O-methyl ribonucleotide
  modified_base 100: mod_base = OTHER; note = 2'-O-methyl ribonucleotide
  modified_base 1..4: mod_base = OTHER; note = phosphorothioate linkage
  modified_base 25..26: mod_base = OTHER; note = phosphorothioate linkage
  modified_base 64..65: mod_base = OTHER; note = phosphorothioate linkage
  modified_base 97..100: mod_base = OTHER; note = phosphorothioate linkage

SEQ ID NO: 2528 - RNA, 103 nt, synthetic construct; identical to SEQ ID NO: 1700
  source 1..103: mol_type = other RNA
  modified_base 1: mod_base = OTHER; note = 2'-O-methyl ribonucleotide
  modified_base 2: mod_base = OTHER; note = 2'-O-methyl ribonucleotide
  modified_base 3: mod_base = OTHER; note = 2'-O-methyl ribonucleotide
  modified_base 21: mod_base = OTHER; note = 2'-O-methyl ribonucleotide
  modified_base 28: mod_base = OTHER; note = 2'-O-methyl ribonucleotide
  modified_base 29: mod_base = OTHER; note = 2'-O-methyl ribonucleotide
  modified_base 30: mod_base = OTHER; note = 2'-O-methyl ribonucleotide
  modified_base 31: mod_base = OTHER; note = 2'-O-methyl ribonucleotide
  modified_base 32: mod_base = OTHER; note = 2'-O-methyl ribonucleotide
  modified_base 34: mod_base = OTHER; note = 2'-O-methyl ribonucleotide
  modified_base 35: mod_base = OTHER; note = 2'-O-methyl ribonucleotide
  modified_base 36: mod_base = OTHER; note = 2'-O-methyl ribonucleotide
  modified_base 37: mod_base = OTHER; note = 2'-O-methyl ribonucleotide
  modified_base 38: mod_base = OTHER; note = 2'-O-methyl ribonucleotide
  modified_base 39: mod_base = OTHER; note = 2'-O-methyl ribonucleotide
  modified_base 40: mod_base = OTHER; note = 2'-O-methyl ribonucleotide
  modified_base 41: mod_base = OTHER; note = 2'-O-methyl ribonucleotide
  modified_base 42: mod_base = OTHER; note = 2'-O-methyl ribonucleotide
  modified_base 46: mod_base = OTHER; note = 2'-O-methyl ribonucleotide
  modified_base 48: mod_base = OTHER; note = 2'-O-methyl ribonucleotide
  modified_base 50: mod_base = OTHER; note = 2'-O-methyl ribonucleotide
  modified_base 52: mod_base = OTHER; note = 2'-O-methyl ribonucleotide
  modified_base 53: mod_base = OTHER; note = 2'-O-methyl ribonucleotide
  modified_base 54: mod_base = OTHER; note = 2'-O-methyl ribonucleotide
  modified_base 55: mod_base = OTHER; note = 2'-O-methyl ribonucleotide
  modified_base 56: mod_base = OTHER; note = 2'-O-methyl ribonucleotide
  modified_base 57: mod_base = OTHER; note = 2'-O-methyl ribonucleotide
  modified_base 60: mod_base = OTHER; note = 2'-O-methyl ribonucleotide
  modified_base 61: mod_base = OTHER; note = 2'-O-methyl ribonucleotide
  modified_base 66: mod_base = OTHER; note = 2'-O-methyl ribonucleotide
  modified_base 67: mod_base = OTHER; note = 2'-O-methyl ribonucleotide
  modified_base 70: mod_base = OTHER; note = 2'-O-methyl ribonucleotide
  modified_base 71: mod_base = OTHER; note = 2'-O-methyl ribonucleotide
  modified_base 72: mod_base = OTHER; note = 2'-O-methyl ribonucleotide
  modified_base 74: mod_base = OTHER; note = 2'-O-methyl ribonucleotide
  modified_base 75: mod_base = OTHER; note = 2'-O-methyl ribonucleotide
  modified_base 76: mod_base = OTHER; note = 2'-O-methyl ribonucleotide
  modified_base 77: mod_base = OTHER; note = 2'-O-methyl ribonucleotide
  modified_base 78: mod_base = OTHER; note = 2'-O-methyl ribonucleotide
  modified_base 79: mod_base = OTHER; note = 2'-O-methyl ribonucleotide
  modified_base 80: mod_base = OTHER; note = 2'-O-methyl ribonucleotide
  modified_base 82: mod_base = OTHER; note = 2'-O-methyl ribonucleotide
  modified_base 83: mod_base = OTHER; note = 2'-O-methyl ribonucleotide
  modified_base 84: mod_base = OTHER; note = 2'-O-methyl ribonucleotide
  modified_base 85: mod_base = OTHER; note = 2'-O-methyl ribonucleotide
  modified_base 86: mod_base = OTHER; note = 2'-O-methyl ribonucleotide
  modified_base 87: mod_base = OTHER; note = 2'-O-methyl ribonucleotide
  modified_base 89: mod_base = OTHER; note = 2'-O-methyl ribonucleotide
  modified_base 92: mod_base = OTHER; note = 2'-O-methyl ribonucleotide
  modified_base 93: mod_base = OTHER; note = 2'-O-methyl ribonucleotide
  modified_base 94: mod_base = OTHER; note = 2'-O-methyl ribonucleotide
  modified_base 95: mod_base = OTHER; note = 2'-O-methyl ribonucleotide
  modified_base 96: mod_base = OTHER; note = 2'-O-methyl ribonucleotide
  modified_base 97: mod_base = OTHER; note = 2'-O-methyl ribonucleotide
  modified_base 98: mod_base = OTHER; note = 2'-O-methyl ribonucleotide
  modified_base 99: mod_base = OTHER; note = 2'-O-methyl ribonucleotide
  modified_base 100: mod_base = OTHER; note = 2'-O-methyl ribonucleotide
  modified_base 1..4: mod_base = OTHER; note = phosphorothioate linkage
  modified_base 25..26: mod_base = OTHER; note = phosphorothioate linkage
  modified_base 64..65: mod_base = OTHER; note = phosphorothioate linkage
  modified_base 97..100: mod_base = OTHER; note = phosphorothioate linkage

SEQ ID NO: 2529 - RNA, 103 nt, synthetic construct; identical to SEQ ID NO: 1643
  source 1..103: mol_type = other RNA
  modified_base 1: mod_base = OTHER; note = 2'-O-methyl ribonucleotide
  modified_base 2: mod_base = OTHER; note = 2'-O-methyl ribonucleotide
  modified_base 3: mod_base = OTHER; note = 2'-O-methyl ribonucleotide
  modified_base 21: mod_base = OTHER; note = 2'-O-methyl ribonucleotide
  modified_base 28: mod_base = OTHER; note = 2'-O-methyl ribonucleotide
  modified_base 29: mod_base = OTHER; note = 2'-O-methyl ribonucleotide
  modified_base 30: mod_base = OTHER; note = 2'-O-methyl ribonucleotide
  modified_base 31: mod_base = OTHER; note = 2'-O-methyl ribonucleotide
  modified_base 32: mod_base = OTHER; note = 2'-O-methyl ribonucleotide
  modified_base 33: mod_base = OTHER; note = 2'-O-methyl ribonucleotide
  modified_base 34: mod_base = OTHER; note = 2'-O-methyl ribonucleotide
  modified_base 35: mod_base = OTHER; note = 2'-O-methyl ribonucleotide
  modified_base 36: mod_base = OTHER; note = 2'-O-methyl ribonucleotide
  modified_base 37: mod_base = OTHER; note = 2'-O-methyl ribonucleotide
  modified_base 38: mod_base = OTHER; note = 2'-O-methyl ribonucleotide
  modified_base 39: mod_base = OTHER; note = 2'-O-methyl ribonucleotide
  modified_base 40: mod_base = OTHER; note = 2'-O-methyl ribonucleotide
  modified_base 41: mod_base = OTHER; note = 2'-O-methyl ribonucleotide
  modified_base 42: mod_base = OTHER; note = 2'-O-methyl ribonucleotide
  modified_base 46: mod_base = OTHER; note = 2'-O-methyl ribonucleotide
  modified_base 48: mod_base = OTHER; note = 2'-O-methyl ribonucleotide
  modified_base 50: mod_base = OTHER; note = 2'-O-methyl ribonucleotide
  modified_base 52: mod_base = OTHER; note = 2'-O-methyl ribonucleotide
  modified_base 53: mod_base = OTHER; note = 2'-O-methyl ribonucleotide
  modified_base 54: mod_base = OTHER; note = 2'-O-methyl ribonucleotide
  modified_base 55: mod_base = OTHER; note = 2'-O-methyl ribonucleotide
  modified_base 56: mod_base = OTHER; note = 2'-O-methyl ribonucleotide
  modified_base 57: mod_base = OTHER; note = 2'-O-methyl ribonucleotide
  modified_base 60: mod_base = OTHER; note = 2'-O-methyl ribonucleotide
  modified_base 61: mod_base = OTHER; note = 2'-O-methyl ribonucleotide
  modified_base 66: mod_base = OTHER; note = 2'-O-methyl ribonucleotide
  modified_base 67: mod_base = OTHER; note = 2'-O-methyl ribonucleotide
  modified_base 70: mod_base = OTHER; note = 2'-O-methyl ribonucleotide
  modified_base 71: mod_base = OTHER; note = 2'-O-methyl ribonucleotide
  modified_base 72: mod_base = OTHER; note = 2'-O-methyl ribonucleotide
  modified_base 73: mod_base = OTHER; note = 2'-O-methyl ribonucleotide
  modified_base 74: mod_base = OTHER; note = 2'-O-methyl ribonucleotide
  modified_base 75: mod_base = OTHER; note = 2'-O-methyl ribonucleotide
  modified_base 76: mod_base = OTHER; note = 2'-O-methyl ribonucleotide
  modified_base 77: mod_base = OTHER; note = 2'-O-methyl ribonucleotide
  modified_base 78: mod_base = OTHER; note = 2'-O-methyl ribonucleotide
  modified_base 79: mod_base = OTHER; note = 2'-O-methyl ribonucleotide
  modified_base 80: mod_base = OTHER; note = 2'-O-methyl ribonucleotide
  modified_base 81: mod_base = OTHER; note = 2'-O-methyl ribonucleotide
  modified_base 83: mod_base = OTHER; note = 2'-O-methyl ribonucleotide
  modified_base 84: mod_base = OTHER; note = 2'-O-methyl ribonucleotide
  modified_base 85: mod_base = OTHER; note = 2'-O-methyl ribonucleotide
  modified_base 86: mod_base = OTHER; note = 2'-O-methyl ribonucleotide
  modified_base 87: mod_base = OTHER; note = 2'-O-methyl ribonucleotide
  modified_base 88: mod_base = OTHER; note = 2'-O-methyl ribonucleotide
  modified_base 89: mod_base = OTHER; note = 2'-O-methyl ribonucleotide
  modified_base 90: mod_base = OTHER; note = 2'-O-methyl ribonucleotide
  modified_base 91: mod_base = OTHER; note = 2'-O-methyl ribonucleotide
  modified_base 92: mod_base = OTHER; note = 2'-O-methyl ribonucleotide
  modified_base 93: mod_base = OTHER; note = 2'-O-methyl ribonucleotide
  modified_base 94: mod_base = OTHER; note = 2'-O-methyl ribonucleotide
  modified_base 95: mod_base = OTHER; note = 2'-O-methyl ribonucleotide
  modified_base 96: mod_base = OTHER; note = 2'-O-methyl ribonucleotide
  modified_base 97: mod_base = OTHER; note = 2'-O-methyl ribonucleotide
  modified_base 98: mod_base = OTHER; note = 2'-O-methyl ribonucleotide
  modified_base 99: mod_base = OTHER; note = 2'-O-methyl ribonucleotide
  modified_base 100: mod_base = OTHER; note = 2'-O-methyl ribonucleotide
  modified_base 1..4: mod_base = OTHER; note = phosphorothioate linkage
  modified_base 25..26: mod_base = OTHER; note = phosphorothioate linkage
  modified_base 45..46: mod_base = OTHER; note = phosphorothioate linkage
  modified_base 64..65: mod_base = OTHER; note = phosphorothioate linkage
  modified_base 97..100: mod_base = OTHER; note = phosphorothioate linkage

SEQ ID NO: 2530 - RNA, 103 nt, synthetic construct; identical to SEQ ID NO: 1643
  source 1..103: mol_type = other RNA
  modified_base 1: mod_base = OTHER; note = 2'-O-methyl ribonucleotide
  modified_base 2: mod_base = OTHER; note = 2'-O-methyl ribonucleotide
  modified_base 3: mod_base = OTHER; note = 2'-O-methyl ribonucleotide
  modified_base 21: mod_base = OTHER; note = 2'-O-methyl ribonucleotide
  modified_base 28: mod_base = OTHER; note = 2'-O-methyl ribonucleotide
  modified_base 29: mod_base = OTHER; note = 2'-O-methyl ribonucleotide
  modified_base 30: mod_base = OTHER; note = 2'-O-methyl ribonucleotide
  modified_base 31: mod_base = OTHER; note = 2'-O-methyl ribonucleotide
  modified_base 32: mod_base = OTHER; note = 2'-O-methyl ribonucleotide
  modified_base 34: mod_base = OTHER; note = 2'-O-methyl ribonucleotide
  modified_base 35: mod_base = OTHER; note = 2'-O-methyl ribonucleotide
  modified_base 36: mod_base = OTHER; note = 2'-O-methyl ribonucleotide
  modified_base 37: mod_base = OTHER; note = 2'-O-methyl ribonucleotide
  modified_base 38: mod_base = OTHER; note = 2'-O-methyl ribonucleotide
  modified_base 39: mod_base = OTHER; note = 2'-O-methyl ribonucleotide
  modified_base 40: mod_base = OTHER; note = 2'-O-methyl ribonucleotide
  modified_base 41: mod_base = OTHER; note = 2'-O-methyl ribonucleotide
  modified_base 42: mod_base = OTHER; note = 2'-O-methyl ribonucleotide
  modified_base 46: mod_base = OTHER; note = 2'-O-methyl ribonucleotide
  modified_base 48: mod_base = OTHER; note = 2'-O-methyl ribonucleotide
  modified_base 50: mod_base = OTHER; note = 2'-O-methyl ribonucleotide
  modified_base 52: mod_base = OTHER; note = 2'-O-methyl ribonucleotide
  modified_base 53: mod_base = OTHER; note = 2'-O-methyl ribonucleotide
  modified_base 54: mod_base = OTHER; note = 2'-O-methyl ribonucleotide
  modified_base 55: mod_base = OTHER; note = 2'-O-methyl ribonucleotide
  modified_base 56: mod_base = OTHER; note = 2'-O-methyl ribonucleotide
  modified_base 57: mod_base = OTHER; note = 2'-O-methyl ribonucleotide
  modified_base 60: mod_base = OTHER; note = 2'-O-methyl ribonucleotide
  modified_base 61: mod_base = OTHER; note = 2'-O-methyl ribonucleotide
  modified_base 66: mod_base = OTHER; note = 2'-O-methyl ribonucleotide
  modified_base 67: mod_base = OTHER; note = 2'-O-methyl ribonucleotide
  modified_base 70: mod_base = OTHER; note = 2'-O-methyl ribonucleotide
  modified_base 71: mod_base = OTHER; note = 2'-O-methyl ribonucleotide
  modified_base 72: mod_base = OTHER; note = 2'-O-methyl ribonucleotide
  modified_base 74: mod_base = OTHER; note = 2'-O-methyl ribonucleotide
  modified_base 75: mod_base = OTHER; note = 2'-O-methyl ribonucleotide
  modified_base 76: mod_base = OTHER; note = 2'-O-methyl ribonucleotide
  modified_base 77: mod_base = OTHER; note = 2'-O-methyl ribonucleotide
  modified_base 78: mod_base = OTHER; note = 2'-O-methyl ribonucleotide
  modified_base 79: mod_base = OTHER; note = 2'-O-methyl ribonucleotide
  modified_base 80: mod_base = OTHER; note = 2'-O-methyl ribonucleotide
  modified_base 81: mod_base = OTHER; note = 2'-O-methyl ribonucleotide
  modified_base 83: mod_base = OTHER; note = 2'-O-methyl ribonucleotide
  modified_base 84: mod_base = OTHER; note = 2'-O-methyl ribonucleotide
  modified_base 85: mod_base = OTHER; note = 2'-O-methyl ribonucleotide
  modified_base 86: mod_base = OTHER; note = 2'-O-methyl ribonucleotide
  modified_base 87: mod_base = OTHER; note = 2'-O-methyl ribonucleotide
  modified_base 88: mod_base = OTHER; note = 2'-O-methyl ribonucleotide
  modified_base 89: mod_base = OTHER; note = 2'-O-methyl ribonucleotide
  modified_base 90: mod_base = OTHER; note = 2'-O-methyl ribonucleotide
  modified_base 91: mod_base = OTHER; note = 2'-O-methyl ribonucleotide
  modified_base 92: mod_base = OTHER; note = 2'-O-methyl ribonucleotide
  modified_base 93: mod_base = OTHER; note = 2'-O-methyl ribonucleotide
  modified_base 94: mod_base = OTHER; note = 2'-O-methyl ribonucleotide
  modified_base 95: mod_base = OTHER; note = 2'-O-methyl ribonucleotide
  modified_base 96: mod_base = OTHER; note = 2'-O-methyl ribonucleotide
  modified_base 97: mod_base = OTHER; note = 2'-O-methyl ribonucleotide
  modified_base 98: mod_base = OTHER; note = 2'-O-methyl ribonucleotide
  modified_base 99: mod_base = OTHER; note = 2'-O-methyl ribonucleotide
  modified_base 100: mod_base = OTHER; note = 2'-O-methyl ribonucleotide
  modified_base 1..4: mod_base = OTHER; note = phosphorothioate linkage
  modified_base 25..26: mod_base = OTHER; note = phosphorothioate linkage
  modified_base 45..46: mod_base = OTHER; note = phosphorothioate linkage
  modified_base 64..65: mod_base = OTHER; note = phosphorothioate linkage
  modified_base 97..100: mod_base = OTHER; note = phosphorothioate linkage

SEQ ID NO: 2531 - RNA, 103 nt, synthetic construct; identical to SEQ ID NO: 1699
  source 1..103: mol_type = other RNA
  modified_base 1: mod_base = OTHER; note = 2'-O-methyl ribonucleotide
  modified_base 2: mod_base = OTHER; note = 2'-O-methyl ribonucleotide
  modified_base 3: mod_base = OTHER; note = 2'-O-methyl ribonucleotide
  modified_base 21: mod_base = OTHER; note = 2'-O-methyl ribonucleotide
  modified_base 28: mod_base = OTHER; note = 2'-O-methyl ribonucleotide
  modified_base 29: mod_base = OTHER; note = 2'-O-methyl ribonucleotide
  modified_base 30: mod_base = OTHER; note = 2'-O-methyl ribonucleotide
  modified_base 31: mod_base = OTHER; note = 2'-O-methyl ribonucleotide
  modified_base 32: mod_base = OTHER; note = 2'-O-methyl ribonucleotide
  modified_base 33: mod_base = OTHER; note = 2'-O-methyl ribonucleotide
  modified_base 34: mod_base = OTHER; note = 2'-O-methyl ribonucleotide
  modified_base 35: mod_base = OTHER; note = 2'-O-methyl ribonucleotide
  modified_base 36: mod_base = OTHER; note = 2'-O-methyl ribonucleotide
  modified_base 37: mod_base = OTHER; note = 2'-O-methyl ribonucleotide
  modified_base 38: mod_base = OTHER; note = 2'-O-methyl ribonucleotide
  modified_base 39: mod_base = OTHER; note = 2'-O-methyl ribonucleotide
  modified_base 40: mod_base = OTHER; note = 2'-O-methyl ribonucleotide
  modified_base 41: mod_base = OTHER; note = 2'-O-methyl ribonucleotide
  modified_base 42: mod_base = OTHER; note = 2'-O-methyl ribonucleotide
  modified_base 46: mod_base = OTHER; note = 2'-O-methyl ribonucleotide
  modified_base 48: mod_base = OTHER; note = 2'-O-methyl ribonucleotide
  modified_base 50: mod_base = OTHER; note = 2'-O-methyl ribonucleotide
  modified_base 52: mod_base = OTHER; note = 2'-O-methyl ribonucleotide
  modified_base 53: mod_base = OTHER; note = 2'-O-methyl ribonucleotide
  modified_base 54: mod_base = OTHER; note = 2'-O-methyl ribonucleotide
  modified_base 55: mod_base = OTHER; note = 2'-O-methyl ribonucleotide
  modified_base 56: mod_base = OTHER; note = 2'-O-methyl ribonucleotide
  modified_base 57: mod_base = OTHER; note = 2'-O-methyl ribonucleotide
  modified_base 60: mod_base = OTHER; note = 2'-O-methyl ribonucleotide
  modified_base 61: mod_base = OTHER; note = 2'-O-methyl ribonucleotide
  modified_base 66: mod_base = OTHER; note = 2'-O-methyl ribonucleotide
  modified_base 67: mod_base = OTHER; note = 2'-O-methyl ribonucleotide
  modified_base 70: mod_base = OTHER; note = 2'-O-methyl ribonucleotide
  modified_base 71: mod_base = OTHER; note = 2'-O-methyl ribonucleotide
  modified_base 72: mod_base = OTHER; note = 2'-O-methyl ribonucleotide
  modified_base 73: mod_base = OTHER; note = 2'-O-methyl ribonucleotide
  modified_base 74: mod_base = OTHER; note = 2'-O-methyl ribonucleotide
  modified_base 75: mod_base = OTHER; note = 2'-O-methyl ribonucleotide
  modified_base 76: mod_base = OTHER; note = 2'-O-methyl ribonucleotide
  modified_base 77: mod_base = OTHER; note = 2'-O-methyl ribonucleotide
  modified_base 78: mod_base = OTHER; note = 2'-O-methyl ribonucleotide
  modified_base 79: mod_base = OTHER; note = 2'-O-methyl ribonucleotide
  modified_base 80: mod_base = OTHER; note = 2'-O-methyl ribonucleotide
  modified_base 81: mod_base = OTHER; note = 2'-O-methyl ribonucleotide
  modified_base 83: mod_base = OTHER; note = 2'-O-methyl ribonucleotide
  modified_base 84: mod_base = OTHER; note = 2'-O-methyl ribonucleotide
  modified_base 85: mod_base = OTHER; note = 2'-O-methyl ribonucleotide
  modified_base 86: mod_base = OTHER; note = 2'-O-methyl ribonucleotide
  modified_base 87: mod_base = OTHER; note = 2'-O-methyl ribonucleotide
  modified_base 88: mod_base = OTHER; note = 2'-O-methyl ribonucleotide
  modified_base 89: mod_base = OTHER; note = 2'-O-methyl ribonucleotide
  modified_base 90: mod_base = OTHER; note = 2'-O-methyl ribonucleotide
  modified_base 91: mod_base = OTHER; note = 2'-O-methyl ribonucleotide
  modified_base 92: mod_base = OTHER; note = 2'-O-methyl ribonucleotide
  modified_base 93: mod_base = OTHER; note = 2'-O-methyl ribonucleotide
  modified_base 94: mod_base = OTHER; note = 2'-O-methyl ribonucleotide
  modified_base 95: mod_base = OTHER; note = 2'-O-methyl ribonucleotide
  modified_base 96: mod_base = OTHER; note = 2'-O-methyl ribonucleotide
  modified_base 97: mod_base = OTHER; note = 2'-O-methyl ribonucleotide
  modified_base 98: mod_base = OTHER; note = 2'-O-methyl ribonucleotide
  modified_base 99: mod_base = OTHER; note = 2'-O-methyl ribonucleotide
  modified_base 100: mod_base = OTHER; note = 2'-O-methyl ribonucleotide
  modified_base 1..4: mod_base = OTHER; note = phosphorothioate linkage
  modified_base 25..26: mod_base = OTHER; note = phosphorothioate linkage
  modified_base 45..46: mod_base = OTHER; note = phosphorothioate linkage
  modified_base 64..65: mod_base = OTHER; note = phosphorothioate linkage
  modified_base 97..100: mod_base = OTHER; note = phosphorothioate linkage

SEQ ID NO: 2532 - RNA, 103 nt, synthetic construct; identical to SEQ ID NO: 1699
  source 1..103: mol_type = other RNA
  modified_base 1: mod_base = OTHER; note = 2'-O-methyl ribonucleotide
  modified_base 2: mod_base = OTHER; note = 2'-O-methyl ribonucleotide
  modified_base 3: mod_base = OTHER; note = 2'-O-methyl ribonucleotide
  modified_base 21: mod_base = OTHER; note = 2'-O-methyl ribonucleotide
  modified_base 28: mod_base = OTHER; note = 2'-O-methyl ribonucleotide
  modified_base 29: mod_base = OTHER; note = 2'-O-methyl ribonucleotide
  modified_base 30: mod_base = OTHER; note = 2'-O-methyl ribonucleotide
  modified_base 31: mod_base = OTHER; note = 2'-O-methyl ribonucleotide
  modified_base 32: mod_base = OTHER; note = 2'-O-methyl ribonucleotide
  modified_base 34: mod_base = OTHER; note = 2'-O-methyl ribonucleotide
  modified_base 35: mod_base = OTHER; note = 2'-O-methyl ribonucleotide
  modified_base 36: mod_base = OTHER; note = 2'-O-methyl ribonucleotide
  modified_base 37: mod_base = OTHER; note = 2'-O-methyl ribonucleotide
  modified_base 38: mod_base = OTHER; note = 2'-O-methyl ribonucleotide
  modified_base 39: mod_base = OTHER; note = 2'-O-methyl ribonucleotide
  modified_base 40: mod_base = OTHER; note = 2'-O-methyl ribonucleotide
  modified_base 41: mod_base = OTHER; note = 2'-O-methyl ribonucleotide
  modified_base 42: mod_base = OTHER; note = 2'-O-methyl ribonucleotide
  modified_base 46: mod_base = OTHER; note = 2'-O-methyl ribonucleotide
  modified_base 48: mod_base = OTHER; note = 2'-O-methyl ribonucleotide
  modified_base 50: mod_base = OTHER; note = 2'-O-methyl ribonucleotide
  modified_base 52: mod_base = OTHER; note = 2'-O-methyl ribonucleotide
  modified_base 53: mod_base = OTHER; note = 2'-O-methyl ribonucleotide
  modified_base 54: mod_base = OTHER; note = 2'-O-methyl ribonucleotide
  modified_base 55: mod_base = OTHER; note = 2'-O-methyl ribonucleotide
  modified_base 56: mod_base = OTHER; note = 2'-O-methyl ribonucleotide
  modified_base 57: mod_base = OTHER; note = 2'-O-methyl ribonucleotide
  modified_base 60: mod_base = OTHER; note = 2'-O-methyl ribonucleotide
  modified_base 61: mod_base = OTHER; note = 2'-O-methyl ribonucleotide
  modified_base 66: mod_base = OTHER; note = 2'-O-methyl ribonucleotide
  modified_base 67: mod_base = OTHER; note = 2'-O-methyl ribonucleotide
  modified_base 70: mod_base = OTHER; note = 2'-O-methyl ribonucleotide
  modified_base 71: mod_base = OTHER; note = 2'-O-methyl ribonucleotide
  modified_base 72: mod_base = OTHER; note = 2'-O-methyl ribonucleotide
  modified_base 74: mod_base = OTHER; note = 2'-O-methyl ribonucleotide
  modified_base 75: mod_base = OTHER; note = 2'-O-methyl ribonucleotide
  modified_base 76: mod_base = OTHER; note = 2'-O-methyl ribonucleotide
  modified_base 77: mod_base = OTHER; note = 2'-O-methyl ribonucleotide
  modified_base 78: mod_base = OTHER; note = 2'-O-methyl ribonucleotide
  modified_base 79: mod_base = OTHER; note = 2'-O-methyl ribonucleotide
  modified_base 80: mod_base = OTHER; note = 2'-O-methyl ribonucleotide
  modified_base 81: mod_base = OTHER; note = 2'-O-methyl ribonucleotide
  modified_base 83: mod_base = OTHER; note = 2'-O-methyl ribonucleotide
  modified_base 84: mod_base = OTHER; note = 2'-O-methyl ribonucleotide
  modified_base 85: mod_base = OTHER; note = 2'-O-methyl ribonucleotide
  modified_base 86: mod_base = OTHER; note = 2'-O-methyl ribonucleotide
  modified_base 87: mod_base = OTHER; note = 2'-O-methyl ribonucleotide
  modified_base 88: mod_base = OTHER; note = 2'-O-methyl ribonucleotide
  modified_base 89: mod_base = OTHER; note = 2'-O-methyl ribonucleotide
  modified_base 90: mod_base = OTHER; note = 2'-O-methyl ribonucleotide
  modified_base 91: mod_base = OTHER; note = 2'-O-methyl ribonucleotide
  modified_base 92: mod_base = OTHER; note = 2'-O-methyl ribonucleotide
  modified_base 93: mod_base = OTHER; note = 2'-O-methyl ribonucleotide
  modified_base 94: mod_base = OTHER; note = 2'-O-methyl ribonucleotide
  modified_base 95: mod_base = OTHER; note = 2'-O-methyl ribonucleotide
  modified_base 96: mod_base = OTHER; note = 2'-O-methyl ribonucleotide
  modified_base 97: mod_base = OTHER; note = 2'-O-methyl ribonucleotide
  modified_base 98: mod_base = OTHER; note = 2'-O-methyl ribonucleotide
  modified_base 99: mod_base = OTHER; note = 2'-O-methyl ribonucleotide
  modified_base 100: mod_base = OTHER; note = 2'-O-methyl ribonucleotide
  modified_base 1..4: mod_base = OTHER; note = phosphorothioate linkage
  modified_base 25..26: mod_base = OTHER; note = phosphorothioate linkage
  modified_base 45..46: mod_base = OTHER; note = phosphorothioate linkage
  modified_base 64..65: mod_base = OTHER; note = phosphorothioate linkage
  modified_base 97..100: mod_base = OTHER; note = phosphorothioate linkage

SEQ ID NO: 2533 - RNA, 103 nt, synthetic construct; identical to SEQ ID NO: 1700
  source 1..103: mol_type = other RNA
  modified_base 1: mod_base = OTHER; note = 2'-O-methyl ribonucleotide
  modified_base 2: mod_base = OTHER; note = 2'-O-methyl ribonucleotide
  modified_base 3: mod_base = OTHER; note = 2'-O-methyl ribonucleotide
  modified_base 21: mod_base = OTHER; note = 2'-O-methyl ribonucleotide
  modified_base 28: mod_base = OTHER; note = 2'-O-methyl ribonucleotide
  modified_base 29: mod_base = OTHER; note = 2'-O-methyl ribonucleotide
  modified_base 30: mod_base = OTHER; note = 2'-O-methyl ribonucleotide
  modified_base 31: mod_base = OTHER; note = 2'-O-methyl ribonucleotide
  modified_base 32: mod_base = OTHER; note = 2'-O-methyl ribonucleotide
  modified_base 33: mod_base = OTHER; note = 2'-O-methyl ribonucleotide
  modified_base 34: mod_base = OTHER; note = 2'-O-methyl ribonucleotide
  modified_base 35: mod_base = OTHER; note = 2'-O-methyl ribonucleotide
  modified_base 36: mod_base = OTHER; note = 2'-O-methyl ribonucleotide
  modified_base 37: mod_base = OTHER; note = 2'-O-methyl ribonucleotide
  modified_base 38: mod_base = OTHER; note = 2'-O-methyl ribonucleotide
  modified_base 39: mod_base = OTHER; note = 2'-O-methyl ribonucleotide
  modified_base 40: mod_base = OTHER; note = 2'-O-methyl ribonucleotide
  modified_base 41: mod_base = OTHER; note = 2'-O-methyl ribonucleotide
  modified_base 42: mod_base = OTHER; note = 2'-O-methyl ribonucleotide
  modified_base 46: mod_base = OTHER; note = 2'-O-methyl ribonucleotide
  modified_base 48: mod_base = OTHER; note = 2'-O-methyl ribonucleotide
  modified_base 50: mod_base = OTHER; note = 2'-O-methyl ribonucleotide
  modified_base 52: mod_base = OTHER; note = 2'-O-methyl ribonucleotide
  modified_base 53: mod_base = OTHER; note = 2'-O-methyl ribonucleotide
  modified_base 54: mod_base = OTHER; note = 2'-O-methyl ribonucleotide
  modified_base 57: mod_base = OTHER; note = 2'-O-methyl ribonucleotide
  modified_base 61: mod_base = OTHER; note = 2'-O-methyl ribonucleotide
  modified_base 66: mod_base = OTHER; note = 2'-O-methyl ribonucleotide
  modified_base 67: mod_base = OTHER; note = 2'-O-methyl ribonucleotide
  modified_base 70: mod_base = OTHER; note = 2'-O-methyl ribonucleotide
  modified_base 71: mod_base = OTHER; note = 2'-O-methyl ribonucleotide
  modified_base 72: mod_base = OTHER; note = 2'-O-methyl ribonucleotide
  modified_base 74: mod_base = OTHER; note = 2'-O-methyl ribonucleotide
  modified_base 75: mod_base = OTHER; note = 2'-O-methyl ribonucleotide
  modified_base 76: mod_base = OTHER; note = 2'-O-methyl ribonucleotide
  modified_base 77: mod_base = OTHER; note = 2'-O-methyl ribonucleotide
  modified_base 78: mod_base = OTHER; note = 2'-O-methyl ribonucleotide
  modified_base 79: mod_base = OTHER; note = 2'-O-methyl ribonucleotide
  modified_base 80: mod_base = OTHER; note = 2'-O-methyl ribonucleotide
  modified_base 82: mod_base = OTHER; note = 2'-O-methyl ribonucleotide
  modified_base 83: mod_base = OTHER; note = 2'-O-methyl ribonucleotide
  modified_base 84: mod_base = OTHER; note = 2'-O-methyl ribonucleotide
  modified_base 85: mod_base = OTHER; note = 2'-O-methyl ribonucleotide
  modified_base 86: mod_base = OTHER; note = 2'-O-methyl ribonucleotide
  modified_base 87: mod_base = OTHER; note = 2'-O-methyl ribonucleotide
  modified_base 89: mod_base = OTHER; note = 2'-O-methyl ribonucleotide
  modified_base 92: mod_base = OTHER; note = 2'-O-methyl ribonucleotide
  modified_base 93: mod_base = OTHER; note = 2'-O-methyl ribonucleotide
  modified_base 94: mod_base = OTHER; note = 2'-O-methyl ribonucleotide
  modified_base 95: mod_base = OTHER; note = 2'-O-methyl ribonucleotide
  modified_base 96: mod_base = OTHER; note = 2'-O-methyl ribonucleotide
  modified_base 97: mod_base = OTHER; note = 2'-O-methyl ribonucleotide
  modified_base 98: mod_base = OTHER; note = 2'-O-methyl ribonucleotide
  modified_base 99: mod_base = OTHER; note = 2'-O-methyl ribonucleotide
  modified_base 100: mod_base = OTHER; note = 2'-O-methyl ribonucleotide
  modified_base 1..4: mod_base = OTHER; note = phosphorothioate linkage
  modified_base 25..26: mod_base = OTHER; note = phosphorothioate linkage
  modified_base 45..46: mod_base = OTHER; note = phosphorothioate linkage
  modified_base 64..65: mod_base = OTHER; note = phosphorothioate linkage
  modified_base 97..100: mod_base = OTHER; note = phosphorothioate linkage

SEQ ID NO: 2534 - RNA, 103 nt, synthetic construct; identical to SEQ ID NO: 1700
  source 1..103: mol_type = other RNA
  modified_base 1: mod_base = OTHER; note = 2'-O-methyl ribonucleotide
  modified_base 2: mod_base = OTHER; note = 2'-O-methyl ribonucleotide
  modified_base 3: mod_base = OTHER; note = 2'-O-methyl ribonucleotide
  modified_base 21: mod_base = OTHER; note = 2'-O-methyl ribonucleotide
  modified_base 28: mod_base = OTHER; note = 2'-O-methyl ribonucleotide
  modified_base 29: mod_base = OTHER; note = 2'-O-methyl ribonucleotide
  modified_base 30: mod_base = OTHER; note = 2'-O-methyl ribonucleotide
  modified_base 31: mod_base = OTHER; note = 2'-O-methyl ribonucleotide
  modified_base 32: mod_base = OTHER; note = 2'-O-methyl ribonucleotide
  modified_base 33: mod_base = OTHER; note = 2'-O-methyl ribonucleotide
  modified_base 34: mod_base = OTHER; note = 2'-O-methyl ribonucleotide
  modified_base 35: mod_base = OTHER; note = 2'-O-methyl ribonucleotide
  modified_base 36: mod_base = OTHER; note = 2'-O-methyl ribonucleotide
  modified_base 37: mod_base = OTHER; note = 2'-O-methyl ribonucleotide
  modified_base 38: mod_base = OTHER; note = 2'-O-methyl ribonucleotide
  modified_base 39: mod_base = OTHER; note = 2'-O-methyl ribonucleotide
  modified_base 40: mod_base = OTHER; note = 2'-O-methyl ribonucleotide
  modified_base 41: mod_base = OTHER; note = 2'-O-methyl ribonucleotide
  modified_base 42: mod_base = OTHER; note = 2'-O-methyl ribonucleotide
  modified_base 46: mod_base = OTHER; note = 2'-O-methyl ribonucleotide
  modified_base 48: mod_base = OTHER; note = 2'-O-methyl ribonucleotide
  modified_base 50: mod_base = OTHER; note = 2'-O-methyl ribonucleotide
  modified_base 52: mod_base = OTHER; note = 2'-O-methyl ribonucleotide
  modified_base 53: mod_base = OTHER; note = 2'-O-methyl ribonucleotide
  modified_base 54: mod_base = OTHER; note = 2'-O-methyl ribonucleotide
  modified_base 55: mod_base = OTHER; note = 2'-O-methyl ribonucleotide
  modified_base 56: mod_base = OTHER; note = 2'-O-methyl ribonucleotide
  modified_base 57: mod_base = OTHER; note = 2'-O-methyl ribonucleotide
  modified_base 60: mod_base = OTHER; note = 2'-O-methyl ribonucleotide
  modified_base 61: mod_base = OTHER; note = 2'-O-methyl ribonucleotide
  modified_base 66: mod_base = OTHER; note = 2'-O-methyl ribonucleotide
  modified_base 67: mod_base = OTHER; note = 2'-O-methyl ribonucleotide
  modified_base 70: mod_base = OTHER; note = 2'-O-methyl ribonucleotide
  modified_base 71: mod_base = OTHER; note = 2'-O-methyl ribonucleotide
  modified_base 72: mod_base = OTHER; note = 2'-O-methyl ribonucleotide
  modified_base 74: mod_base = OTHER; note = 2'-O-methyl ribonucleotide
  modified_base 75: mod_base = OTHER; note = 2'-O-methyl ribonucleotide
  modified_base 76: mod_base = OTHER; note = 2'-O-methyl ribonucleotide
  modified_base 77: mod_base = OTHER; note = 2'-O-methyl ribonucleotide
  modified_base 78: mod_base = OTHER; note = 2'-O-methyl ribonucleotide
  modified_base 79: mod_base = OTHER; note = 2'-O-methyl ribonucleotide
  modified_base 80: mod_base = OTHER; note = 2'-O-methyl ribonucleotide
  modified_base 82: mod_base = OTHER; note = 2'-O-methyl ribonucleotide
  modified_base 83: mod_base = OTHER; note = 2'-O-methyl ribonucleotide
  modified_base 84: mod_base = OTHER; note = 2'-O-methyl ribonucleotide
  modified_base 85: mod_base = OTHER; note = 2'-O-methyl ribonucleotide
  modified_base 86: mod_base = OTHER; note = 2'-O-methyl ribonucleotide
  modified_base 87: mod_base = OTHER; note = 2'-O-methyl ribonucleotide
  modified_base 89: mod_base = OTHER; note = 2'-O-methyl ribonucleotide
  modified_base 92: mod_base = OTHER; note = 2'-O-methyl ribonucleotide
  modified_base 93: mod_base = OTHER; note = 2'-O-methyl ribonucleotide
  modified_base 94: mod_base = OTHER; note = 2'-O-methyl ribonucleotide
  modified_base 95: mod_base = OTHER; note = 2'-O-methyl ribonucleotide
  modified_base 96: mod_base = OTHER; note = 2'-O-methyl ribonucleotide
  modified_base 97: mod_base = OTHER; note = 2'-O-methyl ribonucleotide
  modified_base 98: mod_base = OTHER; note = 2'-O-methyl ribonucleotide
  modified_base 99: mod_base = OTHER; note = 2'-O-methyl ribonucleotide
  modified_base 100: mod_base = OTHER; note = 2'-O-methyl ribonucleotide
  modified_base 1..4: mod_base = OTHER; note = phosphorothioate linkage
  modified_base 25..26: mod_base = OTHER; note = phosphorothioate linkage
  modified_base 45..46: mod_base = OTHER; note = phosphorothioate linkage
  modified_base 64..65: mod_base = OTHER; note = phosphorothioate linkage
  modified_base 97..100: mod_base = OTHER; note = phosphorothioate linkage

SEQ ID NO: 2535 - RNA, 103 nt, synthetic construct; identical to SEQ ID NO: 1700
  source 1..103: mol_type = other RNA
  modified_base 1: mod_base = OTHER; note = 2'-O-methyl ribonucleotide
  modified_base 2: mod_base = OTHER; note = 2'-O-methyl ribonucleotide
  modified_base 3: mod_base = OTHER; note = 2'-O-methyl ribonucleotide
  modified_base 21: mod_base = OTHER; note = 2'-O-methyl ribonucleotide
  modified_base 28: mod_base = OTHER; note = 2'-O-methyl ribonucleotide
  modified_base 29: mod_base = OTHER; note = 2'-O-methyl ribonucleotide
  modified_base 30: mod_base = OTHER; note = 2'-O-methyl ribonucleotide
  modified_base 31: mod_base = OTHER; note = 2'-O-methyl ribonucleotide
  modified_base 32: mod_base = OTHER; note = 2'-O-methyl ribonucleotide
  modified_base 33: mod_base = OTHER; note = 2'-O-methyl ribonucleotide
  modified_base 34: mod_base = OTHER; note = 2'-O-methyl ribonucleotide
  modified_base 35: mod_base = OTHER; note = 2'-O-methyl ribonucleotide
  modified_base 36: mod_base = OTHER; note = 2'-O-methyl ribonucleotide
  modified_base 37: mod_base = OTHER; note = 2'-O-methyl ribonucleotide
  modified_base 38: mod_base = OTHER; note = 2'-O-methyl ribonucleotide
  modified_base 39: mod_base = OTHER; note = 2'-O-methyl ribonucleotide
  modified_base 40: mod_base = OTHER; note = 2'-O-methyl ribonucleotide
  modified_base 41: mod_base = OTHER; note = 2'-O-methyl ribonucleotide
  modified_base 42: mod_base = OTHER; note = 2'-O-methyl ribonucleotide
  modified_base 46: mod_base = OTHER; note = 2'-O-methyl ribonucleotide
  modified_base 48: mod_base = OTHER; note = 2'-O-methyl ribonucleotide
  modified_base 50: mod_base = OTHER; note = 2'-O-methyl ribonucleotide
  modified_base 52: mod_base = OTHER; note = 2'-O-methyl ribonucleotide
  modified_base 53: mod_base = OTHER; note = 2'-O-methyl ribonucleotide
  modified_base 54: mod_base = OTHER; note = 2'-O-methyl ribonucleotide
  modified_base 57: mod_base = OTHER; note = 2'-O-methyl ribonucleotide
  modified_base 61: mod_base = OTHER; note = 2'-O-methyl ribonucleotide
  modified_base 66: mod_base = OTHER; note = 2'-O-methyl ribonucleotide
  modified_base 67: mod_base = OTHER; note = 2'-O-methyl ribonucleotide
  modified_base 70: mod_base = OTHER; note = 2'-O-methyl ribonucleotide
  modified_base 71: mod_base = OTHER; note = 2'-O-methyl ribonucleotide
  modified_base 72: mod_base = OTHER; note = 2'-O-methyl ribonucleotide
  modified_base 73: mod_base = OTHER; note = 2'-O-methyl ribonucleotide
  modified_base 74: mod_base = OTHER; note = 2'-O-methyl ribonucleotide
  modified_base 75: mod_base = OTHER; note = 2'-O-methyl ribonucleotide
  modified_base 76: mod_base = OTHER; note = 2'-O-methyl ribonucleotide
  modified_base 77: mod_base = OTHER; note = 2'-O-methyl ribonucleotide
  modified_base 78: mod_base = OTHER; note = 2'-O-methyl ribonucleotide
  modified_base 79: mod_base = OTHER; note = 2'-O-methyl ribonucleotide
  modified_base 80: mod_base = OTHER; note = 2'-O-methyl ribonucleotide
  modified_base 82: mod_base = OTHER; note = 2'-O-methyl ribonucleotide
  modified_base 83: mod_base = OTHER; note = 2'-O-methyl ribonucleotide
  modified_base 84: mod_base = OTHER; note = 2'-O-methyl ribonucleotide
  modified_base 85: mod_base = OTHER; note = 2'-O-methyl ribonucleotide
  modified_base 86: mod_base = OTHER; note = 2'-O-methyl ribonucleotide
  modified_base 87: mod_base = OTHER; note = 2'-O-methyl ribonucleotide
  modified_base 89: mod_base = OTHER; note = 2'-O-methyl ribonucleotide
  modified_base 92: mod_base = OTHER; note = 2'-O-methyl ribonucleotide
  modified_base 93: mod_base = OTHER; note = 2'-O-methyl ribonucleotide
  modified_base 94: mod_base = OTHER; note = 2'-O-methyl ribonucleotide
  modified_base 95: mod_base = OTHER; note = 2'-O-methyl ribonucleotide
  modified_base 96: mod_base = OTHER; note = 2'-O-methyl ribonucleotide
  modified_base 97: mod_base = OTHER; note = 2'-O-methyl ribonucleotide
  modified_base 98: mod_base = OTHER; note = 2'-O-methyl ribonucleotide
  modified_base 99: mod_base = OTHER; note = 2'-O-methyl ribonucleotide
  modified_base 100: mod_base = OTHER; note = 2'-O-methyl ribonucleotide
  modified_base 1..4: mod_base = OTHER; note = phosphorothioate linkage
  modified_base 25..26: mod_base = OTHER; note = phosphorothioate linkage
  modified_base 45..46: mod_base = OTHER; note = phosphorothioate linkage
  modified_base 64..65: mod_base = OTHER; note = phosphorothioate linkage
  modified_base 97..100: mod_base = OTHER; note = phosphorothioate linkage

SEQ ID NO: 2536 - RNA, 103 nt, synthetic construct; identical to SEQ ID NO: 1700
  source 1..103: mol_type = other RNA
  modified_base 1: mod_base = OTHER; note = 2'-O-methyl ribonucleotide
  modified_base 2: mod_base = OTHER; note = 2'-O-methyl ribonucleotide
  modified_base 3: mod_base = OTHER; note = 2'-O-methyl ribonucleotide
  modified_base 21: mod_base = OTHER; note = 2'-O-methyl ribonucleotide
  modified_base 28: mod_base = OTHER; note = 2'-O-methyl ribonucleotide
  modified_base 29: mod_base = OTHER; note = 2'-O-methyl ribonucleotide
  modified_base 30: mod_base = OTHER; note = 2'-O-methyl ribonucleotide
  modified_base 31: mod_base = OTHER; note = 2'-O-methyl ribonucleotide
  modified_base 32: mod_base = OTHER; note = 2'-O-methyl ribonucleotide
  modified_base 33: mod_base = OTHER; note = 2'-O-methyl ribonucleotide
  modified_base 34: mod_base = OTHER; note = 2'-O-methyl ribonucleotide
  modified_base 35: mod_base = OTHER; note = 2'-O-methyl ribonucleotide
  modified_base 36: mod_base = OTHER; note = 2'-O-methyl ribonucleotide
  modified_base 37: mod_base = OTHER; note = 2'-O-methyl ribonucleotide
  modified_base 38: mod_base = OTHER; note = 2'-O-methyl ribonucleotide
  modified_base 39: mod_base = OTHER; note = 2'-O-methyl ribonucleotide
  modified_base 40: mod_base = OTHER; note = 2'-O-methyl ribonucleotide
  modified_base 41: mod_base = OTHER; note = 2'-O-methyl ribonucleotide
  modified_base 42: mod_base = OTHER; note = 2'-O-methyl ribonucleotide
  modified_base 46: mod_base = OTHER; note = 2'-O-methyl ribonucleotide
  modified_base 48: mod_base = OTHER; note = 2'-O-methyl ribonucleotide
  modified_base 50: mod_base = OTHER; note = 2'-O-methyl ribonucleotide
  modified_base 52: mod_base = OTHER; note = 2'-O-methyl ribonucleotide
  modified_base 53: mod_base = OTHER; note = 2'-O-methyl ribonucleotide
  modified_base 54: mod_base = OTHER; note = 2'-O-methyl ribonucleotide
  modified_base 57: mod_base = OTHER; note = 2'-O-methyl ribonucleotide
  modified_base 61: mod_base = OTHER; note = 2'-O-methyl ribonucleotide
  modified_base 66: mod_base = OTHER; note = 2'-O-methyl ribonucleotide
  modified_base 67: mod_base = OTHER; note = 2'-O-methyl ribonucleotide
  modified_base 70: mod_base = OTHER; note = 2'-O-methyl ribonucleotide
  modified_base 71: mod_base = OTHER; note = 2'-O-methyl ribonucleotide
  modified_base 72: mod_base = OTHER; note = 2'-O-methyl ribonucleotide
  modified_base 73: mod_base = OTHER; note = 2'-O-methyl ribonucleotide
  modified_base 74: mod_base = OTHER; note = 2'-O-methyl ribonucleotide
  modified_base 75: mod_base = OTHER; note = 2'-O-methyl ribonucleotide
  modified_base 76: mod_base = OTHER; note = 2'-O-methyl ribonucleotide
  modified_base 77: mod_base = OTHER; note = 2'-O-methyl ribonucleotide
  modified_base 78: mod_base = OTHER; note = 2'-O-methyl ribonucleotide
  modified_base 79: mod_base = OTHER; note = 2'-O-methyl ribonucleotide
  modified_base 80: mod_base = OTHER; note = 2'-O-methyl ribonucleotide
  modified_base 82: mod_base = OTHER; note = 2'-O-methyl ribonucleotide
  modified_base 83: mod_base = OTHER; note = 2'-O-methyl ribonucleotide
  modified_base 84: mod_base = OTHER; note = 2'-O-methyl ribonucleotide
  modified_base 85: mod_base = OTHER; note = 2'-O-methyl ribonucleotide
  modified_base 86: mod_base = OTHER; note = 2'-O-methyl ribonucleotide
  modified_base 87: mod_base = OTHER; note = 2'-O-methyl ribonucleotide
  modified_base 89: mod_base = OTHER; note = 2'-O-methyl ribonucleotide
  modified_base 91: mod_base = OTHER; note = 2'-O-methyl ribonucleotide
  modified_base 92: mod_base = OTHER; note = 2'-O-methyl ribonucleotide
  modified_base 93: mod_base = OTHER; note = 2'-O-methyl ribonucleotide
  modified_base 94: mod_base = OTHER; note = 2'-O-methyl ribonucleotide
  modified_base 95: mod_base = OTHER; note = 2'-O-methyl ribonucleotide
  modified_base 96: mod_base = OTHER; note = 2'-O-methyl ribonucleotide
  modified_base 97: mod_base = OTHER; note = 2'-O-methyl ribonucleotide
  modified_base 98: mod_base = OTHER; note = 2'-O-methyl ribonucleotide
  modified_base 99: mod_base = OTHER; note = 2'-O-methyl ribonucleotide
  modified_base 100: mod_base = OTHER; note = 2'-O-methyl ribonucleotide
  modified_base 1..4: mod_base = OTHER; note = phosphorothioate linkage
  modified_base 25..26: mod_base = OTHER; note = phosphorothioate linkage
  modified_base 45..46: mod_base = OTHER; note = phosphorothioate linkage
  modified_base 64..65: mod_base = OTHER; note = phosphorothioate linkage
  modified_base 97..100: mod_base = OTHER; note = phosphorothioate linkage

SEQ ID NO: 2537 - RNA, 103 nt, synthetic construct; identical to SEQ ID NO: 1700
  source 1..103: mol_type = other RNA
  modified_base 1: mod_base = OTHER; note = 2'-O-methyl ribonucleotide
  modified_base 2: mod_base = OTHER; note = 2'-O-methyl ribonucleotide
  modified_base 3: mod_base = OTHER; note = 2'-O-methyl ribonucleotide
  modified_base 21: mod_base = OTHER; note = 2'-O-methyl ribonucleotide
  modified_base 28: mod_base = OTHER; note = 2'-O-methyl ribonucleotide
  modified_base 29: mod_base = OTHER; note = 2'-O-methyl ribonucleotide
  modified_base 30: mod_base = OTHER; note = 2'-O-methyl ribonucleotide
  modified_base 31: mod_base = OTHER; note = 2'-O-methyl ribonucleotide
  modified_base 32: mod_base = OTHER; note = 2'-O-methyl ribonucleotide
  modified_base 34: mod_base = OTHER; note = 2'-O-methyl ribonucleotide
  modified_base 35: mod_base = OTHER; note = 2'-O-methyl ribonucleotide
  modified_base 36: mod_base = OTHER; note = 2'-O-methyl ribonucleotide
  modified_base 37: mod_base = OTHER; note = 2'-O-methyl ribonucleotide
  modified_base 38: mod_base = OTHER; note = 2'-O-methyl ribonucleotide
  modified_base 39: mod_base = OTHER; note = 2'-O-methyl ribonucleotide
  modified_base 40: mod_base = OTHER; note = 2'-O-methyl ribonucleotide
  modified_base 41: mod_base = OTHER; note = 2'-O-methyl ribonucleotide
  modified_base 42: mod_base = OTHER; note = 2'-O-methyl ribonucleotide
  modified_base 46: mod_base = OTHER; note = 2'-O-methyl ribonucleotide
  modified_base 48: mod_base = OTHER; note = 2'-O-methyl ribonucleotide
  modified_base 50: mod_base = OTHER; note = 2'-O-methyl ribonucleotide
  modified_base 52: mod_base = OTHER; note = 2'-O-methyl ribonucleotide
  modified_base 53: mod_base = OTHER; note = 2'-O-methyl ribonucleotide
  modified_base 54: mod_base = OTHER; note = 2'-O-methyl ribonucleotide
  modified_base 57: mod_base = OTHER; note = 2'-O-methyl ribonucleotide
  modified_base 61: mod_base = OTHER; note = 2'-O-methyl ribonucleotide
  modified_base 66: mod_base = OTHER; note = 2'-O-methyl ribonucleotide
  modified_base 67: mod_base = OTHER; note = 2'-O-methyl ribonucleotide
  modified_base 70: mod_base = OTHER; note = 2'-O-methyl ribonucleotide
  modified_base 71: mod_base = OTHER; note = 2'-O-methyl ribonucleotide
  modified_base 72: mod_base = OTHER; note = 2'-O-methyl ribonucleotide
  modified_base 73: mod_base = OTHER; note = 2'-O-methyl ribonucleotide
  modified_base 74: mod_base = OTHER; note = 2'-O-methyl ribonucleotide
  modified_base 75: mod_base = OTHER; note = 2'-O-methyl ribonucleotide
  modified_base 76: mod_base = OTHER; note = 2'-O-methyl ribonucleotide
  modified_base 77: mod_base = OTHER; note = 2'-O-methyl ribonucleotide
  modified_base 78: mod_base = OTHER; note = 2'-O-methyl ribonucleotide
  modified_base 79: mod_base = OTHER; note = 2'-O-methyl ribonucleotide
  modified_base 80: mod_base = OTHER; note = 2'-O-methyl ribonucleotide
  modified_base 82: mod_base = OTHER; note = 2'-O-methyl ribonucleotide
  modified_base 83: mod_base = OTHER; note = 2'-O-methyl ribonucleotide
  modified_base 84: mod_base = OTHER; note = 2'-O-methyl ribonucleotide
  modified_base 85: mod_base = OTHER; note = 2'-O-methyl ribonucleotide
  modified_base 86: mod_base = OTHER; note = 2'-O-methyl ribonucleotide
  modified_base 87: mod_base = OTHER; note = 2'-O-methyl ribonucleotide
  modified_base 89: mod_base = OTHER; note = 2'-O-methyl ribonucleotide
  modified_base 92: mod_base = OTHER; note = 2'-O-methyl ribonucleotide
  modified_base 93: mod_base = OTHER; note = 2'-O-methyl ribonucleotide
  modified_base 94: mod_base = OTHER; note = 2'-O-methyl ribonucleotide
  modified_base 95: mod_base = OTHER; note = 2'-O-methyl ribonucleotide
  modified_base 96: mod_base = OTHER; note = 2'-O-methyl ribonucleotide
  modified_base 97: mod_base = OTHER; note = 2'-O-methyl ribonucleotide
  modified_base 98: mod_base = OTHER; note = 2'-O-methyl ribonucleotide
  modified_base 99: mod_base = OTHER; note = 2'-O-methyl ribonucleotide
  modified_base 100: mod_base = OTHER; note = 2'-O-methyl ribonucleotide
  modified_base 1..4: mod_base = OTHER; note = phosphorothioate linkage
  modified_base 25..26: mod_base = OTHER; note = phosphorothioate linkage
  modified_base 45..46: mod_base = OTHER; note = phosphorothioate linkage
  modified_base 64..65: mod_base = OTHER; note = phosphorothioate linkage
  modified_base 97..100: mod_base = OTHER; note = phosphorothioate linkage

SEQ ID NO: 2538 - RNA, 103 nt, synthetic construct; identical to SEQ ID NO: 1700
  source 1..103: mol_type = other RNA
  modified_base 1: mod_base = OTHER; note = 2'-O-methyl ribonucleotide
  modified_base 2: mod_base = OTHER; note = 2'-O-methyl ribonucleotide
  modified_base 3: mod_base = OTHER; note = 2'-O-methyl ribonucleotide
  modified_base 21: mod_base = OTHER; note = 2'-O-methyl ribonucleotide
  modified_base 28: mod_base = OTHER; note = 2'-O-methyl ribonucleotide
  modified_base 29: mod_base = OTHER; note = 2'-O-methyl ribonucleotide
  modified_base 30: mod_base = OTHER; note = 2'-O-methyl ribonucleotide
  modified_base 31: mod_base = OTHER; note = 2'-O-methyl ribonucleotide
  modified_base 32: mod_base = OTHER; note = 2'-O-methyl ribonucleotide
  modified_base 34: mod_base = OTHER; note = 2'-O-methyl ribonucleotide
  modified_base 35: mod_base = OTHER; note = 2'-O-methyl ribonucleotide
  modified_base 36: mod_base = OTHER; note = 2'-O-methyl ribonucleotide
  modified_base 37: mod_base = OTHER; note = 2'-O-methyl ribonucleotide
  modified_base 38: mod_base = OTHER; note = 2'-O-methyl ribonucleotide
  modified_base 39: mod_base = OTHER; note = 2'-O-methyl ribonucleotide
  modified_base 40: mod_base = OTHER; note = 2'-O-methyl ribonucleotide
  modified_base 41: mod_base = OTHER; note = 2'-O-methyl ribonucleotide
  modified_base 42: mod_base = OTHER; note = 2'-O-methyl ribonucleotide
  modified_base 46: mod_base = OTHER; note = 2'-O-methyl ribonucleotide
  modified_base 48: mod_base = OTHER; note = 2'-O-methyl ribonucleotide
  modified_base 50: mod_base = OTHER; note = 2'-O-methyl ribonucleotide
  modified_base 52: mod_base = OTHER; note = 2'-O-methyl ribonucleotide
  modified_base 53: mod_base = OTHER; note = 2'-O-methyl ribonucleotide
  modified_base 54: mod_base = OTHER; note = 2'-O-methyl ribonucleotide
  modified_base 57: mod_base = OTHER; note = 2'-O-methyl ribonucleotide
  modified_base 61: mod_base = OTHER; note = 2'-O-methyl ribonucleotide
  modified_base 66: mod_base = OTHER; note = 2'-O-methyl ribonucleotide
  modified_base 67: mod_base = OTHER; note = 2'-O-methyl ribonucleotide
  modified_base 70: mod_base = OTHER; note = 2'-O-methyl ribonucleotide
  modified_base 71: mod_base = OTHER; note = 2'-O-methyl ribonucleotide
  modified_base 72: mod_base = OTHER; note = 2'-O-methyl ribonucleotide
  modified_base 73: mod_base = OTHER; note = 2'-O-methyl ribonucleotide
  modified_base 74: mod_base = OTHER; note = 2'-O-methyl ribonucleotide
  modified_base 75: mod_base = OTHER; note = 2'-O-methyl ribonucleotide
  modified_base 76: mod_base = OTHER; note = 2'-O-methyl ribonucleotide
  modified_base 77: mod_base = OTHER; note = 2'-O-methyl ribonucleotide
  modified_base 78: mod_base = OTHER; note = 2'-O-methyl ribonucleotide
  modified_base 79: mod_base = OTHER; note = 2'-O-methyl ribonucleotide
  modified_base 80: mod_base = OTHER; note = 2'-O-methyl ribonucleotide
  modified_base 82: mod_base = OTHER; note = 2'-O-methyl ribonucleotide
  modified_base 83: mod_base = OTHER; note = 2'-O-methyl ribonucleotide
  modified_base 84: mod_base = OTHER; note = 2'-O-methyl ribonucleotide
  modified_base 85: mod_base = OTHER; note = 2'-O-methyl ribonucleotide
  modified_base 86: mod_base = OTHER; note = 2'-O-methyl ribonucleotide
  modified_base 87: mod_base = OTHER; note = 2'-O-methyl ribonucleotide
  modified_base 89: mod_base = OTHER; note = 2'-O-methyl ribonucleotide
  modified_base 91: mod_base = OTHER; note = 2'-O-methyl ribonucleotide
  modified_base 92: mod_base = OTHER; note = 2'-O-methyl ribonucleotide
  modified_base 93: mod_base = OTHER; note = 2'-O-methyl ribonucleotide
  modified_base 94: mod_base = OTHER; note = 2'-O-methyl ribonucleotide
  modified_base 95: mod_base = OTHER; note = 2'-O-methyl ribonucleotide
  modified_base 96: mod_base = OTHER; note = 2'-O-methyl ribonucleotide
  modified_base 97: mod_base = OTHER; note = 2'-O-methyl ribonucleotide
  modified_base 98: mod_base = OTHER; note = 2'-O-methyl ribonucleotide
  modified_base 99: mod_base = OTHER; note = 2'-O-methyl ribonucleotide
  modified_base 100: mod_base = OTHER; note = 2'-O-methyl ribonucleotide
  modified_base 1..4: mod_base = OTHER; note = phosphorothioate linkage
  modified_base 25..26: mod_base = OTHER; note = phosphorothioate linkage
  modified_base 45..46: mod_base = OTHER; note = phosphorothioate linkage
  modified_base 64..65: mod_base = OTHER; note = phosphorothioate linkage
  modified_base 97..100: mod_base = OTHER; note = phosphorothioate linkage

SEQ ID NO: 2539 - RNA, 103 nt, synthetic construct; identical to SEQ ID NO: 1700
  source 1..103: mol_type = other RNA
  modified_base 1: mod_base = OTHER; note = 2'-O-methyl ribonucleotide
  modified_base 2: mod_base = OTHER; note = 2'-O-methyl ribonucleotide
  modified_base 3: mod_base = OTHER; note = 2'-O-methyl ribonucleotide
  modified_base 21: mod_base = OTHER; note = 2'-O-methyl ribonucleotide
  modified_base 28: mod_base = OTHER; note = 2'-O-methyl ribonucleotide
  modified_base 29: mod_base = OTHER; note = 2'-O-methyl ribonucleotide
  modified_base 30: mod_base = OTHER; note = 2'-O-methyl ribonucleotide
  modified_base 31: mod_base = OTHER; note = 2'-O-methyl ribonucleotide
  modified_base 32: mod_base = OTHER; note = 2'-O-methyl ribonucleotide
  modified_base 34: mod_base = OTHER; note = 2'-O-methyl ribonucleotide
  modified_base 35: mod_base = OTHER; note = 2'-O-methyl ribonucleotide
  modified_base 36: mod_base = OTHER; note = 2'-O-methyl ribonucleotide
  modified_base 37: mod_base = OTHER; note = 2'-O-methyl ribonucleotide
  modified_base 38: mod_base = OTHER; note = 2'-O-methyl ribonucleotide
  modified_base 39: mod_base = OTHER; note = 2'-O-methyl ribonucleotide
  modified_base 40: mod_base = OTHER; note = 2'-O-methyl ribonucleotide
  modified_base 41: mod_base = OTHER; note = 2'-O-methyl ribonucleotide
  modified_base 42: mod_base = OTHER; note = 2'-O-methyl ribonucleotide
  modified_base 46: mod_base = OTHER; note = 2'-O-methyl ribonucleotide
  modified_base 48: mod_base = OTHER; note = 2'-O-methyl ribonucleotide
  modified_base 50: mod_base = OTHER; note = 2'-O-methyl ribonucleotide
  modified_base 52: mod_base = OTHER; note = 2'-O-methyl ribonucleotide
  modified_base 53: mod_base = OTHER; note = 2'-O-methyl ribonucleotide
  modified_base 54: mod_base = OTHER; note = 2'-O-methyl ribonucleotide
  modified_base 55: mod_base = OTHER; note = 2'-O-methyl ribonucleotide
  modified_base 56: mod_base = OTHER; note = 2'-O-methyl ribonucleotide
  modified_base 57: mod_base = OTHER; note = 2'-O-methyl ribonucleotide
  modified_base 60: mod_base = OTHER; note = 2'-O-methyl ribonucleotide
  modified_base 61: mod_base = OTHER; note = 2'-O-methyl ribonucleotide
  modified_base 66: mod_base = OTHER; note = 2'-O-methyl ribonucleotide
  modified_base 67: mod_base = OTHER; note = 2'-O-methyl ribonucleotide
  modified_base 70: mod_base = OTHER; note = 2'-O-methyl ribonucleotide
  modified_base 71: mod_base = OTHER; note = 2'-O-methyl ribonucleotide
  modified_base 72: mod_base = OTHER; note = 2'-O-methyl ribonucleotide
  modified_base 74: mod_base = OTHER; note = 2'-O-methyl ribonucleotide
  modified_base 75: mod_base = OTHER; note = 2'-O-methyl ribonucleotide
  modified_base 76: mod_base = OTHER; note = 2'-O-methyl ribonucleotide
  modified_base 77: mod_base = OTHER; note = 2'-O-methyl ribonucleotide
  modified_base 78: mod_base = OTHER; note = 2'-O-methyl ribonucleotide
  modified_base 79: mod_base = OTHER; note = 2'-O-methyl ribonucleotide
  modified_base 80: mod_base = OTHER; note = 2'-O-methyl ribonucleotide
  modified_base 82: mod_base = OTHER; note = 2'-O-methyl ribonucleotide
  modified_base 83: mod_base = OTHER; note = 2'-O-methyl ribonucleotide
  modified_base 84: mod_base = OTHER; note = 2'-O-methyl ribonucleotide
  modified_base 85: mod_base = OTHER; note = 2'-O-methyl ribonucleotide
  modified_base 86: mod_base = OTHER; note = 2'-O-methyl ribonucleotide
  modified_base 87: mod_base = OTHER; note = 2'-O-methyl ribonucleotide
  modified_base 89: mod_base = OTHER; note = 2'-O-methyl ribonucleotide
  modified_base 92: mod_base = OTHER; note = 2'-O-methyl ribonucleotide
  modified_base 93: mod_base = OTHER; note = 2'-O-methyl ribonucleotide
  modified_base 94: mod_base = OTHER; note = 2'-O-methyl ribonucleotide
  modified_base 95: mod_base = OTHER; note = 2'-O-methyl ribonucleotide
  modified_base 96: mod_base = OTHER; note = 2'-O-methyl ribonucleotide
  modified_base 97: mod_base = OTHER; note = 2'-O-methyl ribonucleotide
  modified_base 98: mod_base = OTHER; note = 2'-O-methyl ribonucleotide
  modified_base 99: mod_base = OTHER; note = 2'-O-methyl ribonucleotide
  modified_base 100: mod_base = OTHER; note = 2'-O-methyl ribonucleotide
  modified_base 1..4: mod_base = OTHER; note = phosphorothioate linkage
  modified_base 25..26: mod_base = OTHER; note = phosphorothioate linkage
  modified_base 45..46: mod_base = OTHER; note = phosphorothioate linkage
  modified_base 64..65: mod_base = OTHER; note = phosphorothioate linkage
  modified_base 97..100: mod_base = OTHER; note = phosphorothioate linkage

SEQ ID NO: 2540 - RNA, 103 nt, synthetic construct; identical to SEQ ID NO: 1700
  source 1..103: mol_type = other RNA
  modified_base 1: mod_base = OTHER; note = 2'-O-methyl ribonucleotide
  modified_base 2: mod_base = OTHER; note = 2'-O-methyl ribonucleotide
  modified_base 3: mod_base = OTHER; note = 2'-O-methyl ribonucleotide
  modified_base 21: mod_base = OTHER; note = 2'-O-methyl ribonucleotide
  modified_base 28: mod_base = OTHER; note = 2'-O-methyl ribonucleotide
  modified_base 29: mod_base = OTHER; note = 2'-O-methyl ribonucleotide
  modified_base 30: mod_base = OTHER; note = 2'-O-methyl ribonucleotide
  modified_base 31: mod_base = OTHER; note = 2'-O-methyl ribonucleotide
  modified_base 32: mod_base = OTHER; note = 2'-O-methyl ribonucleotide
  modified_base 33: mod_base = OTHER; note = 2'-O-methyl ribonucleotide
  modified_base 34: mod_base = OTHER; note = 2'-O-methyl ribonucleotide
  modified_base 35: mod_base = OTHER; note = 2'-O-methyl ribonucleotide
  modified_base 36: mod_base = OTHER; note = 2'-O-methyl ribonucleotide
  modified_base 37: mod_base = OTHER; note = 2'-O-methyl ribonucleotide
  modified_base 38: mod_base = OTHER; note = 2'-O-methyl ribonucleotide
  modified_base 39: mod_base = OTHER; note = 2'-O-methyl ribonucleotide
  modified_base 40: mod_base = OTHER; note = 2'-O-methyl ribonucleotide
  modified_base 41: mod_base = OTHER; note = 2'-O-methyl ribonucleotide
  modified_base 42: mod_base = OTHER; note = 2'-O-methyl ribonucleotide
  modified_base 46: mod_base = OTHER; note = 2'-O-methyl ribonucleotide
  modified_base 48: mod_base = OTHER; note = 2'-O-methyl ribonucleotide
  modified_base 50: mod_base = OTHER; note = 2'-O-methyl ribonucleotide
  modified_base 52: mod_base = OTHER; note = 2'-O-methyl ribonucleotide
  modified_base 53: mod_base = OTHER; note = 2'-O-methyl ribonucleotide
  modified_base 54: mod_base = OTHER; note = 2'-O-methyl ribonucleotide
  modified_base 55: mod_base = OTHER; note = 2'-O-methyl ribonucleotide
  modified_base 56: mod_base = OTHER; note = 2'-O-methyl ribonucleotide
  modified_base 57: mod_base = OTHER; note = 2'-O-methyl ribonucleotide
  modified_base 60: mod_base = OTHER; note = 2'-O-methyl ribonucleotide
  modified_base 61: mod_base = OTHER; note = 2'-O-methyl ribonucleotide
  modified_base 66: mod_base = OTHER; note = 2'-O-methyl ribonucleotide
  modified_base 67: mod_base = OTHER; note = 2'-O-methyl ribonucleotide
  modified_base 70: mod_base = OTHER; note = 2'-O-methyl ribonucleotide
  modified_base 71: mod_base = OTHER; note = 2'-O-methyl ribonucleotide
  modified_base 72: mod_base = OTHER; note = 2'-O-methyl ribonucleotide
  modified_base 73: mod_base = OTHER; note = 2'-O-methyl ribonucleotide
  modified_base 74: mod_base = OTHER; note = 2'-O-methyl ribonucleotide
  modified_base 75: mod_base = OTHER; note = 2'-O-methyl ribonucleotide
  modified_base 76: mod_base = OTHER; note = 2'-O-methyl ribonucleotide
  modified_base 77: mod_base = OTHER; note = 2'-O-methyl ribonucleotide
  modified_base 78: mod_base = OTHER; note = 2'-O-methyl ribonucleotide
  modified_base 79: mod_base = OTHER; note = 2'-O-methyl ribonucleotide
  modified_base 80: mod_base = OTHER; note = 2'-O-methyl ribonucleotide
  modified_base 81: mod_base = OTHER; note = 2'-O-methyl ribonucleotide
  modified_base 83: mod_base = OTHER; note = 2'-O-methyl ribonucleotide
  modified_base 84: mod_base = OTHER; note = 2'-O-methyl ribonucleotide
  modified_base 85: mod_base = OTHER; note = 2'-O-methyl ribonucleotide
  modified_base 86: mod_base = OTHER; note = 2'-O-methyl ribonucleotide
  modified_base 87: mod_base = OTHER; note = 2'-O-methyl ribonucleotide
  modified_base 88: mod_base = OTHER; note = 2'-O-methyl ribonucleotide
  modified_base 89: mod_base = OTHER; note = 2'-O-methyl ribonucleotide
  modified_base 90: mod_base = OTHER; note = 2'-O-methyl ribonucleotide
  modified_base 91: mod_base = OTHER; note = 2'-O-methyl ribonucleotide
  modified_base 92: mod_base = OTHER; note = 2'-O-methyl ribonucleotide
  modified_base 93: mod_base = OTHER; note = 2'-O-methyl ribonucleotide
  modified_base 94: mod_base = OTHER; note = 2'-O-methyl ribonucleotide
  modified_base 95: mod_base = OTHER; note = 2'-O-methyl ribonucleotide
  modified_base 96: mod_base = OTHER; note = 2'-O-methyl ribonucleotide
  modified_base 97: mod_base = OTHER; note = 2'-O-methyl ribonucleotide
  modified_base 98: mod_base = OTHER; note = 2'-O-methyl ribonucleotide
  modified_base 99: mod_base = OTHER; note = 2'-O-methyl ribonucleotide
  modified_base 100: mod_base = OTHER; note = 2'-O-methyl ribonucleotide
  modified_base 1..3: mod_base = OTHER; note = phosphorothioate linkage
  modified_base 97..100: mod_base = OTHER; note = phosphorothioate linkage

SEQ ID NO: 2541 - RNA, 103 nt, synthetic construct; identical to SEQ ID NO: 1700
  source 1..103: mol_type = other RNA
  modified_base 1: mod_base = OTHER; note = 2'-O-methyl ribonucleotide
  modified_base 2: mod_base = OTHER; note = 2'-O-methyl ribonucleotide
  modified_base 3: mod_base = OTHER; note = 2'-O-methyl ribonucleotide
  modified_base 21: mod_base = OTHER; note = 2'-O-methyl ribonucleotide
  modified_base 28: mod_base = OTHER; note = 2'-O-methyl ribonucleotide
  modified_base 29: mod_base = OTHER; note = 2'-O-methyl ribonucleotide
  modified_base 30: mod_base = OTHER; note = 2'-O-methyl ribonucleotide
  modified_base 31: mod_base = OTHER; note = 2'-O-methyl ribonucleotide
  modified_base 32: mod_base = OTHER; note = 2'-O-methyl ribonucleotide
  modified_base 34: mod_base = OTHER; note = 2'-O-methyl ribonucleotide
  modified_base 35: mod_base = OTHER; note = 2'-O-methyl ribonucleotide
  modified_base 36: mod_base = OTHER; note = 2'-O-methyl ribonucleotide
  modified_base 37: mod_base = OTHER; note = 2'-O-methyl ribonucleotide
  modified_base 38: mod_base = OTHER; note = 2'-O-methyl ribonucleotide
  modified_base 39: mod_base = OTHER; note = 2'-O-methyl ribonucleotide
  modified_base 40: mod_base = OTHER; note = 2'-O-methyl ribonucleotide
  modified_base 41: mod_base = OTHER; note = 2'-O-methyl ribonucleotide
  modified_base 42: mod_base = OTHER; note = 2'-O-methyl ribonucleotide
  modified_base 46: mod_base = OTHER; note = 2'-O-methyl ribonucleotide
  modified_base 48: mod_base = OTHER; note = 2'-O-methyl ribonucleotide
  modified_base 50: mod_base = OTHER; note = 2'-O-methyl ribonucleotide
  modified_base 52: mod_base = OTHER; note = 2'-O-methyl ribonucleotide
  modified_base 53: mod_base = OTHER; note = 2'-O-methyl ribonucleotide
  modified_base 54: mod_base = OTHER; note = 2'-O-methyl ribonucleotide
  modified_base 55: mod_base = OTHER; note = 2'-O-methyl ribonucleotide
  modified_base 56: mod_base = OTHER; note = 2'-O-methyl ribonucleotide
  modified_base 57: mod_base = OTHER; note = 2'-O-methyl ribonucleotide
  modified_base 60: mod_base = OTHER; note = 2'-O-methyl ribonucleotide
  modified_base 61: mod_base = OTHER; note = 2'-O-methyl ribonucleotide
  modified_base 66: mod_base = OTHER; note = 2'-O-methyl ribonucleotide
  modified_base 67: mod_base = OTHER; note = 2'-O-methyl ribonucleotide
  modified_base 70: mod_base = OTHER; note = 2'-O-methyl ribonucleotide
  modified_base 71: mod_base = OTHER; note = 2'-O-methyl ribonucleotide
  modified_base 72: mod_base = OTHER; note = 2'-O-methyl ribonucleotide
  modified_base 74: mod_base = OTHER; note = 2'-O-methyl ribonucleotide
  modified_base 75: mod_base = OTHER; note = 2'-O-methyl ribonucleotide
  modified_base 76: mod_base = OTHER; note = 2'-O-methyl ribonucleotide
  modified_base 77: mod_base = OTHER; note = 2'-O-methyl ribonucleotide
  modified_base 78: mod_base = OTHER; note = 2'-O-methyl ribonucleotide
  modified_base 79: mod_base = OTHER; note = 2'-O-methyl ribonucleotide
  modified_base 80: mod_base = OTHER; note = 2'-O-methyl ribonucleotide
  modified_base 81: mod_base = OTHER; note = 2'-O-methyl ribonucleotide
  modified_base 83: mod_base = OTHER; note = 2'-O-methyl ribonucleotide
  modified_base 84: mod_base = OTHER; note = 2'-O-methyl ribonucleotide
  modified_base 85: mod_base = OTHER; note = 2'-O-methyl ribonucleotide
  modified_base 86: mod_base = OTHER; note = 2'-O-methyl ribonucleotide
  modified_base 87: mod_base = OTHER; note = 2'-O-methyl ribonucleotide
  modified_base 88: mod_base = OTHER; note = 2'-O-methyl ribonucleotide
  modified_base 89: mod_base = OTHER; note = 2'-O-methyl ribonucleotide
  modified_base 90: mod_base = OTHER; note = 2'-O-methyl ribonucleotide
  modified_base 91: mod_base = OTHER; note = 2'-O-methyl ribonucleotide
  modified_base 92: mod_base = OTHER; note = 2'-O-methyl ribonucleotide
  modified_base 93: mod_base = OTHER; note = 2'-O-methyl ribonucleotide
  modified_base 94: mod_base = OTHER; note = 2'-O-methyl ribonucleotide
  modified_base 95: mod_base = OTHER; note = 2'-O-methyl ribonucleotide
  modified_base 96: mod_base = OTHER; note = 2'-O-methyl ribonucleotide
  modified_base 97: mod_base = OTHER; note = 2'-O-methyl ribonucleotide
  modified_base 98: mod_base = OTHER; note = 2'-O-methyl ribonucleotide
  modified_base 99: mod_base = OTHER; note = 2'-O-methyl ribonucleotide
  modified_base 100: mod_base = OTHER; note = 2'-O-methyl ribonucleotide
  modified_base 1..3: mod_base = OTHER; note = phosphorothioate linkage
  modified_base 97..100: mod_base = OTHER; note = phosphorothioate linkage

SEQ ID NO: 2542 - RNA, 103 nt, synthetic construct; identical to SEQ ID NO: 1700
  source 1..103: mol_type = other RNA
  modified_base 1: mod_base = OTHER; note = 2'-O-methyl ribonucleotide
  modified_base 2: mod_base = OTHER; note = 2'-O-methyl ribonucleotide
  modified_base 3: mod_base = OTHER; note = 2'-O-methyl ribonucleotide
  modified_base 21: mod_base = OTHER; note = 2'-O-methyl ribonucleotide
  modified_base 28: mod_base = OTHER; note = 2'-O-methyl ribonucleotide
  modified_base 29: mod_base = OTHER; note = 2'-O-methyl ribonucleotide
  modified_base 30: mod_base = OTHER; note = 2'-O-methyl ribonucleotide
  modified_base 31: mod_base = OTHER; note = 2'-O-methyl ribonucleotide
  modified_base 32: mod_base = OTHER; note = 2'-O-methyl ribonucleotide
  modified_base 33: mod_base = OTHER; note = 2'-O-methyl ribonucleotide
  modified_base 34: mod_base = OTHER; note = 2'-O-methyl ribonucleotide
  modified_base 35: mod_base = OTHER; note = 2'-O-methyl ribonucleotide
  modified_base 36: mod_base = OTHER; note = 2'-O-methyl ribonucleotide
  modified_base 37: mod_base = OTHER; note = 2'-O-methyl ribonucleotide
  modified_base 38: mod_base = OTHER; note = 2'-O-methyl ribonucleotide
  modified_base 39: mod_base = OTHER; note = 2'-O-methyl ribonucleotide
  modified_base 40: mod_base = OTHER; note = 2'-O-methyl ribonucleotide
  modified_base 41: mod_base = OTHER; note = 2'-O-methyl ribonucleotide
  modified_base 42: mod_base = OTHER; note = 2'-O-methyl ribonucleotide
  modified_base 46: mod_base = OTHER; note = 2'-O-methyl ribonucleotide
  modified_base 48: mod_base = OTHER; note = 2'-O-methyl ribonucleotide
  modified_base 50: mod_base = OTHER; note = 2'-O-methyl ribonucleotide
  modified_base 52: mod_base = OTHER; note = 2'-O-methyl ribonucleotide
  modified_base 53: mod_base = OTHER; note = 2'-O-methyl ribonucleotide
  modified_base 54: mod_base = OTHER; note = 2'-O-methyl ribonucleotide
  modified_base 57: mod_base = OTHER; note = 2'-O-methyl ribonucleotide
  modified_base 61: mod_base = OTHER; note = 2'-O-methyl ribonucleotide
  modified_base 66: mod_base = OTHER; note = 2'-O-methyl ribonucleotide
  modified_base 67: mod_base = OTHER; note = 2'-O-methyl ribonucleotide
  modified_base 70: mod_base = OTHER; note = 2'-O-methyl ribonucleotide
  modified_base 71: mod_base = OTHER; note = 2'-O-methyl ribonucleotide
  modified_base 72: mod_base = OTHER; note = 2'-O-methyl ribonucleotide
  modified_base 74: mod_base = OTHER; note = 2'-O-methyl ribonucleotide
  modified_base 75: mod_base = OTHER; note = 2'-O-methyl ribonucleotide
  modified_base 76: mod_base = OTHER; note = 2'-O-methyl ribonucleotide
  modified_base 77: mod_base = OTHER; note = 2'-O-methyl ribonucleotide
  modified_base 78: mod_base = OTHER; note = 2'-O-methyl ribonucleotide
  modified_base 79: mod_base = OTHER; note = 2'-O-methyl ribonucleotide
  modified_base 80: mod_base = OTHER; note = 2'-O-methyl ribonucleotide
  modified_base 82: mod_base = OTHER; note = 2'-O-methyl ribonucleotide
  modified_base 83: mod_base = OTHER; note = 2'-O-methyl ribonucleotide
  modified_base 84: mod_base = OTHER; note = 2'-O-methyl ribonucleotide
  modified_base 85: mod_base = OTHER; note = 2'-O-methyl ribonucleotide
  modified_base 86: mod_base = OTHER; note = 2'-O-methyl ribonucleotide
  modified_base 87: mod_base = OTHER; note = 2'-O-methyl ribonucleotide
  modified_base 89: mod_base = OTHER; note = 2'-O-methyl ribonucleotide
  modified_base 92: mod_base = OTHER; note = 2'-O-methyl ribonucleotide
  modified_base 93: mod_base = OTHER; note = 2'-O-methyl ribonucleotide
  modified_base 94: mod_base = OTHER; note = 2'-O-methyl ribonucleotide
  modified_base 95: mod_base = OTHER; note = 2'-O-methyl ribonucleotide
  modified_base 96: mod_base = OTHER; note = 2'-O-methyl ribonucleotide
  modified_base 97: mod_base = OTHER; note = 2'-O-methyl ribonucleotide
  modified_base 98: mod_base = OTHER; note = 2'-O-methyl ribonucleotide
  modified_base 99: mod_base = OTHER; note = 2'-O-methyl ribonucleotide
  modified_base 100: mod_base = OTHER; note = 2'-O-methyl ribonucleotide
  modified_base 1..3: mod_base = OTHER; note = phosphorothioate linkage
  modified_base 97..100: mod_base = OTHER; note = phosphorothioate linkage

SEQ ID NO: 2543 - RNA, 103 nt, synthetic construct; identical to SEQ ID NO: 1700
  source 1..103: mol_type = other RNA
  modified_base 1: mod_base = OTHER; note = 2'-O-methyl ribonucleotide
  modified_base 2: mod_base = OTHER; note = 2'-O-methyl ribonucleotide
  modified_base 3: mod_base = OTHER; note = 2'-O-methyl ribonucleotide
  modified_base 21: mod_base = OTHER; note = 2'-O-methyl ribonucleotide
  modified_base 28: mod_base = OTHER; note = 2'-O-methyl ribonucleotide
  modified_base 29: mod_base = OTHER; note = 2'-O-methyl ribonucleotide
  modified_base 30: mod_base = OTHER; note = 2'-O-methyl ribonucleotide
  modified_base 31: mod_base = OTHER; note = 2'-O-methyl ribonucleotide
  modified_base 32: mod_base = OTHER; note = 2'-O-methyl ribonucleotide
  modified_base 33: mod_base = OTHER; note = 2'-O-methyl ribonucleotide
  modified_base 34: mod_base = OTHER; note = 2'-O-methyl ribonucleotide
  modified_base 35: mod_base = OTHER; note = 2'-O-methyl ribonucleotide
  modified_base 36: mod_base = OTHER; note = 2'-O-methyl ribonucleotide
  modified_base 37: mod_base = OTHER; note = 2'-O-methyl ribonucleotide
  modified_base 38: mod_base = OTHER; note = 2'-O-methyl ribonucleotide
  modified_base 39: mod_base = OTHER; note = 2'-O-methyl ribonucleotide
  modified_base 40: mod_base = OTHER; note = 2'-O-methyl ribonucleotide
  modified_base 41: mod_base = OTHER; note = 2'-O-methyl ribonucleotide
  modified_base 42: mod_base = OTHER; note = 2'-O-methyl ribonucleotide
  modified_base 46: mod_base = OTHER; note = 2'-O-methyl ribonucleotide
  modified_base 48: mod_base = OTHER; note = 2'-O-methyl ribonucleotide
  modified_base 50: mod_base = OTHER; note = 2'-O-methyl ribonucleotide
  modified_base 52: mod_base = OTHER; note = 2'-O-methyl ribonucleotide
  modified_base 53: mod_base = OTHER; note = 2'-O-methyl ribonucleotide
  modified_base 54: mod_base = OTHER; note = 2'-O-methyl ribonucleotide
  modified_base 55: mod_base = OTHER; note = 2'-O-methyl ribonucleotide
  modified_base 56: mod_base = OTHER; note = 2'-O-methyl ribonucleotide
  modified_base 57: mod_base = OTHER; note = 2'-O-methyl ribonucleotide
  modified_base 60: mod_base = OTHER; note = 2'-O-methyl ribonucleotide
  modified_base 61: mod_base = OTHER; note = 2'-O-methyl ribonucleotide
  modified_base 66: mod_base = OTHER; note = 2'-O-methyl ribonucleotide
  modified_base 67: mod_base = OTHER; note = 2'-O-methyl ribonucleotide
  modified_base 70: mod_base = OTHER; note = 2'-O-methyl ribonucleotide
  modified_base 71: mod_base = OTHER; note = 2'-O-methyl ribonucleotide
  modified_base 72: mod_base = OTHER; note = 2'-O-methyl ribonucleotide
  modified_base 74: mod_base = OTHER; note = 2'-O-methyl ribonucleotide
  modified_base 75: mod_base = OTHER; note = 2'-O-methyl ribonucleotide
  modified_base 76: mod_base = OTHER; note = 2'-O-methyl ribonucleotide
  modified_base 77: mod_base = OTHER; note = 2'-O-methyl ribonucleotide
  modified_base 78: mod_base = OTHER; note = 2'-O-methyl ribonucleotide
  modified_base 79: mod_base = OTHER; note = 2'-O-methyl ribonucleotide
  modified_base 80: mod_base = OTHER; note = 2'-O-methyl ribonucleotide
  modified_base 82: mod_base = OTHER; note = 2'-O-methyl ribonucleotide
  modified_base 83: mod_base = OTHER; note = 2'-O-methyl ribonucleotide
  modified_base 84: mod_base = OTHER; note = 2'-O-methyl ribonucleotide
  modified_base 85: mod_base = OTHER; note = 2'-O-methyl ribonucleotide
  modified_base 86: mod_base = OTHER; note = 2'-O-methyl ribonucleotide
  modified_base 87: mod_base = OTHER; note = 2'-O-methyl ribonucleotide
  modified_base 89: mod_base = OTHER; note = 2'-O-methyl ribonucleotide
  modified_base 92: mod_base = OTHER; note = 2'-O-methyl ribonucleotide
  modified_base 93: mod_base = OTHER; note = 2'-O-methyl ribonucleotide
  modified_base 94: mod_base = OTHER; note = 2'-O-methyl ribonucleotide
  modified_base 95: mod_base = OTHER; note = 2'-O-methyl ribonucleotide
  modified_base 96: mod_base = OTHER; note = 2'-O-methyl ribonucleotide
  modified_base 97: mod_base = OTHER; note = 2'-O-methyl ribonucleotide
  modified_base 98: mod_base = OTHER; note = 2'-O-methyl ribonucleotide
  modified_base 99: mod_base = OTHER; note = 2'-O-methyl ribonucleotide
  modified_base 100: mod_base = OTHER; note = 2'-O-methyl ribonucleotide
  modified_base 1..3: mod_base = OTHER; note = phosphorothioate linkage
  modified_base 97..100: mod_base = OTHER; note = phosphorothioate linkage

SEQ ID NO: 2544 - RNA, 103 nt, synthetic construct; identical to SEQ ID NO: 1700
  source 1..103: mol_type = other RNA
  modified_base 1: mod_base = OTHER; note = 2'-O-methyl ribonucleotide
  modified_base 2: mod_base = OTHER; note = 2'-O-methyl ribonucleotide
  modified_base 3: mod_base = OTHER; note = 2'-O-methyl ribonucleotide
  modified_base 21: mod_base = OTHER; note = 2'-O-methyl ribonucleotide
  modified_base 28: mod_base = OTHER; note = 2'-O-methyl ribonucleotide
  modified_base 29: mod_base = OTHER; note = 2'-O-methyl ribonucleotide
  modified_base 30: mod_base = OTHER; note = 2'-O-methyl ribonucleotide
  modified_base 31: mod_base = OTHER; note = 2'-O-methyl ribonucleotide
  modified_base 32: mod_base = OTHER; note = 2'-O-methyl ribonucleotide
  modified_base 33: mod_base = OTHER; note = 2'-O-methyl ribonucleotide
  modified_base 34: mod_base = OTHER; note = 2'-O-methyl ribonucleotide
  modified_base 35: mod_base = OTHER; note = 2'-O-methyl ribonucleotide
  modified_base 36: mod_base = OTHER; note = 2'-O-methyl ribonucleotide
  modified_base 37: mod_base = OTHER; note = 2'-O-methyl ribonucleotide
  modified_base 38: mod_base = OTHER; note = 2'-O-methyl ribonucleotide
  modified_base 39: mod_base = OTHER; note = 2'-O-methyl ribonucleotide
  modified_base 40: mod_base = OTHER; note = 2'-O-methyl ribonucleotide
  modified_base 41: mod_base = OTHER; note = 2'-O-methyl ribonucleotide
  modified_base 42: mod_base = OTHER; note = 2'-O-methyl ribonucleotide
  modified_base 46: mod_base = OTHER; note = 2'-O-methyl ribonucleotide
  modified_base 48: mod_base = OTHER; note = 2'-O-methyl ribonucleotide
  modified_base 50: mod_base = OTHER; note = 2'-O-methyl ribonucleotide
  modified_base 52: mod_base = OTHER; note = 2'-O-methyl ribonucleotide
  modified_base 53: mod_base = OTHER; note = 2'-O-methyl ribonucleotide
  modified_base 54: mod_base = OTHER; note = 2'-O-methyl ribonucleotide
  modified_base 57: mod_base = OTHER; note = 2'-O-methyl ribonucleotide
  modified_base 61: mod_base = OTHER; note = 2'-O-methyl ribonucleotide
  modified_base 66: mod_base = OTHER; note = 2'-O-methyl ribonucleotide
  modified_base 67: mod_base = OTHER; note = 2'-O-methyl ribonucleotide
  modified_base 70: mod_base = OTHER; note = 2'-O-methyl ribonucleotide
  modified_base 71: mod_base = OTHER; note = 2'-O-methyl ribonucleotide
  modified_base 72: mod_base = OTHER; note = 2'-O-methyl ribonucleotide
  modified_base 73: mod_base = OTHER; note = 2'-O-methyl ribonucleotide
  modified_base 74: mod_base = OTHER; note = 2'-O-methyl ribonucleotide
  modified_base 75: mod_base = OTHER; note = 2'-O-methyl ribonucleotide
  modified_base 76: mod_base = OTHER; note = 2'-O-methyl ribonucleotide
  modified_base 77: mod_base = OTHER; note = 2'-O-methyl ribonucleotide
  modified_base 78: mod_base = OTHER; note = 2'-O-methyl ribonucleotide
  modified_base 79: mod_base = OTHER; note = 2'-O-methyl ribonucleotide
  modified_base 80: mod_base = OTHER; note = 2'-O-methyl ribonucleotide
  modified_base 82: mod_base = OTHER; note = 2'-O-methyl ribonucleotide
  modified_base 83: mod_base = OTHER; note = 2'-O-methyl ribonucleotide
  modified_base 84: mod_base = OTHER; note = 2'-O-methyl ribonucleotide
  modified_base 85: mod_base = OTHER; note = 2'-O-methyl ribonucleotide
  modified_base 86: mod_base = OTHER; note = 2'-O-methyl ribonucleotide
  modified_base 87: mod_base = OTHER; note = 2'-O-methyl ribonucleotide
  modified_base 89: mod_base = OTHER; note = 2'-O-methyl ribonucleotide
  modified_base 92: mod_base = OTHER; note = 2'-O-methyl ribonucleotide
  modified_base 93: mod_base = OTHER; note = 2'-O-methyl ribonucleotide
  modified_base 94: mod_base = OTHER; note = 2'-O-methyl ribonucleotide
  modified_base 95: mod_base = OTHER; note = 2'-O-methyl ribonucleotide
  modified_base 96: mod_base = OTHER; note = 2'-O-methyl ribonucleotide
  modified_base 97: mod_base = OTHER; note = 2'-O-methyl ribonucleotide
  modified_base 98: mod_base = OTHER; note = 2'-O-methyl ribonucleotide
  modified_base 99: mod_base = OTHER; note = 2'-O-methyl ribonucleotide
  modified_base 100: mod_base = OTHER; note = 2'-O-methyl ribonucleotide
  modified_base 1..3: mod_base = OTHER; note = phosphorothioate linkage
  modified_base 97..100: mod_base = OTHER; note = phosphorothioate linkage

SEQ ID NO: 2545 - RNA, 103 nt, synthetic construct; identical to SEQ ID NO: 1700
  source 1..103: mol_type = other RNA
  modified_base 1: mod_base = OTHER; note = 2'-O-methyl ribonucleotide
  modified_base 2: mod_base = OTHER; note = 2'-O-methyl ribonucleotide
  modified_base 3: mod_base = OTHER; note = 2'-O-methyl ribonucleotide
  modified_base 21: mod_base = OTHER; note = 2'-O-methyl ribonucleotide
  modified_base 28: mod_base = OTHER; note = 2'-O-methyl ribonucleotide
  modified_base 29: mod_base = OTHER; note = 2'-O-methyl ribonucleotide
  modified_base 30: mod_base = OTHER; note = 2'-O-methyl ribonucleotide
  modified_base 31: mod_base = OTHER; note = 2'-O-methyl ribonucleotide
  modified_base 32: mod_base = OTHER; note = 2'-O-methyl ribonucleotide
  modified_base 34: mod_base = OTHER; note = 2'-O-methyl ribonucleotide
  modified_base 35: mod_base = OTHER; note = 2'-O-methyl ribonucleotide
  modified_base 36: mod_base = OTHER; note = 2'-O-methyl ribonucleotide
  modified_base 37: mod_base = OTHER; note = 2'-O-methyl ribonucleotide
  modified_base 38: mod_base = OTHER; note = 2'-O-methyl ribonucleotide
  modified_base 39: mod_base = OTHER; note = 2'-O-methyl ribonucleotide
  modified_base 40: mod_base = OTHER; note = 2'-O-methyl ribonucleotide
  modified_base 41: mod_base = OTHER; note = 2'-O-methyl ribonucleotide
  modified_base 42: mod_base = OTHER; note = 2'-O-methyl ribonucleotide
  modified_base 46: mod_base = OTHER; note = 2'-O-methyl ribonucleotide
  modified_base 48: mod_base = OTHER; note = 2'-O-methyl ribonucleotide
  modified_base 50: mod_base = OTHER; note = 2'-O-methyl ribonucleotide
  modified_base 52: mod_base = OTHER; note = 2'-O-methyl ribonucleotide
  modified_base 53: mod_base = OTHER; note = 2'-O-methyl ribonucleotide
  modified_base 54: mod_base = OTHER; note = 2'-O-methyl ribonucleotide
  modified_base 57: mod_base = OTHER; note = 2'-O-methyl ribonucleotide
  modified_base 61: mod_base = OTHER; note = 2'-O-methyl ribonucleotide
  modified_base 66: mod_base = OTHER; note = 2'-O-methyl ribonucleotide
  modified_base 67: mod_base = OTHER; note = 2'-O-methyl ribonucleotide
  modified_base 70: mod_base = OTHER; note = 2'-O-methyl ribonucleotide
  modified_base 71: mod_base = OTHER; note = 2'-O-methyl ribonucleotide
  modified_base 72: mod_base = OTHER; note = 2'-O-methyl ribonucleotide
  modified_base 73: mod_base = OTHER; note = 2'-O-methyl ribonucleotide
  modified_base 74: mod_base = OTHER; note = 2'-O-methyl ribonucleotide
  modified_base 75: mod_base = OTHER; note = 2'-O-methyl ribonucleotide
  modified_base 76: mod_base = OTHER; note = 2'-O-methyl ribonucleotide
  modified_base 77: mod_base = OTHER; note = 2'-O-methyl ribonucleotide
  modified_base 78: mod_base = OTHER; note = 2'-O-methyl ribonucleotide
  modified_base 79: mod_base = OTHER; note = 2'-O-methyl ribonucleotide
  modified_base 80: mod_base = OTHER; note = 2'-O-methyl ribonucleotide
  modified_base 82: mod_base = OTHER; note = 2'-O-methyl ribonucleotide
  modified_base 83: mod_base = OTHER; note = 2'-O-methyl ribonucleotide
  modified_base 84: mod_base = OTHER; note = 2'-O-methyl ribonucleotide
  modified_base 85: mod_base = OTHER; note = 2'-O-methyl ribonucleotide
  modified_base 86: mod_base = OTHER; note = 2'-O-methyl ribonucleotide
  modified_base 87: mod_base = OTHER; note = 2'-O-methyl ribonucleotide
  modified_base 89: mod_base = OTHER; note = 2'-O-methyl ribonucleotide
  modified_base 92: mod_base = OTHER; note = 2'-O-methyl ribonucleotide
  modified_base 93: mod_base = OTHER; note = 2'-O-methyl ribonucleotide
  modified_base 94: mod_base = OTHER; note = 2'-O-methyl ribonucleotide
  modified_base 95: mod_base = OTHER; note = 2'-O-methyl ribonucleotide
  modified_base 96: mod_base = OTHER; note = 2'-O-methyl ribonucleotide
  modified_base 97: mod_base = OTHER; note = 2'-O-methyl ribonucleotide
  modified_base 98: mod_base = OTHER; note = 2'-O-methyl ribonucleotide
  modified_base 99: mod_base = OTHER; note = 2'-O-methyl ribonucleotide
  modified_base 100: mod_base = OTHER; note = 2'-O-methyl ribonucleotide
  modified_base 1..3: mod_base = OTHER; note = phosphorothioate linkage
  modified_base 97..100: mod_base = OTHER; note = phosphorothioate linkage

SEQ ID NO: 2546 - RNA, 103 nt, synthetic construct; identical to SEQ ID NO: 1700
  source 1..103: mol_type = other RNA
  modified_base 1: mod_base = OTHER; note = 2'-O-methyl ribonucleotide
  modified_base 2: mod_base = OTHER; note = 2'-O-methyl ribonucleotide
  modified_base 3: mod_base = OTHER; note = 2'-O-methyl ribonucleotide
  modified_base 21: mod_base = OTHER; note = 2'-O-methyl ribonucleotide
  modified_base 28: mod_base = OTHER; note = 2'-O-methyl ribonucleotide
  modified_base 29: mod_base = OTHER; note = 2'-O-methyl ribonucleotide
  modified_base 30: mod_base = OTHER; note = 2'-O-methyl ribonucleotide
  modified_base 31: mod_base = OTHER; note = 2'-O-methyl ribonucleotide
  modified_base 32: mod_base = OTHER; note = 2'-O-methyl ribonucleotide
  modified_base 34: mod_base = OTHER; note = 2'-O-methyl ribonucleotide
  modified_base 35: mod_base = OTHER; note = 2'-O-methyl ribonucleotide
  modified_base 36: mod_base = OTHER; note = 2'-O-methyl ribonucleotide
  modified_base 37: mod_base = OTHER; note = 2'-O-methyl ribonucleotide
  modified_base 38: mod_base = OTHER; note = 2'-O-methyl ribonucleotide
  modified_base 39: mod_base = OTHER; note = 2'-O-methyl ribonucleotide
  modified_base 40: mod_base = OTHER; note = 2'-O-methyl ribonucleotide
  modified_base 41: mod_base = OTHER; note = 2'-O-methyl ribonucleotide
  modified_base 42: mod_base = OTHER; note = 2'-O-methyl ribonucleotide
  modified_base 46: mod_base = OTHER; note = 2'-O-methyl ribonucleotide
  modified_base 48: mod_base = OTHER; note = 2'-O-methyl ribonucleotide
  modified_base 50: mod_base = OTHER; note = 2'-O-methyl ribonucleotide
  modified_base 52: mod_base = OTHER; note = 2'-O-methyl ribonucleotide
  modified_base 53: mod_base = OTHER; note = 2'-O-methyl ribonucleotide
  modified_base 54: mod_base = OTHER; note = 2'-O-methyl ribonucleotide
  modified_base 57: mod_base = OTHER; note = 2'-O-methyl ribonucleotide
  modified_base 61: mod_base = OTHER; note = 2'-O-methyl ribonucleotide
  modified_base 66: mod_base = OTHER; note = 2'-O-methyl ribonucleotide
  modified_base 67: mod_base = OTHER; note = 2'-O-methyl ribonucleotide
  modified_base 70: mod_base = OTHER; note = 2'-O-methyl ribonucleotide
  modified_base 71: mod_base = OTHER; note = 2'-O-methyl ribonucleotide
  modified_base 72: mod_base = OTHER; note = 2'-O-methyl ribonucleotide
  modified_base 73: mod_base = OTHER; note = 2'-O-methyl ribonucleotide
  modified_base 74: mod_base = OTHER; note = 2'-O-methyl ribonucleotide
  modified_base 75: mod_base = OTHER; note = 2'-O-methyl ribonucleotide
  modified_base 76: mod_base = OTHER; note = 2'-O-methyl ribonucleotide
  modified_base 77: mod_base = OTHER; note = 2'-O-methyl ribonucleotide
  modified_base 78: mod_base = OTHER; note = 2'-O-methyl ribonucleotide
  modified_base 79: mod_base = OTHER; note = 2'-O-methyl ribonucleotide
  modified_base 80: mod_base = OTHER; note = 2'-O-methyl ribonucleotide
  modified_base 82: mod_base = OTHER; note = 2'-O-methyl ribonucleotide
  modified_base 83: mod_base = OTHER; note = 2'-O-methyl ribonucleotide
  modified_base 84: mod_base = OTHER; note = 2'-O-methyl ribonucleotide
  modified_base 85: mod_base = OTHER; note = 2'-O-methyl ribonucleotide
  modified_base 86: mod_base = OTHER; note = 2'-O-methyl ribonucleotide
  modified_base 87: mod_base = OTHER; note = 2'-O-methyl ribonucleotide
  modified_base 89: mod_base = OTHER; note = 2'-O-methyl ribonucleotide
  modified_base 91: mod_base = OTHER; note = 2'-O-methyl ribonucleotide
  modified_base 92: mod_base = OTHER; note = 2'-O-methyl ribonucleotide
  modified_base 93: mod_base = OTHER; note = 2'-O-methyl ribonucleotide
  modified_base 94: mod_base = OTHER; note = 2'-O-methyl ribonucleotide
  modified_base 95: mod_base = OTHER; note = 2'-O-methyl ribonucleotide
  modified_base 96: mod_base = OTHER; note = 2'-O-methyl ribonucleotide
  modified_base 97: mod_base = OTHER; note = 2'-O-methyl ribonucleotide
  modified_base 98: mod_base = OTHER; note = 2'-O-methyl ribonucleotide
  modified_base 99: mod_base = OTHER; note = 2'-O-methyl ribonucleotide
  modified_base 100: mod_base = OTHER; note = 2'-O-methyl ribonucleotide
  modified_base 1..3: mod_base = OTHER; note = phosphorothioate linkage
  modified_base 97..100: mod_base = OTHER; note = phosphorothioate linkage

SEQ ID NO: 2547 - RNA, 103 nt, synthetic construct; identical to SEQ ID NO: 1700
  source 1..103: mol_type = other RNA
  modified_base 1: mod_base = OTHER; note = 2'-O-methyl ribonucleotide
  modified_base 2: mod_base = OTHER; note = 2'-O-methyl ribonucleotide
  modified_base 3: mod_base = OTHER; note = 2'-O-methyl ribonucleotide
  modified_base 21: mod_base = OTHER; note = 2'-O-methyl ribonucleotide
  modified_base 28: mod_base = OTHER; note = 2'-O-methyl ribonucleotide
  modified_base 29: mod_base = OTHER; note = 2'-O-methyl ribonucleotide
  modified_base 30: mod_base = OTHER; note = 2'-O-methyl ribonucleotide
  modified_base 31: mod_base = OTHER; note = 2'-O-methyl ribonucleotide
  modified_base 32: mod_base = OTHER; note = 2'-O-methyl ribonucleotide
  modified_base 34: mod_base = OTHER; note = 2'-O-methyl ribonucleotide
  modified_base 35: mod_base = OTHER; note = 2'-O-methyl ribonucleotide
  modified_base 36: mod_base = OTHER; note = 2'-O-methyl ribonucleotide
  modified_base 37: mod_base = OTHER; note = 2'-O-methyl ribonucleotide
  modified_base 38: mod_base = OTHER; note = 2'-O-methyl ribonucleotide
  modified_base 39: mod_base = OTHER; note = 2'-O-methyl ribonucleotide
  modified_base 40: mod_base = OTHER; note = 2'-O-methyl ribonucleotide
  modified_base 41: mod_base = OTHER; note = 2'-O-methyl ribonucleotide
  modified_base 42: mod_base = OTHER; note = 2'-O-methyl ribonucleotide
  modified_base 46: mod_base = OTHER; note = 2'-O-methyl ribonucleotide
  modified_base 48: mod_base = OTHER; note = 2'-O-methyl ribonucleotide
  modified_base 50: mod_base = OTHER; note = 2'-O-methyl ribonucleotide
  modified_base 52: mod_base = OTHER; note = 2'-O-methyl ribonucleotide
  modified_base 53: mod_base = OTHER; note = 2'-O-methyl ribonucleotide
  modified_base 54: mod_base = OTHER; note = 2'-O-methyl ribonucleotide
  modified_base 55: mod_base = OTHER; note = 2'-O-methyl ribonucleotide
  modified_base 56: mod_base = OTHER; note = 2'-O-methyl ribonucleotide
  modified_base 57: mod_base = OTHER; note = 2'-O-methyl ribonucleotide
  modified_base 60: mod_base = OTHER; note = 2'-O-methyl ribonucleotide
  modified_base 61: mod_base = OTHER; note = 2'-O-methyl ribonucleotide
  modified_base 66: mod_base = OTHER; note = 2'-O-methyl ribonucleotide
  modified_base 67: mod_base = OTHER; note = 2'-O-methyl ribonucleotide
  modified_base 70: mod_base = OTHER; note = 2'-O-methyl ribonucleotide
  modified_base 71: mod_base = OTHER; note = 2'-O-methyl ribonucleotide
  modified_base 72: mod_base = OTHER; note = 2'-O-methyl ribonucleotide
  modified_base 74: mod_base = OTHER; note = 2'-O-methyl ribonucleotide
  modified_base 75: mod_base = OTHER; note = 2'-O-methyl ribonucleotide
  modified_base 76: mod_base = OTHER; note = 2'-O-methyl ribonucleotide
  modified_base 77: mod_base = OTHER; note = 2'-O-methyl ribonucleotide
  modified_base 78: mod_base = OTHER; note = 2'-O-methyl ribonucleotide
  modified_base 79: mod_base = OTHER; note = 2'-O-methyl ribonucleotide
  modified_base 80: mod_base = OTHER; note = 2'-O-methyl ribonucleotide
  modified_base 82: mod_base = OTHER; note = 2'-O-methyl ribonucleotide
  modified_base 83: mod_base = OTHER; note = 2'-O-methyl ribonucleotide
  modified_base 84: mod_base = OTHER; note = 2'-O-methyl ribonucleotide
  modified_base 85: mod_base = OTHER; note = 2'-O-methyl ribonucleotide
  modified_base 86: mod_base = OTHER; note = 2'-O-methyl ribonucleotide
  modified_base 87: mod_base = OTHER; note = 2'-O-methyl ribonucleotide
  modified_base 89: mod_base = OTHER; note = 2'-O-methyl ribonucleotide
  modified_base 92: mod_base = OTHER; note = 2'-O-methyl ribonucleotide
  modified_base 93: mod_base = OTHER; note = 2'-O-methyl ribonucleotide
  modified_base 94: mod_base = OTHER; note = 2'-O-methyl ribonucleotide
  modified_base 95: mod_base = OTHER; note = 2'-O-methyl ribonucleotide
  modified_base 96: mod_base = OTHER; note = 2'-O-methyl ribonucleotide
  modified_base 97: mod_base = OTHER; note = 2'-O-methyl ribonucleotide
  modified_base 98: mod_base = OTHER; note = 2'-O-methyl ribonucleotide
  modified_base 99: mod_base = OTHER; note = 2'-O-methyl ribonucleotide
  modified_base 100: mod_base = OTHER; note = 2'-O-methyl ribonucleotide
  modified_base 1..3: mod_base = OTHER; note = phosphorothioate linkage
  modified_base 97..100: mod_base = OTHER; note = phosphorothioate linkage

SEQ ID NO: 2548 - RNA, 103 nt, synthetic construct; identical to SEQ ID NO: 1643
  source 1..103: mol_type = other RNA
  modified_base 1: mod_base = OTHER; note = 2'-O-methyl ribonucleotide
  modified_base 2: mod_base = OTHER; note = 2'-O-methyl ribonucleotide
  modified_base 3: mod_base = OTHER; note = 2'-O-methyl ribonucleotide
  modified_base 21: mod_base = OTHER; note = 2'-O-methyl ribonucleotide
  modified_base 28: mod_base = OTHER; note = 2'-O-methyl ribonucleotide
  modified_base 29: mod_base = OTHER; note = 2'-O-methyl ribonucleotide
  modified_base 30: mod_base = OTHER; note = 2'-O-methyl ribonucleotide
  modified_base 31: mod_base = OTHER; note = 2'-O-methyl ribonucleotide
  modified_base 32: mod_base = OTHER; note = 2'-O-methyl ribonucleotide
  modified_base 33: mod_base = OTHER; note = 2'-O-methyl ribonucleotide
  modified_base 34: mod_base = OTHER; note = 2'-O-methyl ribonucleotide
  modified_base 35: mod_base = OTHER; note = 2'-O-methyl ribonucleotide
  modified_base 36: mod_base = OTHER; note = 2'-O-methyl ribonucleotide
  modified_base 37: mod_base = OTHER; note = 2'-O-methyl ribonucleotide
  modified_base 38: mod_base = OTHER; note = 2'-O-methyl ribonucleotide
  modified_base 39: mod_base = OTHER; note = 2'-O-methyl ribonucleotide
  modified_base 40: mod_base = OTHER; note = 2'-O-methyl ribonucleotide
  modified_base 41: mod_base = OTHER; note = 2'-O-methyl ribonucleotide
  modified_base 42: mod_base = OTHER; note = 2'-O-methyl ribonucleotide
  modified_base 46: mod_base = OTHER; note = 2'-O-methyl ribonucleotide
  modified_base 48: mod_base = OTHER; note = 2'-O-methyl ribonucleotide
  modified_base 50: mod_base = OTHER; note = 2'-O-methyl ribonucleotide
  modified_base 52: mod_base = OTHER; note = 2'-O-methyl ribonucleotide
  modified_base 53: mod_base = OTHER; note = 2'-O-methyl ribonucleotide
  modified_base 54: mod_base = OTHER; note = 2'-O-methyl ribonucleotide
  modified_base 55: mod_base = OTHER; note = 2'-O-methyl ribonucleotide
  modified_base 56: mod_base = OTHER; note = 2'-O-methyl ribonucleotide
  modified_base 57: mod_base = OTHER; note = 2'-O-methyl ribonucleotide
  modified_base 60: mod_base = OTHER; note = 2'-O-methyl ribonucleotide
  modified_base 61: mod_base = OTHER; note = 2'-O-methyl ribonucleotide
  modified_base 66: mod_base = OTHER; note = 2'-O-methyl ribonucleotide
  modified_base 67: mod_base = OTHER; note = 2'-O-methyl ribonucleotide
  modified_base 70: mod_base = OTHER; note = 2'-O-methyl ribonucleotide
  modified_base 71: mod_base = OTHER; note = 2'-O-methyl ribonucleotide
  modified_base 72: mod_base = OTHER; note = 2'-O-methyl ribonucleotide
  modified_base 73: mod_base = OTHER; note = 2'-O-methyl ribonucleotide
  modified_base 74: mod_base = OTHER; note = 2'-O-methyl ribonucleotide
  modified_base 75: mod_base = OTHER; note = 2'-O-methyl ribonucleotide
  modified_base 76: mod_base = OTHER; note = 2'-O-methyl ribonucleotide
  modified_base 77: mod_base = OTHER; note = 2'-O-methyl ribonucleotide
  modified_base 78: mod_base = OTHER; note = 2'-O-methyl ribonucleotide
  modified_base 79: mod_base = OTHER; note = 2'-O-methyl ribonucleotide
  modified_base 80: mod_base = OTHER; note = 2'-O-methyl ribonucleotide
  modified_base 81: mod_base = OTHER; note = 2'-O-methyl ribonucleotide
  modified_base 83: mod_base = OTHER; note = 2'-O-methyl ribonucleotide
  modified_base 84: mod_base = OTHER; note = 2'-O-methyl ribonucleotide
  modified_base 85: mod_base = OTHER; note = 2'-O-methyl ribonucleotide
  modified_base 86: mod_base = OTHER; note = 2'-O-methyl ribonucleotide
  modified_base 87: mod_base = OTHER; note = 2'-O-methyl ribonucleotide
  modified_base 88: mod_base = OTHER; note = 2'-O-methyl ribonucleotide
  modified_base 89: mod_base = OTHER; note = 2'-O-methyl ribonucleotide
  modified_base 90: mod_base = OTHER; note = 2'-O-methyl ribonucleotide
  modified_base 91: mod_base = OTHER; note = 2'-O-methyl ribonucleotide
  modified_base 92: mod_base = OTHER; note = 2'-O-methyl ribonucleotide
  modified_base 93: mod_base = OTHER; note = 2'-O-methyl ribonucleotide
  modified_base 94: mod_base = OTHER; note = 2'-O-methyl ribonucleotide
  modified_base 95: mod_base = OTHER; note = 2'-O-methyl ribonucleotide
  modified_base 96: mod_base = OTHER; note = 2'-O-methyl ribonucleotide
  modified_base 97: mod_base = OTHER; note = 2'-O-methyl ribonucleotide
  modified_base 98: mod_base = OTHER; note = 2'-O-methyl ribonucleotide
  modified_base 99: mod_base = OTHER; note = 2'-O-methyl ribonucleotide
  modified_base 100: mod_base = OTHER; note = 2'-O-methyl ribonucleotide
  modified_base 1..3: mod_base = OTHER; note = phosphorothioate linkage
  modified_base 97..100: mod_base = OTHER; note = phosphorothioate linkage

SEQ ID NO: 2549 - RNA, 103 nt, synthetic construct; identical to SEQ ID NO: 1643
  source 1..103: mol_type = other RNA
  modified_base 1: mod_base = OTHER; note = 2'-O-methyl ribonucleotide
  modified_base 2: mod_base = OTHER; note = 2'-O-methyl ribonucleotide
  modified_base 3: mod_base = OTHER; note = 2'-O-methyl ribonucleotide
  modified_base 21: mod_base = OTHER; note = 2'-O-methyl ribonucleotide
  modified_base 28: mod_base = OTHER; note = 2'-O-methyl ribonucleotide
  modified_base 29: mod_base = OTHER; note = 2'-O-methyl ribonucleotide
  modified_base 30: mod_base = OTHER; note = 2'-O-methyl ribonucleotide
  modified_base 31: mod_base = OTHER; note = 2'-O-methyl ribonucleotide
  modified_base 32: mod_base = OTHER; note = 2'-O-methyl ribonucleotide
  modified_base 34: mod_base = OTHER; note = 2'-O-methyl ribonucleotide
  modified_base 35: mod_base = OTHER; note = 2'-O-methyl ribonucleotide
  modified_base 36: mod_base = OTHER; note = 2'-O-methyl ribonucleotide
  modified_base 37: mod_base = OTHER; note = 2'-O-methyl ribonucleotide
  modified_base 38: mod_base = OTHER; note = 2'-O-methyl ribonucleotide
  modified_base 39: mod_base = OTHER; note = 2'-O-methyl ribonucleotide
  modified_base 40: mod_base = OTHER; note = 2'-O-methyl ribonucleotide
  modified_base 41: mod_base = OTHER; note = 2'-O-methyl ribonucleotide
  modified_base 42: mod_base = OTHER; note = 2'-O-methyl ribonucleotide
  modified_base 46: mod_base = OTHER; note = 2'-O-methyl ribonucleotide
  modified_base 48: mod_base = OTHER; note = 2'-O-methyl ribonucleotide
  modified_base 50: mod_base = OTHER; note = 2'-O-methyl ribonucleotide
  modified_base 52: mod_base = OTHER; note = 2'-O-methyl ribonucleotide
  modified_base 53: mod_base = OTHER; note = 2'-O-methyl ribonucleotide
  modified_base 54: mod_base = OTHER; note = 2'-O-methyl ribonucleotide
  modified_base 55: mod_base = OTHER; note = 2'-O-methyl ribonucleotide
  modified_base 56: mod_base = OTHER; note = 2'-O-methyl ribonucleotide
  modified_base 57: mod_base = OTHER; note = 2'-O-methyl ribonucleotide
  modified_base 60: mod_base = OTHER; note = 2'-O-methyl ribonucleotide
  modified_base 61: mod_base = OTHER; note = 2'-O-methyl ribonucleotide
  modified_base 66: mod_base = OTHER; note = 2'-O-methyl ribonucleotide
  modified_base 67: mod_base = OTHER; note = 2'-O-methyl ribonucleotide
  modified_base 70: mod_base = OTHER; note = 2'-O-methyl ribonucleotide
  modified_base 71: mod_base = OTHER; note = 2'-O-methyl ribonucleotide
  modified_base 72: mod_base = OTHER; note = 2'-O-methyl ribonucleotide
  modified_base 74: mod_base = OTHER; note = 2'-O-methyl ribonucleotide
  modified_base 75: mod_base = OTHER; note = 2'-O-methyl ribonucleotide
  modified_base 76: mod_base = OTHER; note = 2'-O-methyl ribonucleotide
  modified_base 77: mod_base = OTHER; note = 2'-O-methyl ribonucleotide
  modified_base 78: mod_base = OTHER; note = 2'-O-methyl ribonucleotide
  modified_base 79: mod_base = OTHER; note = 2'-O-methyl ribonucleotide
  modified_base 80: mod_base = OTHER; note = 2'-O-methyl ribonucleotide
  modified_base 81: mod_base = OTHER; note = 2'-O-methyl ribonucleotide
  modified_base 83: mod_base = OTHER; note = 2'-O-methyl ribonucleotide
  modified_base 84: mod_base = OTHER; note = 2'-O-methyl ribonucleotide
  modified_base 85: mod_base = OTHER; note = 2'-O-methyl ribonucleotide
  modified_base 86: mod_base = OTHER; note = 2'-O-methyl ribonucleotide
  modified_base 87: mod_base = OTHER; note = 2'-O-methyl ribonucleotide
  modified_base 88: mod_base = OTHER; note = 2'-O-methyl ribonucleotide
  modified_base 89: mod_base = OTHER; note = 2'-O-methyl ribonucleotide
  modified_base 90: mod_base = OTHER; note = 2'-O-methyl ribonucleotide
  modified_base 91: mod_base = OTHER; note = 2'-O-methyl ribonucleotide
  modified_base 92: mod_base = OTHER; note = 2'-O-methyl ribonucleotide
  modified_base 93: mod_base = OTHER; note = 2'-O-methyl ribonucleotide
  modified_base 94: mod_base = OTHER; note = 2'-O-methyl ribonucleotide
  modified_base 95: mod_base = OTHER; note = 2'-O-methyl ribonucleotide
  modified_base 96: mod_base = OTHER; note = 2'-O-methyl ribonucleotide
  modified_base 97: mod_base = OTHER; note = 2'-O-methyl ribonucleotide
  modified_base 98: mod_base = OTHER; note = 2'-O-methyl ribonucleotide
  modified_base 99: mod_base = OTHER; note = 2'-O-methyl ribonucleotide
  modified_base 100: mod_base = OTHER; note = 2'-O-methyl ribonucleotide
  modified_base 1..3: mod_base = OTHER; note = phosphorothioate linkage
  modified_base 97..100: mod_base = OTHER; note = phosphorothioate linkage

SEQ ID NO: 2550 - RNA, 103 nt, synthetic construct; identical to SEQ ID NO: 1699
  source 1..103: mol_type = other RNA
  modified_base 1: mod_base = OTHER; note = 2'-O-methyl ribonucleotide
  modified_base 2: mod_base = OTHER; note = 2'-O-methyl ribonucleotide
  modified_base 3: mod_base = OTHER; note = 2'-O-methyl ribonucleotide
  modified_base 21: mod_base = OTHER; note = 2'-O-methyl ribonucleotide
  modified_base 28: mod_base = OTHER; note = 2'-O-methyl ribonucleotide
  modified_base 29: mod_base = OTHER; note = 2'-O-methyl ribonucleotide
  modified_base 30: mod_base = OTHER; note = 2'-O-methyl ribonucleotide
  modified_base 31: mod_base = OTHER; note = 2'-O-methyl ribonucleotide
  modified_base 32: mod_base = OTHER; note = 2'-O-methyl ribonucleotide
  modified_base 33: mod_base = OTHER; note = 2'-O-methyl ribonucleotide
  modified_base 34: mod_base = OTHER; note = 2'-O-methyl ribonucleotide
  modified_base 35: mod_base = OTHER; note = 2'-O-methyl ribonucleotide
  modified_base 36: mod_base = OTHER; note = 2'-O-methyl ribonucleotide
  modified_base 37: mod_base = OTHER; note = 2'-O-methyl ribonucleotide
  modified_base 38: mod_base = OTHER; note = 2'-O-methyl ribonucleotide
  modified_base 39: mod_base = OTHER; note = 2'-O-methyl ribonucleotide
  modified_base 40: mod_base = OTHER; note = 2'-O-methyl ribonucleotide
  modified_base 41: mod_base = OTHER; note = 2'-O-methyl ribonucleotide
  modified_base 42: mod_base = OTHER; note = 2'-O-methyl ribonucleotide
  modified_base 46: mod_base = OTHER; note = 2'-O-methyl ribonucleotide
  modified_base 48: mod_base = OTHER; note = 2'-O-methyl ribonucleotide
  modified_base 50: mod_base = OTHER; note = 2'-O-methyl ribonucleotide
  modified_base 52: mod_base = OTHER; note = 2'-O-methyl ribonucleotide
  modified_base 53: mod_base = OTHER; note = 2'-O-methyl ribonucleotide
  modified_base 54: mod_base = OTHER; note = 2'-O-methyl ribonucleotide
  modified_base 55: mod_base = OTHER; note = 2'-O-methyl ribonucleotide
  modified_base 56: mod_base = OTHER; note = 2'-O-methyl ribonucleotide
  modified_base 57: mod_base = OTHER; note = 2'-O-methyl ribonucleotide
  modified_base 60: mod_base = OTHER; note = 2'-O-methyl ribonucleotide
  modified_base 61: mod_base = OTHER; note = 2'-O-methyl ribonucleotide
  modified_base 66: mod_base = OTHER; note = 2'-O-methyl ribonucleotide
  modified_base 67: mod_base = OTHER; note = 2'-O-methyl ribonucleotide
  modified_base 70: mod_base = OTHER; note = 2'-O-methyl ribonucleotide
  modified_base 71: mod_base = OTHER; note = 2'-O-methyl ribonucleotide
  modified_base 72: mod_base = OTHER; note = 2'-O-methyl ribonucleotide
  modified_base 73: mod_base = OTHER; note = 2'-O-methyl ribonucleotide
  modified_base 74: mod_base = OTHER; note = 2'-O-methyl ribonucleotide
  modified_base 75: mod_base = OTHER; note = 2'-O-methyl ribonucleotide
  modified_base 76: mod_base = OTHER; note = 2'-O-methyl ribonucleotide
  modified_base 77: mod_base = OTHER; note = 2'-O-methyl ribonucleotide
  modified_base 78: mod_base = OTHER; note = 2'-O-methyl ribonucleotide
  modified_base 79: mod_base = OTHER; note = 2'-O-methyl ribonucleotide
  modified_base 80: mod_base = OTHER; note = 2'-O-methyl ribonucleotide
  modified_base 81: mod_base = OTHER; note = 2'-O-methyl ribonucleotide
  modified_base 83: mod_base = OTHER; note = 2'-O-methyl ribonucleotide
  modified_base 84: mod_base = OTHER; note = 2'-O-methyl ribonucleotide
  modified_base 85: mod_base = OTHER; note = 2'-O-methyl ribonucleotide
  modified_base 86: mod_base = OTHER; note = 2'-O-methyl ribonucleotide
  modified_base 87: mod_base = OTHER; note = 2'-O-methyl ribonucleotide
  modified_base 88: mod_base = OTHER; note = 2'-O-methyl ribonucleotide
  modified_base 89: mod_base = OTHER; note = 2'-O-methyl ribonucleotide
  modified_base 90: mod_base = OTHER; note = 2'-O-methyl ribonucleotide
  modified_base 91: mod_base = OTHER; note = 2'-O-methyl ribonucleotide
  modified_base 92: mod_base = OTHER; note = 2'-O-methyl ribonucleotide
  modified_base 93: mod_base = OTHER; note = 2'-O-methyl ribonucleotide
  modified_base 94: mod_base = OTHER; note = 2'-O-methyl ribonucleotide
  modified_base 95: mod_base = OTHER; note = 2'-O-methyl ribonucleotide
  modified_base 96: mod_base = OTHER; note = 2'-O-methyl ribonucleotide
  modified_base 97: mod_base = OTHER; note = 2'-O-methyl ribonucleotide
  modified_base 98: mod_base = OTHER; note = 2'-O-methyl ribonucleotide
  modified_base 99: mod_base = OTHER; note = 2'-O-methyl ribonucleotide
  modified_base 100: mod_base = OTHER; note = 2'-O-methyl ribonucleotide
  modified_base 1..3: mod_base = OTHER; note = phosphorothioate linkage
  modified_base 97..100: mod_base = OTHER; note = phosphorothioate linkage

SEQ ID NO: 2551 - RNA, 103 nt, synthetic construct; identical to SEQ ID NO: 1699
  source 1..103: mol_type = other RNA
  modified_base 1: mod_base = OTHER; note = 2'-O-methyl ribonucleotide
  modified_base 2: mod_base = OTHER; note = 2'-O-methyl ribonucleotide
  modified_base 3: mod_base = OTHER; note = 2'-O-methyl ribonucleotide
  modified_base 21: mod_base = OTHER; note = 2'-O-methyl ribonucleotide
  modified_base 28: mod_base = OTHER; note = 2'-O-methyl ribonucleotide
  modified_base 29: mod_base = OTHER; note = 2'-O-methyl ribonucleotide
  modified_base 30: mod_base = OTHER; note = 2'-O-methyl ribonucleotide
  modified_base 31: mod_base = OTHER; note = 2'-O-methyl ribonucleotide
  modified_base 32: mod_base = OTHER; note = 2'-O-methyl ribonucleotide
  modified_base 34: mod_base = OTHER; note = 2'-O-methyl ribonucleotide
  modified_base 35: mod_base = OTHER; note = 2'-O-methyl ribonucleotide
  modified_base 36: mod_base = OTHER; note = 2'-O-methyl ribonucleotide
  modified_base 37: mod_base = OTHER; note = 2'-O-methyl ribonucleotide
  modified_base 38: mod_base = OTHER; note = 2'-O-methyl ribonucleotide
  modified_base 39: mod_base = OTHER; note = 2'-O-methyl ribonucleotide
  modified_base 40: mod_base = OTHER; note = 2'-O-methyl ribonucleotide
  modified_base 41: mod_base = OTHER; note = 2'-O-methyl ribonucleotide
  modified_base 42: mod_base = OTHER; note = 2'-O-methyl ribonucleotide
  modified_base 46: mod_base = OTHER; note = 2'-O-methyl ribonucleotide
  modified_base 48: mod_base = OTHER; note = 2'-O-methyl ribonucleotide
  modified_base 50: mod_base = OTHER; note = 2'-O-methyl ribonucleotide
  modified_base 52: mod_base = OTHER; note = 2'-O-methyl ribonucleotide
  modified_base 53: mod_base = OTHER; note = 2'-O-methyl ribonucleotide
  modified_base 54: mod_base = OTHER; note = 2'-O-methyl ribonucleotide
  modified_base 55: mod_base = OTHER; note = 2'-O-methyl ribonucleotide
  modified_base 56: mod_base = OTHER; note = 2'-O-methyl ribonucleotide
  modified_base 57: mod_base = OTHER; note = 2'-O-methyl ribonucleotide
  modified_base 60: mod_base = OTHER; note = 2'-O-methyl ribonucleotide
  modified_base 61: mod_base = OTHER; note = 2'-O-methyl ribonucleotide
  modified_base 66: mod_base = OTHER; note = 2'-O-methyl ribonucleotide
  modified_base 67: mod_base = OTHER; note = 2'-O-methyl ribonucleotide
  modified_base 70: mod_base = OTHER; note = 2'-O-methyl ribonucleotide
  modified_base 71: mod_base = OTHER; note = 2'-O-methyl ribonucleotide
  modified_base 72: mod_base = OTHER; note = 2'-O-methyl ribonucleotide
  modified_base 74: mod_base = OTHER; note = 2'-O-methyl ribonucleotide
  modified_base 75: mod_base = OTHER; note = 2'-O-methyl ribonucleotide
  modified_base 76: mod_base = OTHER; note = 2'-O-methyl ribonucleotide
  modified_base 77: mod_base = OTHER; note = 2'-O-methyl ribonucleotide
  modified_base 78: mod_base = OTHER; note = 2'-O-methyl ribonucleotide
  modified_base 79: mod_base = OTHER; note = 2'-O-methyl ribonucleotide
  modified_base 80: mod_base = OTHER; note = 2'-O-methyl ribonucleotide
  modified_base 81: mod_base = OTHER; note = 2'-O-methyl ribonucleotide
  modified_base 83: mod_base = OTHER; note = 2'-O-methyl ribonucleotide
  modified_base 84: mod_base = OTHER; note = 2'-O-methyl ribonucleotide
  modified_base 85: mod_base = OTHER; note = 2'-O-methyl ribonucleotide
  modified_base 86: mod_base = OTHER; note = 2'-O-methyl ribonucleotide
  modified_base 87: mod_base = OTHER; note = 2'-O-methyl ribonucleotide
  modified_base 88: mod_base = OTHER; note = 2'-O-methyl ribonucleotide
  modified_base 89: mod_base = OTHER; note = 2'-O-methyl ribonucleotide
  modified_base 90: mod_base = OTHER; note = 2'-O-methyl ribonucleotide
  modified_base 91: mod_base = OTHER; note = 2'-O-methyl ribonucleotide
  modified_base 92: mod_base = OTHER; note = 2'-O-methyl ribonucleotide
  modified_base 93: mod_base = OTHER; note = 2'-O-methyl ribonucleotide
  modified_base 94: mod_base = OTHER; note = 2'-O-methyl ribonucleotide
  modified_base 95: mod_base = OTHER; note = 2'-O-methyl ribonucleotide
  modified_base 96: mod_base = OTHER; note = 2'-O-methyl ribonucleotide
  modified_base 97: mod_base = OTHER; note = 2'-O-methyl ribonucleotide
  modified_base 98: mod_base = OTHER; note = 2'-O-methyl ribonucleotide
  modified_base 99: mod_base = OTHER; note = 2'-O-methyl ribonucleotide
  modified_base 100: mod_base = OTHER; note = 2'-O-methyl ribonucleotide
  modified_base 1..3: mod_base = OTHER; note = phosphorothioate linkage
  modified_base 97..100: mod_base = OTHER; note = phosphorothioate linkage

SEQ ID NO: 2552 - RNA, 103 nt, synthetic construct; identical to SEQ ID NO: 1643
  source 1..103: mol_type = other RNA
  modified_base 1: mod_base = OTHER; note = 2'-O-methyl ribonucleotide
  modified_base 2: mod_base = OTHER; note = 2'-O-methyl ribonucleotide
  modified_base 3: mod_base = OTHER; note = 2'-O-methyl ribonucleotide
  modified_base 21: mod_base = OTHER; note = 2'-O-methyl ribonucleotide
  modified_base 28: mod_base = OTHER; note = 2'-O-methyl ribonucleotide
  modified_base 29: mod_base = OTHER; note = 2'-O-methyl ribonucleotide
  modified_base 30: mod_base = OTHER; note = 2'-O-methyl ribonucleotide
  modified_base 31: mod_base = OTHER; note = 2'-O-methyl ribonucleotide
  modified_base 32: mod_base = OTHER; note = 2'-O-methyl ribonucleotide
  modified_base 33: mod_base = OTHER; note = 2'-O-methyl ribonucleotide
  modified_base 34: mod_base = OTHER; note = 2'-O-methyl ribonucleotide
  modified_base 35: mod_base = OTHER; note = 2'-O-methyl ribonucleotide
  modified_base 36: mod_base = OTHER; note = 2'-O-methyl ribonucleotide
  modified_base 37: mod_base = OTHER; note = 2'-O-methyl ribonucleotide
  modified_base 38: mod_base = OTHER; note = 2'-O-methyl ribonucleotide
  modified_base 39: mod_base = OTHER; note = 2'-O-methyl ribonucleotide
  modified_base 40: mod_base = OTHER; note = 2'-O-methyl ribonucleotide
  modified_base 41: mod_base = OTHER; note = 2'-O-methyl ribonucleotide
  modified_base 42: mod_base = OTHER; note = 2'-O-methyl ribonucleotide
  modified_base 46: mod_base = OTHER; note = 2'-O-methyl ribonucleotide
  modified_base 48: mod_base = OTHER; note = 2'-O-methyl ribonucleotide
  modified_base 50: mod_base = OTHER; note = 2'-O-methyl ribonucleotide
  modified_base 52: mod_base = OTHER; note = 2'-O-methyl ribonucleotide
  modified_base 53: mod_base = OTHER; note = 2'-O-methyl ribonucleotide
  modified_base 54: mod_base = OTHER; note = 2'-O-methyl ribonucleotide
  modified_base 55: mod_base = OTHER; note = 2'-O-methyl ribonucleotide
  modified_base 56: mod_base = OTHER; note = 2'-O-methyl ribonucleotide
  modified_base 57: mod_base = OTHER; note = 2'-O-methyl ribonucleotide
  modified_base 60: mod_base = OTHER; note = 2'-O-methyl ribonucleotide
  modified_base 61: mod_base = OTHER; note = 2'-O-methyl ribonucleotide
  modified_base 66: mod_base = OTHER; note = 2'-O-methyl ribonucleotide
  modified_base 67: mod_base = OTHER; note = 2'-O-methyl ribonucleotide
  modified_base 70: mod_base = OTHER; note = 2'-O-methyl ribonucleotide
  modified_base 71: mod_base = OTHER; note = 2'-O-methyl ribonucleotide
  modified_base 72: mod_base = OTHER; note = 2'-O-methyl ribonucleotide
  modified_base 73: mod_base = OTHER; note = 2'-O-methyl ribonucleotide
  modified_base 74: mod_base = OTHER; note = 2'-O-methyl ribonucleotide
  modified_base 75: mod_base = OTHER; note = 2'-O-methyl ribonucleotide
  modified_base 76: mod_base = OTHER; note = 2'-O-methyl ribonucleotide
  modified_base 77: mod_base = OTHER; note = 2'-O-methyl ribonucleotide
  modified_base 78: mod_base = OTHER; note = 2'-O-methyl ribonucleotide
  modified_base 79: mod_base = OTHER; note = 2'-O-methyl ribonucleotide
  modified_base 80: mod_base = OTHER; note = 2'-O-methyl ribonucleotide
  modified_base 81: mod_base = OTHER; note = 2'-O-methyl ribonucleotide
  modified_base 83: mod_base = OTHER; note = 2'-O-methyl ribonucleotide
  modified_base 84: mod_base = OTHER; note = 2'-O-methyl ribonucleotide
  modified_base 85: mod_base = OTHER; note = 2'-O-methyl ribonucleotide
  modified_base 86: mod_base = OTHER; note = 2'-O-methyl ribonucleotide
  modified_base 87: mod_base = OTHER; note = 2'-O-methyl ribonucleotide
  modified_base 88: mod_base = OTHER; note = 2'-O-methyl ribonucleotide
  modified_base 89: mod_base = OTHER; note = 2'-O-methyl ribonucleotide
  modified_base 90: mod_base = OTHER; note = 2'-O-methyl ribonucleotide
  modified_base 91: mod_base = OTHER; note = 2'-O-methyl ribonucleotide
  modified_base 92: mod_base = OTHER; note = 2'-O-methyl ribonucleotide
  modified_base 93: mod_base = OTHER; note = 2'-O-methyl ribonucleotide
  modified_base 94: mod_base = OTHER; note = 2'-O-methyl ribonucleotide
  modified_base 95: mod_base = OTHER; note = 2'-O-methyl ribonucleotide
  modified_base 96: mod_base = OTHER; note = 2'-O-methyl ribonucleotide
  modified_base 97: mod_base = OTHER; note = 2'-O-methyl ribonucleotide
  modified_base 98: mod_base = OTHER; note = 2'-O-methyl ribonucleotide
  modified_base 99: mod_base = OTHER; note = 2'-O-methyl ribonucleotide
  modified_base 100: mod_base = OTHER; note = 2'-O-methyl ribonucleotide
  modified_base 1..3: mod_base = OTHER; note = phosphorothioate linkage
  modified_base 64..65: mod_base = OTHER; note = phosphorothioate linkage
  modified_base 97..100: mod_base = OTHER; note = phosphorothioate linkage

SEQ ID NO: 2553 - RNA, 103 nt, synthetic construct; identical to SEQ ID NO: 1643
  source 1..103: mol_type = other RNA
  modified_base 1: mod_base = OTHER; note = 2'-O-methyl ribonucleotide
  modified_base 2: mod_base = OTHER; note = 2'-O-methyl ribonucleotide
  modified_base 3: mod_base = OTHER; note = 2'-O-methyl ribonucleotide
  modified_base 21: mod_base = OTHER; note = 2'-O-methyl ribonucleotide
  modified_base 28: mod_base = OTHER; note = 2'-O-methyl ribonucleotide
  modified_base 29: mod_base = OTHER; note = 2'-O-methyl ribonucleotide
  modified_base 30: mod_base = OTHER; note = 2'-O-methyl ribonucleotide
  modified_base 31: mod_base = OTHER; note = 2'-O-methyl ribonucleotide
  modified_base 32: mod_base = OTHER; note = 2'-O-methyl ribonucleotide
  modified_base 34: mod_base = OTHER; note = 2'-O-methyl ribonucleotide
  modified_base 35: mod_base = OTHER; note = 2'-O-methyl ribonucleotide
  modified_base 36: mod_base = OTHER; note = 2'-O-methyl ribonucleotide
  modified_base 37: mod_base = OTHER; note = 2'-O-methyl ribonucleotide
  modified_base 38: mod_base = OTHER; note = 2'-O-methyl ribonucleotide
  modified_base 39: mod_base = OTHER; note = 2'-O-methyl ribonucleotide
  modified_base 40: mod_base = OTHER; note = 2'-O-methyl ribonucleotide
  modified_base 41: mod_base = OTHER; note = 2'-O-methyl ribonucleotide
  modified_base 42: mod_base = OTHER; note = 2'-O-methyl ribonucleotide
  modified_base 46: mod_base = OTHER; note = 2'-O-methyl ribonucleotide
  modified_base 48: mod_base = OTHER; note = 2'-O-methyl ribonucleotide
  modified_base 50: mod_base = OTHER; note = 2'-O-methyl ribonucleotide
  modified_base 52: mod_base = OTHER; note = 2'-O-methyl ribonucleotide
  modified_base 53: mod_base = OTHER; note = 2'-O-methyl ribonucleotide
  modified_base 54: mod_base = OTHER; note = 2'-O-methyl ribonucleotide
  modified_base 55: mod_base = OTHER; note = 2'-O-methyl ribonucleotide
  modified_base 56: mod_base = OTHER; note = 2'-O-methyl ribonucleotide
  modified_base 57: mod_base = OTHER; note = 2'-O-methyl ribonucleotide
  modified_base 60: mod_base = OTHER; note = 2'-O-methyl ribonucleotide
  modified_base 61: mod_base = OTHER; note = 2'-O-methyl ribonucleotide
  modified_base 66: mod_base = OTHER; note = 2'-O-methyl ribonucleotide
  modified_base 67: mod_base = OTHER; note = 2'-O-methyl ribonucleotide
  modified_base 70: mod_base = OTHER; note = 2'-O-methyl ribonucleotide
  modified_base 71: mod_base = OTHER; note = 2'-O-methyl ribonucleotide
  modified_base 72: mod_base = OTHER; note = 2'-O-methyl ribonucleotide
  modified_base 74: mod_base = OTHER; note = 2'-O-methyl ribonucleotide
  modified_base 75: mod_base = OTHER; note = 2'-O-methyl ribonucleotide
  modified_base 76: mod_base = OTHER; note = 2'-O-methyl ribonucleotide
  modified_base 77: mod_base = OTHER; note = 2'-O-methyl ribonucleotide
  modified_base 78: mod_base = OTHER; note = 2'-O-methyl ribonucleotide
  modified_base 79: mod_base = OTHER; note = 2'-O-methyl ribonucleotide
  modified_base 80: mod_base = OTHER; note = 2'-O-methyl ribonucleotide
  modified_base 81: mod_base = OTHER; note = 2'-O-methyl ribonucleotide
  modified_base 83: mod_base = OTHER; note = 2'-O-methyl ribonucleotide
  modified_base 84: mod_base = OTHER; note = 2'-O-methyl ribonucleotide
  modified_base 85: mod_base = OTHER; note = 2'-O-methyl ribonucleotide
  modified_base 86: mod_base = OTHER; note = 2'-O-methyl ribonucleotide
  modified_base 87: mod_base = OTHER; note = 2'-O-methyl ribonucleotide
  modified_base 88: mod_base = OTHER; note = 2'-O-methyl ribonucleotide
  modified_base 89: mod_base = OTHER; note = 2'-O-methyl ribonucleotide
  modified_base 90: mod_base = OTHER; note = 2'-O-methyl ribonucleotide
  modified_base 91: mod_base = OTHER; note = 2'-O-methyl ribonucleotide
  modified_base 92: mod_base = OTHER; note = 2'-O-methyl ribonucleotide
  modified_base 93: mod_base = OTHER; note = 2'-O-methyl ribonucleotide
  modified_base 94: mod_base = OTHER; note = 2'-O-methyl ribonucleotide
  modified_base 95: mod_base = OTHER; note = 2'-O-methyl ribonucleotide
  modified_base 96: mod_base = OTHER; note = 2'-O-methyl ribonucleotide
  modified_base 97: mod_base = OTHER; note = 2'-O-methyl ribonucleotide
  modified_base 98: mod_base = OTHER; note = 2'-O-methyl ribonucleotide
  modified_base 99: mod_base = OTHER; note = 2'-O-methyl ribonucleotide
  modified_base 100: mod_base = OTHER; note = 2'-O-methyl ribonucleotide
  modified_base 1..3: mod_base = OTHER; note = phosphorothioate linkage
  modified_base 64..65: mod_base = OTHER; note = phosphorothioate linkage
  modified_base 97..100: mod_base = OTHER; note = phosphorothioate linkage

SEQ ID NO: 2554 - RNA, 103 nt, synthetic construct; identical to SEQ ID NO: 1699
  source 1..103: mol_type = other RNA
  modified_base 1: mod_base = OTHER; note = 2'-O-methyl ribonucleotide
  modified_base 2: mod_base = OTHER; note = 2'-O-methyl ribonucleotide
  modified_base 3: mod_base = OTHER; note = 2'-O-methyl ribonucleotide
  modified_base 21: mod_base = OTHER; note = 2'-O-methyl ribonucleotide
  modified_base 28: mod_base = OTHER; note = 2'-O-methyl ribonucleotide
  modified_base 29: mod_base = OTHER; note = 2'-O-methyl ribonucleotide
  modified_base 30: mod_base = OTHER; note = 2'-O-methyl ribonucleotide
  modified_base 31: mod_base = OTHER; note = 2'-O-methyl ribonucleotide
  modified_base 32: mod_base = OTHER; note = 2'-O-methyl ribonucleotide
  modified_base 33: mod_base = OTHER; note = 2'-O-methyl ribonucleotide
  modified_base 34: mod_base = OTHER; note = 2'-O-methyl ribonucleotide
  modified_base 35: mod_base = OTHER; note = 2'-O-methyl ribonucleotide
  modified_base 36: mod_base = OTHER; note = 2'-O-methyl ribonucleotide
  modified_base 37: mod_base = OTHER; note = 2'-O-methyl ribonucleotide
  modified_base 38: mod_base = OTHER; note = 2'-O-methyl ribonucleotide
  modified_base 39: mod_base = OTHER; note = 2'-O-methyl ribonucleotide
  modified_base 40: mod_base = OTHER; note = 2'-O-methyl ribonucleotide
  modified_base 41: mod_base = OTHER; note = 2'-O-methyl ribonucleotide
  modified_base 42: mod_base = OTHER; note = 2'-O-methyl ribonucleotide
  modified_base 46: mod_base = OTHER; note = 2'-O-methyl ribonucleotide
  modified_base 48: mod_base = OTHER; note = 2'-O-methyl ribonucleotide
  modified_base 50: mod_base = OTHER; note = 2'-O-methyl ribonucleotide
  modified_base 52: mod_base = OTHER; note = 2'-O-methyl ribonucleotide
  modified_base 53: mod_base = OTHER; note = 2'-O-methyl ribonucleotide
  modified_base 54: mod_base = OTHER; note = 2'-O-methyl ribonucleotide
  modified_base 55: mod_base = OTHER; note = 2'-O-methyl ribonucleotide
  modified_base 56: mod_base = OTHER; note = 2'-O-methyl ribonucleotide
  modified_base 57: mod_base = OTHER; note = 2'-O-methyl ribonucleotide
  modified_base 60: mod_base = OTHER; note = 2'-O-methyl ribonucleotide
  modified_base 61: mod_base = OTHER; note = 2'-O-methyl ribonucleotide
  modified_base 66: mod_base = OTHER; note = 2'-O-methyl ribonucleotide
  modified_base 67: mod_base = OTHER; note = 2'-O-methyl ribonucleotide
  modified_base 70: mod_base = OTHER; note = 2'-O-methyl ribonucleotide
  modified_base 71: mod_base = OTHER; note = 2'-O-methyl ribonucleotide
  modified_base 72: mod_base = OTHER; note = 2'-O-methyl ribonucleotide
  modified_base 73: mod_base = OTHER; note = 2'-O-methyl ribonucleotide
  modified_base 74: mod_base = OTHER; note = 2'-O-methyl ribonucleotide
  modified_base 75: mod_base = OTHER; note = 2'-O-methyl ribonucleotide
  modified_base 76: mod_base = OTHER; note = 2'-O-methyl ribonucleotide
  modified_base 77: mod_base = OTHER; note = 2'-O-methyl ribonucleotide
  modified_base 78: mod_base = OTHER; note = 2'-O-methyl ribonucleotide
  modified_base 79: mod_base = OTHER; note = 2'-O-methyl ribonucleotide
  modified_base 80: mod_base = OTHER; note = 2'-O-methyl ribonucleotide
  modified_base 81: mod_base = OTHER; note = 2'-O-methyl ribonucleotide
  modified_base 83: mod_base = OTHER; note = 2'-O-methyl ribonucleotide
  modified_base 84: mod_base = OTHER; note = 2'-O-methyl ribonucleotide
  modified_base 85: mod_base = OTHER; note = 2'-O-methyl ribonucleotide
  modified_base 86: mod_base = OTHER; note = 2'-O-methyl ribonucleotide
  modified_base 87: mod_base = OTHER; note = 2'-O-methyl ribonucleotide
  modified_base 88: mod_base = OTHER; note = 2'-O-methyl ribonucleotide
  modified_base 89: mod_base = OTHER; note = 2'-O-methyl ribonucleotide
  modified_base 90: mod_base = OTHER; note = 2'-O-methyl ribonucleotide
  modified_base 91: mod_base = OTHER; note = 2'-O-methyl ribonucleotide
  modified_base 92: mod_base = OTHER; note = 2'-O-methyl ribonucleotide
  modified_base 93: mod_base = OTHER; note = 2'-O-methyl ribonucleotide
  modified_base 94: mod_base = OTHER; note = 2'-O-methyl ribonucleotide
  modified_base 95: mod_base = OTHER; note = 2'-O-methyl ribonucleotide
  modified_base 96: mod_base = OTHER; note = 2'-O-methyl ribonucleotide
  modified_base 97: mod_base = OTHER; note = 2'-O-methyl ribonucleotide
  modified_base 98: mod_base = OTHER; note = 2'-O-methyl ribonucleotide
  modified_base 99: mod_base = OTHER; note = 2'-O-methyl ribonucleotide
  modified_base 100: mod_base = OTHER; note = 2'-O-methyl ribonucleotide
  modified_base 1..3: mod_base = OTHER; note = phosphorothioate linkage
  modified_base 64..65: mod_base = OTHER; note = phosphorothioate linkage
  modified_base 97..100: mod_base = OTHER; note = phosphorothioate linkage

SEQ ID NO: 2555 - RNA, 103 nt, synthetic construct; identical to SEQ ID NO: 1699
  source 1..103: mol_type = other RNA
  modified_base 1: mod_base = OTHER; note = 2'-O-methyl ribonucleotide
  modified_base 2: mod_base = OTHER; note = 2'-O-methyl ribonucleotide
  modified_base 3: mod_base = OTHER; note = 2'-O-methyl ribonucleotide
  modified_base 21: mod_base = OTHER; note = 2'-O-methyl ribonucleotide
  modified_base 28: mod_base = OTHER; note = 2'-O-methyl ribonucleotide
  modified_base 29: mod_base = OTHER; note = 2'-O-methyl ribonucleotide
  modified_base 30: mod_base = OTHER; note = 2'-O-methyl ribonucleotide
  modified_base 31: mod_base = OTHER; note = 2'-O-methyl ribonucleotide
  modified_base 32: mod_base = OTHER; note = 2'-O-methyl ribonucleotide
  modified_base 34: mod_base = OTHER; note = 2'-O-methyl ribonucleotide
  modified_base 35: mod_base = OTHER; note = 2'-O-methyl ribonucleotide
  modified_base 36: mod_base = OTHER; note = 2'-O-methyl ribonucleotide
  modified_base 37: mod_base = OTHER; note = 2'-O-methyl ribonucleotide
  modified_base 38: mod_base = OTHER; note = 2'-O-methyl ribonucleotide
  modified_base 39: mod_base = OTHER; note = 2'-O-methyl ribonucleotide
  modified_base 40: mod_base = OTHER; note = 2'-O-methyl ribonucleotide
  modified_base 41: mod_base = OTHER; note = 2'-O-methyl ribonucleotide
  modified_base 42: mod_base = OTHER; note = 2'-O-methyl ribonucleotide
  modified_base 46: mod_base = OTHER; note = 2'-O-methyl ribonucleotide
  modified_base 48: mod_base = OTHER; note = 2'-O-methyl ribonucleotide
  modified_base 50: mod_base = OTHER; note = 2'-O-methyl ribonucleotide
  modified_base 52: mod_base = OTHER; note = 2'-O-methyl ribonucleotide
  modified_base 53: mod_base = OTHER; note = 2'-O-methyl ribonucleotide
  modified_base 54: mod_base = OTHER; note = 2'-O-methyl ribonucleotide
  modified_base 55: mod_base = OTHER; note = 2'-O-methyl ribonucleotide
  modified_base 56: mod_base = OTHER; note = 2'-O-methyl ribonucleotide
  modified_base 57: mod_base = OTHER; note = 2'-O-methyl ribonucleotide
  modified_base 60: mod_base = OTHER; note = 2'-O-methyl ribonucleotide
  modified_base 61: mod_base = OTHER; note = 2'-O-methyl ribonucleotide
  modified_base 66: mod_base = OTHER; note = 2'-O-methyl ribonucleotide
  modified_base 67: mod_base = OTHER; note = 2'-O-methyl ribonucleotide
  modified_base 70: mod_base = OTHER; note = 2'-O-methyl ribonucleotide
  modified_base 71: mod_base = OTHER; note = 2'-O-methyl ribonucleotide
  modified_base 72: mod_base = OTHER; note = 2'-O-methyl ribonucleotide
  modified_base 74: mod_base = OTHER; note = 2'-O-methyl ribonucleotide
  modified_base 75: mod_base = OTHER; note = 2'-O-methyl ribonucleotide
  modified_base 76: mod_base = OTHER; note = 2'-O-methyl ribonucleotide
  modified_base 77: mod_base = OTHER; note = 2'-O-methyl ribonucleotide
  modified_base 78: mod_base = OTHER; note = 2'-O-methyl ribonucleotide
  modified_base 79: mod_base = OTHER; note = 2'-O-methyl ribonucleotide
  modified_base 80: mod_base = OTHER; note = 2'-O-methyl ribonucleotide
  modified_base 81: mod_base = OTHER; note = 2'-O-methyl ribonucleotide
  modified_base 83: mod_base = OTHER; note = 2'-O-methyl ribonucleotide
  modified_base 84: mod_base = OTHER; note = 2'-O-methyl ribonucleotide
  modified_base 85: mod_base = OTHER; note = 2'-O-methyl ribonucleotide
  modified_base 86: mod_base = OTHER; note = 2'-O-methyl ribonucleotide
  modified_base 87: mod_base = OTHER; note = 2'-O-methyl ribonucleotide
  modified_base 88: mod_base = OTHER; note = 2'-O-methyl ribonucleotide
  modified_base 89: mod_base = OTHER; note = 2'-O-methyl ribonucleotide
  modified_base 90: mod_base = OTHER; note = 2'-O-methyl ribonucleotide
  modified_base 91: mod_base = OTHER; note = 2'-O-methyl ribonucleotide
  modified_base 92: mod_base = OTHER; note = 2'-O-methyl ribonucleotide
  modified_base 93: mod_base = OTHER; note = 2'-O-methyl ribonucleotide
  modified_base 94: mod_base = OTHER; note = 2'-O-methyl ribonucleotide
  modified_base 95: mod_base = OTHER; note = 2'-O-methyl ribonucleotide
  modified_base 96: mod_base = OTHER; note = 2'-O-methyl ribonucleotide
  modified_base 97: mod_base = OTHER; note = 2'-O-methyl ribonucleotide
  modified_base 98: mod_base = OTHER; note = 2'-O-methyl ribonucleotide
  modified_base 99: mod_base = OTHER; note = 2'-O-methyl ribonucleotide
  modified_base 100: mod_base = OTHER; note = 2'-O-methyl ribonucleotide
  modified_base 1..3: mod_base = OTHER; note = phosphorothioate linkage
  modified_base 64..65: mod_base = OTHER; note = phosphorothioate linkage
  modified_base 97..100: mod_base = OTHER; note = phosphorothioate linkage

SEQ ID NO: 2556 - RNA, 103 nt, synthetic construct; identical to SEQ ID NO: 1700
  source 1..103: mol_type = other RNA
  modified_base 1: mod_base = OTHER; note = 2'-O-methyl ribonucleotide
  modified_base 2: mod_base = OTHER; note = 2'-O-methyl ribonucleotide
  modified_base 3: mod_base = OTHER; note = 2'-O-methyl ribonucleotide
  modified_base 21: mod_base = OTHER; note = 2'-O-methyl ribonucleotide
  modified_base 28: mod_base = OTHER; note = 2'-O-methyl ribonucleotide
  modified_base 29: mod_base = OTHER; note = 2'-O-methyl ribonucleotide
  modified_base 30: mod_base = OTHER; note = 2'-O-methyl ribonucleotide
  modified_base 31: mod_base = OTHER; note = 2'-O-methyl ribonucleotide
  modified_base 32: mod_base = OTHER; note = 2'-O-methyl ribonucleotide
  modified_base 33: mod_base = OTHER; note = 2'-O-methyl ribonucleotide
  modified_base 34: mod_base = OTHER; note = 2'-O-methyl ribonucleotide
  modified_base 35: mod_base = OTHER; note = 2'-O-methyl ribonucleotide
  modified_base 36: mod_base = OTHER; note = 2'-O-methyl ribonucleotide
  modified_base 37: mod_base = OTHER; note = 2'-O-methyl ribonucleotide
  modified_base 38: mod_base = OTHER; note = 2'-O-methyl ribonucleotide
  modified_base 39: mod_base = OTHER; note = 2'-O-methyl ribonucleotide
  modified_base 40: mod_base = OTHER; note = 2'-O-methyl ribonucleotide
  modified_base 41: mod_base = OTHER; note = 2'-O-methyl ribonucleotide
  modified_base 42: mod_base = OTHER; note = 2'-O-methyl ribonucleotide
  modified_base 46: mod_base = OTHER; note = 2'-O-methyl ribonucleotide
  modified_base 48: mod_base = OTHER; note = 2'-O-methyl ribonucleotide
  modified_base 50: mod_base = OTHER; note = 2'-O-methyl ribonucleotide
  modified_base 52: mod_base = OTHER; note = 2'-O-methyl ribonucleotide
  modified_base 53: mod_base = OTHER; note = 2'-O-methyl ribonucleotide
  modified_base 54: mod_base = OTHER; note = 2'-O-methyl ribonucleotide
  modified_base 57: mod_base = OTHER; note = 2'-O-methyl ribonucleotide
  modified_base 61: mod_base = OTHER; note = 2'-O-methyl ribonucleotide
  modified_base 66: mod_base = OTHER; note = 2'-O-methyl ribonucleotide
  modified_base 67: mod_base = OTHER; note = 2'-O-methyl ribonucleotide
  modified_base 70: mod_base = OTHER; note = 2'-O-methyl ribonucleotide
  modified_base 71: mod_base = OTHER; note = 2'-O-methyl ribonucleotide
  modified_base 72: mod_base = OTHER; note = 2'-O-methyl ribonucleotide
  modified_base 74: mod_base = OTHER; note = 2'-O-methyl ribonucleotide
  modified_base 75: mod_base = OTHER; note = 2'-O-methyl ribonucleotide
  modified_base 76: mod_base = OTHER; note = 2'-O-methyl ribonucleotide
  modified_base 77: mod_base = OTHER; note = 2'-O-methyl ribonucleotide
  modified_base 78: mod_base = OTHER; note = 2'-O-methyl ribonucleotide
  modified_base 79: mod_base = OTHER; note = 2'-O-methyl ribonucleotide
  modified_base 80: mod_base = OTHER; note = 2'-O-methyl ribonucleotide
  modified_base 82: mod_base = OTHER; note = 2'-O-methyl ribonucleotide
  modified_base 83: mod_base = OTHER; note = 2'-O-methyl ribonucleotide
  modified_base 84: mod_base = OTHER; note = 2'-O-methyl ribonucleotide
  modified_base 85: mod_base = OTHER; note = 2'-O-methyl ribonucleotide
  modified_base 86: mod_base = OTHER; note = 2'-O-methyl ribonucleotide
  modified_base 87: mod_base = OTHER; note = 2'-O-methyl ribonucleotide
  modified_base 89: mod_base = OTHER; note = 2'-O-methyl ribonucleotide
  modified_base 92: mod_base = OTHER; note = 2'-O-methyl ribonucleotide
  modified_base 93: mod_base = OTHER; note = 2'-O-methyl ribonucleotide
  modified_base 94: mod_base = OTHER; note = 2'-O-methyl ribonucleotide
  modified_base 95: mod_base = OTHER; note = 2'-O-methyl ribonucleotide
  modified_base 96: mod_base = OTHER; note = 2'-O-methyl ribonucleotide
  modified_base 97: mod_base = OTHER; note = 2'-O-methyl ribonucleotide
  modified_base 98: mod_base = OTHER; note = 2'-O-methyl ribonucleotide
  modified_base 99: mod_base = OTHER; note = 2'-O-methyl ribonucleotide
  modified_base 100: mod_base = OTHER; note = 2'-O-methyl ribonucleotide
  modified_base 1..3: mod_base = OTHER; note = phosphorothioate linkage
  modified_base 64..65: mod_base = OTHER; note = phosphorothioate linkage
  modified_base 97..100: mod_base = OTHER; note = phosphorothioate linkage

SEQ ID NO: 2557 - RNA, 103 nt, synthetic construct; identical to SEQ ID NO: 1700
  source 1..103: mol_type = other RNA
  modified_base 1: mod_base = OTHER; note = 2'-O-methyl ribonucleotide
  modified_base 2: mod_base = OTHER; note = 2'-O-methyl ribonucleotide
  modified_base 3: mod_base = OTHER; note = 2'-O-methyl ribonucleotide
  modified_base 21: mod_base = OTHER; note = 2'-O-methyl ribonucleotide
  modified_base 28: mod_base = OTHER; note = 2'-O-methyl ribonucleotide
  modified_base 29: mod_base = OTHER; note = 2'-O-methyl ribonucleotide
  modified_base 30: mod_base = OTHER; note = 2'-O-methyl ribonucleotide
  modified_base 31: mod_base = OTHER; note = 2'-O-methyl ribonucleotide
  modified_base 32: mod_base = OTHER; note = 2'-O-methyl ribonucleotide
  modified_base 33: mod_base = OTHER; note = 2'-O-methyl ribonucleotide
  modified_base 34: mod_base = OTHER; note = 2'-O-methyl ribonucleotide
  modified_base 35: mod_base = OTHER; note = 2'-O-methyl ribonucleotide
  modified_base 36: mod_base = OTHER; note = 2'-O-methyl ribonucleotide
  modified_base 37: mod_base = OTHER; note = 2'-O-methyl ribonucleotide
  modified_base 38: mod_base = OTHER; note = 2'-O-methyl ribonucleotide
  modified_base 39: mod_base = OTHER; note = 2'-O-methyl ribonucleotide
  modified_base 40: mod_base = OTHER; note = 2'-O-methyl ribonucleotide
  modified_base 41: mod_base = OTHER; note = 2'-O-methyl ribonucleotide
  modified_base 42: mod_base = OTHER; note = 2'-O-methyl ribonucleotide
  modified_base 46: mod_base = OTHER; note = 2'-O-methyl ribonucleotide
  modified_base 48: mod_base = OTHER; note = 2'-O-methyl ribonucleotide
  modified_base 50: mod_base = OTHER; note = 2'-O-methyl ribonucleotide
  modified_base 52: mod_base = OTHER; note = 2'-O-methyl ribonucleotide
  modified_base 53: mod_base = OTHER; note = 2'-O-methyl ribonucleotide
  modified_base 54: mod_base = OTHER; note = 2'-O-methyl ribonucleotide
  modified_base 55: mod_base = OTHER; note = 2'-O-methyl ribonucleotide
  modified_base 56: mod_base = OTHER; note = 2'-O-methyl ribonucleotide
  modified_base 57: mod_base = OTHER; note = 2'-O-methyl ribonucleotide
  modified_base 60: mod_base = OTHER; note = 2'-O-methyl ribonucleotide
  modified_base 61: mod_base = OTHER; note = 2'-O-methyl ribonucleotide
  modified_base 66: mod_base = OTHER; note = 2'-O-methyl ribonucleotide
  modified_base 67: mod_base = OTHER; note = 2'-O-methyl ribonucleotide
  modified_base 70: mod_base = OTHER; note = 2'-O-methyl ribonucleotide
  modified_base 71: mod_base = OTHER; note = 2'-O-methyl ribonucleotide
  modified_base 72: mod_base = OTHER; note = 2'-O-methyl ribonucleotide
  modified_base 74: mod_base = OTHER; note = 2'-O-methyl ribonucleotide
  modified_base 75: mod_base = OTHER; note = 2'-O-methyl ribonucleotide
  modified_base 76: mod_base = OTHER; note = 2'-O-methyl ribonucleotide
  modified_base 77: mod_base = OTHER; note = 2'-O-methyl ribonucleotide
  modified_base 78: mod_base = OTHER; note = 2'-O-methyl ribonucleotide
  modified_base 79: mod_base = OTHER; note = 2'-O-methyl ribonucleotide
  modified_base 80: mod_base = OTHER; note = 2'-O-methyl ribonucleotide
  modified_base 82: mod_base = OTHER; note = 2'-O-methyl ribonucleotide
  modified_base 83: mod_base = OTHER; note = 2'-O-methyl ribonucleotide
  modified_base 84: mod_base = OTHER; note = 2'-O-methyl ribonucleotide
  modified_base 85: mod_base = OTHER; note = 2'-O-methyl ribonucleotide
  modified_base 86: mod_base = OTHER; note = 2'-O-methyl ribonucleotide
  modified_base 87: mod_base = OTHER; note = 2'-O-methyl ribonucleotide
  modified_base 89: mod_base = OTHER; note = 2'-O-methyl ribonucleotide
  modified_base 92: mod_base = OTHER; note = 2'-O-methyl ribonucleotide
  modified_base 93: mod_base = OTHER; note = 2'-O-methyl ribonucleotide
  modified_base 94: mod_base = OTHER; note = 2'-O-methyl ribonucleotide
  modified_base 95: mod_base = OTHER; note = 2'-O-methyl ribonucleotide
  modified_base 96: mod_base = OTHER; note = 2'-O-methyl ribonucleotide
  modified_base 97: mod_base = OTHER; note = 2'-O-methyl ribonucleotide
  modified_base 98: mod_base = OTHER; note = 2'-O-methyl ribonucleotide
  modified_base 99: mod_base = OTHER; note = 2'-O-methyl ribonucleotide
  modified_base 100: mod_base = OTHER; note = 2'-O-methyl ribonucleotide
  modified_base 1..3: mod_base = OTHER; note = phosphorothioate linkage
  modified_base 64..65: mod_base = OTHER; note = phosphorothioate linkage
  modified_base 97..100: mod_base = OTHER; note = phosphorothioate linkage

SEQ ID NO: 2558 - RNA, 103 nt, synthetic construct; identical to SEQ ID NO: 1700
  source 1..103: mol_type = other RNA
  modified_base 1: mod_base = OTHER; note = 2'-O-methyl ribonucleotide
  modified_base 2: mod_base = OTHER; note = 2'-O-methyl ribonucleotide
  modified_base 3: mod_base = OTHER; note = 2'-O-methyl ribonucleotide
  modified_base 21: mod_base = OTHER; note = 2'-O-methyl ribonucleotide
  modified_base 28: mod_base = OTHER; note = 2'-O-methyl ribonucleotide
  modified_base 29: mod_base = OTHER; note = 2'-O-methyl ribonucleotide
  modified_base 30: mod_base = OTHER; note = 2'-O-methyl ribonucleotide
  modified_base 31: mod_base = OTHER; note = 2'-O-methyl ribonucleotide
  modified_base 32: mod_base = OTHER; note = 2'-O-methyl ribonucleotide
  modified_base 33: mod_base = OTHER; note = 2'-O-methyl ribonucleotide
  modified_base 34: mod_base = OTHER; note = 2'-O-methyl ribonucleotide
  modified_base 35: mod_base = OTHER; note = 2'-O-methyl ribonucleotide
  modified_base 36: mod_base = OTHER; note = 2'-O-methyl ribonucleotide
  modified_base 37: mod_base = OTHER; note = 2'-O-methyl ribonucleotide
  modified_base 38: mod_base = OTHER; note = 2'-O-methyl ribonucleotide
  modified_base 39: mod_base = OTHER; note = 2'-O-methyl ribonucleotide
  modified_base 40: mod_base = OTHER; note = 2'-O-methyl ribonucleotide
  modified_base 41: mod_base = OTHER; note = 2'-O-methyl ribonucleotide
  modified_base 42: mod_base = OTHER; note = 2'-O-methyl ribonucleotide
  modified_base 46: mod_base = OTHER; note = 2'-O-methyl ribonucleotide
  modified_base 48: mod_base = OTHER; note = 2'-O-methyl ribonucleotide
  modified_base 50: mod_base = OTHER; note = 2'-O-methyl ribonucleotide
  modified_base 52: mod_base = OTHER; note = 2'-O-methyl ribonucleotide
  modified_base 53: mod_base = OTHER; note = 2'-O-methyl ribonucleotide
  modified_base 54: mod_base = OTHER; note = 2'-O-methyl ribonucleotide
  modified_base 57: mod_base = OTHER; note = 2'-O-methyl ribonucleotide
  modified_base 61: mod_base = OTHER; note = 2'-O-methyl ribonucleotide
  modified_base 66: mod_base = OTHER; note = 2'-O-methyl ribonucleotide
  modified_base 67: mod_base = OTHER; note = 2'-O-methyl ribonucleotide
  modified_base 70: mod_base = OTHER; note = 2'-O-methyl ribonucleotide
  modified_base 71: mod_base = OTHER; note = 2'-O-methyl ribonucleotide
  modified_base 72: mod_base = OTHER; note = 2'-O-methyl ribonucleotide
  modified_base 73: mod_base = OTHER; note = 2'-O-methyl ribonucleotide
  modified_base 74: mod_base = OTHER; note = 2'-O-methyl ribonucleotide
  modified_base 75: mod_base = OTHER; note = 2'-O-methyl ribonucleotide
  modified_base 76: mod_base = OTHER; note = 2'-O-methyl ribonucleotide
  modified_base 77: mod_base = OTHER; note = 2'-O-methyl ribonucleotide
  modified_base 78: mod_base = OTHER; note = 2'-O-methyl ribonucleotide
  modified_base 79: mod_base = OTHER; note = 2'-O-methyl ribonucleotide
  modified_base 80: mod_base = OTHER; note = 2'-O-methyl ribonucleotide
  modified_base 82: mod_base = OTHER; note = 2'-O-methyl ribonucleotide
  modified_base 83: mod_base = OTHER; note = 2'-O-methyl ribonucleotide
  modified_base 84: mod_base = OTHER; note = 2'-O-methyl ribonucleotide
  modified_base 85: mod_base = OTHER; note = 2'-O-methyl ribonucleotide
  modified_base 86: mod_base = OTHER; note = 2'-O-methyl ribonucleotide
  modified_base 87: mod_base = OTHER; note = 2'-O-methyl ribonucleotide
  modified_base 89: mod_base = OTHER; note = 2'-O-methyl ribonucleotide
  modified_base 92: mod_base = OTHER; note = 2'-O-methyl ribonucleotide
  modified_base 93: mod_base = OTHER; note = 2'-O-methyl ribonucleotide
  modified_base 94: mod_base = OTHER; note = 2'-O-methyl ribonucleotide
  modified_base 95: mod_base = OTHER; note = 2'-O-methyl ribonucleotide
  modified_base 96: mod_base = OTHER; note = 2'-O-methyl ribonucleotide
  modified_base 97: mod_base = OTHER; note = 2'-O-methyl ribonucleotide
  modified_base 98: mod_base = OTHER; note = 2'-O-methyl ribonucleotide
  modified_base 99: mod_base = OTHER; note = 2'-O-methyl ribonucleotide
  modified_base 100: mod_base = OTHER; note = 2'-O-methyl ribonucleotide
  modified_base 1..3: mod_base = OTHER; note = phosphorothioate linkage
  modified_base 64..65: mod_base = OTHER; note = phosphorothioate linkage
  modified_base 97..100: mod_base = OTHER; note = phosphorothioate linkage

SEQ ID NO: 2559 - RNA, 103 nt, synthetic construct; identical to SEQ ID NO: 1700
  source 1..103: mol_type = other RNA
  modified_base 1: mod_base = OTHER; note = 2'-O-methyl ribonucleotide
  modified_base 2: mod_base = OTHER; note = 2'-O-methyl ribonucleotide
  modified_base 3: mod_base = OTHER; note = 2'-O-methyl ribonucleotide
  modified_base 21: mod_base = OTHER; note = 2'-O-methyl ribonucleotide
  modified_base 28: mod_base = OTHER; note = 2'-O-methyl ribonucleotide
  modified_base 29: mod_base = OTHER; note = 2'-O-methyl ribonucleotide
  modified_base 30: mod_base = OTHER; note = 2'-O-methyl ribonucleotide
  modified_base 31: mod_base = OTHER; note = 2'-O-methyl ribonucleotide
  modified_base 32: mod_base = OTHER; note = 2'-O-methyl ribonucleotide
  modified_base 33: mod_base = OTHER; note = 2'-O-methyl ribonucleotide
  modified_base 34: mod_base = OTHER; note = 2'-O-methyl ribonucleotide
  modified_base 35: mod_base = OTHER; note = 2'-O-methyl ribonucleotide
  modified_base 36: mod_base = OTHER; note = 2'-O-methyl ribonucleotide
  modified_base 37: mod_base = OTHER; note = 2'-O-methyl ribonucleotide
  modified_base 38: mod_base = OTHER; note = 2'-O-methyl ribonucleotide
  modified_base 39: mod_base = OTHER; note = 2'-O-methyl ribonucleotide
  modified_base 40: mod_base = OTHER; note = 2'-O-methyl ribonucleotide
  modified_base 41: mod_base = OTHER; note = 2'-O-methyl ribonucleotide
  modified_base 42: mod_base = OTHER; note = 2'-O-methyl ribonucleotide
  modified_base 46: mod_base = OTHER; note = 2'-O-methyl ribonucleotide
  modified_base 48: mod_base = OTHER; note = 2'-O-methyl ribonucleotide
  modified_base 50: mod_base = OTHER; note = 2'-O-methyl ribonucleotide
  modified_base 52: mod_base = OTHER; note = 2'-O-methyl ribonucleotide
  modified_base 53: mod_base = OTHER; note = 2'-O-methyl ribonucleotide
  modified_base 54: mod_base = OTHER; note = 2'-O-methyl ribonucleotide
  modified_base 57: mod_base = OTHER; note = 2'-O-methyl ribonucleotide
  modified_base 61: mod_base = OTHER; note = 2'-O-methyl ribonucleotide
  modified_base 66: mod_base = OTHER; note = 2'-O-methyl ribonucleotide
  modified_base 67: mod_base = OTHER; note = 2'-O-methyl ribonucleotide
  modified_base 70: mod_base = OTHER; note = 2'-O-methyl ribonucleotide
  modified_base 71: mod_base = OTHER; note = 2'-O-methyl ribonucleotide
  modified_base 72: mod_base = OTHER; note = 2'-O-methyl ribonucleotide
  modified_base 73: mod_base = OTHER; note = 2'-O-methyl ribonucleotide
  modified_base 74: mod_base = OTHER; note = 2'-O-methyl ribonucleotide
  modified_base 75: mod_base = OTHER; note = 2'-O-methyl ribonucleotide
  modified_base 76: mod_base = OTHER; note = 2'-O-methyl ribonucleotide
  modified_base 77: mod_base = OTHER; note = 2'-O-methyl ribonucleotide
  modified_base 78: mod_base = OTHER; note = 2'-O-methyl ribonucleotide
  modified_base 79: mod_base = OTHER; note = 2'-O-methyl ribonucleotide
  modified_base 80: mod_base = OTHER; note = 2'-O-methyl ribonucleotide
  modified_base 82: mod_base = OTHER; note = 2'-O-methyl ribonucleotide
  modified_base 83: mod_base = OTHER; note = 2'-O-methyl ribonucleotide
  modified_base 84: mod_base = OTHER; note = 2'-O-methyl ribonucleotide
  modified_base 85: mod_base = OTHER; note = 2'-O-methyl ribonucleotide
  modified_base 86: mod_base = OTHER; note = 2'-O-methyl ribonucleotide
  modified_base 87: mod_base = OTHER; note = 2'-O-methyl ribonucleotide
  modified_base 89: mod_base = OTHER; note = 2'-O-methyl ribonucleotide
  modified_base 91: mod_base = OTHER; note = 2'-O-methyl ribonucleotide
  modified_base 92: mod_base = OTHER; note = 2'-O-methyl ribonucleotide
  modified_base 93: mod_base = OTHER; note = 2'-O-methyl ribonucleotide
  modified_base 94: mod_base = OTHER; note = 2'-O-methyl ribonucleotide
  modified_base 95: mod_base = OTHER; note = 2'-O-methyl ribonucleotide
  modified_base 96: mod_base = OTHER; note = 2'-O-methyl ribonucleotide
  modified_base 97: mod_base = OTHER; note = 2'-O-methyl ribonucleotide
  modified_base 98: mod_base = OTHER; note = 2'-O-methyl ribonucleotide
  modified_base 99: mod_base = OTHER; note = 2'-O-methyl ribonucleotide
  modified_base 100: mod_base = OTHER; note = 2'-O-methyl ribonucleotide
  modified_base 1..3: mod_base = OTHER; note = phosphorothioate linkage
  modified_base 64..65: mod_base = OTHER; note = phosphorothioate linkage
  modified_base 97..100: mod_base = OTHER; note = phosphorothioate linkage

SEQ ID NO: 2560 - RNA, 103 nt, synthetic construct; identical to SEQ ID NO: 1700
  source 1..103: mol_type = other RNA
  modified_base 1: mod_base = OTHER; note = 2'-O-methyl ribonucleotide
  modified_base 2: mod_base = OTHER; note = 2'-O-methyl ribonucleotide
  modified_base 3: mod_base = OTHER; note = 2'-O-methyl ribonucleotide
  modified_base 21: mod_base = OTHER; note = 2'-O-methyl ribonucleotide
  modified_base 28: mod_base = OTHER; note = 2'-O-methyl ribonucleotide
  modified_base 29: mod_base = OTHER; note = 2'-O-methyl ribonucleotide
  modified_base 30: mod_base = OTHER; note = 2'-O-methyl ribonucleotide
  modified_base 31: mod_base = OTHER; note = 2'-O-methyl ribonucleotide
  modified_base 32: mod_base = OTHER; note = 2'-O-methyl ribonucleotide
  modified_base 34: mod_base = OTHER; note = 2'-O-methyl ribonucleotide
  modified_base 35: mod_base = OTHER; note = 2'-O-methyl ribonucleotide
  modified_base 36: mod_base = OTHER; note = 2'-O-methyl ribonucleotide
  modified_base 37: mod_base = OTHER; note = 2'-O-methyl ribonucleotide
  modified_base 38: mod_base = OTHER; note = 2'-O-methyl ribonucleotide
  modified_base 39: mod_base = OTHER; note = 2'-O-methyl ribonucleotide
  modified_base 40: mod_base = OTHER; note = 2'-O-methyl ribonucleotide
  modified_base 41: mod_base = OTHER; note = 2'-O-methyl ribonucleotide
  modified_base 42: mod_base = OTHER; note = 2'-O-methyl ribonucleotide
  modified_base 46: mod_base = OTHER; note = 2'-O-methyl ribonucleotide
  modified_base 48: mod_base = OTHER; note = 2'-O-methyl ribonucleotide
  modified_base 50: mod_base = OTHER; note = 2'-O-methyl ribonucleotide
  modified_base 52: mod_base = OTHER; note = 2'-O-methyl ribonucleotide
  modified_base 53: mod_base = OTHER; note = 2'-O-methyl ribonucleotide
  modified_base 54: mod_base = OTHER; note = 2'-O-methyl ribonucleotide
  modified_base 57: mod_base = OTHER; note = 2'-O-methyl ribonucleotide
  modified_base 61: mod_base = OTHER; note = 2'-O-methyl ribonucleotide
  modified_base 66: mod_base = OTHER; note = 2'-O-methyl ribonucleotide
  modified_base 67: mod_base = OTHER; note = 2'-O-methyl ribonucleotide
  modified_base 70: mod_base = OTHER; note = 2'-O-methyl ribonucleotide
  modified_base 71: mod_base = OTHER; note = 2'-O-methyl ribonucleotide
  modified_base 72: mod_base = OTHER; note = 2'-O-methyl ribonucleotide
  modified_base 73: mod_base = OTHER; note = 2'-O-methyl ribonucleotide
  modified_base 74: mod_base = OTHER; note = 2'-O-methyl ribonucleotide
  modified_base 75: mod_base = OTHER; note = 2'-O-methyl ribonucleotide
  modified_base 76: mod_base = OTHER; note = 2'-O-methyl ribonucleotide
  modified_base 77: mod_base = OTHER; note = 2'-O-methyl ribonucleotide
  modified_base 78: mod_base = OTHER; note = 2'-O-methyl ribonucleotide
  modified_base 79: mod_base = OTHER; note = 2'-O-methyl ribonucleotide
  modified_base 80: mod_base = OTHER; note = 2'-O-methyl ribonucleotide
  modified_base 82: mod_base = OTHER; note = 2'-O-methyl ribonucleotide
  modified_base 83: mod_base = OTHER; note = 2'-O-methyl ribonucleotide
  modified_base 84: mod_base = OTHER; note = 2'-O-methyl ribonucleotide
  modified_base 85: mod_base = OTHER; note = 2'-O-methyl ribonucleotide
  modified_base 86: mod_base = OTHER; note = 2'-O-methyl ribonucleotide
  modified_base 87: mod_base = OTHER; note = 2'-O-methyl ribonucleotide
  modified_base 89: mod_base = OTHER; note = 2'-O-methyl ribonucleotide
  modified_base 92: mod_base = OTHER; note = 2'-O-methyl ribonucleotide
  modified_base 93: mod_base = OTHER; note = 2'-O-methyl ribonucleotide
  modified_base 94: mod_base = OTHER; note = 2'-O-methyl ribonucleotide
  modified_base 95: mod_base = OTHER; note = 2'-O-methyl ribonucleotide
  modified_base 96: mod_base = OTHER; note = 2'-O-methyl ribonucleotide
  modified_base 97: mod_base = OTHER; note = 2'-O-methyl ribonucleotide
  modified_base 98: mod_base = OTHER; note = 2'-O-methyl ribonucleotide
  modified_base 99: mod_base = OTHER; note = 2'-O-methyl ribonucleotide
  modified_base 100: mod_base = OTHER; note = 2'-O-methyl ribonucleotide
  modified_base 1..3: mod_base = OTHER; note = phosphorothioate linkage
  modified_base 64..65: mod_base = OTHER; note = phosphorothioate linkage
  modified_base 97..100: mod_base = OTHER; note = phosphorothioate linkage

SEQ ID NO: 2561 - RNA, 103 nt, synthetic construct; identical to SEQ ID NO: 1700
  source 1..103: mol_type = other RNA
  modified_base 1: mod_base = OTHER; note = 2'-O-methyl ribonucleotide
  modified_base 2: mod_base = OTHER; note = 2'-O-methyl ribonucleotide
  modified_base 3: mod_base = OTHER; note = 2'-O-methyl ribonucleotide
  modified_base 21: mod_base = OTHER; note = 2'-O-methyl ribonucleotide
  modified_base 28: mod_base = OTHER; note = 2'-O-methyl ribonucleotide
  modified_base 29: mod_base = OTHER; note = 2'-O-methyl ribonucleotide
  modified_base 30: mod_base = OTHER; note = 2'-O-methyl ribonucleotide
  modified_base 31: mod_base = OTHER; note = 2'-O-methyl ribonucleotide
  modified_base 32: mod_base = OTHER; note = 2'-O-methyl ribonucleotide
  modified_base 34: mod_base = OTHER; note = 2'-O-methyl ribonucleotide
  modified_base 35: mod_base = OTHER; note = 2'-O-methyl ribonucleotide
  modified_base 36: mod_base = OTHER; note = 2'-O-methyl ribonucleotide
  modified_base 37: mod_base = OTHER; note = 2'-O-methyl ribonucleotide
  modified_base 38: mod_base = OTHER; note = 2'-O-methyl ribonucleotide
  modified_base 39: mod_base = OTHER; note = 2'-O-methyl ribonucleotide
  modified_base 40: mod_base = OTHER; note = 2'-O-methyl ribonucleotide
  modified_base 41: mod_base = OTHER; note = 2'-O-methyl ribonucleotide
  modified_base 42: mod_base = OTHER; note = 2'-O-methyl ribonucleotide
  modified_base 46: mod_base = OTHER; note = 2'-O-methyl ribonucleotide
  modified_base 48: mod_base = OTHER; note = 2'-O-methyl ribonucleotide
  modified_base 50: mod_base = OTHER; note = 2'-O-methyl ribonucleotide
  modified_base 52: mod_base = OTHER; note = 2'-O-methyl ribonucleotide
  modified_base 53: mod_base = OTHER; note = 2'-O-methyl ribonucleotide
  modified_base 54: mod_base = OTHER; note = 2'-O-methyl ribonucleotide
  modified_base 57: mod_base = OTHER; note = 2'-O-methyl ribonucleotide
  modified_base 61: mod_base = OTHER; note = 2'-O-methyl ribonucleotide
  modified_base 66: mod_base = OTHER; note = 2'-O-methyl ribonucleotide
  modified_base 67: mod_base = OTHER; note = 2'-O-methyl ribonucleotide
  modified_base 70: mod_base = OTHER; note = 2'-O-methyl ribonucleotide
  modified_base 71: mod_base = OTHER; note = 2'-O-methyl ribonucleotide
  modified_base 72: mod_base = OTHER; note = 2'-O-methyl ribonucleotide
  modified_base 73: mod_base = OTHER; note = 2'-O-methyl ribonucleotide
  modified_base 74: mod_base = OTHER; note = 2'-O-methyl ribonucleotide
  modified_base 75: mod_base = OTHER; note = 2'-O-methyl ribonucleotide
  modified_base 76: mod_base = OTHER; note = 2'-O-methyl ribonucleotide
  modified_base 77: mod_base = OTHER; note = 2'-O-methyl ribonucleotide
  modified_base 78: mod_base = OTHER; note = 2'-O-methyl ribonucleotide
  modified_base 79: mod_base = OTHER; note = 2'-O-methyl ribonucleotide
  modified_base 80: mod_base = OTHER; note = 2'-O-methyl ribonucleotide
  modified_base 82: mod_base = OTHER; note = 2'-O-methyl ribonucleotide
  modified_base 83: mod_base = OTHER; note = 2'-O-methyl ribonucleotide
  modified_base 84: mod_base = OTHER; note = 2'-O-methyl ribonucleotide
  modified_base 85: mod_base = OTHER; note = 2'-O-methyl ribonucleotide
  modified_base 86: mod_base = OTHER; note = 2'-O-methyl ribonucleotide
  modified_base 87: mod_base = OTHER; note = 2'-O-methyl ribonucleotide
  modified_base 89: mod_base = OTHER; note = 2'-O-methyl ribonucleotide
  modified_base 91: mod_base = OTHER; note = 2'-O-methyl ribonucleotide
  modified_base 92: mod_base = OTHER; note = 2'-O-methyl ribonucleotide
  modified_base 93: mod_base = OTHER; note = 2'-O-methyl ribonucleotide
  modified_base 94: mod_base = OTHER; note = 2'-O-methyl ribonucleotide
  modified_base 95: mod_base = OTHER; note = 2'-O-methyl ribonucleotide
  modified_base 96: mod_base = OTHER; note = 2'-O-methyl ribonucleotide
  modified_base 97: mod_base = OTHER; note = 2'-O-methyl ribonucleotide
  modified_base 98: mod_base = OTHER; note = 2'-O-methyl ribonucleotide
  modified_base 99: mod_base = OTHER; note = 2'-O-methyl ribonucleotide
  modified_base 100: mod_base = OTHER; note = 2'-O-methyl ribonucleotide
  modified_base 1..3: mod_base = OTHER; note = phosphorothioate linkage
  modified_base 64..65: mod_base = OTHER; note = phosphorothioate linkage
  modified_base 97..100: mod_base = OTHER; note = phosphorothioate linkage

SEQ ID NO: 2562 - RNA, 103 nt, synthetic construct; identical to SEQ ID NO: 1700
  source 1..103: mol_type = other RNA
  modified_base 1: mod_base = OTHER; note = 2'-O-methyl ribonucleotide
  modified_base 2: mod_base = OTHER; note = 2'-O-methyl ribonucleotide
  modified_base 3: mod_base = OTHER; note = 2'-O-methyl ribonucleotide
  modified_base 21: mod_base = OTHER; note = 2'-O-methyl ribonucleotide
  modified_base 28: mod_base = OTHER; note = 2'-O-methyl ribonucleotide
  modified_base 29: mod_base = OTHER; note = 2'-O-methyl ribonucleotide
  modified_base 30: mod_base = OTHER; note = 2'-O-methyl ribonucleotide
  modified_base 31: mod_base = OTHER; note = 2'-O-methyl ribonucleotide
  modified_base 32: mod_base = OTHER; note = 2'-O-methyl ribonucleotide
  modified_base 34: mod_base = OTHER; note = 2'-O-methyl ribonucleotide
  modified_base 35: mod_base = OTHER; note = 2'-O-methyl ribonucleotide
  modified_base 36: mod_base = OTHER; note = 2'-O-methyl ribonucleotide
  modified_base 37: mod_base = OTHER; note = 2'-O-methyl ribonucleotide
  modified_base 38: mod_base = OTHER; note = 2'-O-methyl ribonucleotide
  modified_base 39: mod_base = OTHER; note = 2'-O-methyl ribonucleotide
  modified_base 40: mod_base = OTHER; note = 2'-O-methyl ribonucleotide
  modified_base 41: mod_base = OTHER; note = 2'-O-methyl ribonucleotide
  modified_base 42: mod_base = OTHER; note = 2'-O-methyl ribonucleotide
  modified_base 46: mod_base = OTHER; note = 2'-O-methyl ribonucleotide
  modified_base 48: mod_base = OTHER; note = 2'-O-methyl ribonucleotide
  modified_base 50: mod_base = OTHER; note = 2'-O-methyl ribonucleotide
  modified_base 52: mod_base = OTHER; note = 2'-O-methyl ribonucleotide
  modified_base 53: mod_base = OTHER; note = 2'-O-methyl ribonucleotide
  modified_base 54: mod_base = OTHER; note = 2'-O-methyl ribonucleotide
  modified_base 55: mod_base = OTHER; note = 2'-O-methyl ribonucleotide
  modified_base 56: mod_base = OTHER; note = 2'-O-methyl ribonucleotide
  modified_base 57: mod_base = OTHER; note = 2'-O-methyl ribonucleotide
  modified_base 60: mod_base = OTHER; note = 2'-O-methyl ribonucleotide
  modified_base 61: mod_base = OTHER; note = 2'-O-methyl ribonucleotide
  modified_base 66: mod_base = OTHER; note = 2'-O-methyl ribonucleotide
  modified_base 67: mod_base = OTHER; note = 2'-O-methyl ribonucleotide
  modified_base 70: mod_base = OTHER; note = 2'-O-methyl ribonucleotide
  modified_base 71: mod_base = OTHER; note = 2'-O-methyl ribonucleotide
  modified_base 72: mod_base = OTHER; note = 2'-O-methyl ribonucleotide
  modified_base 74: mod_base = OTHER; note = 2'-O-methyl ribonucleotide
  modified_base 75: mod_base = OTHER; note = 2'-O-methyl ribonucleotide
  modified_base 76: mod_base = OTHER; note = 2'-O-methyl ribonucleotide
  modified_base 77: mod_base = OTHER; note = 2'-O-methyl ribonucleotide
  modified_base 78: mod_base = OTHER; note = 2'-O-methyl ribonucleotide
  modified_base 79: mod_base = OTHER; note = 2'-O-methyl ribonucleotide
  modified_base 80: mod_base = OTHER; note = 2'-O-methyl ribonucleotide
  modified_base 82: mod_base = OTHER; note = 2'-O-methyl ribonucleotide
  modified_base 83: mod_base = OTHER; note = 2'-O-methyl ribonucleotide
  modified_base 84: mod_base = OTHER; note = 2'-O-methyl ribonucleotide
  modified_base 85: mod_base = OTHER; note = 2'-O-methyl ribonucleotide
  modified_base 86: mod_base = OTHER; note = 2'-O-methyl ribonucleotide
  modified_base 87: mod_base = OTHER; note = 2'-O-methyl ribonucleotide
  modified_base 89: mod_base = OTHER; note = 2'-O-methyl ribonucleotide
  modified_base 92: mod_base = OTHER; note = 2'-O-methyl ribonucleotide
  modified_base 93: mod_base = OTHER; note = 2'-O-methyl ribonucleotide
  modified_base 94: mod_base = OTHER; note = 2'-O-methyl ribonucleotide
  modified_base 95: mod_base = OTHER; note = 2'-O-methyl ribonucleotide
  modified_base 96: mod_base = OTHER; note = 2'-O-methyl ribonucleotide
  modified_base 97: mod_base = OTHER; note = 2'-O-methyl ribonucleotide
  modified_base 98: mod_base = OTHER; note = 2'-O-methyl ribonucleotide
  modified_base 99: mod_base = OTHER; note = 2'-O-methyl ribonucleotide
  modified_base 100: mod_base = OTHER; note = 2'-O-methyl ribonucleotide
  modified_base 1..3: mod_base = OTHER; note = phosphorothioate linkage
  modified_base 64..65: mod_base = OTHER; note = phosphorothioate linkage
  modified_base 97..100: mod_base = OTHER; note = phosphorothioate linkage

SEQ ID NO: 2563 - RNA, 103 nt, synthetic construct; identical to SEQ ID NO: 1643
  source 1..103: mol_type = other RNA
  modified_base 1: mod_base = OTHER; note = 2'-O-methyl ribonucleotide
  modified_base 2: mod_base = OTHER; note = 2'-O-methyl ribonucleotide
  modified_base 3: mod_base = OTHER; note = 2'-O-methyl ribonucleotide
  modified_base 21: mod_base = OTHER; note = 2'-O-methyl ribonucleotide
  modified_base 28: mod_base = OTHER; note = 2'-O-methyl ribonucleotide
  modified_base 29: mod_base = OTHER; note = 2'-O-methyl ribonucleotide
  modified_base 30: mod_base = OTHER; note = 2'-O-methyl ribonucleotide
  modified_base 31: mod_base = OTHER; note = 2'-O-methyl ribonucleotide
  modified_base 32: mod_base = OTHER; note = 2'-O-methyl ribonucleotide
  modified_base 33: mod_base = OTHER; note = 2'-O-methyl ribonucleotide
  modified_base 34: mod_base = OTHER; note = 2'-O-methyl ribonucleotide
  modified_base 35: mod_base = OTHER; note = 2'-O-methyl ribonucleotide
  modified_base 36: mod_base = OTHER; note = 2'-O-methyl ribonucleotide
  modified_base 37: mod_base = OTHER; note = 2'-O-methyl ribonucleotide
  modified_base 38: mod_base = OTHER; note = 2'-O-methyl ribonucleotide
  modified_base 39: mod_base = OTHER; note = 2'-O-methyl ribonucleotide
  modified_base 40: mod_base = OTHER; note = 2'-O-methyl ribonucleotide
  modified_base 41: mod_base = OTHER; note = 2'-O-methyl ribonucleotide
  modified_base 42: mod_base = OTHER; note = 2'-O-methyl ribonucleotide
  modified_base 46: mod_base = OTHER; note = 2'-O-methyl ribonucleotide
  modified_base 48: mod_base = OTHER; note = 2'-O-methyl ribonucleotide
  modified_base 50: mod_base = OTHER; note = 2'-O-methyl ribonucleotide
  modified_base 52: mod_base = OTHER; note = 2'-O-methyl ribonucleotide
  modified_base 53: mod_base = OTHER; note = 2'-O-methyl ribonucleotide
  modified_base 54: mod_base = OTHER; note = 2'-O-methyl ribonucleotide
  modified_base 55: mod_base = OTHER; note = 2'-O-methyl ribonucleotide
  modified_base 56: mod_base = OTHER; note = 2'-O-methyl ribonucleotide
  modified_base 57: mod_base = OTHER; note = 2'-O-methyl ribonucleotide
  modified_base 60: mod_base = OTHER; note = 2'-O-methyl ribonucleotide
  modified_base 61: mod_base = OTHER; note = 2'-O-methyl ribonucleotide
  modified_base 66: mod_base = OTHER; note = 2'-O-methyl ribonucleotide
  modified_base 67: mod_base = OTHER; note = 2'-O-methyl ribonucleotide
  modified_base 70: mod_base = OTHER; note = 2'-O-methyl ribonucleotide
  modified_base 71: mod_base = OTHER; note = 2'-O-methyl ribonucleotide
  modified_base 72: mod_base = OTHER; note = 2'-O-methyl ribonucleotide
  modified_base 73: mod_base = OTHER; note = 2'-O-methyl ribonucleotide
  modified_base 74: mod_base = OTHER; note = 2'-O-methyl ribonucleotide
  modified_base 75: mod_base = OTHER; note = 2'-O-methyl ribonucleotide
  modified_base 76: mod_base = OTHER; note = 2'-O-methyl ribonucleotide
  modified_base 77: mod_base = OTHER; note = 2'-O-methyl ribonucleotide
  modified_base 78: mod_base = OTHER; note = 2'-O-methyl ribonucleotide
  modified_base 79: mod_base = OTHER; note = 2'-O-methyl ribonucleotide
  modified_base 80: mod_base = OTHER; note = 2'-O-methyl ribonucleotide
  modified_base 81: mod_base = OTHER; note = 2'-O-methyl ribonucleotide
  modified_base 83: mod_base = OTHER; note = 2'-O-methyl ribonucleotide
  modified_base 84: mod_base = OTHER; note = 2'-O-methyl ribonucleotide
  modified_base 85: mod_base = OTHER; note = 2'-O-methyl ribonucleotide
  modified_base 86: mod_base = OTHER; note = 2'-O-methyl ribonucleotide
  modified_base 87: mod_base = OTHER; note = 2'-O-methyl ribonucleotide
  modified_base 88: mod_base = OTHER; note = 2'-O-methyl ribonucleotide
  modified_base 89: mod_base = OTHER; note = 2'-O-methyl ribonucleotide
  modified_base 90: mod_base = OTHER; note = 2'-O-methyl ribonucleotide
  modified_base 91: mod_base = OTHER; note = 2'-O-methyl ribonucleotide
  modified_base 92: mod_base = OTHER; note = 2'-O-methyl ribonucleotide
  modified_base 93: mod_base = OTHER; note = 2'-O-methyl ribonucleotide
  modified_base 94: mod_base = OTHER; note = 2'-O-methyl ribonucleotide
  modified_base 95: mod_base = OTHER; note = 2'-O-methyl ribonucleotide
  modified_base 96: mod_base = OTHER; note = 2'-O-methyl ribonucleotide
  modified_base 97: mod_base = OTHER; note = 2'-O-methyl ribonucleotide
  modified_base 98: mod_base = OTHER; note = 2'-O-methyl ribonucleotide
  modified_base 99: mod_base = OTHER; note = 2'-O-methyl ribonucleotide
  modified_base 100: mod_base = OTHER; note = 2'-O-methyl ribonucleotide
  modified_base 1..3: mod_base = OTHER; note = phosphorothioate linkage
  modified_base 45..46: mod_base = OTHER; note = phosphorothioate linkage
  modified_base 97..100: mod_base = OTHER; note = phosphorothioate linkage

SEQ ID NO: 2564 - RNA, 103 nt, synthetic construct; identical to SEQ ID NO: 1643
  source 1..103: mol_type = other RNA
  modified_base 1: mod_base = OTHER; note = 2'-O-methyl ribonucleotide
  modified_base 2: mod_base = OTHER; note = 2'-O-methyl ribonucleotide
  modified_base 3: mod_base = OTHER; note = 2'-O-methyl ribonucleotide
  modified_base 21: mod_base = OTHER; note = 2'-O-methyl ribonucleotide
  modified_base 28: mod_base = OTHER; note = 2'-O-methyl ribonucleotide
  modified_base 29: mod_base = OTHER; note = 2'-O-methyl ribonucleotide
  modified_base 30: mod_base = OTHER; note = 2'-O-methyl ribonucleotide
  modified_base 31: mod_base = OTHER; note = 2'-O-methyl ribonucleotide
  modified_base 32: mod_base = OTHER; note = 2'-O-methyl ribonucleotide
  modified_base 34: mod_base = OTHER; note = 2'-O-methyl ribonucleotide
  modified_base 35: mod_base = OTHER; note = 2'-O-methyl ribonucleotide
  modified_base 36: mod_base = OTHER; note = 2'-O-methyl ribonucleotide
  modified_base 37: mod_base = OTHER; note = 2'-O-methyl ribonucleotide
  modified_base 38: mod_base = OTHER; note = 2'-O-methyl ribonucleotide
  modified_base 39: mod_base = OTHER; note = 2'-O-methyl ribonucleotide
  modified_base 40: mod_base = OTHER; note = 2'-O-methyl ribonucleotide
  modified_base 41: mod_base = OTHER; note = 2'-O-methyl ribonucleotide
  modified_base 42: mod_base = OTHER; note = 2'-O-methyl ribonucleotide
  modified_base 46: mod_base = OTHER; note = 2'-O-methyl ribonucleotide
  modified_base 48: mod_base = OTHER; note = 2'-O-methyl ribonucleotide
  modified_base 50: mod_base = OTHER; note = 2'-O-methyl ribonucleotide
  modified_base 52: mod_base = OTHER; note = 2'-O-methyl ribonucleotide
  modified_base 53: mod_base = OTHER; note = 2'-O-methyl ribonucleotide
  modified_base 54: mod_base = OTHER; note = 2'-O-methyl ribonucleotide
  modified_base 55: mod_base = OTHER; note = 2'-O-methyl ribonucleotide
  modified_base 56: mod_base = OTHER; note = 2'-O-methyl ribonucleotide
  modified_base 57: mod_base = OTHER; note = 2'-O-methyl ribonucleotide
  modified_base 60: mod_base = OTHER; note = 2'-O-methyl ribonucleotide
  modified_base 61: mod_base = OTHER; note = 2'-O-methyl ribonucleotide
  modified_base 66: mod_base = OTHER; note = 2'-O-methyl ribonucleotide
  modified_base 67: mod_base = OTHER; note = 2'-O-methyl ribonucleotide
  modified_base 70: mod_base = OTHER; note = 2'-O-methyl ribonucleotide
  modified_base 71: mod_base = OTHER; note = 2'-O-methyl ribonucleotide
  modified_base 72: mod_base = OTHER; note = 2'-O-methyl ribonucleotide
  modified_base 74: mod_base = OTHER; note = 2'-O-methyl ribonucleotide
  modified_base 75: mod_base = OTHER; note = 2'-O-methyl ribonucleotide
  modified_base 76: mod_base = OTHER; note = 2'-O-methyl ribonucleotide
  modified_base 77: mod_base = OTHER; note = 2'-O-methyl ribonucleotide
  modified_base 78: mod_base = OTHER; note = 2'-O-methyl ribonucleotide
  modified_base 79: mod_base = OTHER; note = 2'-O-methyl ribonucleotide
  modified_base 80: mod_base = OTHER; note = 2'-O-methyl ribonucleotide
  modified_base 81: mod_base = OTHER; note = 2'-O-methyl ribonucleotide
  modified_base 83: mod_base = OTHER; note = 2'-O-methyl ribonucleotide
  modified_base 84: mod_base = OTHER; note = 2'-O-methyl ribonucleotide
  modified_base 85: mod_base = OTHER; note = 2'-O-methyl ribonucleotide
  modified_base 86: mod_base = OTHER; note = 2'-O-methyl ribonucleotide
  modified_base 87: mod_base = OTHER; note = 2'-O-methyl ribonucleotide
  modified_base 88: mod_base = OTHER; note = 2'-O-methyl ribonucleotide
  modified_base 89: mod_base = OTHER; note = 2'-O-methyl ribonucleotide
  modified_base 90: mod_base = OTHER; note = 2'-O-methyl ribonucleotide
  modified_base 91: mod_base = OTHER; note = 2'-O-methyl ribonucleotide
  modified_base 92: mod_base = OTHER; note = 2'-O-methyl ribonucleotide
  modified_base 93: mod_base = OTHER; note = 2'-O-methyl ribonucleotide
  modified_base 94: mod_base = OTHER; note = 2'-O-methyl ribonucleotide
  modified_base 95: mod_base = OTHER; note = 2'-O-methyl ribonucleotide
  modified_base 96: mod_base = OTHER; note = 2'-O-methyl ribonucleotide
  modified_base 97: mod_base = OTHER; note = 2'-O-methyl ribonucleotide
  modified_base 98: mod_base = OTHER; note = 2'-O-methyl ribonucleotide
  modified_base 99: mod_base = OTHER; note = 2'-O-methyl ribonucleotide
  modified_base 100: mod_base = OTHER; note = 2'-O-methyl ribonucleotide
  modified_base 1..3: mod_base = OTHER; note = phosphorothioate linkage
  modified_base 45..46: mod_base = OTHER; note = phosphorothioate linkage
  modified_base 97..100: mod_base = OTHER; note = phosphorothioate linkage

SEQ ID NO: 2565 - RNA, 103 nt, synthetic construct; identical to SEQ ID NO: 1699
  source 1..103: mol_type = other RNA
  modified_base 1: mod_base = OTHER; note = 2'-O-methyl ribonucleotide
  modified_base 2: mod_base = OTHER; note = 2'-O-methyl ribonucleotide
  modified_base 3: mod_base = OTHER; note = 2'-O-methyl ribonucleotide
  modified_base 21: mod_base = OTHER; note = 2'-O-methyl ribonucleotide
  modified_base 28: mod_base = OTHER; note = 2'-O-methyl ribonucleotide
  modified_base 29: mod_base = OTHER; note = 2'-O-methyl ribonucleotide
  modified_base 30: mod_base = OTHER; note = 2'-O-methyl ribonucleotide
  modified_base 31: mod_base = OTHER; note = 2'-O-methyl ribonucleotide
  modified_base 32: mod_base = OTHER; note = 2'-O-methyl ribonucleotide
  modified_base 33: mod_base = OTHER; note = 2'-O-methyl ribonucleotide
  modified_base 34: mod_base = OTHER; note = 2'-O-methyl ribonucleotide
  modified_base 35: mod_base = OTHER; note = 2'-O-methyl ribonucleotide
  modified_base 36: mod_base = OTHER; note = 2'-O-methyl ribonucleotide
  modified_base 37: mod_base = OTHER; note = 2'-O-methyl ribonucleotide
  modified_base 38: mod_base = OTHER; note = 2'-O-methyl ribonucleotide
  modified_base 39: mod_base = OTHER; note = 2'-O-methyl ribonucleotide
  modified_base 40: mod_base = OTHER; note = 2'-O-methyl ribonucleotide
  modified_base 41: mod_base = OTHER; note = 2'-O-methyl ribonucleotide
  modified_base 42: mod_base = OTHER; note = 2'-O-methyl ribonucleotide
  modified_base 46: mod_base = OTHER; note = 2'-O-methyl ribonucleotide
  modified_base 48: mod_base = OTHER; note = 2'-O-methyl ribonucleotide
  modified_base 50: mod_base = OTHER; note = 2'-O-methyl ribonucleotide
  modified_base 52: mod_base = OTHER; note = 2'-O-methyl ribonucleotide
  modified_base 53: mod_base = OTHER; note = 2'-O-methyl ribonucleotide
  modified_base 54: mod_base = OTHER; note = 2'-O-methyl ribonucleotide
  modified_base 55: mod_base = OTHER; note = 2'-O-methyl ribonucleotide
  modified_base 56: mod_base = OTHER; note = 2'-O-methyl ribonucleotide
  modified_base 57: mod_base = OTHER; note = 2'-O-methyl ribonucleotide
  modified_base 60: mod_base = OTHER; note = 2'-O-methyl ribonucleotide
  modified_base 61: mod_base = OTHER; note = 2'-O-methyl ribonucleotide
  modified_base 66: mod_base = OTHER; note = 2'-O-methyl ribonucleotide
  modified_base 67: mod_base = OTHER; note = 2'-O-methyl ribonucleotide
  modified_base 70: mod_base = OTHER; note = 2'-O-methyl ribonucleotide
  modified_base 71: mod_base = OTHER; note = 2'-O-methyl ribonucleotide
  modified_base 72: mod_base = OTHER; note = 2'-O-methyl ribonucleotide
  modified_base 73: mod_base = OTHER; note = 2'-O-methyl ribonucleotide
  modified_base 74: mod_base = OTHER; note = 2'-O-methyl ribonucleotide
  modified_base 75: mod_base = OTHER; note = 2'-O-methyl ribonucleotide
  modified_base 76: mod_base = OTHER; note = 2'-O-methyl ribonucleotide
  modified_base 77: mod_base = OTHER; note = 2'-O-methyl ribonucleotide
  modified_base 78: mod_base = OTHER; note = 2'-O-methyl ribonucleotide
  modified_base 79: mod_base = OTHER; note = 2'-O-methyl ribonucleotide
  modified_base 80: mod_base = OTHER; note = 2'-O-methyl ribonucleotide
  modified_base 81: mod_base = OTHER; note = 2'-O-methyl ribonucleotide
  modified_base 83: mod_base = OTHER; note = 2'-O-methyl ribonucleotide
  modified_base 84: mod_base = OTHER; note = 2'-O-methyl ribonucleotide
  modified_base 85: mod_base = OTHER; note = 2'-O-methyl ribonucleotide
  modified_base 86: mod_base = OTHER; note = 2'-O-methyl ribonucleotide
  modified_base 87: mod_base = OTHER; note = 2'-O-methyl ribonucleotide
  modified_base 88: mod_base = OTHER; note = 2'-O-methyl ribonucleotide
  modified_base 89: mod_base = OTHER; note = 2'-O-methyl ribonucleotide
  modified_base 90: mod_base = OTHER; note = 2'-O-methyl ribonucleotide
  modified_base 91: mod_base = OTHER; note = 2'-O-methyl ribonucleotide
  modified_base 92: mod_base = OTHER; note = 2'-O-methyl ribonucleotide
  modified_base 93: mod_base = OTHER; note = 2'-O-methyl ribonucleotide
  modified_base 94: mod_base = OTHER; note = 2'-O-methyl ribonucleotide
  modified_base 95: mod_base = OTHER; note = 2'-O-methyl ribonucleotide
  modified_base 96: mod_base = OTHER; note = 2'-O-methyl ribonucleotide
  modified_base 97: mod_base = OTHER; note = 2'-O-methyl ribonucleotide
  modified_base 98: mod_base = OTHER; note = 2'-O-methyl ribonucleotide
  modified_base 99: mod_base = OTHER; note = 2'-O-methyl ribonucleotide
  modified_base 100: mod_base = OTHER; note = 2'-O-methyl ribonucleotide
  modified_base 1..3: mod_base = OTHER; note = phosphorothioate linkage
  modified_base 45..46: mod_base = OTHER; note = phosphorothioate linkage
  modified_base 97..100: mod_base = OTHER; note = phosphorothioate linkage

SEQ ID NO: 2566 - RNA, 103 nt, synthetic construct; identical to SEQ ID NO: 1699
  source 1..103: mol_type = other RNA
  modified_base 1: mod_base = OTHER; note = 2'-O-methyl ribonucleotide
  modified_base 2: mod_base = OTHER; note = 2'-O-methyl ribonucleotide
  modified_base 3: mod_base = OTHER; note = 2'-O-methyl ribonucleotide
  modified_base 21: mod_base = OTHER; note = 2'-O-methyl ribonucleotide
  modified_base 28: mod_base = OTHER; note = 2'-O-methyl ribonucleotide
  modified_base 29: mod_base = OTHER; note = 2'-O-methyl ribonucleotide
  modified_base 30: mod_base = OTHER; note = 2'-O-methyl ribonucleotide
  modified_base 31: mod_base = OTHER; note = 2'-O-methyl ribonucleotide
  modified_base 32: mod_base = OTHER; note = 2'-O-methyl ribonucleotide
  modified_base 34: mod_base = OTHER; note = 2'-O-methyl ribonucleotide
  modified_base 35: mod_base = OTHER; note = 2'-O-methyl ribonucleotide
  modified_base 36: mod_base = OTHER; note = 2'-O-methyl ribonucleotide
  modified_base 37: mod_base = OTHER; note = 2'-O-methyl ribonucleotide
  modified_base 38: mod_base = OTHER; note = 2'-O-methyl ribonucleotide
  modified_base 39: mod_base = OTHER; note = 2'-O-methyl ribonucleotide
  modified_base 40: mod_base = OTHER; note = 2'-O-methyl ribonucleotide
  modified_base 41: mod_base = OTHER; note = 2'-O-methyl ribonucleotide
  modified_base 42: mod_base = OTHER; note = 2'-O-methyl ribonucleotide
  modified_base 46: mod_base = OTHER; note = 2'-O-methyl ribonucleotide
  modified_base 48: mod_base = OTHER; note = 2'-O-methyl ribonucleotide
  modified_base 50: mod_base = OTHER; note = 2'-O-methyl ribonucleotide
  modified_base 52: mod_base = OTHER; note = 2'-O-methyl ribonucleotide
  modified_base 53: mod_base = OTHER; note = 2'-O-methyl ribonucleotide
  modified_base 54: mod_base = OTHER; note = 2'-O-methyl ribonucleotide
  modified_base 55: mod_base = OTHER; note = 2'-O-methyl ribonucleotide
  modified_base 56: mod_base = OTHER; note = 2'-O-methyl ribonucleotide
  modified_base 57: mod_base = OTHER; note = 2'-O-methyl ribonucleotide
  modified_base 60: mod_base = OTHER; note = 2'-O-methyl ribonucleotide
  modified_base 61: mod_base = OTHER; note = 2'-O-methyl ribonucleotide
  modified_base 66: mod_base = OTHER; note = 2'-O-methyl ribonucleotide
  modified_base 67: mod_base = OTHER; note = 2'-O-methyl ribonucleotide
  modified_base 70: mod_base = OTHER; note = 2'-O-methyl ribonucleotide
  modified_base 71: mod_base = OTHER; note = 2'-O-methyl ribonucleotide
  modified_base 72: mod_base = OTHER; note = 2'-O-methyl ribonucleotide
  modified_base 74: mod_base = OTHER; note = 2'-O-methyl ribonucleotide
  modified_base 75: mod_base = OTHER; note = 2'-O-methyl ribonucleotide
  modified_base 76: mod_base = OTHER; note = 2'-O-methyl ribonucleotide
  modified_base 77: mod_base = OTHER; note = 2'-O-methyl ribonucleotide
  modified_base 78: mod_base = OTHER; note = 2'-O-methyl ribonucleotide
  modified_base 79: mod_base = OTHER; note = 2'-O-methyl ribonucleotide
  modified_base 80: mod_base = OTHER; note = 2'-O-methyl ribonucleotide
  modified_base 81: mod_base = OTHER; note = 2'-O-methyl ribonucleotide
  modified_base 83: mod_base = OTHER; note = 2'-O-methyl ribonucleotide
  modified_base 84: mod_base = OTHER; note = 2'-O-methyl ribonucleotide
  modified_base 85: mod_base = OTHER; note = 2'-O-methyl ribonucleotide
  modified_base 86: mod_base = OTHER; note = 2'-O-methyl ribonucleotide
  modified_base 87: mod_base = OTHER; note = 2'-O-methyl ribonucleotide
  modified_base 88: mod_base = OTHER; note = 2'-O-methyl ribonucleotide
  modified_base 89: mod_base = OTHER; note = 2'-O-methyl ribonucleotide
  modified_base 90: mod_base = OTHER; note = 2'-O-methyl ribonucleotide
  modified_base 91: mod_base = OTHER; note = 2'-O-methyl ribonucleotide
  modified_base 92: mod_base = OTHER; note = 2'-O-methyl ribonucleotide
  modified_base 93: mod_base = OTHER; note = 2'-O-methyl ribonucleotide
  modified_base 94: mod_base = OTHER; note = 2'-O-methyl ribonucleotide
  modified_base 95: mod_base = OTHER; note = 2'-O-methyl ribonucleotide
  modified_base 96: mod_base = OTHER; note = 2'-O-methyl ribonucleotide
  modified_base 97: mod_base = OTHER; note = 2'-O-methyl ribonucleotide
  modified_base 98: mod_base = OTHER; note = 2'-O-methyl ribonucleotide
  modified_base 99: mod_base = OTHER; note = 2'-O-methyl ribonucleotide
  modified_base 100: mod_base = OTHER; note = 2'-O-methyl ribonucleotide
  modified_base 1..3: mod_base = OTHER; note = phosphorothioate linkage
  modified_base 45..46: mod_base = OTHER; note = phosphorothioate linkage
  modified_base 97..100: mod_base = OTHER; note = phosphorothioate linkage

SEQ ID NO: 2567 - RNA, 103 nt, synthetic construct; identical to SEQ ID NO: 1700
  source 1..103: mol_type = other RNA
  modified_base 1: mod_base = OTHER; note = 2'-O-methyl ribonucleotide
  modified_base 2: mod_base = OTHER; note = 2'-O-methyl ribonucleotide
  modified_base 3: mod_base = OTHER; note = 2'-O-methyl ribonucleotide
  modified_base 21: mod_base = OTHER; note = 2'-O-methyl ribonucleotide
  modified_base 28: mod_base = OTHER; note = 2'-O-methyl ribonucleotide
  modified_base 29: mod_base = OTHER; note = 2'-O-methyl ribonucleotide
  modified_base 30: mod_base = OTHER; note = 2'-O-methyl ribonucleotide
  modified_base 31: mod_base = OTHER; note = 2'-O-methyl ribonucleotide
  modified_base 32: mod_base = OTHER; note = 2'-O-methyl ribonucleotide
  modified_base 33: mod_base = OTHER; note = 2'-O-methyl ribonucleotide
  modified_base 34: mod_base = OTHER; note = 2'-O-methyl ribonucleotide
  modified_base 35: mod_base = OTHER; note = 2'-O-methyl ribonucleotide
  modified_base 36: mod_base = OTHER; note = 2'-O-methyl ribonucleotide
  modified_base 37: mod_base = OTHER; note = 2'-O-methyl ribonucleotide
  modified_base 38: mod_base = OTHER; note = 2'-O-methyl ribonucleotide
  modified_base 39: mod_base = OTHER; note = 2'-O-methyl ribonucleotide
  modified_base 40: mod_base = OTHER; note = 2'-O-methyl ribonucleotide
  modified_base 41: mod_base = OTHER; note = 2'-O-methyl ribonucleotide
  modified_base 42: mod_base = OTHER; note = 2'-O-methyl ribonucleotide
  modified_base 46: mod_base = OTHER; note = 2'-O-methyl ribonucleotide
  modified_base 48: mod_base = OTHER; note = 2'-O-methyl ribonucleotide
  modified_base 50: mod_base = OTHER; note = 2'-O-methyl ribonucleotide
  modified_base 52: mod_base = OTHER; note = 2'-O-methyl ribonucleotide
  modified_base 53: mod_base = OTHER; note = 2'-O-methyl ribonucleotide
  modified_base 54: mod_base = OTHER; note = 2'-O-methyl ribonucleotide
  modified_base 57: mod_base = OTHER; note = 2'-O-methyl ribonucleotide
  modified_base 61: mod_base = OTHER; note = 2'-O-methyl ribonucleotide
  modified_base 66: mod_base = OTHER; note = 2'-O-methyl ribonucleotide
  modified_base 67: mod_base = OTHER; note = 2'-O-methyl ribonucleotide
  modified_base 70: mod_base = OTHER; note = 2'-O-methyl ribonucleotide
  modified_base 71: mod_base = OTHER; note = 2'-O-methyl ribonucleotide
  modified_base 72: mod_base = OTHER; note = 2'-O-methyl ribonucleotide
  modified_base 74: mod_base = OTHER; note = 2'-O-methyl ribonucleotide
  modified_base 75: mod_base = OTHER; note = 2'-O-methyl ribonucleotide
  modified_base 76: mod_base = OTHER; note = 2'-O-methyl ribonucleotide
  modified_base 77: mod_base = OTHER; note = 2'-O-methyl ribonucleotide
  modified_base 78: mod_base = OTHER; note = 2'-O-methyl ribonucleotide
  modified_base 79: mod_base = OTHER; note = 2'-O-methyl ribonucleotide
  modified_base 80: mod_base = OTHER; note = 2'-O-methyl ribonucleotide
  modified_base 82: mod_base = OTHER; note = 2'-O-methyl ribonucleotide
  modified_base 83: mod_base = OTHER; note = 2'-O-methyl ribonucleotide
  modified_base 84: mod_base = OTHER; note = 2'-O-methyl ribonucleotide
  modified_base 85: mod_base = OTHER; note = 2'-O-methyl ribonucleotide
  modified_base 86: mod_base = OTHER; note = 2'-O-methyl ribonucleotide
  modified_base 87: mod_base = OTHER; note = 2'-O-methyl ribonucleotide
  modified_base 89: mod_base = OTHER; note = 2'-O-methyl ribonucleotide
  modified_base 92: mod_base = OTHER; note = 2'-O-methyl ribonucleotide
  modified_base 93: mod_base = OTHER; note = 2'-O-methyl ribonucleotide
  modified_base 94: mod_base = OTHER; note = 2'-O-methyl ribonucleotide
  modified_base 95: mod_base = OTHER; note = 2'-O-methyl ribonucleotide
  modified_base 96: mod_base = OTHER; note = 2'-O-methyl ribonucleotide
  modified_base 97: mod_base = OTHER; note = 2'-O-methyl ribonucleotide
  modified_base 98: mod_base = OTHER; note = 2'-O-methyl ribonucleotide
  modified_base 99: mod_base = OTHER; note = 2'-O-methyl ribonucleotide
  modified_base 100: mod_base = OTHER; note = 2'-O-methyl ribonucleotide
  modified_base 1..3: mod_base = OTHER; note = phosphorothioate linkage
  modified_base 45..46: mod_base = OTHER; note = phosphorothioate linkage
  modified_base 97..100: mod_base = OTHER; note = phosphorothioate linkage

SEQ ID NO: 2568 - RNA, 103 nt, synthetic construct; identical to SEQ ID NO: 1700
  source 1..103: mol_type = other RNA
  modified_base 1: mod_base = OTHER; note = 2'-O-methyl ribonucleotide
  modified_base 2: mod_base = OTHER; note = 2'-O-methyl ribonucleotide
  modified_base 3: mod_base = OTHER; note = 2'-O-methyl ribonucleotide
  modified_base 21: mod_base = OTHER; note = 2'-O-methyl ribonucleotide
  modified_base 28: mod_base = OTHER; note = 2'-O-methyl ribonucleotide
  modified_base 29: mod_base = OTHER; note = 2'-O-methyl ribonucleotide
  modified_base 30: mod_base = OTHER; note = 2'-O-methyl ribonucleotide
  modified_base 31: mod_base = OTHER; note = 2'-O-methyl ribonucleotide
  modified_base 32: mod_base = OTHER; note = 2'-O-methyl ribonucleotide
  modified_base 33: mod_base = OTHER; note = 2'-O-methyl ribonucleotide
  modified_base 34: mod_base = OTHER; note = 2'-O-methyl ribonucleotide
  modified_base 35: mod_base = OTHER; note = 2'-O-methyl ribonucleotide
  modified_base 36: mod_base = OTHER; note = 2'-O-methyl ribonucleotide
  modified_base 37: mod_base = OTHER; note = 2'-O-methyl ribonucleotide
  modified_base 38: mod_base = OTHER; note = 2'-O-methyl ribonucleotide
  modified_base 39: mod_base = OTHER; note = 2'-O-methyl ribonucleotide
  modified_base 40: mod_base = OTHER; note = 2'-O-methyl ribonucleotide
  modified_base 41: mod_base = OTHER; note = 2'-O-methyl ribonucleotide
  modified_base 42: mod_base = OTHER; note = 2'-O-methyl ribonucleotide
  modified_base 46: mod_base = OTHER; note = 2'-O-methyl ribonucleotide
  modified_base 48: mod_base = OTHER; note = 2'-O-methyl ribonucleotide
  modified_base 50: mod_base = OTHER; note = 2'-O-methyl ribonucleotide
  modified_base 52: mod_base = OTHER; note = 2'-O-methyl ribonucleotide
  modified_base 53: mod_base = OTHER; note = 2'-O-methyl ribonucleotide
  modified_base 54: mod_base = OTHER; note = 2'-O-methyl ribonucleotide
  modified_base 55: mod_base = OTHER; note = 2'-O-methyl ribonucleotide
  modified_base 56: mod_base = OTHER; note = 2'-O-methyl ribonucleotide
  modified_base 57: mod_base = OTHER; note = 2'-O-methyl ribonucleotide
  modified_base 60: mod_base = OTHER; note = 2'-O-methyl ribonucleotide
  modified_base 61: mod_base = OTHER; note = 2'-O-methyl ribonucleotide
  modified_base 66: mod_base = OTHER; note = 2'-O-methyl ribonucleotide
  modified_base 67: mod_base = OTHER; note = 2'-O-methyl ribonucleotide
  modified_base 70: mod_base = OTHER; note = 2'-O-methyl ribonucleotide
  modified_base 71: mod_base = OTHER; note = 2'-O-methyl ribonucleotide
  modified_base 72: mod_base = OTHER; note = 2'-O-methyl ribonucleotide
  modified_base 74: mod_base = OTHER; note = 2'-O-methyl ribonucleotide
  modified_base 75: mod_base = OTHER; note = 2'-O-methyl ribonucleotide
  modified_base 76: mod_base = OTHER; note = 2'-O-methyl ribonucleotide
  modified_base 77: mod_base = OTHER; note = 2'-O-methyl ribonucleotide
  modified_base 78: mod_base = OTHER; note = 2'-O-methyl ribonucleotide
  modified_base 79: mod_base = OTHER; note = 2'-O-methyl ribonucleotide
  modified_base 80: mod_base = OTHER; note = 2'-O-methyl ribonucleotide
  modified_base 82: mod_base = OTHER; note = 2'-O-methyl ribonucleotide
  modified_base 83: mod_base = OTHER; note = 2'-O-methyl ribonucleotide
  modified_base 84: mod_base = OTHER; note = 2'-O-methyl ribonucleotide
  modified_base 85: mod_base = OTHER; note = 2'-O-methyl ribonucleotide
  modified_base 86: mod_base = OTHER; note = 2'-O-methyl ribonucleotide
  modified_base 87: mod_base = OTHER; note = 2'-O-methyl ribonucleotide
  modified_base 89: mod_base = OTHER; note = 2'-O-methyl ribonucleotide
  modified_base 92: mod_base = OTHER; note = 2'-O-methyl ribonucleotide
  modified_base 93: mod_base = OTHER; note = 2'-O-methyl ribonucleotide
  modified_base 94: mod_base = OTHER; note = 2'-O-methyl ribonucleotide
  modified_base 95: mod_base = OTHER; note = 2'-O-methyl ribonucleotide
  modified_base 96: mod_base = OTHER; note = 2'-O-methyl ribonucleotide
  modified_base 97: mod_base = OTHER; note = 2'-O-methyl ribonucleotide
  modified_base 98: mod_base = OTHER; note = 2'-O-methyl ribonucleotide
  modified_base 99: mod_base = OTHER; note = 2'-O-methyl ribonucleotide
  modified_base 100: mod_base = OTHER; note = 2'-O-methyl ribonucleotide
  modified_base 1..3: mod_base = OTHER; note = phosphorothioate linkage
  modified_base 45..46: mod_base = OTHER; note = phosphorothioate linkage
  modified_base 97..100: mod_base = OTHER; note = phosphorothioate linkage

SEQ ID NO: 2569 - RNA, 103 nt, synthetic construct; identical to SEQ ID NO: 1700
  source 1..103: mol_type = other RNA
  modified_base 1: mod_base = OTHER; note = 2'-O-methyl ribonucleotide
  modified_base 2: mod_base = OTHER; note = 2'-O-methyl ribonucleotide
  modified_base 3: mod_base = OTHER; note = 2'-O-methyl ribonucleotide
  modified_base 21: mod_base = OTHER; note = 2'-O-methyl ribonucleotide
  modified_base 28: mod_base = OTHER; note = 2'-O-methyl ribonucleotide
  modified_base 29: mod_base = OTHER; note = 2'-O-methyl ribonucleotide
  modified_base 30: mod_base = OTHER; note = 2'-O-methyl ribonucleotide
  modified_base 31: mod_base = OTHER; note = 2'-O-methyl ribonucleotide
  modified_base 32: mod_base = OTHER; note = 2'-O-methyl ribonucleotide
  modified_base 33: mod_base = OTHER; note = 2'-O-methyl ribonucleotide
  modified_base 34: mod_base = OTHER; note = 2'-O-methyl ribonucleotide
  modified_base 35: mod_base = OTHER; note = 2'-O-methyl ribonucleotide
  modified_base 36: mod_base = OTHER; note = 2'-O-methyl ribonucleotide
  modified_base 37: mod_base = OTHER; note = 2'-O-methyl ribonucleotide
  modified_base 38: mod_base = OTHER; note = 2'-O-methyl ribonucleotide
  modified_base 39: mod_base = OTHER; note = 2'-O-methyl ribonucleotide
  modified_base 40: mod_base = OTHER; note = 2'-O-methyl ribonucleotide
  modified_base 41: mod_base = OTHER; note = 2'-O-methyl ribonucleotide
  modified_base 42: mod_base = OTHER; note = 2'-O-methyl ribonucleotide
  modified_base 46: mod_base = OTHER; note = 2'-O-methyl ribonucleotide
  modified_base 48: mod_base = OTHER; note = 2'-O-methyl ribonucleotide
  modified_base 50: mod_base = OTHER; note = 2'-O-methyl ribonucleotide
  modified_base 52: mod_base = OTHER; note = 2'-O-methyl ribonucleotide
  modified_base 53: mod_base = OTHER; note = 2'-O-methyl ribonucleotide
  modified_base 54: mod_base = OTHER; note = 2'-O-methyl ribonucleotide
  modified_base 57: mod_base = OTHER; note = 2'-O-methyl ribonucleotide
  modified_base 61: mod_base = OTHER; note = 2'-O-methyl ribonucleotide
  modified_base 66: mod_base = OTHER; note = 2'-O-methyl ribonucleotide
  modified_base 67: mod_base = OTHER; note = 2'-O-methyl ribonucleotide
  modified_base 70: mod_base = OTHER; note = 2'-O-methyl ribonucleotide
  modified_base 71: mod_base = OTHER; note = 2'-O-methyl ribonucleotide
  modified_base 72: mod_base = OTHER; note = 2'-O-methyl ribonucleotide
  modified_base 73: mod_base = OTHER; note = 2'-O-methyl ribonucleotide
  modified_base 74: mod_base = OTHER; note = 2'-O-methyl ribonucleotide
  modified_base 75: mod_base = OTHER; note = 2'-O-methyl ribonucleotide
  modified_base 76: mod_base = OTHER; note = 2'-O-methyl ribonucleotide
  modified_base 77: mod_base = OTHER; note = 2'-O-methyl ribonucleotide
  modified_base 78: mod_base = OTHER; note = 2'-O-methyl ribonucleotide
  modified_base 79: mod_base = OTHER; note = 2'-O-methyl ribonucleotide
  modified_base 80: mod_base = OTHER; note = 2'-O-methyl ribonucleotide
  modified_base 82: mod_base = OTHER; note = 2'-O-methyl ribonucleotide
  modified_base 83: mod_base = OTHER; note = 2'-O-methyl ribonucleotide
  modified_base 84: mod_base = OTHER; note = 2'-O-methyl ribonucleotide
  modified_base 85: mod_base = OTHER; note = 2'-O-methyl ribonucleotide
  modified_base 86: mod_base = OTHER; note = 2'-O-methyl ribonucleotide
  modified_base 87: mod_base = OTHER; note = 2'-O-methyl ribonucleotide
  modified_base 89: mod_base = OTHER; note = 2'-O-methyl ribonucleotide
  modified_base 92: mod_base = OTHER; note = 2'-O-methyl ribonucleotide
  modified_base 93: mod_base = OTHER; note = 2'-O-methyl ribonucleotide
  modified_base 94: mod_base = OTHER; note = 2'-O-methyl ribonucleotide
  modified_base 95: mod_base = OTHER; note = 2'-O-methyl ribonucleotide
  modified_base 96: mod_base = OTHER; note = 2'-O-methyl ribonucleotide
  modified_base 97: mod_base = OTHER; note = 2'-O-methyl ribonucleotide
  modified_base 98: mod_base = OTHER; note = 2'-O-methyl ribonucleotide
  modified_base 99: mod_base = OTHER; note = 2'-O-methyl ribonucleotide
  modified_base 100: mod_base = OTHER; note = 2'-O-methyl ribonucleotide
  modified_base 1..3: mod_base = OTHER; note = phosphorothioate linkage
  modified_base 45..46: mod_base = OTHER; note = phosphorothioate linkage
  modified_base 97..100: mod_base = OTHER; note = phosphorothioate linkage

SEQ ID NO: 2570 - RNA, 103 nt, synthetic construct; identical to SEQ ID NO: 1700
  source 1..103: mol_type = other RNA
  modified_base 1: mod_base = OTHER; note = 2'-O-methyl ribonucleotide
  modified_base 2: mod_base = OTHER; note = 2'-O-methyl ribonucleotide
  modified_base 3: mod_base = OTHER; note = 2'-O-methyl ribonucleotide
  modified_base 21: mod_base = OTHER; note = 2'-O-methyl ribonucleotide
  modified_base 28: mod_base = OTHER; note = 2'-O-methyl ribonucleotide
  modified_base 29: mod_base = OTHER; note = 2'-O-methyl ribonucleotide
  modified_base 30: mod_base = OTHER; note = 2'-O-methyl ribonucleotide
  modified_base 31: mod_base = OTHER; note = 2'-O-methyl ribonucleotide
  modified_base 32: mod_base = OTHER; note = 2'-O-methyl ribonucleotide
  modified_base 33: mod_base = OTHER; note = 2'-O-methyl ribonucleotide
  modified_base 34: mod_base = OTHER; note = 2'-O-methyl ribonucleotide
  modified_base 35: mod_base = OTHER; note = 2'-O-methyl ribonucleotide
  modified_base 36: mod_base = OTHER; note = 2'-O-methyl ribonucleotide
  modified_base 37: mod_base = OTHER; note = 2'-O-methyl ribonucleotide
  modified_base 38: mod_base = OTHER; note = 2'-O-methyl ribonucleotide
  modified_base 39: mod_base = OTHER; note = 2'-O-methyl ribonucleotide
  modified_base 40: mod_base = OTHER; note = 2'-O-methyl ribonucleotide
  modified_base 41: mod_base = OTHER; note = 2'-O-methyl ribonucleotide
  modified_base 42: mod_base = OTHER; note = 2'-O-methyl ribonucleotide
  modified_base 46: mod_base = OTHER; note = 2'-O-methyl ribonucleotide
  modified_base 48: mod_base = OTHER; note = 2'-O-methyl ribonucleotide
  modified_base 50: mod_base = OTHER; note = 2'-O-methyl ribonucleotide
  modified_base 52: mod_base = OTHER; note = 2'-O-methyl ribonucleotide
  modified_base 53: mod_base = OTHER; note = 2'-O-methyl ribonucleotide
  modified_base 54: mod_base = OTHER; note = 2'-O-methyl ribonucleotide
  modified_base 57: mod_base = OTHER; note = 2'-O-methyl ribonucleotide
  modified_base 61: mod_base = OTHER; note = 2'-O-methyl ribonucleotide
  modified_base 66: mod_base = OTHER; note = 2'-O-methyl ribonucleotide
  modified_base 67: mod_base = OTHER; note = 2'-O-methyl ribonucleotide
  modified_base 70: mod_base = OTHER; note = 2'-O-methyl ribonucleotide
  modified_base 71: mod_base = OTHER; note = 2'-O-methyl ribonucleotide
  modified_base 72: mod_base = OTHER; note = 2'-O-methyl ribonucleotide
  modified_base 73: mod_base = OTHER; note = 2'-O-methyl ribonucleotide
  modified_base 74: mod_base = OTHER; note = 2'-O-methyl ribonucleotide
  modified_base 75: mod_base = OTHER; note = 2'-O-methyl ribonucleotide
  modified_base 76: mod_base = OTHER; note = 2'-O-methyl ribonucleotide
  modified_base 77: mod_base = OTHER; note = 2'-O-methyl ribonucleotide
  modified_base 78: mod_base = OTHER; note = 2'-O-methyl ribonucleotide
  modified_base 79: mod_base = OTHER; note = 2'-O-methyl ribonucleotide
  modified_base 80: mod_base = OTHER; note = 2'-O-methyl ribonucleotide
  modified_base 82: mod_base = OTHER; note = 2'-O-methyl ribonucleotide
  modified_base 83: mod_base = OTHER; note = 2'-O-methyl ribonucleotide
  modified_base 84: mod_base = OTHER; note = 2'-O-methyl ribonucleotide
  modified_base 85: mod_base = OTHER; note = 2'-O-methyl ribonucleotide
  modified_base 86: mod_base = OTHER; note = 2'-O-methyl ribonucleotide
  modified_base 87: mod_base = OTHER; note = 2'-O-methyl ribonucleotide
  modified_base 89: mod_base = OTHER; note = 2'-O-methyl ribonucleotide
  modified_base 91: mod_base = OTHER; note = 2'-O-methyl ribonucleotide
  modified_base 92: mod_base = OTHER; note = 2'-O-methyl ribonucleotide
  modified_base 93: mod_base = OTHER; note = 2'-O-methyl ribonucleotide
  modified_base 94: mod_base = OTHER; note = 2'-O-methyl ribonucleotide
  modified_base 95: mod_base = OTHER; note = 2'-O-methyl ribonucleotide
  modified_base 96: mod_base = OTHER; note = 2'-O-methyl ribonucleotide
  modified_base 97: mod_base = OTHER; note = 2'-O-methyl ribonucleotide
  modified_base 98: mod_base = OTHER; note = 2'-O-methyl ribonucleotide
  modified_base 99: mod_base = OTHER; note = 2'-O-methyl ribonucleotide
  modified_base 100: mod_base = OTHER; note = 2'-O-methyl ribonucleotide
  modified_base 1..3: mod_base = OTHER; note = phosphorothioate linkage
  modified_base 45..46: mod_base = OTHER; note = phosphorothioate linkage
  modified_base 97..100: mod_base = OTHER; note = phosphorothioate linkage

SEQ ID NO: 2571 - RNA, 103 nt, synthetic construct; identical to SEQ ID NO: 1700
  source 1..103: mol_type = other RNA
  modified_base 1: mod_base = OTHER; note = 2'-O-methyl ribonucleotide
  modified_base 2: mod_base = OTHER; note = 2'-O-methyl ribonucleotide
  modified_base 3: mod_base = OTHER; note = 2'-O-methyl ribonucleotide
  modified_base 21: mod_base = OTHER; note = 2'-O-methyl ribonucleotide
  modified_base 28: mod_base = OTHER; note = 2'-O-methyl ribonucleotide
  modified_base 29: mod_base = OTHER; note = 2'-O-methyl ribonucleotide
  modified_base 30: mod_base = OTHER; note = 2'-O-methyl ribonucleotide
  modified_base 31: mod_base = OTHER; note = 2'-O-methyl ribonucleotide
  modified_base 32: mod_base = OTHER; note = 2'-O-methyl ribonucleotide
  modified_base 34: mod_base = OTHER; note = 2'-O-methyl ribonucleotide
  modified_base 35: mod_base = OTHER; note = 2'-O-methyl ribonucleotide
  modified_base 36: mod_base = OTHER; note = 2'-O-methyl ribonucleotide
  modified_base 37: mod_base = OTHER; note = 2'-O-methyl ribonucleotide
  modified_base 38: mod_base = OTHER; note = 2'-O-methyl ribonucleotide
  modified_base 39: mod_base = OTHER; note = 2'-O-methyl ribonucleotide
  modified_base 40: mod_base = OTHER; note = 2'-O-methyl ribonucleotide
  modified_base 41: mod_base = OTHER; note = 2'-O-methyl ribonucleotide
  modified_base 42: mod_base = OTHER; note = 2'-O-methyl ribonucleotide
  modified_base 46: mod_base = OTHER; note = 2'-O-methyl ribonucleotide
  modified_base 48: mod_base = OTHER; note = 2'-O-methyl ribonucleotide
  modified_base 50: mod_base = OTHER; note = 2'-O-methyl ribonucleotide
  modified_base 52: mod_base = OTHER; note = 2'-O-methyl ribonucleotide
  modified_base 53: mod_base = OTHER; note = 2'-O-methyl ribonucleotide
  modified_base 54: mod_base = OTHER; note = 2'-O-methyl ribonucleotide
  modified_base 57: mod_base = OTHER; note = 2'-O-methyl ribonucleotide
  modified_base 61: mod_base = OTHER; note = 2'-O-methyl ribonucleotide
  modified_base 66: mod_base = OTHER; note = 2'-O-methyl ribonucleotide
  modified_base 67: mod_base = OTHER; note = 2'-O-methyl ribonucleotide
  modified_base 70: mod_base = OTHER; note = 2'-O-methyl ribonucleotide
  modified_base 71: mod_base = OTHER; note = 2'-O-methyl ribonucleotide
  modified_base 72: mod_base = OTHER; note = 2'-O-methyl ribonucleotide
  modified_base 73: mod_base = OTHER; note = 2'-O-methyl ribonucleotide
  modified_base 74: mod_base = OTHER; note = 2'-O-methyl ribonucleotide
  modified_base 75: mod_base = OTHER; note = 2'-O-methyl ribonucleotide
  modified_base 76: mod_base = OTHER; note = 2'-O-methyl ribonucleotide
  modified_base 77: mod_base = OTHER; note = 2'-O-methyl ribonucleotide
  modified_base 78: mod_base = OTHER; note = 2'-O-methyl ribonucleotide
  modified_base 79: mod_base = OTHER; note = 2'-O-methyl ribonucleotide
  modified_base 80: mod_base = OTHER; note = 2'-O-methyl ribonucleotide
  modified_base 82: mod_base = OTHER; note = 2'-O-methyl ribonucleotide
  modified_base 83: mod_base = OTHER; note = 2'-O-methyl ribonucleotide
  modified_base 84: mod_base = OTHER; note = 2'-O-methyl ribonucleotide
  modified_base 85: mod_base = OTHER; note = 2'-O-methyl ribonucleotide
  modified_base 86: mod_base = OTHER; note = 2'-O-methyl ribonucleotide
  modified_base 87: mod_base = OTHER; note = 2'-O-methyl ribonucleotide
  modified_base 89: mod_base = OTHER; note = 2'-O-methyl ribonucleotide
  modified_base 92: mod_base = OTHER; note = 2'-O-methyl ribonucleotide
  modified_base 93: mod_base = OTHER; note = 2'-O-methyl ribonucleotide
  modified_base 94: mod_base = OTHER; note = 2'-O-methyl ribonucleotide
  modified_base 95: mod_base = OTHER; note = 2'-O-methyl ribonucleotide
  modified_base 96: mod_base = OTHER; note = 2'-O-methyl ribonucleotide
  modified_base 97: mod_base = OTHER; note = 2'-O-methyl ribonucleotide
  modified_base 98: mod_base = OTHER; note = 2'-O-methyl ribonucleotide
  modified_base 99: mod_base = OTHER; note = 2'-O-methyl ribonucleotide
  modified_base 100: mod_base = OTHER; note = 2'-O-methyl ribonucleotide
  modified_base 1..3: mod_base = OTHER; note = phosphorothioate linkage
  modified_base 45..46: mod_base = OTHER; note = phosphorothioate linkage
  modified_base 97..100: mod_base = OTHER; note = phosphorothioate linkage

SEQ ID NO: 2572 - RNA, 103 nt, synthetic construct; identical to SEQ ID NO: 1700
  source 1..103: mol_type = other RNA
  modified_base 1: mod_base = OTHER; note = 2'-O-methyl ribonucleotide
  modified_base 2: mod_base = OTHER; note = 2'-O-methyl ribonucleotide
  modified_base 3: mod_base = OTHER; note = 2'-O-methyl ribonucleotide
  modified_base 21: mod_base = OTHER; note = 2'-O-methyl ribonucleotide
  modified_base 28: mod_base = OTHER; note = 2'-O-methyl ribonucleotide
  modified_base 29: mod_base = OTHER; note = 2'-O-methyl ribonucleotide
  modified_base 30: mod_base = OTHER; note = 2'-O-methyl ribonucleotide
  modified_base 31: mod_base = OTHER; note = 2'-O-methyl ribonucleotide
  modified_base 32: mod_base = OTHER; note = 2'-O-methyl ribonucleotide
  modified_base 34: mod_base = OTHER; note = 2'-O-methyl ribonucleotide
  modified_base 35: mod_base = OTHER; note = 2'-O-methyl ribonucleotide
  modified_base 36: mod_base = OTHER; note = 2'-O-methyl ribonucleotide
  modified_base 37: mod_base = OTHER; note = 2'-O-methyl ribonucleotide
  modified_base 38: mod_base = OTHER; note = 2'-O-methyl ribonucleotide
  modified_base 39: mod_base = OTHER; note = 2'-O-methyl ribonucleotide
  modified_base 40: mod_base = OTHER; note = 2'-O-methyl ribonucleotide
  modified_base 41: mod_base = OTHER; note = 2'-O-methyl ribonucleotide
  modified_base 42: mod_base = OTHER; note = 2'-O-methyl ribonucleotide
  modified_base 46: mod_base = OTHER; note = 2'-O-methyl ribonucleotide
  modified_base 48: mod_base = OTHER; note = 2'-O-methyl ribonucleotide
  modified_base 50: mod_base = OTHER; note = 2'-O-methyl ribonucleotide
  modified_base 52: mod_base = OTHER; note = 2'-O-methyl ribonucleotide
  modified_base 53: mod_base = OTHER; note = 2'-O-methyl ribonucleotide
  modified_base 54: mod_base = OTHER; note = 2'-O-methyl ribonucleotide
  modified_base 57: mod_base = OTHER; note = 2'-O-methyl ribonucleotide
  modified_base 61: mod_base = OTHER; note = 2'-O-methyl ribonucleotide
  modified_base 66: mod_base = OTHER; note = 2'-O-methyl ribonucleotide
  modified_base 67: mod_base = OTHER; note = 2'-O-methyl ribonucleotide
  modified_base 70: mod_base = OTHER; note = 2'-O-methyl ribonucleotide
  modified_base 71: mod_base = OTHER; note = 2'-O-methyl ribonucleotide
  modified_base 72: mod_base = OTHER; note = 2'-O-methyl ribonucleotide
  modified_base 73: mod_base = OTHER; note = 2'-O-methyl ribonucleotide
  modified_base 74: mod_base = OTHER; note = 2'-O-methyl ribonucleotide
  modified_base 75: mod_base = OTHER; note = 2'-O-methyl ribonucleotide
  modified_base 76: mod_base = OTHER; note = 2'-O-methyl ribonucleotide
  modified_base 77: mod_base = OTHER; note = 2'-O-methyl ribonucleotide
  modified_base 78: mod_base = OTHER; note = 2'-O-methyl ribonucleotide
  modified_base 79: mod_base = OTHER; note = 2'-O-methyl ribonucleotide
  modified_base 80: mod_base = OTHER; note = 2'-O-methyl ribonucleotide
  modified_base 82: mod_base = OTHER; note = 2'-O-methyl ribonucleotide
  modified_base 83: mod_base = OTHER; note = 2'-O-methyl ribonucleotide
  modified_base 84: mod_base = OTHER; note = 2'-O-methyl ribonucleotide
  modified_base 85: mod_base = OTHER; note = 2'-O-methyl ribonucleotide
  modified_base 86: mod_base = OTHER; note = 2'-O-methyl ribonucleotide
  modified_base 87: mod_base = OTHER; note = 2'-O-methyl ribonucleotide
  modified_base 89: mod_base = OTHER; note = 2'-O-methyl ribonucleotide
  modified_base 91: mod_base = OTHER; note = 2'-O-methyl ribonucleotide
  modified_base 92: mod_base = OTHER; note = 2'-O-methyl ribonucleotide
  modified_base 93: mod_base = OTHER; note = 2'-O-methyl ribonucleotide
  modified_base 94: mod_base = OTHER; note = 2'-O-methyl ribonucleotide
  modified_base 95: mod_base = OTHER; note = 2'-O-methyl ribonucleotide
  modified_base 96: mod_base = OTHER; note = 2'-O-methyl ribonucleotide
  modified_base 97: mod_base = OTHER; note = 2'-O-methyl ribonucleotide
  modified_base 98: mod_base = OTHER; note = 2'-O-methyl ribonucleotide
  modified_base 99: mod_base = OTHER; note = 2'-O-methyl ribonucleotide
  modified_base 100: mod_base = OTHER; note = 2'-O-methyl ribonucleotide
  modified_base 1..3: mod_base = OTHER; note = phosphorothioate linkage
  modified_base 45..46: mod_base = OTHER; note = phosphorothioate linkage
  modified_base 97..100: mod_base = OTHER; note = phosphorothioate linkage

SEQ ID NO: 2573 - RNA, 103 nt, synthetic construct; identical to SEQ ID NO: 1700
  source 1..103: mol_type = other RNA
  modified_base 1: mod_base = OTHER; note = 2'-O-methyl ribonucleotide
  modified_base 2: mod_base = OTHER; note = 2'-O-methyl ribonucleotide
  modified_base 3: mod_base = OTHER; note = 2'-O-methyl ribonucleotide
  modified_base 21: mod_base = OTHER; note = 2'-O-methyl ribonucleotide
  modified_base 28: mod_base = OTHER; note = 2'-O-methyl ribonucleotide
  modified_base 29: mod_base = OTHER; note = 2'-O-methyl ribonucleotide
  modified_base 30: mod_base = OTHER; note = 2'-O-methyl ribonucleotide
  modified_base 31: mod_base = OTHER; note = 2'-O-methyl ribonucleotide
  modified_base 32: mod_base = OTHER; note = 2'-O-methyl ribonucleotide
  modified_base 34: mod_base = OTHER; note = 2'-O-methyl ribonucleotide
  modified_base 35: mod_base = OTHER; note = 2'-O-methyl ribonucleotide
  modified_base 36: mod_base = OTHER; note = 2'-O-methyl ribonucleotide
  modified_base 37: mod_base = OTHER; note = 2'-O-methyl ribonucleotide
  modified_base 38: mod_base = OTHER; note = 2'-O-methyl ribonucleotide
  modified_base 39: mod_base = OTHER; note = 2'-O-methyl ribonucleotide
  modified_base 40: mod_base = OTHER; note = 2'-O-methyl ribonucleotide
  modified_base 41: mod_base = OTHER; note = 2'-O-methyl ribonucleotide
  modified_base 42: mod_base = OTHER; note = 2'-O-methyl ribonucleotide
  modified_base 46: mod_base = OTHER; note = 2'-O-methyl ribonucleotide
  modified_base 48: mod_base = OTHER; note = 2'-O-methyl ribonucleotide
  modified_base 50: mod_base = OTHER; note = 2'-O-methyl ribonucleotide
  modified_base 52: mod_base = OTHER; note = 2'-O-methyl ribonucleotide
  modified_base 53: mod_base = OTHER; note = 2'-O-methyl ribonucleotide
  modified_base 54: mod_base = OTHER; note = 2'-O-methyl ribonucleotide
  modified_base 55: mod_base = OTHER; note = 2'-O-methyl ribonucleotide
  modified_base 56: mod_base = OTHER; note = 2'-O-methyl ribonucleotide
  modified_base 57: mod_base = OTHER; note = 2'-O-methyl ribonucleotide
  modified_base 60: mod_base = OTHER; note = 2'-O-methyl ribonucleotide
  modified_base 61: mod_base = OTHER; note = 2'-O-methyl ribonucleotide
  modified_base 66: mod_base = OTHER; note = 2'-O-methyl ribonucleotide
  modified_base 67: mod_base = OTHER; note = 2'-O-methyl ribonucleotide
  modified_base 70: mod_base = OTHER; note = 2'-O-methyl ribonucleotide
  modified_base 71: mod_base = OTHER; note = 2'-O-methyl ribonucleotide
  modified_base 72: mod_base = OTHER; note = 2'-O-methyl ribonucleotide
  modified_base 74: mod_base = OTHER; note = 2'-O-methyl ribonucleotide
  modified_base 75: mod_base = OTHER; note = 2'-O-methyl ribonucleotide
  modified_base 76: mod_base = OTHER; note = 2'-O-methyl ribonucleotide
  modified_base 77: mod_base = OTHER; note = 2'-O-methyl ribonucleotide
  modified_base 78: mod_base = OTHER; note = 2'-O-methyl ribonucleotide
  modified_base 79: mod_base = OTHER; note = 2'-O-methyl ribonucleotide
  modified_base 80: mod_base = OTHER; note = 2'-O-methyl ribonucleotide
  modified_base 82: mod_base = OTHER; note = 2'-O-methyl ribonucleotide
  modified_base 83: mod_base = OTHER; note = 2'-O-methyl ribonucleotide
  modified_base 84: mod_base = OTHER; note = 2'-O-methyl ribonucleotide
  modified_base 85: mod_base = OTHER; note = 2'-O-methyl ribonucleotide
  modified_base 86: mod_base = OTHER; note = 2'-O-methyl ribonucleotide
  modified_base 87: mod_base = OTHER; note = 2'-O-methyl ribonucleotide
  modified_base 89: mod_base = OTHER; note = 2'-O-methyl ribonucleotide
  modified_base 92: mod_base = OTHER; note = 2'-O-methyl ribonucleotide
  modified_base 93: mod_base = OTHER; note = 2'-O-methyl ribonucleotide
  modified_base 94: mod_base = OTHER; note = 2'-O-methyl ribonucleotide
  modified_base 95: mod_base = OTHER; note = 2'-O-methyl ribonucleotide
  modified_base 96: mod_base = OTHER; note = 2'-O-methyl ribonucleotide
  modified_base 97: mod_base = OTHER; note = 2'-O-methyl ribonucleotide
  modified_base 98: mod_base = OTHER; note = 2'-O-methyl ribonucleotide
  modified_base 99: mod_base = OTHER; note = 2'-O-methyl ribonucleotide
  modified_base 100: mod_base = OTHER; note = 2'-O-methyl ribonucleotide
  modified_base 1..3: mod_base = OTHER; note = phosphorothioate linkage
  modified_base 45..46: mod_base = OTHER; note = phosphorothioate linkage
  modified_base 97..100: mod_base = OTHER; note = phosphorothioate linkage

SEQ ID NO: 2574 - RNA, 103 nt, synthetic construct; identical to SEQ ID NO: 1643
  source 1..103: mol_type = other RNA
  modified_base 1: mod_base = OTHER; note = 2'-O-methyl ribonucleotide
  modified_base 2: mod_base = OTHER; note = 2'-O-methyl ribonucleotide
  modified_base 3: mod_base = OTHER; note = 2'-O-methyl ribonucleotide
  modified_base 21: mod_base = OTHER; note = 2'-O-methyl ribonucleotide
  modified_base 28: mod_base = OTHER; note = 2'-O-methyl ribonucleotide
  modified_base 29: mod_base = OTHER; note = 2'-O-methyl ribonucleotide
  modified_base 30: mod_base = OTHER; note = 2'-O-methyl ribonucleotide
  modified_base 31: mod_base = OTHER; note = 2'-O-methyl ribonucleotide
  modified_base 32: mod_base = OTHER; note = 2'-O-methyl ribonucleotide
  modified_base 33: mod_base = OTHER; note = 2'-O-methyl ribonucleotide
  modified_base 34: mod_base = OTHER; note = 2'-O-methyl ribonucleotide
  modified_base 35: mod_base = OTHER; note = 2'-O-methyl ribonucleotide
  modified_base 36: mod_base = OTHER; note = 2'-O-methyl ribonucleotide
  modified_base 37: mod_base = OTHER; note = 2'-O-methyl ribonucleotide
  modified_base 38: mod_base = OTHER; note = 2'-O-methyl ribonucleotide
  modified_base 39: mod_base = OTHER; note = 2'-O-methyl ribonucleotide
  modified_base 40: mod_base = OTHER; note = 2'-O-methyl ribonucleotide
  modified_base 41: mod_base = OTHER; note = 2'-O-methyl ribonucleotide
  modified_base 42: mod_base = OTHER; note = 2'-O-methyl ribonucleotide
  modified_base 46: mod_base = OTHER; note = 2'-O-methyl ribonucleotide
  modified_base 48: mod_base = OTHER; note = 2'-O-methyl ribonucleotide
  modified_base 50: mod_base = OTHER; note = 2'-O-methyl ribonucleotide
  modified_base 52: mod_base = OTHER; note = 2'-O-methyl ribonucleotide
  modified_base 53: mod_base = OTHER; note = 2'-O-methyl ribonucleotide
  modified_base 54: mod_base = OTHER; note = 2'-O-methyl ribonucleotide
  modified_base 55: mod_base = OTHER; note = 2'-O-methyl ribonucleotide
  modified_base 56: mod_base = OTHER; note = 2'-O-methyl ribonucleotide
  modified_base 57: mod_base = OTHER; note = 2'-O-methyl ribonucleotide
  modified_base 60: mod_base = OTHER; note = 2'-O-methyl ribonucleotide
  modified_base 61: mod_base = OTHER; note = 2'-O-methyl ribonucleotide
  modified_base 66: mod_base = OTHER; note = 2'-O-methyl ribonucleotide
  modified_base 67: mod_base = OTHER; note = 2'-O-methyl ribonucleotide
  modified_base 70: mod_base = OTHER; note = 2'-O-methyl ribonucleotide
  modified_base 71: mod_base = OTHER; note = 2'-O-methyl ribonucleotide
  modified_base 72: mod_base = OTHER; note = 2'-O-methyl ribonucleotide
  modified_base 73: mod_base = OTHER; note = 2'-O-methyl ribonucleotide
  modified_base 74: mod_base = OTHER; note = 2'-O-methyl ribonucleotide
  modified_base 75: mod_base = OTHER; note = 2'-O-methyl ribonucleotide
  modified_base 76: mod_base = OTHER; note = 2'-O-methyl ribonucleotide
  modified_base 77: mod_base = OTHER; note = 2'-O-methyl ribonucleotide
  modified_base 78: mod_base = OTHER; note = 2'-O-methyl ribonucleotide
  modified_base 79: mod_base = OTHER; note = 2'-O-methyl ribonucleotide
  modified_base 80: mod_base = OTHER; note = 2'-O-methyl ribonucleotide
  modified_base 81: mod_base = OTHER; note = 2'-O-methyl ribonucleotide
  modified_base 83: mod_base = OTHER; note = 2'-O-methyl ribonucleotide
  modified_base 84: mod_base = OTHER; note = 2'-O-methyl ribonucleotide
  modified_base 85: mod_base = OTHER; note = 2'-O-methyl ribonucleotide
  modified_base 86: mod_base = OTHER; note = 2'-O-methyl ribonucleotide
  modified_base 87: mod_base = OTHER; note = 2'-O-methyl ribonucleotide
  modified_base 88: mod_base = OTHER; note = 2'-O-methyl ribonucleotide
  modified_base 89: mod_base = OTHER; note = 2'-O-methyl ribonucleotide
  modified_base 90: mod_base = OTHER; note = 2'-O-methyl ribonucleotide
  modified_base 91: mod_base = OTHER; note = 2'-O-methyl ribonucleotide
  modified_base 92: mod_base = OTHER; note = 2'-O-methyl ribonucleotide
  modified_base 93: mod_base = OTHER; note = 2'-O-methyl ribonucleotide
  modified_base 94: mod_base = OTHER; note = 2'-O-methyl ribonucleotide
  modified_base 95: mod_base = OTHER; note = 2'-O-methyl ribonucleotide
  modified_base 96: mod_base = OTHER; note = 2'-O-methyl ribonucleotide
  modified_base 97: mod_base = OTHER; note = 2'-O-methyl ribonucleotide
  modified_base 98: mod_base = OTHER; note = 2'-O-methyl ribonucleotide
  modified_base 99: mod_base = OTHER; note = 2'-O-methyl ribonucleotide
  modified_base 100: mod_base = OTHER; note = 2'-O-methyl ribonucleotide
  modified_base 1..3: mod_base = OTHER; note = phosphorothioate linkage
  modified_base 25..26: mod_base = OTHER; note = phosphorothioate linkage
  modified_base 97..100: mod_base = OTHER; note = phosphorothioate linkage

SEQ ID NO: 2575 - RNA, 103 nt, synthetic construct; identical to SEQ ID NO: 1643
  source 1..103: mol_type = other RNA
  modified_base 1: mod_base = OTHER; note = 2'-O-methyl ribonucleotide
  modified_base 2: mod_base = OTHER; note = 2'-O-methyl ribonucleotide
  modified_base 3: mod_base = OTHER; note = 2'-O-methyl ribonucleotide
  modified_base 21: mod_base = OTHER; note = 2'-O-methyl ribonucleotide
  modified_base 28: mod_base = OTHER; note = 2'-O-methyl ribonucleotide
  modified_base 29: mod_base = OTHER; note = 2'-O-methyl ribonucleotide
  modified_base 30: mod_base = OTHER; note = 2'-O-methyl ribonucleotide
  modified_base 31: mod_base = OTHER; note = 2'-O-methyl ribonucleotide
  modified_base 32: mod_base = OTHER; note = 2'-O-methyl ribonucleotide
  modified_base 34: mod_base = OTHER; note = 2'-O-methyl ribonucleotide
  modified_base 35: mod_base = OTHER; note = 2'-O-methyl ribonucleotide
  modified_base 36: mod_base = OTHER; note = 2'-O-methyl ribonucleotide
  modified_base 37: mod_base = OTHER; note = 2'-O-methyl ribonucleotide
  modified_base 38: mod_base = OTHER; note = 2'-O-methyl ribonucleotide
  modified_base 39: mod_base = OTHER; note = 2'-O-methyl ribonucleotide
  modified_base 40: mod_base = OTHER; note = 2'-O-methyl ribonucleotide
  modified_base 41: mod_base = OTHER; note = 2'-O-methyl ribonucleotide
  modified_base 42: mod_base = OTHER; note = 2'-O-methyl ribonucleotide
  modified_base 46: mod_base = OTHER; note = 2'-O-methyl ribonucleotide
  modified_base 48: mod_base = OTHER; note = 2'-O-methyl ribonucleotide
  modified_base 50: mod_base = OTHER; note = 2'-O-methyl ribonucleotide
  modified_base 52: mod_base = OTHER; note = 2'-O-methyl ribonucleotide
  modified_base 53: mod_base = OTHER; note = 2'-O-methyl ribonucleotide
  modified_base 54: mod_base = OTHER; note = 2'-O-methyl ribonucleotide
  modified_base 55: mod_base = OTHER; note = 2'-O-methyl ribonucleotide
  modified_base 56: mod_base = OTHER; note = 2'-O-methyl ribonucleotide
  modified_base 57: mod_base = OTHER; note = 2'-O-methyl ribonucleotide
  modified_base 60: mod_base = OTHER; note = 2'-O-methyl ribonucleotide
  modified_base 61: mod_base = OTHER; note = 2'-O-methyl ribonucleotide
  modified_base 66: mod_base = OTHER; note = 2'-O-methyl ribonucleotide
  modified_base 67: mod_base = OTHER; note = 2'-O-methyl ribonucleotide
  modified_base 70: mod_base = OTHER; note = 2'-O-methyl ribonucleotide
  modified_base 71: mod_base = OTHER; note = 2'-O-methyl ribonucleotide
  modified_base 72: mod_base = OTHER; note = 2'-O-methyl ribonucleotide
  modified_base 74: mod_base = OTHER; note = 2'-O-methyl ribonucleotide
  modified_base 75: mod_base = OTHER; note = 2'-O-methyl ribonucleotide
  modified_base 76: mod_base = OTHER; note = 2'-O-methyl ribonucleotide
  modified_base 77: mod_base = OTHER; note = 2'-O-methyl ribonucleotide
  modified_base 78: mod_base = OTHER; note = 2'-O-methyl ribonucleotide
  modified_base 79: mod_base = OTHER; note = 2'-O-methyl ribonucleotide
  modified_base 80: mod_base = OTHER; note = 2'-O-methyl ribonucleotide
  modified_base 81: mod_base = OTHER; note = 2'-O-methyl ribonucleotide
  modified_base 83: mod_base = OTHER; note = 2'-O-methyl ribonucleotide
  modified_base 84: mod_base = OTHER; note = 2'-O-methyl ribonucleotide
  modified_base 85: mod_base = OTHER; note = 2'-O-methyl ribonucleotide
  modified_base 86: mod_base = OTHER; note = 2'-O-methyl ribonucleotide
  modified_base 87: mod_base = OTHER; note = 2'-O-methyl ribonucleotide
  modified_base 88: mod_base = OTHER; note = 2'-O-methyl ribonucleotide
  modified_base 89: mod_base = OTHER; note = 2'-O-methyl ribonucleotide
  modified_base 90: mod_base = OTHER; note = 2'-O-methyl ribonucleotide
  modified_base 91: mod_base = OTHER; note = 2'-O-methyl ribonucleotide
  modified_base 92: mod_base = OTHER; note = 2'-O-methyl ribonucleotide
  modified_base 93: mod_base = OTHER; note = 2'-O-methyl ribonucleotide
  modified_base 94: mod_base = OTHER; note = 2'-O-methyl ribonucleotide
  modified_base 95: mod_base = OTHER; note = 2'-O-methyl ribonucleotide
  modified_base 96: mod_base = OTHER; note = 2'-O-methyl ribonucleotide
  modified_base 97: mod_base = OTHER; note = 2'-O-methyl ribonucleotide
  modified_base 98: mod_base = OTHER; note = 2'-O-methyl ribonucleotide
  modified_base 99: mod_base = OTHER; note = 2'-O-methyl ribonucleotide
  modified_base 100: mod_base = OTHER; note = 2'-O-methyl ribonucleotide
  modified_base 1..3: mod_base = OTHER; note = phosphorothioate linkage
  modified_base 25..26: mod_base = OTHER; note = phosphorothioate linkage
  modified_base 97..100: mod_base = OTHER; note = phosphorothioate linkage

SEQ ID NO: 2576 - RNA, 103 nt, synthetic construct; identical to SEQ ID NO: 1699
  source 1..103: mol_type = other RNA
  modified_base 1: mod_base = OTHER; note = 2'-O-methyl ribonucleotide
  modified_base 2: mod_base = OTHER; note = 2'-O-methyl ribonucleotide
  modified_base 3: mod_base = OTHER; note = 2'-O-methyl ribonucleotide
  modified_base 21: mod_base = OTHER; note = 2'-O-methyl ribonucleotide
  modified_base 28: mod_base = OTHER; note = 2'-O-methyl ribonucleotide
  modified_base 29: mod_base = OTHER; note = 2'-O-methyl ribonucleotide
  modified_base 30: mod_base = OTHER; note = 2'-O-methyl ribonucleotide
  modified_base 31: mod_base = OTHER; note = 2'-O-methyl ribonucleotide
  modified_base 32: mod_base = OTHER; note = 2'-O-methyl ribonucleotide
  modified_base 33: mod_base = OTHER; note = 2'-O-methyl ribonucleotide
  modified_base 34: mod_base = OTHER; note = 2'-O-methyl ribonucleotide
  modified_base 35: mod_base = OTHER; note = 2'-O-methyl ribonucleotide
  modified_base 36: mod_base = OTHER; note = 2'-O-methyl ribonucleotide
  modified_base 37: mod_base = OTHER; note = 2'-O-methyl ribonucleotide
  modified_base 38: mod_base = OTHER; note = 2'-O-methyl ribonucleotide
  modified_base 39: mod_base = OTHER; note = 2'-O-methyl ribonucleotide
  modified_base 40: mod_base = OTHER; note = 2'-O-methyl ribonucleotide
  modified_base 41: mod_base = OTHER; note = 2'-O-methyl ribonucleotide
  modified_base 42: mod_base = OTHER; note = 2'-O-methyl ribonucleotide
  modified_base 46: mod_base = OTHER; note = 2'-O-methyl ribonucleotide
  modified_base 48: mod_base = OTHER; note = 2'-O-methyl ribonucleotide
  modified_base 50: mod_base = OTHER; note = 2'-O-methyl ribonucleotide
  modified_base 52: mod_base = OTHER; note = 2'-O-methyl ribonucleotide
  modified_base 53: mod_base = OTHER; note = 2'-O-methyl ribonucleotide
  modified_base 54: mod_base = OTHER; note = 2'-O-methyl ribonucleotide
  modified_base 55: mod_base = OTHER; note = 2'-O-methyl ribonucleotide
  modified_base 56: mod_base = OTHER; note = 2'-O-methyl ribonucleotide
  modified_base 57: mod_base = OTHER; note = 2'-O-methyl ribonucleotide
  modified_base 60: mod_base = OTHER; note = 2'-O-methyl ribonucleotide
  modified_base 61: mod_base = OTHER; note = 2'-O-methyl ribonucleotide
  modified_base 66: mod_base = OTHER; note = 2'-O-methyl ribonucleotide
  modified_base 67: mod_base = OTHER; note = 2'-O-methyl ribonucleotide
  modified_base 70: mod_base = OTHER; note = 2'-O-methyl ribonucleotide
  modified_base 71: mod_base = OTHER; note = 2'-O-methyl ribonucleotide
  modified_base 72: mod_base = OTHER; note = 2'-O-methyl ribonucleotide
  modified_base 73: mod_base = OTHER; note = 2'-O-methyl ribonucleotide
  modified_base 74: mod_base = OTHER; note = 2'-O-methyl ribonucleotide
  modified_base 75: mod_base = OTHER; note = 2'-O-methyl ribonucleotide
  modified_base 76: mod_base = OTHER; note = 2'-O-methyl ribonucleotide
  modified_base 77: mod_base = OTHER; note = 2'-O-methyl ribonucleotide
  modified_base 78: mod_base = OTHER; note = 2'-O-methyl ribonucleotide
  modified_base 79: mod_base = OTHER; note = 2'-O-methyl ribonucleotide
  modified_base 80: mod_base = OTHER; note = 2'-O-methyl ribonucleotide
  modified_base 81: mod_base = OTHER; note = 2'-O-methyl ribonucleotide
  modified_base 83: mod_base = OTHER; note = 2'-O-methyl ribonucleotide
  modified_base 84: mod_base = OTHER; note = 2'-O-methyl ribonucleotide
  modified_base 85: mod_base = OTHER; note = 2'-O-methyl ribonucleotide
  modified_base 86: mod_base = OTHER; note = 2'-O-methyl ribonucleotide
  modified_base 87: mod_base = OTHER; note = 2'-O-methyl ribonucleotide
  modified_base 88: mod_base = OTHER; note = 2'-O-methyl ribonucleotide
  modified_base 89: mod_base = OTHER; note = 2'-O-methyl ribonucleotide
  modified_base 90: mod_base = OTHER; note = 2'-O-methyl ribonucleotide
  modified_base 91: mod_base = OTHER; note = 2'-O-methyl ribonucleotide
  modified_base 92: mod_base = OTHER; note = 2'-O-methyl ribonucleotide
  modified_base 93: mod_base = OTHER; note = 2'-O-methyl ribonucleotide
  modified_base 94: mod_base = OTHER; note = 2'-O-methyl ribonucleotide
  modified_base 95: mod_base = OTHER; note = 2'-O-methyl ribonucleotide
  modified_base 96: mod_base = OTHER; note = 2'-O-methyl ribonucleotide
  modified_base 97: mod_base = OTHER; note = 2'-O-methyl ribonucleotide
  modified_base 98: mod_base = OTHER; note = 2'-O-methyl ribonucleotide
  modified_base 99: mod_base = OTHER; note = 2'-O-methyl ribonucleotide
  modified_base 100: mod_base = OTHER; note = 2'-O-methyl ribonucleotide
  modified_base 1..3: mod_base = OTHER; note = phosphorothioate linkage
  modified_base 25..26: mod_base = OTHER; note = phosphorothioate linkage
  modified_base 97..100: mod_base = OTHER; note = phosphorothioate linkage

SEQ ID NO: 2577 - RNA, 103 nt, synthetic construct; identical to SEQ ID NO: 1699
  source 1..103: mol_type = other RNA
  modified_base 1: mod_base = OTHER; note = 2'-O-methyl ribonucleotide
  modified_base 2: mod_base = OTHER; note = 2'-O-methyl ribonucleotide
  modified_base 3: mod_base = OTHER; note = 2'-O-methyl ribonucleotide
  modified_base 21: mod_base = OTHER; note = 2'-O-methyl ribonucleotide
  modified_base 28: mod_base = OTHER; note = 2'-O-methyl ribonucleotide
  modified_base 29: mod_base = OTHER; note = 2'-O-methyl ribonucleotide
  modified_base 30: mod_base = OTHER; note = 2'-O-methyl ribonucleotide
  modified_base 31: mod_base = OTHER; note = 2'-O-methyl ribonucleotide
  modified_base 32: mod_base = OTHER; note = 2'-O-methyl ribonucleotide
  modified_base 34: mod_base = OTHER; note = 2'-O-methyl ribonucleotide
  modified_base 35: mod_base = OTHER; note = 2'-O-methyl ribonucleotide
  modified_base 36: mod_base = OTHER; note = 2'-O-methyl ribonucleotide
  modified_base 37: mod_base = OTHER; note = 2'-O-methyl ribonucleotide
  modified_base 38: mod_base = OTHER; note = 2'-O-methyl ribonucleotide
  modified_base 39: mod_base = OTHER; note = 2'-O-methyl ribonucleotide
  modified_base 40: mod_base = OTHER; note = 2'-O-methyl ribonucleotide
  modified_base 41: mod_base = OTHER; note = 2'-O-methyl ribonucleotide
  modified_base 42: mod_base = OTHER; note = 2'-O-methyl ribonucleotide
  modified_base 46: mod_base = OTHER; note = 2'-O-methyl ribonucleotide
  modified_base 48: mod_base = OTHER; note = 2'-O-methyl ribonucleotide
  modified_base 50: mod_base = OTHER; note = 2'-O-methyl ribonucleotide
  modified_base 52: mod_base = OTHER; note = 2'-O-methyl ribonucleotide
  modified_base 53: mod_base = OTHER; note = 2'-O-methyl ribonucleotide
  modified_base 54: mod_base = OTHER; note = 2'-O-methyl ribonucleotide
  modified_base 55: mod_base = OTHER; note = 2'-O-methyl ribonucleotide
  modified_base 56: mod_base = OTHER; note = 2'-O-methyl ribonucleotide
  modified_base 57: mod_base = OTHER; note = 2'-O-methyl ribonucleotide
  modified_base 60: mod_base = OTHER; note = 2'-O-methyl ribonucleotide
  modified_base 61: mod_base = OTHER; note = 2'-O-methyl ribonucleotide
  modified_base 66: mod_base = OTHER; note = 2'-O-methyl ribonucleotide
  modified_base 67: mod_base = OTHER; note = 2'-O-methyl ribonucleotide
  modified_base 70: mod_base = OTHER; note = 2'-O-methyl ribonucleotide
  modified_base 71: mod_base = OTHER; note = 2'-O-methyl ribonucleotide
  modified_base 72: mod_base = OTHER; note = 2'-O-methyl ribonucleotide
  modified_base 74: mod_base = OTHER; note = 2'-O-methyl ribonucleotide
  modified_base 75: mod_base = OTHER; note = 2'-O-methyl ribonucleotide
  modified_base 76: mod_base = OTHER; note = 2'-O-methyl ribonucleotide
  modified_base 77: mod_base = OTHER; note = 2'-O-methyl ribonucleotide
  modified_base 78: mod_base = OTHER; note = 2'-O-methyl ribonucleotide
  modified_base 79: mod_base = OTHER; note = 2'-O-methyl ribonucleotide
  modified_base 80: mod_base = OTHER; note = 2'-O-methyl ribonucleotide
  modified_base 81: mod_base = OTHER; note = 2'-O-methyl ribonucleotide
  modified_base 83: mod_base = OTHER; note = 2'-O-methyl ribonucleotide
  modified_base 84: mod_base = OTHER; note = 2'-O-methyl ribonucleotide
  modified_base 85: mod_base = OTHER; note = 2'-O-methyl ribonucleotide
  modified_base 86: mod_base = OTHER; note = 2'-O-methyl ribonucleotide
  modified_base 87: mod_base = OTHER; note = 2'-O-methyl ribonucleotide
  modified_base 88: mod_base = OTHER; note = 2'-O-methyl ribonucleotide
  modified_base 89: mod_base = OTHER; note = 2'-O-methyl ribonucleotide
  modified_base 90: mod_base = OTHER; note = 2'-O-methyl ribonucleotide
  modified_base 91: mod_base = OTHER; note = 2'-O-methyl ribonucleotide
  modified_base 92: mod_base = OTHER; note = 2'-O-methyl ribonucleotide
  modified_base 93: mod_base = OTHER; note = 2'-O-methyl ribonucleotide
  modified_base 94: mod_base = OTHER; note = 2'-O-methyl ribonucleotide
  modified_base 95: mod_base = OTHER; note = 2'-O-methyl ribonucleotide
  modified_base 96: mod_base = OTHER; note = 2'-O-methyl ribonucleotide
  modified_base 97: mod_base = OTHER; note = 2'-O-methyl ribonucleotide
  modified_base 98: mod_base = OTHER; note = 2'-O-methyl ribonucleotide
  modified_base 99: mod_base = OTHER; note = 2'-O-methyl ribonucleotide
  modified_base 100: mod_base = OTHER; note = 2'-O-methyl ribonucleotide
  modified_base 1..3: mod_base = OTHER; note = phosphorothioate linkage
  modified_base 25..26: mod_base = OTHER; note = phosphorothioate linkage
  modified_base 97..100: mod_base = OTHER; note = phosphorothioate linkage

SEQ ID NO: 2578 - RNA, 103 nt, synthetic construct; identical to SEQ ID NO: 1700
  source 1..103: mol_type = other RNA
  modified_base 1: mod_base = OTHER; note = 2'-O-methyl ribonucleotide
  modified_base 2: mod_base = OTHER; note = 2'-O-methyl ribonucleotide
  modified_base 3: mod_base = OTHER; note = 2'-O-methyl ribonucleotide
  modified_base 21: mod_base = OTHER; note = 2'-O-methyl ribonucleotide
  modified_base 28: mod_base = OTHER; note = 2'-O-methyl ribonucleotide
  modified_base 29: mod_base = OTHER; note = 2'-O-methyl ribonucleotide
  modified_base 30: mod_base = OTHER; note = 2'-O-methyl ribonucleotide
  modified_base 31: mod_base = OTHER; note = 2'-O-methyl ribonucleotide
  modified_base 32: mod_base = OTHER; note = 2'-O-methyl ribonucleotide
  modified_base 33: mod_base = OTHER; note = 2'-O-methyl ribonucleotide
  modified_base 34: mod_base = OTHER; note = 2'-O-methyl ribonucleotide
  modified_base 35: mod_base = OTHER; note = 2'-O-methyl ribonucleotide
  modified_base 36: mod_base = OTHER; note = 2'-O-methyl ribonucleotide
  modified_base 37: mod_base = OTHER; note = 2'-O-methyl ribonucleotide
  modified_base 38: mod_base = OTHER; note = 2'-O-methyl ribonucleotide
  modified_base 39: mod_base = OTHER; note = 2'-O-methyl ribonucleotide
  modified_base 40: mod_base = OTHER; note = 2'-O-methyl ribonucleotide
  modified_base 41: mod_base = OTHER; note = 2'-O-methyl ribonucleotide
  modified_base 42: mod_base = OTHER; note = 2'-O-methyl ribonucleotide
  modified_base 46: mod_base = OTHER; note = 2'-O-methyl ribonucleotide
  modified_base 48: mod_base = OTHER; note = 2'-O-methyl ribonucleotide
  modified_base 50: mod_base = OTHER; note = 2'-O-methyl ribonucleotide
  modified_base 52: mod_base = OTHER; note = 2'-O-methyl ribonucleotide
  modified_base 53: mod_base = OTHER; note = 2'-O-methyl ribonucleotide
  modified_base 54: mod_base = OTHER; note = 2'-O-methyl ribonucleotide
  modified_base 57: mod_base = OTHER; note = 2'-O-methyl ribonucleotide
  modified_base 61: mod_base = OTHER; note = 2'-O-methyl ribonucleotide
  modified_base 66: mod_base = OTHER; note = 2'-O-methyl ribonucleotide
  modified_base 67: mod_base = OTHER; note = 2'-O-methyl ribonucleotide
  modified_base 70: mod_base = OTHER; note = 2'-O-methyl ribonucleotide
  modified_base 71: mod_base = OTHER; note = 2'-O-methyl ribonucleotide
  modified_base 72: mod_base = OTHER; note = 2'-O-methyl ribonucleotide
  modified_base 74: mod_base = OTHER; note = 2'-O-methyl ribonucleotide
  modified_base 75: mod_base = OTHER; note = 2'-O-methyl ribonucleotide
  modified_base 76: mod_base = OTHER; note = 2'-O-methyl ribonucleotide
  modified_base 77: mod_base = OTHER; note = 2'-O-methyl ribonucleotide
  modified_base 78: mod_base = OTHER; note = 2'-O-methyl ribonucleotide
  modified_base 79: mod_base = OTHER; note = 2'-O-methyl ribonucleotide
  modified_base 80: mod_base = OTHER; note = 2'-O-methyl ribonucleotide
  modified_base 82: mod_base = OTHER; note = 2'-O-methyl ribonucleotide
  modified_base 83: mod_base = OTHER; note = 2'-O-methyl ribonucleotide
  modified_base 84: mod_base = OTHER; note = 2'-O-methyl ribonucleotide
  modified_base 85: mod_base = OTHER; note = 2'-O-methyl ribonucleotide
  modified_base 86: mod_base = OTHER; note = 2'-O-methyl ribonucleotide
  modified_base 87: mod_base = OTHER; note = 2'-O-methyl ribonucleotide
  modified_base 89: mod_base = OTHER; note = 2'-O-methyl ribonucleotide
  modified_base 92: mod_base = OTHER; note = 2'-O-methyl ribonucleotide
  modified_base 93: mod_base = OTHER; note = 2'-O-methyl ribonucleotide
  modified_base 94: mod_base = OTHER; note = 2'-O-methyl ribonucleotide
  modified_base 95: mod_base = OTHER; note = 2'-O-methyl ribonucleotide
  modified_base 96: mod_base = OTHER; note = 2'-O-methyl ribonucleotide
  modified_base 97: mod_base = OTHER; note = 2'-O-methyl ribonucleotide
  modified_base 98: mod_base = OTHER; note = 2'-O-methyl ribonucleotide
  modified_base 99: mod_base = OTHER; note = 2'-O-methyl ribonucleotide
  modified_base 100: mod_base = OTHER; note = 2'-O-methyl ribonucleotide
  modified_base 1..3: mod_base = OTHER; note = phosphorothioate linkage
  modified_base 25..26: mod_base = OTHER; note = phosphorothioate linkage
  modified_base 97..100: mod_base = OTHER; note = phosphorothioate linkage

SEQ ID NO: 2579 - RNA, 103 nt, synthetic construct; identical to SEQ ID NO: 1700
  source 1..103: mol_type = other RNA
  modified_base 1: mod_base = OTHER; note = 2'-O-methyl ribonucleotide
  modified_base 2: mod_base = OTHER; note = 2'-O-methyl ribonucleotide
  modified_base 3: mod_base = OTHER; note = 2'-O-methyl ribonucleotide
  modified_base 21: mod_base = OTHER; note = 2'-O-methyl ribonucleotide
  modified_base 28: mod_base = OTHER; note = 2'-O-methyl ribonucleotide
  modified_base 29: mod_base = OTHER; note = 2'-O-methyl ribonucleotide
  modified_base 30: mod_base = OTHER; note = 2'-O-methyl ribonucleotide
  modified_base 31: mod_base = OTHER; note = 2'-O-methyl ribonucleotide
  modified_base 32: mod_base = OTHER; note = 2'-O-methyl ribonucleotide
  modified_base 33: mod_base = OTHER; note = 2'-O-methyl ribonucleotide
  modified_base 34: mod_base = OTHER; note = 2'-O-methyl ribonucleotide
  modified_base 35: mod_base = OTHER; note = 2'-O-methyl ribonucleotide
  modified_base 36: mod_base = OTHER; note = 2'-O-methyl ribonucleotide
  modified_base 37: mod_base = OTHER; note = 2'-O-methyl ribonucleotide
  modified_base 38: mod_base = OTHER; note = 2'-O-methyl ribonucleotide
  modified_base 39: mod_base = OTHER; note = 2'-O-methyl ribonucleotide
  modified_base 40: mod_base = OTHER; note = 2'-O-methyl ribonucleotide
  modified_base 41: mod_base = OTHER; note = 2'-O-methyl ribonucleotide
  modified_base 42: mod_base = OTHER; note = 2'-O-methyl ribonucleotide
  modified_base 46: mod_base = OTHER; note = 2'-O-methyl ribonucleotide
  modified_base 48: mod_base = OTHER; note = 2'-O-methyl ribonucleotide
  modified_base 50: mod_base = OTHER; note = 2'-O-methyl ribonucleotide
  modified_base 52: mod_base = OTHER; note = 2'-O-methyl ribonucleotide
  modified_base 53: mod_base = OTHER; note = 2'-O-methyl ribonucleotide
  modified_base 54: mod_base = OTHER; note = 2'-O-methyl ribonucleotide
  modified_base 55: mod_base = OTHER; note = 2'-O-methyl ribonucleotide
  modified_base 56: mod_base = OTHER; note = 2'-O-methyl ribonucleotide
  modified_base 57: mod_base = OTHER; note = 2'-O-methyl ribonucleotide
  modified_base 60: mod_base = OTHER; note = 2'-O-methyl ribonucleotide
  modified_base 61: mod_base = OTHER; note = 2'-O-methyl ribonucleotide
  modified_base 66: mod_base = OTHER; note = 2'-O-methyl ribonucleotide
  modified_base 67: mod_base = OTHER; note = 2'-O-methyl ribonucleotide
  modified_base 70: mod_base = OTHER; note = 2'-O-methyl ribonucleotide
  modified_base 71: mod_base = OTHER; note = 2'-O-methyl ribonucleotide
  modified_base 72: mod_base = OTHER; note = 2'-O-methyl ribonucleotide
  modified_base 74: mod_base = OTHER; note = 2'-O-methyl ribonucleotide
  modified_base 75: mod_base = OTHER; note = 2'-O-methyl ribonucleotide
  modified_base 76: mod_base = OTHER; note = 2'-O-methyl ribonucleotide
  modified_base 77: mod_base = OTHER; note = 2'-O-methyl ribonucleotide
  modified_base 78: mod_base = OTHER; note = 2'-O-methyl ribonucleotide
  modified_base 79: mod_base = OTHER; note = 2'-O-methyl ribonucleotide
  modified_base 80: mod_base = OTHER; note = 2'-O-methyl ribonucleotide
  modified_base 82: mod_base = OTHER; note = 2'-O-methyl ribonucleotide
  modified_base 83: mod_base = OTHER; note = 2'-O-methyl ribonucleotide
  modified_base 84: mod_base = OTHER; note = 2'-O-methyl ribonucleotide
  modified_base 85: mod_base = OTHER; note = 2'-O-methyl ribonucleotide
  modified_base 86: mod_base = OTHER; note = 2'-O-methyl ribonucleotide
  modified_base 87: mod_base = OTHER; note = 2'-O-methyl ribonucleotide
  modified_base 89: mod_base = OTHER; note = 2'-O-methyl ribonucleotide
  modified_base 92: mod_base = OTHER; note = 2'-O-methyl ribonucleotide
  modified_base 93: mod_base = OTHER; note = 2'-O-methyl ribonucleotide
  modified_base 94: mod_base = OTHER; note = 2'-O-methyl ribonucleotide
  modified_base 95: mod_base = OTHER; note = 2'-O-methyl ribonucleotide
  modified_base 96: mod_base = OTHER; note = 2'-O-methyl ribonucleotide
  modified_base 97: mod_base = OTHER; note = 2'-O-methyl ribonucleotide
  modified_base 98: mod_base = OTHER; note = 2'-O-methyl ribonucleotide
  modified_base 99: mod_base = OTHER; note = 2'-O-methyl ribonucleotide
  modified_base 100: mod_base = OTHER; note = 2'-O-methyl ribonucleotide
  modified_base 1..3: mod_base = OTHER; note = phosphorothioate linkage
  modified_base 25..26: mod_base = OTHER; note = phosphorothioate linkage
  modified_base 97..100: mod_base = OTHER; note = phosphorothioate linkage

SEQ ID NO: 2580 - RNA, 103 nt, synthetic construct; identical to SEQ ID NO: 1700
  source 1..103: mol_type = other RNA
  modified_base 1: mod_base = OTHER; note = 2'-O-methyl ribonucleotide
  modified_base 2: mod_base = OTHER; note = 2'-O-methyl ribonucleotide
  modified_base 3: mod_base = OTHER; note = 2'-O-methyl ribonucleotide
  modified_base 21: mod_base = OTHER; note = 2'-O-methyl ribonucleotide
  modified_base 28: mod_base = OTHER; note = 2'-O-methyl ribonucleotide
  modified_base 29: mod_base = OTHER; note = 2'-O-methyl ribonucleotide
  modified_base 30: mod_base = OTHER; note = 2'-O-methyl ribonucleotide
  modified_base 31: mod_base = OTHER; note = 2'-O-methyl ribonucleotide
  modified_base 32: mod_base = OTHER; note = 2'-O-methyl ribonucleotide
  modified_base 33: mod_base = OTHER; note = 2'-O-methyl ribonucleotide
  modified_base 34: mod_base = OTHER; note = 2'-O-methyl ribonucleotide
  modified_base 35: mod_base = OTHER; note = 2'-O-methyl ribonucleotide
  modified_base 36: mod_base = OTHER; note = 2'-O-methyl ribonucleotide
  modified_base 37: mod_base = OTHER; note = 2'-O-methyl ribonucleotide
  modified_base 38: mod_base = OTHER; note = 2'-O-methyl ribonucleotide
  modified_base 39: mod_base = OTHER; note = 2'-O-methyl ribonucleotide
  modified_base 40: mod_base = OTHER; note = 2'-O-methyl ribonucleotide
  modified_base 41: mod_base = OTHER; note = 2'-O-methyl ribonucleotide
  modified_base 42: mod_base = OTHER; note = 2'-O-methyl ribonucleotide
  modified_base 46: mod_base = OTHER; note = 2'-O-methyl ribonucleotide
  modified_base 48: mod_base = OTHER; note = 2'-O-methyl ribonucleotide
  modified_base 50: mod_base = OTHER; note = 2'-O-methyl ribonucleotide
  modified_base 52: mod_base = OTHER; note = 2'-O-methyl ribonucleotide
  modified_base 53: mod_base = OTHER; note = 2'-O-methyl ribonucleotide
  modified_base 54: mod_base = OTHER; note = 2'-O-methyl ribonucleotide
  modified_base 57: mod_base = OTHER; note = 2'-O-methyl ribonucleotide
  modified_base 61: mod_base = OTHER; note = 2'-O-methyl ribonucleotide
  modified_base 66: mod_base = OTHER; note = 2'-O-methyl ribonucleotide
  modified_base 67: mod_base = OTHER; note = 2'-O-methyl ribonucleotide
  modified_base 70: mod_base = OTHER; note = 2'-O-methyl ribonucleotide
  modified_base 71: mod_base = OTHER; note = 2'-O-methyl ribonucleotide
  modified_base 72: mod_base = OTHER; note = 2'-O-methyl ribonucleotide
  modified_base 73: mod_base = OTHER; note = 2'-O-methyl ribonucleotide
  modified_base 74: mod_base = OTHER; note = 2'-O-methyl ribonucleotide
  modified_base 75: mod_base = OTHER; note = 2'-O-methyl ribonucleotide
  modified_base 76: mod_base = OTHER; note = 2'-O-methyl ribonucleotide
  modified_base 77: mod_base = OTHER; note = 2'-O-methyl ribonucleotide
  modified_base 78: mod_base = OTHER; note = 2'-O-methyl ribonucleotide
  modified_base 79: mod_base = OTHER; note = 2'-O-methyl ribonucleotide
  modified_base 80: mod_base = OTHER; note = 2'-O-methyl ribonucleotide
  modified_base 82: mod_base = OTHER; note = 2'-O-methyl ribonucleotide
  modified_base 83: mod_base = OTHER; note = 2'-O-methyl ribonucleotide
  modified_base 84: mod_base = OTHER; note = 2'-O-methyl ribonucleotide
  modified_base 85: mod_base = OTHER; note = 2'-O-methyl ribonucleotide
  modified_base 86: mod_base = OTHER; note = 2'-O-methyl ribonucleotide
  modified_base 87: mod_base = OTHER; note = 2'-O-methyl ribonucleotide
  modified_base 89: mod_base = OTHER; note = 2'-O-methyl ribonucleotide
  modified_base 92: mod_base = OTHER; note = 2'-O-methyl ribonucleotide
  modified_base 93: mod_base = OTHER; note = 2'-O-methyl ribonucleotide
  modified_base 94: mod_base = OTHER; note = 2'-O-methyl ribonucleotide
  modified_base 95: mod_base = OTHER; note = 2'-O-methyl ribonucleotide
  modified_base 96: mod_base = OTHER; note = 2'-O-methyl ribonucleotide
  modified_base 97: mod_base = OTHER; note = 2'-O-methyl ribonucleotide
  modified_base 98: mod_base = OTHER; note = 2'-O-methyl ribonucleotide
  modified_base 99: mod_base = OTHER; note = 2'-O-methyl ribonucleotide
  modified_base 100: mod_base = OTHER; note = 2'-O-methyl ribonucleotide
  modified_base 1..3: mod_base = OTHER; note = phosphorothioate linkage
  modified_base 25..26: mod_base = OTHER; note = phosphorothioate linkage
  modified_base 97..100: mod_base = OTHER; note = phosphorothioate linkage

SEQ ID NO: 2581 - RNA, 103 nt, synthetic construct; identical to SEQ ID NO: 1700
  source 1..103: mol_type = other RNA
  modified_base 1: mod_base = OTHER; note = 2'-O-methyl ribonucleotide
  modified_base 2: mod_base = OTHER; note = 2'-O-methyl ribonucleotide
  modified_base 3: mod_base = OTHER; note = 2'-O-methyl ribonucleotide
  modified_base 21: mod_base = OTHER; note = 2'-O-methyl ribonucleotide
  modified_base 28: mod_base = OTHER; note = 2'-O-methyl ribonucleotide
  modified_base 29: mod_base = OTHER; note = 2'-O-methyl ribonucleotide
  modified_base 30: mod_base = OTHER; note = 2'-O-methyl ribonucleotide
  modified_base 31: mod_base = OTHER; note = 2'-O-methyl ribonucleotide
  modified_base 32: mod_base = OTHER; note = 2'-O-methyl ribonucleotide
  modified_base 33: mod_base = OTHER; note = 2'-O-methyl ribonucleotide
  modified_base 34: mod_base = OTHER; note = 2'-O-methyl ribonucleotide
  modified_base 35: mod_base = OTHER; note = 2'-O-methyl ribonucleotide
  modified_base 36: mod_base = OTHER; note = 2'-O-methyl ribonucleotide
  modified_base 37: mod_base = OTHER; note = 2'-O-methyl ribonucleotide
  modified_base 38: mod_base = OTHER; note = 2'-O-methyl ribonucleotide
  modified_base 39: mod_base = OTHER; note = 2'-O-methyl ribonucleotide
  modified_base 40: mod_base = OTHER; note = 2'-O-methyl ribonucleotide
  modified_base 41: mod_base = OTHER; note = 2'-O-methyl ribonucleotide
  modified_base 42: mod_base = OTHER; note = 2'-O-methyl ribonucleotide
  modified_base 46: mod_base = OTHER; note = 2'-O-methyl ribonucleotide
  modified_base 48: mod_base = OTHER; note = 2'-O-methyl ribonucleotide
  modified_base 50: mod_base = OTHER; note = 2'-O-methyl ribonucleotide
  modified_base 52: mod_base = OTHER; note = 2'-O-methyl ribonucleotide
  modified_base 53: mod_base = OTHER; note = 2'-O-methyl ribonucleotide
  modified_base 54: mod_base = OTHER; note = 2'-O-methyl ribonucleotide
  modified_base 57: mod_base = OTHER; note = 2'-O-methyl ribonucleotide
  modified_base 61: mod_base = OTHER; note = 2'-O-methyl ribonucleotide
  modified_base 66: mod_base = OTHER; note = 2'-O-methyl ribonucleotide
  modified_base 67: mod_base = OTHER; note = 2'-O-methyl ribonucleotide
  modified_base 70: mod_base = OTHER; note = 2'-O-methyl ribonucleotide
  modified_base 71: mod_base = OTHER; note = 2'-O-methyl ribonucleotide
  modified_base 72: mod_base = OTHER; note = 2'-O-methyl ribonucleotide
  modified_base 73: mod_base = OTHER; note = 2'-O-methyl ribonucleotide
  modified_base 74: mod_base = OTHER; note = 2'-O-methyl ribonucleotide
  modified_base 75: mod_base = OTHER; note = 2'-O-methyl ribonucleotide
  modified_base 76: mod_base = OTHER; note = 2'-O-methyl ribonucleotide
  modified_base 77: mod_base = OTHER; note = 2'-O-methyl ribonucleotide
  modified_base 78: mod_base = OTHER; note = 2'-O-methyl ribonucleotide
  modified_base 79: mod_base = OTHER; note = 2'-O-methyl ribonucleotide
  modified_base 80: mod_base = OTHER; note = 2'-O-methyl ribonucleotide
  modified_base 82: mod_base = OTHER; note = 2'-O-methyl ribonucleotide
  modified_base 83: mod_base = OTHER; note = 2'-O-methyl ribonucleotide
  modified_base 84: mod_base = OTHER; note = 2'-O-methyl ribonucleotide
  modified_base 85: mod_base = OTHER; note = 2'-O-methyl ribonucleotide
  modified_base 86: mod_base = OTHER; note = 2'-O-methyl ribonucleotide
  modified_base 87: mod_base = OTHER; note = 2'-O-methyl ribonucleotide
  modified_base 89: mod_base = OTHER; note = 2'-O-methyl ribonucleotide
  modified_base 91: mod_base = OTHER; note = 2'-O-methyl ribonucleotide
  modified_base 92: mod_base = OTHER; note = 2'-O-methyl ribonucleotide
  modified_base 93: mod_base = OTHER; note = 2'-O-methyl ribonucleotide
  modified_base 94: mod_base = OTHER; note = 2'-O-methyl ribonucleotide
  modified_base 95: mod_base = OTHER; note = 2'-O-methyl ribonucleotide
  modified_base 96: mod_base = OTHER; note = 2'-O-methyl ribonucleotide
  modified_base 97: mod_base = OTHER; note = 2'-O-methyl ribonucleotide
  modified_base 98: mod_base = OTHER; note = 2'-O-methyl ribonucleotide
  modified_base 99: mod_base = OTHER; note = 2'-O-methyl ribonucleotide
  modified_base 100: mod_base = OTHER; note = 2'-O-methyl ribonucleotide
  modified_base 1..3: mod_base = OTHER; note = phosphorothioate linkage
  modified_base 25..26: mod_base = OTHER; note = phosphorothioate linkage
  modified_base 97..100: mod_base = OTHER; note = phosphorothioate linkage

SEQ ID NO: 2582 - RNA, 103 nt, synthetic construct; identical to SEQ ID NO: 1700
  source 1..103: mol_type = other RNA
  modified_base 1: mod_base = OTHER; note = 2'-O-methyl ribonucleotide
  modified_base 2: mod_base = OTHER; note = 2'-O-methyl ribonucleotide
  modified_base 3: mod_base = OTHER; note = 2'-O-methyl ribonucleotide
  modified_base 21: mod_base = OTHER; note = 2'-O-methyl ribonucleotide
  modified_base 28: mod_base = OTHER; note = 2'-O-methyl ribonucleotide
  modified_base 29: mod_base = OTHER; note = 2'-O-methyl ribonucleotide
  modified_base 30: mod_base = OTHER; note = 2'-O-methyl ribonucleotide
  modified_base 31: mod_base = OTHER; note = 2'-O-methyl ribonucleotide
  modified_base 32: mod_base = OTHER; note = 2'-O-methyl ribonucleotide
  modified_base 34: mod_base = OTHER; note = 2'-O-methyl ribonucleotide
  modified_base 35: mod_base = OTHER; note = 2'-O-methyl ribonucleotide
  modified_base 36: mod_base = OTHER; note = 2'-O-methyl ribonucleotide
  modified_base 37: mod_base = OTHER; note = 2'-O-methyl ribonucleotide
  modified_base 38: mod_base = OTHER; note = 2'-O-methyl ribonucleotide
  modified_base 39: mod_base = OTHER; note = 2'-O-methyl ribonucleotide
  modified_base 40: mod_base = OTHER; note = 2'-O-methyl ribonucleotide
  modified_base 41: mod_base = OTHER; note = 2'-O-methyl ribonucleotide
  modified_base 42: mod_base = OTHER; note = 2'-O-methyl ribonucleotide
  modified_base 46: mod_base = OTHER; note = 2'-O-methyl ribonucleotide
  modified_base 48: mod_base = OTHER; note = 2'-O-methyl ribonucleotide
  modified_base 50: mod_base = OTHER; note = 2'-O-methyl ribonucleotide
  modified_base 52: mod_base = OTHER; note = 2'-O-methyl ribonucleotide
  modified_base 53: mod_base = OTHER; note = 2'-O-methyl ribonucleotide
  modified_base 54: mod_base = OTHER; note = 2'-O-methyl ribonucleotide
  modified_base 57: mod_base = OTHER; note = 2'-O-methyl ribonucleotide
  modified_base 61: mod_base = OTHER; note = 2'-O-methyl ribonucleotide
  modified_base 66: mod_base = OTHER; note = 2'-O-methyl ribonucleotide
  modified_base 67: mod_base = OTHER; note = 2'-O-methyl ribonucleotide
  modified_base 70: mod_base = OTHER; note = 2'-O-methyl ribonucleotide
  modified_base 71: mod_base = OTHER; note = 2'-O-methyl ribonucleotide
  modified_base 72: mod_base = OTHER; note = 2'-O-methyl ribonucleotide
  modified_base 73: mod_base = OTHER; note = 2'-O-methyl ribonucleotide
  modified_base 74: mod_base = OTHER; note = 2'-O-methyl ribonucleotide
  modified_base 75: mod_base = OTHER; note = 2'-O-methyl ribonucleotide
  modified_base 76: mod_base = OTHER; note = 2'-O-methyl ribonucleotide
  modified_base 77: mod_base = OTHER; note = 2'-O-methyl ribonucleotide
  modified_base 78: mod_base = OTHER; note = 2'-O-methyl ribonucleotide
  modified_base 79: mod_base = OTHER; note = 2'-O-methyl ribonucleotide
  modified_base 80: mod_base = OTHER; note = 2'-O-methyl ribonucleotide
  modified_base 82: mod_base = OTHER; note = 2'-O-methyl ribonucleotide
  modified_base 83: mod_base = OTHER; note = 2'-O-methyl ribonucleotide
  modified_base 84: mod_base = OTHER; note = 2'-O-methyl ribonucleotide
  modified_base 85: mod_base = OTHER; note = 2'-O-methyl ribonucleotide
  modified_base 86: mod_base = OTHER; note = 2'-O-methyl ribonucleotide
  modified_base 87: mod_base = OTHER; note = 2'-O-methyl ribonucleotide
  modified_base 89: mod_base = OTHER; note = 2'-O-methyl ribonucleotide
  modified_base 92: mod_base = OTHER; note = 2'-O-methyl ribonucleotide
  modified_base 93: mod_base = OTHER; note = 2'-O-methyl ribonucleotide
  modified_base 94: mod_base = OTHER; note = 2'-O-methyl ribonucleotide
  modified_base 95: mod_base = OTHER; note = 2'-O-methyl ribonucleotide
  modified_base 96: mod_base = OTHER; note = 2'-O-methyl ribonucleotide
  modified_base 97: mod_base = OTHER; note = 2'-O-methyl ribonucleotide
  modified_base 98: mod_base = OTHER; note = 2'-O-methyl ribonucleotide
  modified_base 99: mod_base = OTHER; note = 2'-O-methyl ribonucleotide
  modified_base 100: mod_base = OTHER; note = 2'-O-methyl ribonucleotide
  modified_base 1..3: mod_base = OTHER; note = phosphorothioate linkage
  modified_base 25..26: mod_base = OTHER; note = phosphorothioate linkage
  modified_base 97..100: mod_base = OTHER; note = phosphorothioate linkage

SEQ ID NO: 2583 - RNA, 103 nt, synthetic construct; identical to SEQ ID NO: 1700
  source 1..103: mol_type = other RNA
  modified_base 1: mod_base = OTHER; note = 2'-O-methyl ribonucleotide
  modified_base 2: mod_base = OTHER; note = 2'-O-methyl ribonucleotide
  modified_base 3: mod_base = OTHER; note = 2'-O-methyl ribonucleotide
  modified_base 21: mod_base = OTHER; note = 2'-O-methyl ribonucleotide
  modified_base 28: mod_base = OTHER; note = 2'-O-methyl ribonucleotide
  modified_base 29: mod_base = OTHER; note = 2'-O-methyl ribonucleotide
  modified_base 30: mod_base = OTHER; note = 2'-O-methyl ribonucleotide
  modified_base 31: mod_base = OTHER; note = 2'-O-methyl ribonucleotide
  modified_base 32: mod_base = OTHER; note = 2'-O-methyl ribonucleotide
  modified_base 34: mod_base = OTHER; note = 2'-O-methyl ribonucleotide
  modified_base 35: mod_base = OTHER; note = 2'-O-methyl ribonucleotide
  modified_base 36: mod_base = OTHER; note = 2'-O-methyl ribonucleotide
  modified_base 37: mod_base = OTHER; note = 2'-O-methyl ribonucleotide
  modified_base 38: mod_base = OTHER; note = 2'-O-methyl ribonucleotide
  modified_base 39: mod_base = OTHER; note = 2'-O-methyl ribonucleotide
  modified_base 40: mod_base = OTHER; note = 2'-O-methyl ribonucleotide
  modified_base 41: mod_base = OTHER; note = 2'-O-methyl ribonucleotide
  modified_base 42: mod_base = OTHER; note = 2'-O-methyl ribonucleotide
  modified_base 46: mod_base = OTHER; note = 2'-O-methyl ribonucleotide
  modified_base 48: mod_base = OTHER; note = 2'-O-methyl ribonucleotide
  modified_base 50: mod_base = OTHER; note = 2'-O-methyl ribonucleotide
  modified_base 52: mod_base = OTHER; note = 2'-O-methyl ribonucleotide
  modified_base 53: mod_base = OTHER; note = 2'-O-methyl ribonucleotide
  modified_base 54: mod_base = OTHER; note = 2'-O-methyl ribonucleotide
  modified_base 57: mod_base = OTHER; note = 2'-O-methyl ribonucleotide
  modified_base 61: mod_base = OTHER; note = 2'-O-methyl ribonucleotide
  modified_base 66: mod_base = OTHER; note = 2'-O-methyl ribonucleotide
  modified_base 67: mod_base = OTHER; note = 2'-O-methyl ribonucleotide
  modified_base 70: mod_base = OTHER; note = 2'-O-methyl ribonucleotide
  modified_base 71: mod_base = OTHER; note = 2'-O-methyl ribonucleotide
  modified_base 72: mod_base = OTHER; note = 2'-O-methyl ribonucleotide
  modified_base 73: mod_base = OTHER; note = 2'-O-methyl ribonucleotide
  modified_base 74: mod_base = OTHER; note = 2'-O-methyl ribonucleotide
  modified_base 75: mod_base = OTHER; note = 2'-O-methyl ribonucleotide
  modified_base 76: mod_base = OTHER; note = 2'-O-methyl ribonucleotide
  modified_base 77: mod_base = OTHER; note = 2'-O-methyl ribonucleotide
  modified_base 78: mod_base = OTHER; note = 2'-O-methyl ribonucleotide
  modified_base 79: mod_base = OTHER; note = 2'-O-methyl ribonucleotide
  modified_base 80: mod_base = OTHER; note = 2'-O-methyl ribonucleotide
  modified_base 82: mod_base = OTHER; note = 2'-O-methyl ribonucleotide
  modified_base 83: mod_base = OTHER; note = 2'-O-methyl ribonucleotide
  modified_base 84: mod_base = OTHER; note = 2'-O-methyl ribonucleotide
  modified_base 85: mod_base = OTHER; note = 2'-O-methyl ribonucleotide
  modified_base 86: mod_base = OTHER; note = 2'-O-methyl ribonucleotide
  modified_base 87: mod_base = OTHER; note = 2'-O-methyl ribonucleotide
  modified_base 89: mod_base = OTHER; note = 2'-O-methyl ribonucleotide
  modified_base 91: mod_base = OTHER; note = 2'-O-methyl ribonucleotide
  modified_base 92: mod_base = OTHER; note = 2'-O-methyl ribonucleotide
  modified_base 93: mod_base = OTHER; note = 2'-O-methyl ribonucleotide
  modified_base 94: mod_base = OTHER; note = 2'-O-methyl ribonucleotide
  modified_base 95: mod_base = OTHER; note = 2'-O-methyl ribonucleotide
  modified_base 96: mod_base = OTHER; note = 2'-O-methyl ribonucleotide
  modified_base 97: mod_base = OTHER; note = 2'-O-methyl ribonucleotide
  modified_base 98: mod_base = OTHER; note = 2'-O-methyl ribonucleotide
  modified_base 99: mod_base = OTHER; note = 2'-O-methyl ribonucleotide
  modified_base 100: mod_base = OTHER; note = 2'-O-methyl ribonucleotide
  modified_base 1..3: mod_base = OTHER; note = phosphorothioate linkage
  modified_base 25..26: mod_base = OTHER; note = phosphorothioate linkage
  modified_base 97..100: mod_base = OTHER; note = phosphorothioate linkage

SEQ ID NO: 2584 - RNA, 103 nt, synthetic construct; identical to SEQ ID NO: 1700
  source 1..103: mol_type = other RNA
  modified_base 1: mod_base = OTHER; note = 2'-O-methyl ribonucleotide
  modified_base 2: mod_base = OTHER; note = 2'-O-methyl ribonucleotide
  modified_base 3: mod_base = OTHER; note = 2'-O-methyl ribonucleotide
  modified_base 21: mod_base = OTHER; note = 2'-O-methyl ribonucleotide
  modified_base 28: mod_base = OTHER; note = 2'-O-methyl ribonucleotide
  modified_base 29: mod_base = OTHER; note = 2'-O-methyl ribonucleotide
  modified_base 30: mod_base = OTHER; note = 2'-O-methyl ribonucleotide
  modified_base 31: mod_base = OTHER; note = 2'-O-methyl ribonucleotide
  modified_base 32: mod_base = OTHER; note = 2'-O-methyl ribonucleotide
  modified_base 34: mod_base = OTHER; note = 2'-O-methyl ribonucleotide
  modified_base 35: mod_base = OTHER; note = 2'-O-methyl ribonucleotide
  modified_base 36: mod_base = OTHER; note = 2'-O-methyl ribonucleotide
  modified_base 37: mod_base = OTHER; note = 2'-O-methyl ribonucleotide
  modified_base 38: mod_base = OTHER; note = 2'-O-methyl ribonucleotide
  modified_base 39: mod_base = OTHER; note = 2'-O-methyl ribonucleotide
  modified_base 40: mod_base = OTHER; note = 2'-O-methyl ribonucleotide
  modified_base 41: mod_base = OTHER; note = 2'-O-methyl ribonucleotide
  modified_base 42: mod_base = OTHER; note = 2'-O-methyl ribonucleotide
  modified_base 46: mod_base = OTHER; note = 2'-O-methyl ribonucleotide
  modified_base 48: mod_base = OTHER; note = 2'-O-methyl ribonucleotide
  modified_base 50: mod_base = OTHER; note = 2'-O-methyl ribonucleotide
  modified_base 52: mod_base = OTHER; note = 2'-O-methyl ribonucleotide
  modified_base 53: mod_base = OTHER; note = 2'-O-methyl ribonucleotide
  modified_base 54: mod_base = OTHER; note = 2'-O-methyl ribonucleotide
  modified_base 55: mod_base = OTHER; note = 2'-O-methyl ribonucleotide
  modified_base 56: mod_base = OTHER; note = 2'-O-methyl ribonucleotide
  modified_base 57: mod_base = OTHER; note = 2'-O-methyl ribonucleotide
  modified_base 60: mod_base = OTHER; note = 2'-O-methyl ribonucleotide
  modified_base 61: mod_base = OTHER; note = 2'-O-methyl ribonucleotide
  modified_base 66: mod_base = OTHER; note = 2'-O-methyl ribonucleotide
  modified_base 67: mod_base = OTHER; note = 2'-O-methyl ribonucleotide
  modified_base 70: mod_base = OTHER; note = 2'-O-methyl ribonucleotide
  modified_base 71: mod_base = OTHER; note = 2'-O-methyl ribonucleotide
  modified_base 72: mod_base = OTHER; note = 2'-O-methyl ribonucleotide
  modified_base 74: mod_base = OTHER; note = 2'-O-methyl ribonucleotide
  modified_base 75: mod_base = OTHER; note = 2'-O-methyl ribonucleotide
  modified_base 76: mod_base = OTHER; note = 2'-O-methyl ribonucleotide
  modified_base 77: mod_base = OTHER; note = 2'-O-methyl ribonucleotide
  modified_base 78: mod_base = OTHER; note = 2'-O-methyl ribonucleotide
  modified_base 79: mod_base = OTHER; note = 2'-O-methyl ribonucleotide
  modified_base 80: mod_base = OTHER; note = 2'-O-methyl ribonucleotide
  modified_base 82: mod_base = OTHER; note = 2'-O-methyl ribonucleotide
  modified_base 83: mod_base = OTHER; note = 2'-O-methyl ribonucleotide
  modified_base 84: mod_base = OTHER; note = 2'-O-methyl ribonucleotide
  modified_base 85: mod_base = OTHER; note = 2'-O-methyl ribonucleotide
  modified_base 86: mod_base = OTHER; note = 2'-O-methyl ribonucleotide
  modified_base 87: mod_base = OTHER; note = 2'-O-methyl ribonucleotide
  modified_base 89: mod_base = OTHER; note = 2'-O-methyl ribonucleotide
  modified_base 92: mod_base = OTHER; note = 2'-O-methyl ribonucleotide
  modified_base 93: mod_base = OTHER; note = 2'-O-methyl ribonucleotide
  modified_base 94: mod_base = OTHER; note = 2'-O-methyl ribonucleotide
  modified_base 95: mod_base = OTHER; note = 2'-O-methyl ribonucleotide
  modified_base 96: mod_base = OTHER; note = 2'-O-methyl ribonucleotide
  modified_base 97: mod_base = OTHER; note = 2'-O-methyl ribonucleotide
  modified_base 98: mod_base = OTHER; note = 2'-O-methyl ribonucleotide
  modified_base 99: mod_base = OTHER; note = 2'-O-methyl ribonucleotide
  modified_base 100: mod_base = OTHER; note = 2'-O-methyl ribonucleotide
  modified_base 1..3: mod_base = OTHER; note = phosphorothioate linkage
  modified_base 25..26: mod_base = OTHER; note = phosphorothioate linkage
  modified_base 97..100: mod_base = OTHER; note = phosphorothioate linkage

SEQ ID NO: 2585 - RNA, 103 nt, synthetic construct; identical to SEQ ID NO: 1643
  source 1..103: mol_type = other RNA
  modified_base 1: mod_base = OTHER; note = 2'-O-methyl ribonucleotide
  modified_base 2: mod_base = OTHER; note = 2'-O-methyl ribonucleotide
  modified_base 3: mod_base = OTHER; note = 2'-O-methyl ribonucleotide
  modified_base 21: mod_base = OTHER; note = 2'-O-methyl ribonucleotide
  modified_base 28: mod_base = OTHER; note = 2'-O-methyl ribonucleotide
  modified_base 29: mod_base = OTHER; note = 2'-O-methyl ribonucleotide
  modified_base 30: mod_base = OTHER; note = 2'-O-methyl ribonucleotide
  modified_base 31: mod_base = OTHER; note = 2'-O-methyl ribonucleotide
  modified_base 32: mod_base = OTHER; note = 2'-O-methyl ribonucleotide
  modified_base 33: mod_base = OTHER; note = 2'-O-methyl ribonucleotide
  modified_base 34: mod_base = OTHER; note = 2'-O-methyl ribonucleotide
  modified_base 35: mod_base = OTHER; note = 2'-O-methyl ribonucleotide
  modified_base 36: mod_base = OTHER; note = 2'-O-methyl ribonucleotide
  modified_base 37: mod_base = OTHER; note = 2'-O-methyl ribonucleotide
  modified_base 38: mod_base = OTHER; note = 2'-O-methyl ribonucleotide
  modified_base 39: mod_base = OTHER; note = 2'-O-methyl ribonucleotide
  modified_base 40: mod_base = OTHER; note = 2'-O-methyl ribonucleotide
  modified_base 41: mod_base = OTHER; note = 2'-O-methyl ribonucleotide
  modified_base 42: mod_base = OTHER; note = 2'-O-methyl ribonucleotide
  modified_base 46: mod_base = OTHER; note = 2'-O-methyl ribonucleotide
  modified_base 48: mod_base = OTHER; note = 2'-O-methyl ribonucleotide
  modified_base 50: mod_base = OTHER; note = 2'-O-methyl ribonucleotide
  modified_base 52: mod_base = OTHER; note = 2'-O-methyl ribonucleotide
  modified_base 53: mod_base = OTHER; note = 2'-O-methyl ribonucleotide
  modified_base 54: mod_base = OTHER; note = 2'-O-methyl ribonucleotide
  modified_base 55: mod_base = OTHER; note = 2'-O-methyl ribonucleotide
  modified_base 56: mod_base = OTHER; note = 2'-O-methyl ribonucleotide
  modified_base 57: mod_base = OTHER; note = 2'-O-methyl ribonucleotide
  modified_base 60: mod_base = OTHER; note = 2'-O-methyl ribonucleotide
  modified_base 61: mod_base = OTHER; note = 2'-O-methyl ribonucleotide
  modified_base 66: mod_base = OTHER; note = 2'-O-methyl ribonucleotide
  modified_base 67: mod_base = OTHER; note = 2'-O-methyl ribonucleotide
  modified_base 70: mod_base = OTHER; note = 2'-O-methyl ribonucleotide
  modified_base 71: mod_base = OTHER; note = 2'-O-methyl ribonucleotide
  modified_base 72: mod_base = OTHER; note = 2'-O-methyl ribonucleotide
  modified_base 73: mod_base = OTHER; note = 2'-O-methyl ribonucleotide
  modified_base 74: mod_base = OTHER; note = 2'-O-methyl ribonucleotide
  modified_base 75: mod_base = OTHER; note = 2'-O-methyl ribonucleotide
  modified_base 76: mod_base = OTHER; note = 2'-O-methyl ribonucleotide
  modified_base 77: mod_base = OTHER; note = 2'-O-methyl ribonucleotide
  modified_base 78: mod_base = OTHER; note = 2'-O-methyl ribonucleotide
  modified_base 79: mod_base = OTHER; note = 2'-O-methyl ribonucleotide
  modified_base 80: mod_base = OTHER; note = 2'-O-methyl ribonucleotide
  modified_base 81: mod_base = OTHER; note = 2'-O-methyl ribonucleotide
  modified_base 83: mod_base = OTHER; note = 2'-O-methyl ribonucleotide
  modified_base 84: mod_base = OTHER; note = 2'-O-methyl ribonucleotide
  modified_base 85: mod_base = OTHER; note = 2'-O-methyl ribonucleotide
  modified_base 86: mod_base = OTHER; note = 2'-O-methyl ribonucleotide
  modified_base 87: mod_base = OTHER; note = 2'-O-methyl ribonucleotide
  modified_base 88: mod_base = OTHER; note = 2'-O-methyl ribonucleotide
  modified_base 89: mod_base = OTHER; note = 2'-O-methyl ribonucleotide
  modified_base 90: mod_base = OTHER; note = 2'-O-methyl ribonucleotide
  modified_base 91: mod_base = OTHER; note = 2'-O-methyl ribonucleotide
  modified_base 92: mod_base = OTHER; note = 2'-O-methyl ribonucleotide
  modified_base 93: mod_base = OTHER; note = 2'-O-methyl ribonucleotide
  modified_base 94: mod_base = OTHER; note = 2'-O-methyl ribonucleotide
  modified_base 95: mod_base = OTHER; note = 2'-O-methyl ribonucleotide
  modified_base 96: mod_base = OTHER; note = 2'-O-methyl ribonucleotide
  modified_base 97: mod_base = OTHER; note = 2'-O-methyl ribonucleotide
  modified_base 98: mod_base = OTHER; note = 2'-O-methyl ribonucleotide
  modified_base 99: mod_base = OTHER; note = 2'-O-methyl ribonucleotide
  modified_base 100: mod_base = OTHER; note = 2'-O-methyl ribonucleotide
  modified_base 1..3: mod_base = OTHER; note = phosphorothioate linkage
  modified_base 45..46: mod_base = OTHER; note = phosphorothioate linkage
  modified_base 64..65: mod_base = OTHER; note = phosphorothioate linkage
  modified_base 97..100: mod_base = OTHER; note = phosphorothioate linkage

SEQ ID NO: 2586 - RNA, 103 nt, synthetic construct; identical to SEQ ID NO: 1643
  source 1..103: mol_type = other RNA
  modified_base 1: mod_base = OTHER; note = 2'-O-methyl ribonucleotide
  modified_base 2: mod_base = OTHER; note = 2'-O-methyl ribonucleotide
  modified_base 3: mod_base = OTHER; note = 2'-O-methyl ribonucleotide
  modified_base 21: mod_base = OTHER; note = 2'-O-methyl ribonucleotide
  modified_base 28: mod_base = OTHER; note = 2'-O-methyl ribonucleotide
  modified_base 29: mod_base = OTHER; note = 2'-O-methyl ribonucleotide
  modified_base 30: mod_base = OTHER; note = 2'-O-methyl ribonucleotide
  modified_base 31: mod_base = OTHER; note = 2'-O-methyl ribonucleotide
  modified_base 32: mod_base = OTHER; note = 2'-O-methyl ribonucleotide
  modified_base 34: mod_base = OTHER; note = 2'-O-methyl ribonucleotide
  modified_base 35: mod_base = OTHER; note = 2'-O-methyl ribonucleotide
  modified_base 36: mod_base = OTHER; note = 2'-O-methyl ribonucleotide
  modified_base 37: mod_base = OTHER; note = 2'-O-methyl ribonucleotide
  modified_base 38: mod_base = OTHER; note = 2'-O-methyl ribonucleotide
  modified_base 39: mod_base = OTHER; note = 2'-O-methyl ribonucleotide
  modified_base 40: mod_base = OTHER; note = 2'-O-methyl ribonucleotide
  modified_base 41: mod_base = OTHER; note = 2'-O-methyl ribonucleotide
  modified_base 42: mod_base = OTHER; note = 2'-O-methyl ribonucleotide
  modified_base 46: mod_base = OTHER; note = 2'-O-methyl ribonucleotide
  modified_base 48: mod_base = OTHER; note = 2'-O-methyl ribonucleotide
  modified_base 50: mod_base = OTHER; note = 2'-O-methyl ribonucleotide
  modified_base 52: mod_base = OTHER; note = 2'-O-methyl ribonucleotide
  modified_base 53: mod_base = OTHER; note = 2'-O-methyl ribonucleotide
  modified_base 54: mod_base = OTHER; note = 2'-O-methyl ribonucleotide
  modified_base 55: mod_base = OTHER; note = 2'-O-methyl ribonucleotide
  modified_base 56: mod_base = OTHER; note = 2'-O-methyl ribonucleotide
  modified_base 57: mod_base = OTHER; note = 2'-O-methyl ribonucleotide
  modified_base 60: mod_base = OTHER; note = 2'-O-methyl ribonucleotide
  modified_base 61: mod_base = OTHER; note = 2'-O-methyl ribonucleotide
  modified_base 66: mod_base = OTHER; note = 2'-O-methyl ribonucleotide
  modified_base 67: mod_base = OTHER; note = 2'-O-methyl ribonucleotide
  modified_base 70: mod_base = OTHER; note = 2'-O-methyl ribonucleotide
  modified_base 71: mod_base = OTHER; note = 2'-O-methyl ribonucleotide
  modified_base 72: mod_base = OTHER; note = 2'-O-methyl ribonucleotide
  modified_base 74: mod_base = OTHER; note = 2'-O-methyl ribonucleotide
  modified_base 75: mod_base = OTHER; note = 2'-O-methyl ribonucleotide
  modified_base 76: mod_base = OTHER; note = 2'-O-methyl ribonucleotide
  modified_base 77: mod_base = OTHER; note = 2'-O-methyl ribonucleotide
  modified_base 78: mod_base = OTHER; note = 2'-O-methyl ribonucleotide
  modified_base 79: mod_base = OTHER; note = 2'-O-methyl ribonucleotide
  modified_base 80: mod_base = OTHER; note = 2'-O-methyl ribonucleotide
  modified_base 81: mod_base = OTHER; note = 2'-O-methyl ribonucleotide
  modified_base 83: mod_base = OTHER; note = 2'-O-methyl ribonucleotide
  modified_base 84: mod_base = OTHER; note = 2'-O-methyl ribonucleotide
  modified_base 85: mod_base = OTHER; note = 2'-O-methyl ribonucleotide
  modified_base 86: mod_base = OTHER; note = 2'-O-methyl ribonucleotide
  modified_base 87: mod_base = OTHER; note = 2'-O-methyl ribonucleotide
  modified_base 88: mod_base = OTHER; note = 2'-O-methyl ribonucleotide
  modified_base 89: mod_base = OTHER; note = 2'-O-methyl ribonucleotide
  modified_base 90: mod_base = OTHER; note = 2'-O-methyl ribonucleotide
  modified_base 91: mod_base = OTHER; note = 2'-O-methyl ribonucleotide
  modified_base 92: mod_base = OTHER; note = 2'-O-methyl ribonucleotide
  modified_base 93: mod_base = OTHER; note = 2'-O-methyl ribonucleotide
  modified_base 94: mod_base = OTHER; note = 2'-O-methyl ribonucleotide
  modified_base 95: mod_base = OTHER; note = 2'-O-methyl ribonucleotide
  modified_base 96: mod_base = OTHER; note = 2'-O-methyl ribonucleotide
  modified_base 97: mod_base = OTHER; note = 2'-O-methyl ribonucleotide
  modified_base 98: mod_base = OTHER; note = 2'-O-methyl ribonucleotide
  modified_base 99: mod_base = OTHER; note = 2'-O-methyl ribonucleotide
  modified_base 100: mod_base = OTHER; note = 2'-O-methyl ribonucleotide
  modified_base 1..3: mod_base = OTHER; note = phosphorothioate linkage
  modified_base 45..46: mod_base = OTHER; note = phosphorothioate linkage
  modified_base 64..65: mod_base = OTHER; note = phosphorothioate linkage
  modified_base 97..100: mod_base = OTHER; note = phosphorothioate linkage

SEQ ID NO: 2587 - RNA, 103 nt, synthetic construct; identical to SEQ ID NO: 1699
  source 1..103: mol_type = other RNA
  modified_base 1: mod_base = OTHER; note = 2'-O-methyl ribonucleotide
  modified_base 2: mod_base = OTHER; note = 2'-O-methyl ribonucleotide
  modified_base 3: mod_base = OTHER; note = 2'-O-methyl ribonucleotide
  modified_base 21: mod_base = OTHER; note = 2'-O-methyl ribonucleotide
  modified_base 28: mod_base = OTHER; note = 2'-O-methyl ribonucleotide
  modified_base 29: mod_base = OTHER; note = 2'-O-methyl ribonucleotide
  modified_base 30: mod_base = OTHER; note = 2'-O-methyl ribonucleotide
  modified_base 31: mod_base = OTHER; note = 2'-O-methyl ribonucleotide
  modified_base 32: mod_base = OTHER; note = 2'-O-methyl ribonucleotide
  modified_base 33: mod_base = OTHER; note = 2'-O-methyl ribonucleotide
  modified_base 34: mod_base = OTHER; note = 2'-O-methyl ribonucleotide
  modified_base 35: mod_base = OTHER; note = 2'-O-methyl ribonucleotide
  modified_base 36: mod_base = OTHER; note = 2'-O-methyl ribonucleotide
  modified_base 37: mod_base = OTHER; note = 2'-O-methyl ribonucleotide
  modified_base 38: mod_base = OTHER; note = 2'-O-methyl ribonucleotide
  modified_base 39: mod_base = OTHER; note = 2'-O-methyl ribonucleotide
  modified_base 40: mod_base = OTHER; note = 2'-O-methyl ribonucleotide
  modified_base 41: mod_base = OTHER; note = 2'-O-methyl ribonucleotide
  modified_base 42: mod_base = OTHER; note = 2'-O-methyl ribonucleotide
  modified_base 46: mod_base = OTHER; note = 2'-O-methyl ribonucleotide
  modified_base 48: mod_base = OTHER; note = 2'-O-methyl ribonucleotide
  modified_base 50: mod_base = OTHER; note = 2'-O-methyl ribonucleotide
  modified_base 52: mod_base = OTHER; note = 2'-O-methyl ribonucleotide
  modified_base 53: mod_base = OTHER; note = 2'-O-methyl ribonucleotide
  modified_base 54: mod_base = OTHER; note = 2'-O-methyl ribonucleotide
  modified_base 55: mod_base = OTHER; note = 2'-O-methyl ribonucleotide
  modified_base 56: mod_base = OTHER; note = 2'-O-methyl ribonucleotide
  modified_base 57: mod_base = OTHER; note = 2'-O-methyl ribonucleotide
  modified_base 60: mod_base = OTHER; note = 2'-O-methyl ribonucleotide
  modified_base 61: mod_base = OTHER; note = 2'-O-methyl ribonucleotide
  modified_base 66: mod_base = OTHER; note = 2'-O-methyl ribonucleotide
  modified_base 67: mod_base = OTHER; note = 2'-O-methyl ribonucleotide
  modified_base 70: mod_base = OTHER; note = 2'-O-methyl ribonucleotide
  modified_base 71: mod_base = OTHER; note = 2'-O-methyl ribonucleotide
  modified_base 72: mod_base = OTHER; note = 2'-O-methyl ribonucleotide
  modified_base 73: mod_base = OTHER; note = 2'-O-methyl ribonucleotide
  modified_base 74: mod_base = OTHER; note = 2'-O-methyl ribonucleotide
  modified_base 75: mod_base = OTHER; note = 2'-O-methyl ribonucleotide
  modified_base 76: mod_base = OTHER; note = 2'-O-methyl ribonucleotide
  modified_base 77: mod_base = OTHER; note = 2'-O-methyl ribonucleotide
  modified_base 78: mod_base = OTHER; note = 2'-O-methyl ribonucleotide
  modified_base 79: mod_base = OTHER; note = 2'-O-methyl ribonucleotide
  modified_base 80: mod_base = OTHER; note = 2'-O-methyl ribonucleotide
  modified_base 81: mod_base = OTHER; note = 2'-O-methyl ribonucleotide
  modified_base 83: mod_base = OTHER; note = 2'-O-methyl ribonucleotide
  modified_base 84: mod_base = OTHER; note = 2'-O-methyl ribonucleotide
  modified_base 85: mod_base = OTHER; note = 2'-O-methyl ribonucleotide
  modified_base 86: mod_base = OTHER; note = 2'-O-methyl ribonucleotide
  modified_base 87: mod_base = OTHER; note = 2'-O-methyl ribonucleotide
  modified_base 88: mod_base = OTHER; note = 2'-O-methyl ribonucleotide
  modified_base 89: mod_base = OTHER; note = 2'-O-methyl ribonucleotide
  modified_base 90: mod_base = OTHER; note = 2'-O-methyl ribonucleotide
  modified_base 91: mod_base = OTHER; note = 2'-O-methyl ribonucleotide
  modified_base 92: mod_base = OTHER; note = 2'-O-methyl ribonucleotide
  modified_base 93: mod_base = OTHER; note = 2'-O-methyl ribonucleotide
  modified_base 94: mod_base = OTHER; note = 2'-O-methyl ribonucleotide
  modified_base 95: mod_base = OTHER; note = 2'-O-methyl ribonucleotide
  modified_base 96: mod_base = OTHER; note = 2'-O-methyl ribonucleotide
  modified_base 97: mod_base = OTHER; note = 2'-O-methyl ribonucleotide
  modified_base 98: mod_base = OTHER; note = 2'-O-methyl ribonucleotide
  modified_base 99: mod_base = OTHER; note = 2'-O-methyl ribonucleotide
  modified_base 100: mod_base = OTHER; note = 2'-O-methyl ribonucleotide
  modified_base 1..3: mod_base = OTHER; note = phosphorothioate linkage
  modified_base 45..46: mod_base = OTHER; note = phosphorothioate linkage
  modified_base 64..65: mod_base = OTHER; note = phosphorothioate linkage
  modified_base 97..100: mod_base = OTHER; note = phosphorothioate linkage

SEQ ID NO: 2588 - RNA, 103 nt, synthetic construct; identical to SEQ ID NO: 1699
  source 1..103: mol_type = other RNA
  modified_base 1: mod_base = OTHER; note = 2'-O-methyl ribonucleotide
  modified_base 2: mod_base = OTHER; note = 2'-O-methyl ribonucleotide
  modified_base 3: mod_base = OTHER; note = 2'-O-methyl ribonucleotide
  modified_base 21: mod_base = OTHER; note = 2'-O-methyl ribonucleotide
  modified_base 28: mod_base = OTHER; note = 2'-O-methyl ribonucleotide
  modified_base 29: mod_base = OTHER; note = 2'-O-methyl ribonucleotide
  modified_base 30: mod_base = OTHER; note = 2'-O-methyl ribonucleotide
  modified_base 31: mod_base = OTHER; note = 2'-O-methyl ribonucleotide
  modified_base 32: mod_base = OTHER; note = 2'-O-methyl ribonucleotide
  modified_base 34: mod_base = OTHER; note = 2'-O-methyl ribonucleotide
  modified_base 35: mod_base = OTHER; note = 2'-O-methyl ribonucleotide
  modified_base 36: mod_base = OTHER; note = 2'-O-methyl ribonucleotide
  modified_base 37: mod_base = OTHER; note = 2'-O-methyl ribonucleotide
  modified_base 38: mod_base = OTHER; note = 2'-O-methyl ribonucleotide
  modified_base 39: mod_base = OTHER; note = 2'-O-methyl ribonucleotide
  modified_base 40: mod_base = OTHER; note = 2'-O-methyl ribonucleotide
  modified_base 41: mod_base = OTHER; note = 2'-O-methyl ribonucleotide
  modified_base 42: mod_base = OTHER; note = 2'-O-methyl ribonucleotide
  modified_base 46: mod_base = OTHER; note = 2'-O-methyl ribonucleotide
  modified_base 48: mod_base = OTHER; note = 2'-O-methyl ribonucleotide
  modified_base 50: mod_base = OTHER; note = 2'-O-methyl ribonucleotide
  modified_base 52: mod_base = OTHER; note = 2'-O-methyl ribonucleotide
  modified_base 53: mod_base = OTHER; note = 2'-O-methyl ribonucleotide
  modified_base 54: mod_base = OTHER; note = 2'-O-methyl ribonucleotide
  modified_base 55: mod_base = OTHER; note = 2'-O-methyl ribonucleotide
  modified_base 56: mod_base = OTHER; note = 2'-O-methyl ribonucleotide
  modified_base 57: mod_base = OTHER; note = 2'-O-methyl ribonucleotide
  modified_base 60: mod_base = OTHER; note = 2'-O-methyl ribonucleotide
  modified_base 61: mod_base = OTHER; note = 2'-O-methyl ribonucleotide
  modified_base 66: mod_base = OTHER; note = 2'-O-methyl ribonucleotide
  modified_base 67: mod_base = OTHER; note = 2'-O-methyl ribonucleotide
  modified_base 70: mod_base = OTHER; note = 2'-O-methyl ribonucleotide
  modified_base 71: mod_base = OTHER; note = 2'-O-methyl ribonucleotide
  modified_base 72: mod_base = OTHER; note = 2'-O-methyl ribonucleotide
  modified_base 74: mod_base = OTHER; note = 2'-O-methyl ribonucleotide
  modified_base 75: mod_base = OTHER; note = 2'-O-methyl ribonucleotide
  modified_base 76: mod_base = OTHER; note = 2'-O-methyl ribonucleotide
  modified_base 77: mod_base = OTHER; note = 2'-O-methyl ribonucleotide
  modified_base 78: mod_base = OTHER; note = 2'-O-methyl ribonucleotide
  modified_base 79: mod_base = OTHER; note = 2'-O-methyl ribonucleotide
  modified_base 80: mod_base = OTHER; note = 2'-O-methyl ribonucleotide
  modified_base 81: mod_base = OTHER; note = 2'-O-methyl ribonucleotide
  modified_base 83: mod_base = OTHER; note = 2'-O-methyl ribonucleotide
  modified_base 84: mod_base = OTHER; note = 2'-O-methyl ribonucleotide
  modified_base 85: mod_base = OTHER; note = 2'-O-methyl ribonucleotide
  modified_base 86: mod_base = OTHER; note = 2'-O-methyl ribonucleotide
  modified_base 87: mod_base = OTHER; note = 2'-O-methyl ribonucleotide
  modified_base 88: mod_base = OTHER; note = 2'-O-methyl ribonucleotide
  modified_base 89: mod_base = OTHER; note = 2'-O-methyl ribonucleotide
  modified_base 90: mod_base = OTHER; note = 2'-O-methyl ribonucleotide
  modified_base 91: mod_base = OTHER; note = 2'-O-methyl ribonucleotide
  modified_base 92: mod_base = OTHER; note = 2'-O-methyl ribonucleotide
  modified_base 93: mod_base = OTHER; note = 2'-O-methyl ribonucleotide
  modified_base 94: mod_base = OTHER; note = 2'-O-methyl ribonucleotide
  modified_base 95: mod_base = OTHER; note = 2'-O-methyl ribonucleotide
  modified_base 96: mod_base = OTHER; note = 2'-O-methyl ribonucleotide
  modified_base 97: mod_base = OTHER; note = 2'-O-methyl ribonucleotide
  modified_base 98: mod_base = OTHER; note = 2'-O-methyl ribonucleotide
  modified_base 99: mod_base = OTHER; note = 2'-O-methyl ribonucleotide
  modified_base 100: mod_base = OTHER; note = 2'-O-methyl ribonucleotide
  modified_base 1..3: mod_base = OTHER; note = phosphorothioate linkage
  modified_base 45..46: mod_base = OTHER; note = phosphorothioate linkage
  modified_base 64..65: mod_base = OTHER; note = phosphorothioate linkage
  modified_base 97..100: mod_base = OTHER; note = phosphorothioate linkage

SEQ ID NO: 2589 - RNA, 103 nt, synthetic construct; identical to SEQ ID NO: 1700
  source 1..103: mol_type = other RNA
  modified_base 1: mod_base = OTHER; note = 2'-O-methyl ribonucleotide
  modified_base 2: mod_base = OTHER; note = 2'-O-methyl ribonucleotide
  modified_base 3: mod_base = OTHER; note = 2'-O-methyl ribonucleotide
  modified_base 21: mod_base = OTHER; note = 2'-O-methyl ribonucleotide
  modified_base 28: mod_base = OTHER; note = 2'-O-methyl ribonucleotide
  modified_base 29: mod_base = OTHER; note = 2'-O-methyl ribonucleotide
  modified_base 30: mod_base = OTHER; note = 2'-O-methyl ribonucleotide
  modified_base 31: mod_base = OTHER; note = 2'-O-methyl ribonucleotide
  modified_base 32: mod_base = OTHER; note = 2'-O-methyl ribonucleotide
  modified_base 33: mod_base = OTHER; note = 2'-O-methyl ribonucleotide
  modified_base 34: mod_base = OTHER; note = 2'-O-methyl ribonucleotide
  modified_base 35: mod_base = OTHER; note = 2'-O-methyl ribonucleotide
  modified_base 36: mod_base = OTHER; note = 2'-O-methyl ribonucleotide
  modified_base 37: mod_base = OTHER; note = 2'-O-methyl ribonucleotide
  modified_base 38: mod_base = OTHER; note = 2'-O-methyl ribonucleotide
  modified_base 39: mod_base = OTHER; note = 2'-O-methyl ribonucleotide
  modified_base 40: mod_base = OTHER; note = 2'-O-methyl ribonucleotide
  modified_base 41: mod_base = OTHER; note = 2'-O-methyl ribonucleotide
  modified_base 42: mod_base = OTHER; note = 2'-O-methyl ribonucleotide
  modified_base 46: mod_base = OTHER; note = 2'-O-methyl ribonucleotide
  modified_base 48: mod_base = OTHER; note = 2'-O-methyl ribonucleotide
  modified_base 50: mod_base = OTHER; note = 2'-O-methyl ribonucleotide
  modified_base 52: mod_base = OTHER; note = 2'-O-methyl ribonucleotide
  modified_base 53: mod_base = OTHER; note = 2'-O-methyl ribonucleotide
  modified_base 54: mod_base = OTHER; note = 2'-O-methyl ribonucleotide
  modified_base 57: mod_base = OTHER; note = 2'-O-methyl ribonucleotide
  modified_base 61: mod_base = OTHER; note = 2'-O-methyl ribonucleotide
  modified_base 66: mod_base = OTHER; note = 2'-O-methyl ribonucleotide
  modified_base 67: mod_base = OTHER; note = 2'-O-methyl ribonucleotide
  modified_base 70: mod_base = OTHER; note = 2'-O-methyl ribonucleotide
  modified_base 71: mod_base = OTHER; note = 2'-O-methyl ribonucleotide
  modified_base 72: mod_base = OTHER; note = 2'-O-methyl ribonucleotide
  modified_base 74: mod_base = OTHER; note = 2'-O-methyl ribonucleotide
  modified_base 75: mod_base = OTHER; note = 2'-O-methyl ribonucleotide
  modified_base 76: mod_base = OTHER; note = 2'-O-methyl ribonucleotide
  modified_base 77: mod_base = OTHER; note = 2'-O-methyl ribonucleotide
  modified_base 78: mod_base = OTHER; note = 2'-O-methyl ribonucleotide
  modified_base 79: mod_base = OTHER; note = 2'-O-methyl ribonucleotide
  modified_base 80: mod_base = OTHER; note = 2'-O-methyl ribonucleotide
  modified_base 82: mod_base = OTHER; note = 2'-O-methyl ribonucleotide
  modified_base 83: mod_base = OTHER; note = 2'-O-methyl ribonucleotide
  modified_base 84: mod_base = OTHER; note = 2'-O-methyl ribonucleotide
  modified_base 85: mod_base = OTHER; note = 2'-O-methyl ribonucleotide
  modified_base 86: mod_base = OTHER; note = 2'-O-methyl ribonucleotide
  modified_base 87: mod_base = OTHER; note = 2'-O-methyl ribonucleotide
  modified_base 89: mod_base = OTHER; note = 2'-O-methyl ribonucleotide
  modified_base 92: mod_base = OTHER; note = 2'-O-methyl ribonucleotide
  modified_base 93: mod_base = OTHER; note = 2'-O-methyl ribonucleotide
  modified_base 94: mod_base = OTHER; note = 2'-O-methyl ribonucleotide
  modified_base 95: mod_base = OTHER; note = 2'-O-methyl ribonucleotide
  modified_base 96: mod_base = OTHER; note = 2'-O-methyl ribonucleotide
  modified_base 97: mod_base = OTHER; note = 2'-O-methyl ribonucleotide
  modified_base 98: mod_base = OTHER; note = 2'-O-methyl ribonucleotide
  modified_base 99: mod_base = OTHER; note = 2'-O-methyl ribonucleotide
  modified_base 100: mod_base = OTHER; note = 2'-O-methyl ribonucleotide
  modified_base 1..3: mod_base = OTHER; note = phosphorothioate linkage
  modified_base 45..46: mod_base = OTHER; note = phosphorothioate linkage
  modified_base 64..65: mod_base = OTHER; note = phosphorothioate linkage
  modified_base 97..100: mod_base = OTHER; note = phosphorothioate linkage

SEQ ID NO: 2590 - RNA, 103 nt, synthetic construct; identical to SEQ ID NO: 1700
  source 1..103: mol_type = other RNA
  modified_base 1: mod_base = OTHER; note = 2'-O-methyl ribonucleotide
  modified_base 2: mod_base = OTHER; note = 2'-O-methyl ribonucleotide
  modified_base 3: mod_base = OTHER; note = 2'-O-methyl ribonucleotide
  modified_base 21: mod_base = OTHER; note = 2'-O-methyl ribonucleotide
  modified_base 28: mod_base = OTHER; note = 2'-O-methyl ribonucleotide
  modified_base 29: mod_base = OTHER; note = 2'-O-methyl ribonucleotide
  modified_base 30: mod_base = OTHER; note = 2'-O-methyl ribonucleotide
  modified_base 31: mod_base = OTHER; note = 2'-O-methyl ribonucleotide
  modified_base 32: mod_base = OTHER; note = 2'-O-methyl ribonucleotide
  modified_base 33: mod_base = OTHER; note = 2'-O-methyl ribonucleotide
  modified_base 34: mod_base = OTHER; note = 2'-O-methyl ribonucleotide
  modified_base 35: mod_base = OTHER; note = 2'-O-methyl ribonucleotide
  modified_base 36: mod_base = OTHER; note = 2'-O-methyl ribonucleotide
  modified_base 37: mod_base = OTHER; note = 2'-O-methyl ribonucleotide
  modified_base 38: mod_base = OTHER; note = 2'-O-methyl ribonucleotide
  modified_base 39: mod_base = OTHER; note = 2'-O-methyl ribonucleotide
  modified_base 40: mod_base = OTHER; note = 2'-O-methyl ribonucleotide
  modified_base 41: mod_base = OTHER; note = 2'-O-methyl ribonucleotide
  modified_base 42: mod_base = OTHER; note = 2'-O-methyl ribonucleotide
  modified_base 46: mod_base = OTHER; note = 2'-O-methyl ribonucleotide
  modified_base 48: mod_base = OTHER; note = 2'-O-methyl ribonucleotide
  modified_base 50: mod_base = OTHER; note = 2'-O-methyl ribonucleotide
  modified_base 52: mod_base = OTHER; note = 2'-O-methyl ribonucleotide
  modified_base 53: mod_base = OTHER; note = 2'-O-methyl ribonucleotide
  modified_base 54: mod_base = OTHER; note = 2'-O-methyl ribonucleotide
  modified_base 55: mod_base = OTHER; note = 2'-O-methyl ribonucleotide
  modified_base 56: mod_base = OTHER; note = 2'-O-methyl ribonucleotide
  modified_base 57: mod_base = OTHER; note = 2'-O-methyl ribonucleotide
  modified_base 60: mod_base = OTHER; note = 2'-O-methyl ribonucleotide
  modified_base 61: mod_base = OTHER; note = 2'-O-methyl ribonucleotide
  modified_base 66: mod_base = OTHER; note = 2'-O-methyl ribonucleotide
  modified_base 67: mod_base = OTHER; note = 2'-O-methyl ribonucleotide
  modified_base 70: mod_base = OTHER; note = 2'-O-methyl ribonucleotide
  modified_base 71: mod_base = OTHER; note = 2'-O-methyl ribonucleotide
  modified_base 72: mod_base = OTHER; note = 2'-O-methyl ribonucleotide
  modified_base 74: mod_base = OTHER; note = 2'-O-methyl ribonucleotide
  modified_base 75: mod_base = OTHER; note = 2'-O-methyl ribonucleotide
  modified_base 76: mod_base = OTHER; note = 2'-O-methyl ribonucleotide
  modified_base 77: mod_base = OTHER; note = 2'-O-methyl ribonucleotide
  modified_base 78: mod_base = OTHER; note = 2'-O-methyl ribonucleotide
  modified_base 79: mod_base = OTHER; note = 2'-O-methyl ribonucleotide
  modified_base 80: mod_base = OTHER; note = 2'-O-methyl ribonucleotide
  modified_base 82: mod_base = OTHER; note = 2'-O-methyl ribonucleotide
  modified_base 83: mod_base = OTHER; note = 2'-O-methyl ribonucleotide
  modified_base 84: mod_base = OTHER; note = 2'-O-methyl ribonucleotide
  modified_base 85: mod_base = OTHER; note = 2'-O-methyl ribonucleotide
  modified_base 86: mod_base = OTHER; note = 2'-O-methyl ribonucleotide
  modified_base 87: mod_base = OTHER; note = 2'-O-methyl ribonucleotide
  modified_base 89: mod_base = OTHER; note = 2'-O-methyl ribonucleotide
  modified_base 92: mod_base = OTHER; note = 2'-O-methyl ribonucleotide
  modified_base 93: mod_base = OTHER; note = 2'-O-methyl ribonucleotide
  modified_base 94: mod_base = OTHER; note = 2'-O-methyl ribonucleotide
  modified_base 95: mod_base = OTHER; note = 2'-O-methyl ribonucleotide
  modified_base 96: mod_base = OTHER; note = 2'-O-methyl ribonucleotide
  modified_base 97: mod_base = OTHER; note = 2'-O-methyl ribonucleotide
  modified_base 98: mod_base = OTHER; note = 2'-O-methyl ribonucleotide
  modified_base 99: mod_base = OTHER; note = 2'-O-methyl ribonucleotide
  modified_base 100: mod_base = OTHER; note = 2'-O-methyl ribonucleotide
  modified_base 1..3: mod_base = OTHER; note = phosphorothioate linkage
  modified_base 45..46: mod_base = OTHER; note = phosphorothioate linkage
  modified_base 64..65: mod_base = OTHER; note = phosphorothioate linkage
  modified_base 97..100: mod_base = OTHER; note = phosphorothioate linkage

SEQ ID NO: 2591 - RNA, 103 nt, synthetic construct; identical to SEQ ID NO: 1700
  source 1..103: mol_type = other RNA
  modified_base 1: mod_base = OTHER; note = 2'-O-methyl ribonucleotide
  modified_base 2: mod_base = OTHER; note = 2'-O-methyl ribonucleotide
  modified_base 3: mod_base = OTHER; note = 2'-O-methyl ribonucleotide
  modified_base 21: mod_base = OTHER; note = 2'-O-methyl ribonucleotide
  modified_base 28: mod_base = OTHER; note = 2'-O-methyl ribonucleotide
  modified_base 29: mod_base = OTHER; note = 2'-O-methyl ribonucleotide
  modified_base 30: mod_base = OTHER; note = 2'-O-methyl ribonucleotide
  modified_base 31: mod_base = OTHER; note = 2'-O-methyl ribonucleotide
  modified_base 32: mod_base = OTHER; note = 2'-O-methyl ribonucleotide
  modified_base 33: mod_base = OTHER; note = 2'-O-methyl ribonucleotide
  modified_base 34: mod_base = OTHER; note = 2'-O-methyl ribonucleotide
  modified_base 35: mod_base = OTHER; note = 2'-O-methyl ribonucleotide
  modified_base 36: mod_base = OTHER; note = 2'-O-methyl ribonucleotide
  modified_base 37: mod_base = OTHER; note = 2'-O-methyl ribonucleotide
  modified_base 38: mod_base = OTHER; note = 2'-O-methyl ribonucleotide
  modified_base 39: mod_base = OTHER; note = 2'-O-methyl ribonucleotide
  modified_base 40: mod_base = OTHER; note = 2'-O-methyl ribonucleotide
  modified_base 41: mod_base = OTHER; note = 2'-O-methyl ribonucleotide
  modified_base 42: mod_base = OTHER; note = 2'-O-methyl ribonucleotide
  modified_base 46: mod_base = OTHER; note = 2'-O-methyl ribonucleotide
  modified_base 48: mod_base = OTHER; note = 2'-O-methyl ribonucleotide
  modified_base 50: mod_base = OTHER; note = 2'-O-methyl ribonucleotide
  modified_base 52: mod_base = OTHER; note = 2'-O-methyl ribonucleotide
  modified_base 53: mod_base = OTHER; note = 2'-O-methyl ribonucleotide
  modified_base 54: mod_base = OTHER; note = 2'-O-methyl ribonucleotide
  modified_base 57: mod_base = OTHER; note = 2'-O-methyl ribonucleotide
  modified_base 61: mod_base = OTHER; note = 2'-O-methyl ribonucleotide
  modified_base 66: mod_base = OTHER; note = 2'-O-methyl ribonucleotide
  modified_base 67: mod_base = OTHER; note = 2'-O-methyl ribonucleotide
  modified_base 70: mod_base = OTHER; note = 2'-O-methyl ribonucleotide
  modified_base 71: mod_base = OTHER; note = 2'-O-methyl ribonucleotide
  modified_base 72: mod_base = OTHER; note = 2'-O-methyl ribonucleotide
  modified_base 73: mod_base = OTHER; note = 2'-O-methyl ribonucleotide
  modified_base 74: mod_base = OTHER; note = 2'-O-methyl ribonucleotide
  modified_base 75: mod_base = OTHER; note = 2'-O-methyl ribonucleotide
  modified_base 76: mod_base = OTHER; note = 2'-O-methyl ribonucleotide
  modified_base 77: mod_base = OTHER; note = 2'-O-methyl ribonucleotide
  modified_base 78: mod_base = OTHER; note = 2'-O-methyl ribonucleotide
  modified_base 79: mod_base = OTHER; note = 2'-O-methyl ribonucleotide
  modified_base 80: mod_base = OTHER; note = 2'-O-methyl ribonucleotide
  modified_base 82: mod_base = OTHER; note = 2'-O-methyl ribonucleotide
  modified_base 83: mod_base = OTHER; note = 2'-O-methyl ribonucleotide
  modified_base 84: mod_base = OTHER; note = 2'-O-methyl ribonucleotide
  modified_base 85: mod_base = OTHER; note = 2'-O-methyl ribonucleotide
  modified_base 86: mod_base = OTHER; note = 2'-O-methyl ribonucleotide
  modified_base 87: mod_base = OTHER; note = 2'-O-methyl ribonucleotide
  modified_base 89: mod_base = OTHER; note = 2'-O-methyl ribonucleotide
  modified_base 92: mod_base = OTHER; note = 2'-O-methyl ribonucleotide
  modified_base 93: mod_base = OTHER; note = 2'-O-methyl ribonucleotide
  modified_base 94: mod_base = OTHER; note = 2'-O-methyl ribonucleotide
  modified_base 95: mod_base = OTHER; note = 2'-O-methyl ribonucleotide
  modified_base 96: mod_base = OTHER; note = 2'-O-methyl ribonucleotide
  modified_base 97: mod_base = OTHER; note = 2'-O-methyl ribonucleotide
  modified_base 98: mod_base = OTHER; note = 2'-O-methyl ribonucleotide
  modified_base 99: mod_base = OTHER; note = 2'-O-methyl ribonucleotide
  modified_base 100: mod_base = OTHER; note = 2'-O-methyl ribonucleotide
  modified_base 1..3: mod_base = OTHER; note = phosphorothioate linkage
  modified_base 45..46: mod_base = OTHER; note = phosphorothioate linkage
  modified_base 64..65: mod_base = OTHER; note = phosphorothioate linkage
  modified_base 97..100: mod_base = OTHER; note = phosphorothioate linkage

SEQ ID NO: 2592 - RNA, 103 nt, synthetic construct; identical to SEQ ID NO: 1700
  source 1..103: mol_type = other RNA
  modified_base 1: mod_base = OTHER; note = 2'-O-methyl ribonucleotide
  modified_base 2: mod_base = OTHER; note = 2'-O-methyl ribonucleotide
  modified_base 3: mod_base = OTHER; note = 2'-O-methyl ribonucleotide
  modified_base 21: mod_base = OTHER; note = 2'-O-methyl ribonucleotide
  modified_base 28: mod_base = OTHER; note = 2'-O-methyl ribonucleotide
  modified_base 29: mod_base = OTHER; note = 2'-O-methyl ribonucleotide
  modified_base 30: mod_base = OTHER; note = 2'-O-methyl ribonucleotide
  modified_base 31: mod_base = OTHER; note = 2'-O-methyl ribonucleotide
  modified_base 32: mod_base = OTHER; note = 2'-O-methyl ribonucleotide
  modified_base 33: mod_base = OTHER; note = 2'-O-methyl ribonucleotide
  modified_base 34: mod_base = OTHER; note = 2'-O-methyl ribonucleotide
  modified_base 35: mod_base = OTHER; note = 2'-O-methyl ribonucleotide
  modified_base 36: mod_base = OTHER; note = 2'-O-methyl ribonucleotide
  modified_base 37: mod_base = OTHER; note = 2'-O-methyl ribonucleotide
  modified_base 38: mod_base = OTHER; note = 2'-O-methyl ribonucleotide
  modified_base 39: mod_base = OTHER; note = 2'-O-methyl ribonucleotide
  modified_base 40: mod_base = OTHER; note = 2'-O-methyl ribonucleotide
  modified_base 41: mod_base = OTHER; note = 2'-O-methyl ribonucleotide
  modified_base 42: mod_base = OTHER; note = 2'-O-methyl ribonucleotide
  modified_base 46: mod_base = OTHER; note = 2'-O-methyl ribonucleotide
  modified_base 48: mod_base = OTHER; note = 2'-O-methyl ribonucleotide
  modified_base 50: mod_base = OTHER; note = 2'-O-methyl ribonucleotide
  modified_base 52: mod_base = OTHER; note = 2'-O-methyl ribonucleotide
  modified_base 53: mod_base = OTHER; note = 2'-O-methyl ribonucleotide
  modified_base 54: mod_base = OTHER; note = 2'-O-methyl ribonucleotide
  modified_base 57: mod_base = OTHER; note = 2'-O-methyl ribonucleotide
  modified_base 61: mod_base = OTHER; note = 2'-O-methyl ribonucleotide
  modified_base 66: mod_base = OTHER; note = 2'-O-methyl ribonucleotide
  modified_base 67: mod_base = OTHER; note = 2'-O-methyl ribonucleotide
  modified_base 70: mod_base = OTHER; note = 2'-O-methyl ribonucleotide
  modified_base 71: mod_base = OTHER; note = 2'-O-methyl ribonucleotide
  modified_base 72: mod_base = OTHER; note = 2'-O-methyl ribonucleotide
  modified_base 73: mod_base = OTHER; note = 2'-O-methyl ribonucleotide
  modified_base 74: mod_base = OTHER; note = 2'-O-methyl ribonucleotide
  modified_base 75: mod_base = OTHER; note = 2'-O-methyl ribonucleotide
  modified_base 76: mod_base = OTHER; note = 2'-O-methyl ribonucleotide
  modified_base 77: mod_base = OTHER; note = 2'-O-methyl ribonucleotide
  modified_base 78: mod_base = OTHER; note = 2'-O-methyl ribonucleotide
  modified_base 79: mod_base = OTHER; note = 2'-O-methyl ribonucleotide
  modified_base 80: mod_base = OTHER; note = 2'-O-methyl ribonucleotide
  modified_base 82: mod_base = OTHER; note = 2'-O-methyl ribonucleotide
  modified_base 83: mod_base = OTHER; note = 2'-O-methyl ribonucleotide
  modified_base 84: mod_base = OTHER; note = 2'-O-methyl ribonucleotide
  modified_base 85: mod_base = OTHER; note = 2'-O-methyl ribonucleotide
  modified_base 86: mod_base = OTHER; note = 2'-O-methyl ribonucleotide
  modified_base 87: mod_base = OTHER; note = 2'-O-methyl ribonucleotide
  modified_base 89: mod_base = OTHER; note = 2'-O-methyl ribonucleotide
  modified_base 91: mod_base = OTHER; note = 2'-O-methyl ribonucleotide
  modified_base 92: mod_base = OTHER; note = 2'-O-methyl ribonucleotide
  modified_base 93: mod_base = OTHER; note = 2'-O-methyl ribonucleotide
  modified_base 94: mod_base = OTHER; note = 2'-O-methyl ribonucleotide
  modified_base 95: mod_base = OTHER; note = 2'-O-methyl ribonucleotide
  modified_base 96: mod_base = OTHER; note = 2'-O-methyl ribonucleotide
  modified_base 97: mod_base = OTHER; note = 2'-O-methyl ribonucleotide
  modified_base 98: mod_base = OTHER; note = 2'-O-methyl ribonucleotide
  modified_base 99: mod_base = OTHER; note = 2'-O-methyl ribonucleotide
  modified_base 100: mod_base = OTHER; note = 2'-O-methyl ribonucleotide
  modified_base 1..3: mod_base = OTHER; note = phosphorothioate linkage
  modified_base 45..46: mod_base = OTHER; note = phosphorothioate linkage
  modified_base 64..65: mod_base = OTHER; note = phosphorothioate linkage
  modified_base 97..100: mod_base = OTHER; note = phosphorothioate linkage

SEQ ID NO: 2593 - RNA, 103 nt, synthetic construct; identical to SEQ ID NO: 1700
  source 1..103: mol_type = other RNA
  modified_base 1: mod_base = OTHER; note = 2'-O-methyl ribonucleotide
  modified_base 2: mod_base = OTHER; note = 2'-O-methyl ribonucleotide
  modified_base 3: mod_base = OTHER; note = 2'-O-methyl ribonucleotide
  modified_base 21: mod_base = OTHER; note = 2'-O-methyl ribonucleotide
  modified_base 28: mod_base = OTHER; note = 2'-O-methyl ribonucleotide
  modified_base 29: mod_base = OTHER; note = 2'-O-methyl ribonucleotide
  modified_base 30: mod_base = OTHER; note = 2'-O-methyl ribonucleotide
  modified_base 31: mod_base = OTHER; note = 2'-O-methyl ribonucleotide
  modified_base 32: mod_base = OTHER; note = 2'-O-methyl ribonucleotide
  modified_base 34: mod_base = OTHER; note = 2'-O-methyl ribonucleotide
  modified_base 35: mod_base = OTHER; note = 2'-O-methyl ribonucleotide
  modified_base 36: mod_base = OTHER; note = 2'-O-methyl ribonucleotide
  modified_base 37: mod_base = OTHER; note = 2'-O-methyl ribonucleotide
  modified_base 38: mod_base = OTHER; note = 2'-O-methyl ribonucleotide
  modified_base 39: mod_base = OTHER; note = 2'-O-methyl ribonucleotide
  modified_base 40: mod_base = OTHER; note = 2'-O-methyl ribonucleotide
  modified_base 41: mod_base = OTHER; note = 2'-O-methyl ribonucleotide
  modified_base 42: mod_base = OTHER; note = 2'-O-methyl ribonucleotide
  modified_base 46: mod_base = OTHER; note = 2'-O-methyl ribonucleotide
  modified_base 48: mod_base = OTHER; note = 2'-O-methyl ribonucleotide
  modified_base 50: mod_base = OTHER; note = 2'-O-methyl ribonucleotide
  modified_base 52: mod_base = OTHER; note = 2'-O-methyl ribonucleotide
  modified_base 53: mod_base = OTHER; note = 2'-O-methyl ribonucleotide
  modified_base 54: mod_base = OTHER; note = 2'-O-methyl ribonucleotide
  modified_base 57: mod_base = OTHER; note = 2'-O-methyl ribonucleotide
  modified_base 61: mod_base = OTHER; note = 2'-O-methyl ribonucleotide
  modified_base 66: mod_base = OTHER; note = 2'-O-methyl ribonucleotide
  modified_base 67: mod_base = OTHER; note = 2'-O-methyl ribonucleotide
  modified_base 70: mod_base = OTHER; note = 2'-O-methyl ribonucleotide
  modified_base 71: mod_base = OTHER; note = 2'-O-methyl ribonucleotide
  modified_base 72: mod_base = OTHER; note = 2'-O-methyl ribonucleotide
  modified_base 73: mod_base = OTHER; note = 2'-O-methyl ribonucleotide
  modified_base 74: mod_base = OTHER; note = 2'-O-methyl ribonucleotide
  modified_base 75: mod_base = OTHER; note = 2'-O-methyl ribonucleotide
  modified_base 76: mod_base = OTHER; note = 2'-O-methyl ribonucleotide
  modified_base 77: mod_base = OTHER; note = 2'-O-methyl ribonucleotide
  modified_base 78: mod_base = OTHER; note = 2'-O-methyl ribonucleotide
  modified_base 79: mod_base = OTHER; note = 2'-O-methyl ribonucleotide
  modified_base 80: mod_base = OTHER; note = 2'-O-methyl ribonucleotide
  modified_base 82: mod_base = OTHER; note = 2'-O-methyl ribonucleotide
  modified_base 83: mod_base = OTHER; note = 2'-O-methyl ribonucleotide
  modified_base 84: mod_base = OTHER; note = 2'-O-methyl ribonucleotide
  modified_base 85: mod_base = OTHER; note = 2'-O-methyl ribonucleotide
  modified_base 86: mod_base = OTHER; note = 2'-O-methyl ribonucleotide
  modified_base 87: mod_base = OTHER; note = 2'-O-methyl ribonucleotide
  modified_base 89: mod_base = OTHER; note = 2'-O-methyl ribonucleotide
  modified_base 92: mod_base = OTHER; note = 2'-O-methyl ribonucleotide
  modified_base 93: mod_base = OTHER; note = 2'-O-methyl ribonucleotide
  modified_base 94: mod_base = OTHER; note = 2'-O-methyl ribonucleotide
  modified_base 95: mod_base = OTHER; note = 2'-O-methyl ribonucleotide
  modified_base 96: mod_base = OTHER; note = 2'-O-methyl ribonucleotide
  modified_base 97: mod_base = OTHER; note = 2'-O-methyl ribonucleotide
  modified_base 98: mod_base = OTHER; note = 2'-O-methyl ribonucleotide
  modified_base 99: mod_base = OTHER; note = 2'-O-methyl ribonucleotide
  modified_base 100: mod_base = OTHER; note = 2'-O-methyl ribonucleotide
  modified_base 1..3: mod_base = OTHER; note = phosphorothioate linkage
  modified_base 45..46: mod_base = OTHER; note = phosphorothioate linkage
  modified_base 64..65: mod_base = OTHER; note = phosphorothioate linkage
  modified_base 97..100: mod_base = OTHER; note = phosphorothioate linkage

SEQ ID NO: 2594 - RNA, 103 nt, synthetic construct; identical to SEQ ID NO: 1700
  source 1..103: mol_type = other RNA
  modified_base 1: mod_base = OTHER; note = 2'-O-methyl ribonucleotide
  modified_base 2: mod_base = OTHER; note = 2'-O-methyl ribonucleotide
  modified_base 3: mod_base = OTHER; note = 2'-O-methyl ribonucleotide
  modified_base 21: mod_base = OTHER; note = 2'-O-methyl ribonucleotide
  modified_base 28: mod_base = OTHER; note = 2'-O-methyl ribonucleotide
  modified_base 29: mod_base = OTHER; note = 2'-O-methyl ribonucleotide
  modified_base 30: mod_base = OTHER; note = 2'-O-methyl ribonucleotide
  modified_base 31: mod_base = OTHER; note = 2'-O-methyl ribonucleotide
  modified_base 32: mod_base = OTHER; note = 2'-O-methyl ribonucleotide
  modified_base 34: mod_base = OTHER; note = 2'-O-methyl ribonucleotide
  modified_base 35: mod_base = OTHER; note = 2'-O-methyl ribonucleotide
  modified_base 36: mod_base = OTHER; note = 2'-O-methyl ribonucleotide
  modified_base 37: mod_base = OTHER; note = 2'-O-methyl ribonucleotide
  modified_base 38: mod_base = OTHER; note = 2'-O-methyl ribonucleotide
  modified_base 39: mod_base = OTHER; note = 2'-O-methyl ribonucleotide
  modified_base 40: mod_base = OTHER; note = 2'-O-methyl ribonucleotide
  modified_base 41: mod_base = OTHER; note = 2'-O-methyl ribonucleotide
  modified_base 42: mod_base = OTHER; note = 2'-O-methyl ribonucleotide
  modified_base 46: mod_base = OTHER; note = 2'-O-methyl ribonucleotide
  modified_base 48: mod_base = OTHER; note = 2'-O-methyl ribonucleotide
  modified_base 50: mod_base = OTHER; note = 2'-O-methyl ribonucleotide
  modified_base 52: mod_base = OTHER; note = 2'-O-methyl ribonucleotide
  modified_base 53: mod_base = OTHER; note = 2'-O-methyl ribonucleotide
  modified_base 54: mod_base = OTHER; note = 2'-O-methyl ribonucleotide
  modified_base 57: mod_base = OTHER; note = 2'-O-methyl ribonucleotide
  modified_base 61: mod_base = OTHER; note = 2'-O-methyl ribonucleotide
  modified_base 66: mod_base = OTHER; note = 2'-O-methyl ribonucleotide
  modified_base 67: mod_base = OTHER; note = 2'-O-methyl ribonucleotide
  modified_base 70: mod_base = OTHER; note = 2'-O-methyl ribonucleotide
  modified_base 71: mod_base = OTHER; note = 2'-O-methyl ribonucleotide
  modified_base 72: mod_base = OTHER; note = 2'-O-methyl ribonucleotide
  modified_base 73: mod_base = OTHER; note = 2'-O-methyl ribonucleotide
  modified_base 74: mod_base = OTHER; note = 2'-O-methyl ribonucleotide
  modified_base 75: mod_base = OTHER; note = 2'-O-methyl ribonucleotide
  modified_base 76: mod_base = OTHER; note = 2'-O-methyl ribonucleotide
  modified_base 77: mod_base = OTHER; note = 2'-O-methyl ribonucleotide
  modified_base 78: mod_base = OTHER; note = 2'-O-methyl ribonucleotide
  modified_base 79: mod_base = OTHER; note = 2'-O-methyl ribonucleotide
  modified_base 80: mod_base = OTHER; note = 2'-O-methyl ribonucleotide
  modified_base 82: mod_base = OTHER; note = 2'-O-methyl ribonucleotide
  modified_base 83: mod_base = OTHER; note = 2'-O-methyl ribonucleotide
  modified_base 84: mod_base = OTHER; note = 2'-O-methyl ribonucleotide
  modified_base 85: mod_base = OTHER; note = 2'-O-methyl ribonucleotide
  modified_base 86: mod_base = OTHER; note = 2'-O-methyl ribonucleotide
  modified_base 87: mod_base = OTHER; note = 2'-O-methyl ribonucleotide
  modified_base 89: mod_base = OTHER; note = 2'-O-methyl ribonucleotide
  modified_base 91: mod_base = OTHER; note = 2'-O-methyl ribonucleotide
  modified_base 92: mod_base = OTHER; note = 2'-O-methyl ribonucleotide
  modified_base 93: mod_base = OTHER; note = 2'-O-methyl ribonucleotide
  modified_base 94: mod_base = OTHER; note = 2'-O-methyl ribonucleotide
  modified_base 95: mod_base = OTHER; note = 2'-O-methyl ribonucleotide
  modified_base 96: mod_base = OTHER; note = 2'-O-methyl ribonucleotide
  modified_base 97: mod_base = OTHER; note = 2'-O-methyl ribonucleotide
  modified_base 98: mod_base = OTHER; note = 2'-O-methyl ribonucleotide
  modified_base 99: mod_base = OTHER; note = 2'-O-methyl ribonucleotide
  modified_base 100: mod_base = OTHER; note = 2'-O-methyl ribonucleotide
  modified_base 1..3: mod_base = OTHER; note = phosphorothioate linkage
  modified_base 45..46: mod_base = OTHER; note = phosphorothioate linkage
  modified_base 64..65: mod_base = OTHER; note = phosphorothioate linkage
  modified_base 97..100: mod_base = OTHER; note = phosphorothioate linkage

SEQ ID NO: 2595 - RNA, 103 nt, synthetic construct; identical to SEQ ID NO: 1700
  source 1..103: mol_type = other RNA
  modified_base 1: mod_base = OTHER; note = 2'-O-methyl ribonucleotide
  modified_base 2: mod_base = OTHER; note = 2'-O-methyl ribonucleotide
  modified_base 3: mod_base = OTHER; note = 2'-O-methyl ribonucleotide
  modified_base 21: mod_base = OTHER; note = 2'-O-methyl ribonucleotide
  modified_base 28: mod_base = OTHER; note = 2'-O-methyl ribonucleotide
  modified_base 29: mod_base = OTHER; note = 2'-O-methyl ribonucleotide
  modified_base 30: mod_base = OTHER; note = 2'-O-methyl ribonucleotide
  modified_base 31: mod_base = OTHER; note = 2'-O-methyl ribonucleotide
  modified_base 32: mod_base = OTHER; note = 2'-O-methyl ribonucleotide
  modified_base 34: mod_base = OTHER; note = 2'-O-methyl ribonucleotide
  modified_base 35: mod_base = OTHER; note = 2'-O-methyl ribonucleotide
  modified_base 36: mod_base = OTHER; note = 2'-O-methyl ribonucleotide
  modified_base 37: mod_base = OTHER; note = 2'-O-methyl ribonucleotide
  modified_base 38: mod_base = OTHER; note = 2'-O-methyl ribonucleotide
  modified_base 39: mod_base = OTHER; note = 2'-O-methyl ribonucleotide
  modified_base 40: mod_base = OTHER; note = 2'-O-methyl ribonucleotide
  modified_base 41: mod_base = OTHER; note = 2'-O-methyl ribonucleotide
  modified_base 42: mod_base = OTHER; note = 2'-O-methyl ribonucleotide
  modified_base 46: mod_base = OTHER; note = 2'-O-methyl ribonucleotide
  modified_base 48: mod_base = OTHER; note = 2'-O-methyl ribonucleotide
  modified_base 50: mod_base = OTHER; note = 2'-O-methyl ribonucleotide
  modified_base 52: mod_base = OTHER; note = 2'-O-methyl ribonucleotide
  modified_base 53: mod_base = OTHER; note = 2'-O-methyl ribonucleotide
  modified_base 54: mod_base = OTHER; note = 2'-O-methyl ribonucleotide
  modified_base 55: mod_base = OTHER; note = 2'-O-methyl ribonucleotide
  modified_base 56: mod_base = OTHER; note = 2'-O-methyl ribonucleotide
  modified_base 57: mod_base = OTHER; note = 2'-O-methyl ribonucleotide
  modified_base 60: mod_base = OTHER; note = 2'-O-methyl ribonucleotide
  modified_base 61: mod_base = OTHER; note = 2'-O-methyl ribonucleotide
  modified_base 66: mod_base = OTHER; note = 2'-O-methyl ribonucleotide
  modified_base 67: mod_base = OTHER; note = 2'-O-methyl ribonucleotide
  modified_base 70: mod_base = OTHER; note = 2'-O-methyl ribonucleotide
  modified_base 71: mod_base = OTHER; note = 2'-O-methyl ribonucleotide
  modified_base 72: mod_base = OTHER; note = 2'-O-methyl ribonucleotide
  modified_base 74: mod_base = OTHER; note = 2'-O-methyl ribonucleotide
  modified_base 75: mod_base = OTHER; note = 2'-O-methyl ribonucleotide
  modified_base 76: mod_base = OTHER; note = 2'-O-methyl ribonucleotide
  modified_base 77: mod_base = OTHER; note = 2'-O-methyl ribonucleotide
  modified_base 78: mod_base = OTHER; note = 2'-O-methyl ribonucleotide
  modified_base 79: mod_base = OTHER; note = 2'-O-methyl ribonucleotide
  modified_base 80: mod_base = OTHER; note = 2'-O-methyl ribonucleotide
  modified_base 82: mod_base = OTHER; note = 2'-O-methyl ribonucleotide
  modified_base 83: mod_base = OTHER; note = 2'-O-methyl ribonucleotide
  modified_base 84: mod_base = OTHER; note = 2'-O-methyl ribonucleotide
  modified_base 85: mod_base = OTHER; note = 2'-O-methyl ribonucleotide
  modified_base 86: mod_base = OTHER; note = 2'-O-methyl ribonucleotide
  modified_base 87: mod_base = OTHER; note = 2'-O-methyl ribonucleotide
  modified_base 89: mod_base = OTHER; note = 2'-O-methyl ribonucleotide
  modified_base 92: mod_base = OTHER; note = 2'-O-methyl ribonucleotide
  modified_base 93: mod_base = OTHER; note = 2'-O-methyl ribonucleotide
  modified_base 94: mod_base = OTHER; note = 2'-O-methyl ribonucleotide
  modified_base 95: mod_base = OTHER; note = 2'-O-methyl ribonucleotide
  modified_base 96: mod_base = OTHER; note = 2'-O-methyl ribonucleotide
  modified_base 97: mod_base = OTHER; note = 2'-O-methyl ribonucleotide
  modified_base 98: mod_base = OTHER; note = 2'-O-methyl ribonucleotide
  modified_base 99: mod_base = OTHER; note = 2'-O-methyl ribonucleotide
  modified_base 100: mod_base = OTHER; note = 2'-O-methyl ribonucleotide
  modified_base 1..3: mod_base = OTHER; note = phosphorothioate linkage
  modified_base 45..46: mod_base = OTHER; note = phosphorothioate linkage
  modified_base 64..65: mod_base = OTHER; note = phosphorothioate linkage
  modified_base 97..100: mod_base = OTHER; note = phosphorothioate linkage

SEQ ID NO: 2596 - RNA, 103 nt, synthetic construct; identical to SEQ ID NO: 1643
  source 1..103: mol_type = other RNA
  modified_base 1: mod_base = OTHER; note = 2'-O-methyl ribonucleotide
  modified_base 2: mod_base = OTHER; note = 2'-O-methyl ribonucleotide
  modified_base 3: mod_base = OTHER; note = 2'-O-methyl ribonucleotide
  modified_base 21: mod_base = OTHER; note = 2'-O-methyl ribonucleotide
  modified_base 28: mod_base = OTHER; note = 2'-O-methyl ribonucleotide
  modified_base 29: mod_base = OTHER; note = 2'-O-methyl ribonucleotide
  modified_base 30: mod_base = OTHER; note = 2'-O-methyl ribonucleotide
  modified_base 31: mod_base = OTHER; note = 2'-O-methyl ribonucleotide
  modified_base 32: mod_base = OTHER; note = 2'-O-methyl ribonucleotide
  modified_base 33: mod_base = OTHER; note = 2'-O-methyl ribonucleotide
  modified_base 34: mod_base = OTHER; note = 2'-O-methyl ribonucleotide
  modified_base 35: mod_base = OTHER; note = 2'-O-methyl ribonucleotide
  modified_base 36: mod_base = OTHER; note = 2'-O-methyl ribonucleotide
  modified_base 37: mod_base = OTHER; note = 2'-O-methyl ribonucleotide
  modified_base 38: mod_base = OTHER; note = 2'-O-methyl ribonucleotide
  modified_base 39: mod_base = OTHER; note = 2'-O-methyl ribonucleotide
  modified_base 40: mod_base = OTHER; note = 2'-O-methyl ribonucleotide
  modified_base 41: mod_base = OTHER; note = 2'-O-methyl ribonucleotide
  modified_base 42: mod_base = OTHER; note = 2'-O-methyl ribonucleotide
  modified_base 46: mod_base = OTHER; note = 2'-O-methyl ribonucleotide
  modified_base 48: mod_base = OTHER; note = 2'-O-methyl ribonucleotide
  modified_base 50: mod_base = OTHER; note = 2'-O-methyl ribonucleotide
  modified_base 52: mod_base = OTHER; note = 2'-O-methyl ribonucleotide
  modified_base 53: mod_base = OTHER; note = 2'-O-methyl ribonucleotide
  modified_base 54: mod_base = OTHER; note = 2'-O-methyl ribonucleotide
  modified_base 55: mod_base = OTHER; note = 2'-O-methyl ribonucleotide
  modified_base 56: mod_base = OTHER; note = 2'-O-methyl ribonucleotide
  modified_base 57: mod_base = OTHER; note = 2'-O-methyl ribonucleotide
  modified_base 60: mod_base = OTHER; note = 2'-O-methyl ribonucleotide
  modified_base 61: mod_base = OTHER; note = 2'-O-methyl ribonucleotide
  modified_base 66: mod_base = OTHER; note = 2'-O-methyl ribonucleotide
  modified_base 67: mod_base = OTHER; note = 2'-O-methyl ribonucleotide
  modified_base 70: mod_base = OTHER; note = 2'-O-methyl ribonucleotide
  modified_base 71: mod_base = OTHER; note = 2'-O-methyl ribonucleotide
  modified_base 72: mod_base = OTHER; note = 2'-O-methyl ribonucleotide
  modified_base 73: mod_base = OTHER; note = 2'-O-methyl ribonucleotide
  modified_base 74: mod_base = OTHER; note = 2'-O-methyl ribonucleotide
  modified_base 75: mod_base = OTHER; note = 2'-O-methyl ribonucleotide
  modified_base 76: mod_base = OTHER; note = 2'-O-methyl ribonucleotide
  modified_base 77: mod_base = OTHER; note = 2'-O-methyl ribonucleotide
  modified_base 78: mod_base = OTHER; note = 2'-O-methyl ribonucleotide
  modified_base 79: mod_base = OTHER; note = 2'-O-methyl ribonucleotide
  modified_base 80: mod_base = OTHER; note = 2'-O-methyl ribonucleotide
  modified_base 81: mod_base = OTHER; note = 2'-O-methyl ribonucleotide
  modified_base 83: mod_base = OTHER; note = 2'-O-methyl ribonucleotide
  modified_base 84: mod_base = OTHER; note = 2'-O-methyl ribonucleotide
  modified_base 85: mod_base = OTHER; note = 2'-O-methyl ribonucleotide
  modified_base 86: mod_base = OTHER; note = 2'-O-methyl ribonucleotide
  modified_base 87: mod_base = OTHER; note = 2'-O-methyl ribonucleotide
  modified_base 88: mod_base = OTHER; note = 2'-O-methyl ribonucleotide
  modified_base 89: mod_base = OTHER; note = 2'-O-methyl ribonucleotide
  modified_base 90: mod_base = OTHER; note = 2'-O-methyl ribonucleotide
  modified_base 91: mod_base = OTHER; note = 2'-O-methyl ribonucleotide
  modified_base 92: mod_base = OTHER; note = 2'-O-methyl ribonucleotide
  modified_base 93: mod_base = OTHER; note = 2'-O-methyl ribonucleotide
  modified_base 94: mod_base = OTHER; note = 2'-O-methyl ribonucleotide
  modified_base 95: mod_base = OTHER; note = 2'-O-methyl ribonucleotide
  modified_base 96: mod_base = OTHER; note = 2'-O-methyl ribonucleotide
  modified_base 97: mod_base = OTHER; note = 2'-O-methyl ribonucleotide
  modified_base 98: mod_base = OTHER; note = 2'-O-methyl ribonucleotide
  modified_base 99: mod_base = OTHER; note = 2'-O-methyl ribonucleotide
  modified_base 100: mod_base = OTHER; note = 2'-O-methyl ribonucleotide
  modified_base 1..3: mod_base = OTHER; note = phosphorothioate linkage
  modified_base 25..26: mod_base = OTHER; note = phosphorothioate linkage
  modified_base 45..46: mod_base = OTHER; note = phosphorothioate linkage
  modified_base 97..100: mod_base = OTHER; note = phosphorothioate linkage

SEQ ID NO: 2597 - RNA, 103 nt, synthetic construct; identical to SEQ ID NO: 1643
  source 1..103: mol_type = other RNA
  modified_base 1: mod_base = OTHER; note = 2'-O-methyl ribonucleotide
  modified_base 2: mod_base = OTHER; note = 2'-O-methyl ribonucleotide
  modified_base 3: mod_base = OTHER; note = 2'-O-methyl ribonucleotide
  modified_base 21: mod_base = OTHER; note = 2'-O-methyl ribonucleotide
  modified_base 28: mod_base = OTHER; note = 2'-O-methyl ribonucleotide
  modified_base 29: mod_base = OTHER; note = 2'-O-methyl ribonucleotide
  modified_base 30: mod_base = OTHER; note = 2'-O-methyl ribonucleotide
  modified_base 31: mod_base = OTHER; note = 2'-O-methyl ribonucleotide
  modified_base 32: mod_base = OTHER; note = 2'-O-methyl ribonucleotide
  modified_base 34: mod_base = OTHER; note = 2'-O-methyl ribonucleotide
  modified_base 35: mod_base = OTHER; note = 2'-O-methyl ribonucleotide
  modified_base 36: mod_base = OTHER; note = 2'-O-methyl ribonucleotide
  modified_base 37: mod_base = OTHER; note = 2'-O-methyl ribonucleotide
  modified_base 38: mod_base = OTHER; note = 2'-O-methyl ribonucleotide
  modified_base 39: mod_base = OTHER; note = 2'-O-methyl ribonucleotide
  modified_base 40: mod_base = OTHER; note = 2'-O-methyl ribonucleotide
  modified_base 41: mod_base = OTHER; note = 2'-O-methyl ribonucleotide
  modified_base 42: mod_base = OTHER; note = 2'-O-methyl ribonucleotide
  modified_base 46: mod_base = OTHER; note = 2'-O-methyl ribonucleotide
  modified_base 48: mod_base = OTHER; note = 2'-O-methyl ribonucleotide
  modified_base 50: mod_base = OTHER; note = 2'-O-methyl ribonucleotide
  modified_base 52: mod_base = OTHER; note = 2'-O-methyl ribonucleotide
  modified_base 53: mod_base = OTHER; note = 2'-O-methyl ribonucleotide
  modified_base 54: mod_base = OTHER; note = 2'-O-methyl ribonucleotide
  modified_base 55: mod_base = OTHER; note = 2'-O-methyl ribonucleotide
  modified_base 56: mod_base = OTHER; note = 2'-O-methyl ribonucleotide
  modified_base 57: mod_base = OTHER; note = 2'-O-methyl ribonucleotide
  modified_base 60: mod_base = OTHER; note = 2'-O-methyl ribonucleotide
  modified_base 61: mod_base = OTHER; note = 2'-O-methyl ribonucleotide
  modified_base 66: mod_base = OTHER; note = 2'-O-methyl ribonucleotide
  modified_base 67: mod_base = OTHER; note = 2'-O-methyl ribonucleotide
  modified_base 70: mod_base = OTHER; note = 2'-O-methyl ribonucleotide
  modified_base 71: mod_base = OTHER; note = 2'-O-methyl ribonucleotide
  modified_base 72: mod_base = OTHER; note = 2'-O-methyl ribonucleotide
  modified_base 74: mod_base = OTHER; note = 2'-O-methyl ribonucleotide
  modified_base 75: mod_base = OTHER; note = 2'-O-methyl ribonucleotide
  modified_base 76: mod_base = OTHER; note = 2'-O-methyl ribonucleotide
  modified_base 77: mod_base = OTHER; note = 2'-O-methyl ribonucleotide
  modified_base 78: mod_base = OTHER; note = 2'-O-methyl ribonucleotide
  modified_base 79: mod_base = OTHER; note = 2'-O-methyl ribonucleotide
  modified_base 80: mod_base = OTHER; note = 2'-O-methyl ribonucleotide
  modified_base 81: mod_base = OTHER; note = 2'-O-methyl ribonucleotide
  modified_base 83: mod_base = OTHER; note = 2'-O-methyl ribonucleotide
  modified_base 84: mod_base = OTHER; note = 2'-O-methyl ribonucleotide
  modified_base 85: mod_base = OTHER; note = 2'-O-methyl ribonucleotide
  modified_base 86: mod_base = OTHER; note = 2'-O-methyl ribonucleotide
  modified_base 87: mod_base = OTHER; note = 2'-O-methyl ribonucleotide
  modified_base 88: mod_base = OTHER; note = 2'-O-methyl ribonucleotide
  modified_base 89: mod_base = OTHER; note = 2'-O-methyl ribonucleotide
  modified_base 90: mod_base = OTHER; note = 2'-O-methyl ribonucleotide
  modified_base 91: mod_base = OTHER; note = 2'-O-methyl ribonucleotide
  modified_base 92: mod_base = OTHER; note = 2'-O-methyl ribonucleotide
  modified_base 93: mod_base = OTHER; note = 2'-O-methyl ribonucleotide
  modified_base 94: mod_base = OTHER; note = 2'-O-methyl ribonucleotide
  modified_base 95: mod_base = OTHER; note = 2'-O-methyl ribonucleotide
  modified_base 96: mod_base = OTHER; note = 2'-O-methyl ribonucleotide
  modified_base 97: mod_base = OTHER; note = 2'-O-methyl ribonucleotide
  modified_base 98: mod_base = OTHER; note = 2'-O-methyl ribonucleotide
  modified_base 99: mod_base = OTHER; note = 2'-O-methyl ribonucleotide
  modified_base 100: mod_base = OTHER; note = 2'-O-methyl ribonucleotide
  modified_base 1..3: mod_base = OTHER; note = phosphorothioate linkage
  modified_base 25..26: mod_base = OTHER; note = phosphorothioate linkage
  modified_base 45..46: mod_base = OTHER; note = phosphorothioate linkage
  modified_base 97..100: mod_base = OTHER; note = phosphorothioate linkage

SEQ ID NO: 2598 - RNA, 103 nt, synthetic construct; identical to SEQ ID NO: 1699
  source 1..103: mol_type = other RNA
  modified_base 1: mod_base = OTHER; note = 2'-O-methyl ribonucleotide
  modified_base 2: mod_base = OTHER; note = 2'-O-methyl ribonucleotide
  modified_base 3: mod_base = OTHER; note = 2'-O-methyl ribonucleotide
  modified_base 21: mod_base = OTHER; note = 2'-O-methyl ribonucleotide
  modified_base 28: mod_base = OTHER; note = 2'-O-methyl ribonucleotide
  modified_base 29: mod_base = OTHER; note = 2'-O-methyl ribonucleotide
  modified_base 30: mod_base = OTHER; note = 2'-O-methyl ribonucleotide
  modified_base 31: mod_base = OTHER; note = 2'-O-methyl ribonucleotide
  modified_base 32: mod_base = OTHER; note = 2'-O-methyl ribonucleotide
  modified_base 33: mod_base = OTHER; note = 2'-O-methyl ribonucleotide
  modified_base 34: mod_base = OTHER; note = 2'-O-methyl ribonucleotide
  modified_base 35: mod_base = OTHER; note = 2'-O-methyl ribonucleotide
  modified_base 36: mod_base = OTHER; note = 2'-O-methyl ribonucleotide
  modified_base 37: mod_base = OTHER; note = 2'-O-methyl ribonucleotide
  modified_base 38: mod_base = OTHER; note = 2'-O-methyl ribonucleotide
  modified_base 39: mod_base = OTHER; note = 2'-O-methyl ribonucleotide
  modified_base 40: mod_base = OTHER; note = 2'-O-methyl ribonucleotide
  modified_base 41: mod_base = OTHER; note = 2'-O-methyl ribonucleotide
  modified_base 42: mod_base = OTHER; note = 2'-O-methyl ribonucleotide
  modified_base 46: mod_base = OTHER; note = 2'-O-methyl ribonucleotide
  modified_base 48: mod_base = OTHER; note = 2'-O-methyl ribonucleotide
  modified_base 50: mod_base = OTHER; note = 2'-O-methyl ribonucleotide
  modified_base 52: mod_base = OTHER; note = 2'-O-methyl ribonucleotide
  modified_base 53: mod_base = OTHER; note = 2'-O-methyl ribonucleotide
  modified_base 54: mod_base = OTHER; note = 2'-O-methyl ribonucleotide
  modified_base 55: mod_base = OTHER; note = 2'-O-methyl ribonucleotide
  modified_base 56: mod_base = OTHER; note = 2'-O-methyl ribonucleotide
  modified_base 57: mod_base = OTHER; note = 2'-O-methyl ribonucleotide
  modified_base 60: mod_base = OTHER; note = 2'-O-methyl ribonucleotide
  modified_base 61: mod_base = OTHER; note = 2'-O-methyl ribonucleotide
  modified_base 66: mod_base = OTHER; note = 2'-O-methyl ribonucleotide
  modified_base 67: mod_base = OTHER; note = 2'-O-methyl ribonucleotide
  modified_base 70: mod_base = OTHER; note = 2'-O-methyl ribonucleotide
  modified_base 71: mod_base = OTHER; note = 2'-O-methyl ribonucleotide
  modified_base 72: mod_base = OTHER; note = 2'-O-methyl ribonucleotide
  modified_base 73: mod_base = OTHER; note = 2'-O-methyl ribonucleotide
  modified_base 74: mod_base = OTHER; note = 2'-O-methyl ribonucleotide
  modified_base 75: mod_base = OTHER; note = 2'-O-methyl ribonucleotide
  modified_base 76: mod_base = OTHER; note = 2'-O-methyl ribonucleotide
  modified_base 77: mod_base = OTHER; note = 2'-O-methyl ribonucleotide
  modified_base 78: mod_base = OTHER; note = 2'-O-methyl ribonucleotide
  modified_base 79: mod_base = OTHER; note = 2'-O-methyl ribonucleotide
  modified_base 80: mod_base = OTHER; note = 2'-O-methyl ribonucleotide
  modified_base 81: mod_base = OTHER; note = 2'-O-methyl ribonucleotide
  modified_base 83: mod_base = OTHER; note = 2'-O-methyl ribonucleotide
  modified_base 84: mod_base = OTHER; note = 2'-O-methyl ribonucleotide
  modified_base 85: mod_base = OTHER; note = 2'-O-methyl ribonucleotide
  modified_base 86: mod_base = OTHER; note = 2'-O-methyl ribonucleotide
  modified_base 87: mod_base = OTHER; note = 2'-O-methyl ribonucleotide
  modified_base 88: mod_base = OTHER; note = 2'-O-methyl ribonucleotide
  modified_base 89: mod_base = OTHER; note = 2'-O-methyl ribonucleotide
  modified_base 90: mod_base = OTHER; note = 2'-O-methyl ribonucleotide
  modified_base 91: mod_base = OTHER; note = 2'-O-methyl ribonucleotide
  modified_base 92: mod_base = OTHER; note = 2'-O-methyl ribonucleotide
  modified_base 93: mod_base = OTHER; note = 2'-O-methyl ribonucleotide
  modified_base 94: mod_base = OTHER; note = 2'-O-methyl ribonucleotide
  modified_base 95: mod_base = OTHER; note = 2'-O-methyl ribonucleotide
  modified_base 96: mod_base = OTHER; note = 2'-O-methyl ribonucleotide
  modified_base 97: mod_base = OTHER; note = 2'-O-methyl ribonucleotide
  modified_base 98: mod_base = OTHER; note = 2'-O-methyl ribonucleotide
  modified_base 99: mod_base = OTHER; note = 2'-O-methyl ribonucleotide
  modified_base 100: mod_base = OTHER; note = 2'-O-methyl ribonucleotide
  modified_base 1..3: mod_base = OTHER; note = phosphorothioate linkage
  modified_base 25..26: mod_base = OTHER; note = phosphorothioate linkage
  modified_base 45..46: mod_base = OTHER; note = phosphorothioate linkage
  modified_base 97..100: mod_base = OTHER; note = phosphorothioate linkage

SEQ ID NO: 2599 - RNA, 103 nt, synthetic construct; identical to SEQ ID NO: 1699
  source 1..103: mol_type = other RNA
  modified_base 1: mod_base = OTHER; note = 2'-O-methyl ribonucleotide
  modified_base 2: mod_base = OTHER; note = 2'-O-methyl ribonucleotide
  modified_base 3: mod_base = OTHER; note = 2'-O-methyl ribonucleotide
  modified_base 21: mod_base = OTHER; note = 2'-O-methyl ribonucleotide
  modified_base 28: mod_base = OTHER; note = 2'-O-methyl ribonucleotide
  modified_base 29: mod_base = OTHER; note = 2'-O-methyl ribonucleotide
  modified_base 30: mod_base = OTHER; note = 2'-O-methyl ribonucleotide
  modified_base 31: mod_base = OTHER; note = 2'-O-methyl ribonucleotide
  modified_base 32: mod_base = OTHER; note = 2'-O-methyl ribonucleotide
  modified_base 34: mod_base = OTHER; note = 2'-O-methyl ribonucleotide
  modified_base 35: mod_base = OTHER; note = 2'-O-methyl ribonucleotide
  modified_base 36: mod_base = OTHER; note = 2'-O-methyl ribonucleotide
  modified_base 37: mod_base = OTHER; note = 2'-O-methyl ribonucleotide
  modified_base 38: mod_base = OTHER; note = 2'-O-methyl ribonucleotide
  modified_base 39: mod_base = OTHER; note = 2'-O-methyl ribonucleotide
  modified_base 40: mod_base = OTHER; note = 2'-O-methyl ribonucleotide
  modified_base 41: mod_base = OTHER; note = 2'-O-methyl ribonucleotide
  modified_base 42: mod_base = OTHER; note = 2'-O-methyl ribonucleotide
  modified_base 46: mod_base = OTHER; note = 2'-O-methyl ribonucleotide
  modified_base 48: mod_base = OTHER; note = 2'-O-methyl ribonucleotide
  modified_base 50: mod_base = OTHER; note = 2'-O-methyl ribonucleotide
  modified_base 52: mod_base = OTHER; note = 2'-O-methyl ribonucleotide
  modified_base 53: mod_base = OTHER; note = 2'-O-methyl ribonucleotide
  modified_base 54: mod_base = OTHER; note = 2'-O-methyl ribonucleotide
  modified_base 55: mod_base = OTHER; note = 2'-O-methyl ribonucleotide
  modified_base 56: mod_base = OTHER; note = 2'-O-methyl ribonucleotide
  modified_base 57: mod_base = OTHER; note = 2'-O-methyl ribonucleotide
  modified_base 60: mod_base = OTHER; note = 2'-O-methyl ribonucleotide
  modified_base 61: mod_base = OTHER; note = 2'-O-methyl ribonucleotide
  modified_base 66: mod_base = OTHER; note = 2'-O-methyl ribonucleotide
  modified_base 67: mod_base = OTHER; note = 2'-O-methyl ribonucleotide
  modified_base 70: mod_base = OTHER; note = 2'-O-methyl ribonucleotide
  modified_base 71: mod_base = OTHER; note = 2'-O-methyl ribonucleotide
  modified_base 72: mod_base = OTHER; note = 2'-O-methyl ribonucleotide
  modified_base 74: mod_base = OTHER; note = 2'-O-methyl ribonucleotide
  modified_base 75: mod_base = OTHER; note = 2'-O-methyl ribonucleotide
  modified_base 76: mod_base = OTHER; note = 2'-O-methyl ribonucleotide
  modified_base 77: mod_base = OTHER; note = 2'-O-methyl ribonucleotide
  modified_base 78: mod_base = OTHER; note = 2'-O-methyl ribonucleotide
  modified_base 79: mod_base = OTHER; note = 2'-O-methyl ribonucleotide
  modified_base 80: mod_base = OTHER; note = 2'-O-methyl ribonucleotide
  modified_base 81: mod_base = OTHER; note = 2'-O-methyl ribonucleotide
  modified_base 83: mod_base = OTHER; note = 2'-O-methyl ribonucleotide
  modified_base 84: mod_base = OTHER; note = 2'-O-methyl ribonucleotide
  modified_base 85: mod_base = OTHER; note = 2'-O-methyl ribonucleotide
  modified_base 86: mod_base = OTHER; note = 2'-O-methyl ribonucleotide
  modified_base 87: mod_base = OTHER; note = 2'-O-methyl ribonucleotide
  modified_base 88: mod_base = OTHER; note = 2'-O-methyl ribonucleotide
  modified_base 89: mod_base = OTHER; note = 2'-O-methyl ribonucleotide
  modified_base 90: mod_base = OTHER; note = 2'-O-methyl ribonucleotide
  modified_base 91: mod_base = OTHER; note = 2'-O-methyl ribonucleotide
  modified_base 92: mod_base = OTHER; note = 2'-O-methyl ribonucleotide
  modified_base 93: mod_base = OTHER; note = 2'-O-methyl ribonucleotide
  modified_base 94: mod_base = OTHER; note = 2'-O-methyl ribonucleotide
  modified_base 95: mod_base = OTHER; note = 2'-O-methyl ribonucleotide
  modified_base 96: mod_base = OTHER; note = 2'-O-methyl ribonucleotide
  modified_base 97: mod_base = OTHER; note = 2'-O-methyl ribonucleotide
  modified_base 98: mod_base = OTHER; note = 2'-O-methyl ribonucleotide
  modified_base 99: mod_base = OTHER; note = 2'-O-methyl ribonucleotide
  modified_base 100: mod_base = OTHER; note = 2'-O-methyl ribonucleotide
  modified_base 1..3: mod_base = OTHER; note = phosphorothioate linkage
  modified_base 25..26: mod_base = OTHER; note = phosphorothioate linkage
  modified_base 45..46: mod_base = OTHER; note = phosphorothioate linkage
  modified_base 97..100: mod_base = OTHER; note = phosphorothioate linkage

SEQ ID NO: 2600 - RNA, 103 nt, synthetic construct; identical to SEQ ID NO: 1700
  source 1..103: mol_type = other RNA
  modified_base 1: mod_base = OTHER; note = 2'-O-methyl ribonucleotide
  modified_base 2: mod_base = OTHER; note = 2'-O-methyl ribonucleotide
  modified_base 3: mod_base = OTHER; note = 2'-O-methyl ribonucleotide
  modified_base 21: mod_base = OTHER; note = 2'-O-methyl ribonucleotide
  modified_base 28: mod_base = OTHER; note = 2'-O-methyl ribonucleotide
  modified_base 29: mod_base = OTHER; note = 2'-O-methyl ribonucleotide
  modified_base 30: mod_base = OTHER; note = 2'-O-methyl ribonucleotide
  modified_base 31: mod_base = OTHER; note = 2'-O-methyl ribonucleotide
  modified_base 32: mod_base = OTHER; note = 2'-O-methyl ribonucleotide
  modified_base 33: mod_base = OTHER; note = 2'-O-methyl ribonucleotide
  modified_base 34: mod_base = OTHER; note = 2'-O-methyl ribonucleotide
  modified_base 35: mod_base = OTHER; note = 2'-O-methyl ribonucleotide
  modified_base 36: mod_base = OTHER; note = 2'-O-methyl ribonucleotide
  modified_base 37: mod_base = OTHER; note = 2'-O-methyl ribonucleotide
  modified_base 38: mod_base = OTHER; note = 2'-O-methyl ribonucleotide
  modified_base 39: mod_base = OTHER; note = 2'-O-methyl ribonucleotide
  modified_base 40: mod_base = OTHER; note = 2'-O-methyl ribonucleotide
  modified_base 41: mod_base = OTHER; note = 2'-O-methyl ribonucleotide
  modified_base 42: mod_base = OTHER; note = 2'-O-methyl ribonucleotide
  modified_base 46: mod_base = OTHER; note = 2'-O-methyl ribonucleotide
  modified_base 48: mod_base = OTHER; note = 2'-O-methyl ribonucleotide
  modified_base 50: mod_base = OTHER; note = 2'-O-methyl ribonucleotide
  modified_base 52: mod_base = OTHER; note = 2'-O-methyl ribonucleotide
  modified_base 53: mod_base = OTHER; note = 2'-O-methyl ribonucleotide
  modified_base 54: mod_base = OTHER; note = 2'-O-methyl ribonucleotide
  modified_base 57: mod_base = OTHER; note = 2'-O-methyl ribonucleotide
  modified_base 61: mod_base = OTHER; note = 2'-O-methyl ribonucleotide
  modified_base 66: mod_base = OTHER; note = 2'-O-methyl ribonucleotide
  modified_base 67: mod_base = OTHER; note = 2'-O-methyl ribonucleotide
  modified_base 70: mod_base = OTHER; note = 2'-O-methyl ribonucleotide
  modified_base 71: mod_base = OTHER; note = 2'-O-methyl ribonucleotide
  modified_base 72: mod_base = OTHER; note = 2'-O-methyl ribonucleotide
  modified_base 74: mod_base = OTHER; note = 2'-O-methyl ribonucleotide
  modified_base 75: mod_base = OTHER; note = 2'-O-methyl ribonucleotide
  modified_base 76: mod_base = OTHER; note = 2'-O-methyl ribonucleotide
  modified_base 77: mod_base = OTHER; note = 2'-O-methyl ribonucleotide
  modified_base 78: mod_base = OTHER; note = 2'-O-methyl ribonucleotide
  modified_base 79: mod_base = OTHER; note = 2'-O-methyl ribonucleotide
  modified_base 80: mod_base = OTHER; note = 2'-O-methyl ribonucleotide
  modified_base 82: mod_base = OTHER; note = 2'-O-methyl ribonucleotide
  modified_base 83: mod_base = OTHER; note = 2'-O-methyl ribonucleotide
  modified_base 84: mod_base = OTHER; note = 2'-O-methyl ribonucleotide
  modified_base 85: mod_base = OTHER; note = 2'-O-methyl ribonucleotide
  modified_base 86: mod_base = OTHER; note = 2'-O-methyl ribonucleotide
  modified_base 87: mod_base = OTHER; note = 2'-O-methyl ribonucleotide
  modified_base 89: mod_base = OTHER; note = 2'-O-methyl ribonucleotide
  modified_base 92: mod_base = OTHER; note = 2'-O-methyl ribonucleotide
  modified_base 93: mod_base = OTHER; note = 2'-O-methyl ribonucleotide
  modified_base 94: mod_base = OTHER; note = 2'-O-methyl ribonucleotide
  modified_base 95: mod_base = OTHER; note = 2'-O-methyl ribonucleotide
  modified_base 96: mod_base = OTHER; note = 2'-O-methyl ribonucleotide
  modified_base 97: mod_base = OTHER; note = 2'-O-methyl ribonucleotide
  modified_base 98: mod_base = OTHER; note = 2'-O-methyl ribonucleotide
  modified_base 99: mod_base = OTHER; note = 2'-O-methyl ribonucleotide
  modified_base 100: mod_base = OTHER; note = 2'-O-methyl ribonucleotide
  modified_base 1..3: mod_base = OTHER; note = phosphorothioate linkage
  modified_base 25..26: mod_base = OTHER; note = phosphorothioate linkage
  modified_base 45..46: mod_base = OTHER; note = phosphorothioate linkage
  modified_base 97..100: mod_base = OTHER; note = phosphorothioate linkage

SEQ ID NO: 2601 - RNA, 103 nt, synthetic construct; identical to SEQ ID NO: 1700
  source 1..103: mol_type = other RNA
  modified_base 1: mod_base = OTHER; note = 2'-O-methyl ribonucleotide
  modified_base 2: mod_base = OTHER; note = 2'-O-methyl ribonucleotide
  modified_base 3: mod_base = OTHER; note = 2'-O-methyl ribonucleotide
  modified_base 21: mod_base = OTHER; note = 2'-O-methyl ribonucleotide
  modified_base 28: mod_base = OTHER; note = 2'-O-methyl ribonucleotide
  modified_base 29: mod_base = OTHER; note = 2'-O-methyl ribonucleotide
  modified_base 30: mod_base = OTHER; note = 2'-O-methyl ribonucleotide
  modified_base 31: mod_base = OTHER; note = 2'-O-methyl ribonucleotide
  modified_base 32: mod_base = OTHER; note = 2'-O-methyl ribonucleotide
  modified_base 33: mod_base = OTHER; note = 2'-O-methyl ribonucleotide
  modified_base 34: mod_base = OTHER; note = 2'-O-methyl ribonucleotide
  modified_base 35: mod_base = OTHER; note = 2'-O-methyl ribonucleotide
  modified_base 36: mod_base = OTHER; note = 2'-O-methyl ribonucleotide
  modified_base 37: mod_base = OTHER; note = 2'-O-methyl ribonucleotide
  modified_base 38: mod_base = OTHER; note = 2'-O-methyl ribonucleotide
  modified_base 39: mod_base = OTHER; note = 2'-O-methyl ribonucleotide
  modified_base 40: mod_base = OTHER; note = 2'-O-methyl ribonucleotide
  modified_base 41: mod_base = OTHER; note = 2'-O-methyl ribonucleotide
  modified_base 42: mod_base = OTHER; note = 2'-O-methyl ribonucleotide
  modified_base 46: mod_base = OTHER; note = 2'-O-methyl ribonucleotide
  modified_base 48: mod_base = OTHER; note = 2'-O-methyl ribonucleotide
  modified_base 50: mod_base = OTHER; note = 2'-O-methyl ribonucleotide
  modified_base 52: mod_base = OTHER; note = 2'-O-methyl ribonucleotide
  modified_base 53: mod_base = OTHER; note = 2'-O-methyl ribonucleotide
  modified_base 54: mod_base = OTHER; note = 2'-O-methyl ribonucleotide
  modified_base 55: mod_base = OTHER; note = 2'-O-methyl ribonucleotide
  modified_base 56: mod_base = OTHER; note = 2'-O-methyl ribonucleotide
  modified_base 57: mod_base = OTHER; note = 2'-O-methyl ribonucleotide
  modified_base 60: mod_base = OTHER; note = 2'-O-methyl ribonucleotide
  modified_base 61: mod_base = OTHER; note = 2'-O-methyl ribonucleotide
  modified_base 66: mod_base = OTHER; note = 2'-O-methyl ribonucleotide
  modified_base 67: mod_base = OTHER; note = 2'-O-methyl ribonucleotide
  modified_base 70: mod_base = OTHER; note = 2'-O-methyl ribonucleotide
  modified_base 71: mod_base = OTHER; note = 2'-O-methyl ribonucleotide
  modified_base 72: mod_base = OTHER; note = 2'-O-methyl ribonucleotide
  modified_base 74: mod_base = OTHER; note = 2'-O-methyl ribonucleotide
  modified_base 75: mod_base = OTHER; note = 2'-O-methyl ribonucleotide
  modified_base 76: mod_base = OTHER; note = 2'-O-methyl ribonucleotide
  modified_base 77: mod_base = OTHER; note = 2'-O-methyl ribonucleotide
  modified_base 78: mod_base = OTHER; note = 2'-O-methyl ribonucleotide
  modified_base 79: mod_base = OTHER; note = 2'-O-methyl ribonucleotide
  modified_base 80: mod_base = OTHER; note = 2'-O-methyl ribonucleotide
  modified_base 82: mod_base = OTHER; note = 2'-O-methyl ribonucleotide
  modified_base 83: mod_base = OTHER; note = 2'-O-methyl ribonucleotide
  modified_base 84: mod_base = OTHER; note = 2'-O-methyl ribonucleotide
  modified_base 85: mod_base = OTHER; note = 2'-O-methyl ribonucleotide
  modified_base 86: mod_base = OTHER; note = 2'-O-methyl ribonucleotide
  modified_base 87: mod_base = OTHER; note = 2'-O-methyl ribonucleotide
  modified_base 89: mod_base = OTHER; note = 2'-O-methyl ribonucleotide
  modified_base 92: mod_base = OTHER; note = 2'-O-methyl ribonucleotide
  modified_base 93: mod_base = OTHER; note = 2'-O-methyl ribonucleotide
  modified_base 94: mod_base = OTHER; note = 2'-O-methyl ribonucleotide
  modified_base 95: mod_base = OTHER; note = 2'-O-methyl ribonucleotide
  modified_base 96: mod_base = OTHER; note = 2'-O-methyl ribonucleotide
  modified_base 97: mod_base = OTHER; note = 2'-O-methyl ribonucleotide
  modified_base 98: mod_base = OTHER; note = 2'-O-methyl ribonucleotide
  modified_base 99: mod_base = OTHER; note = 2'-O-methyl ribonucleotide
  modified_base 100: mod_base = OTHER; note = 2'-O-methyl ribonucleotide
  modified_base 1..3: mod_base = OTHER; note = phosphorothioate linkage
  modified_base 25..26: mod_base = OTHER; note = phosphorothioate linkage
  modified_base 45..46: mod_base = OTHER; note = phosphorothioate linkage
  modified_base 97..100: mod_base = OTHER; note = phosphorothioate linkage

SEQ ID NO: 2602 - RNA, 103 nt, synthetic construct; identical to SEQ ID NO: 1700
  source 1..103: mol_type = other RNA
  modified_base 1: mod_base = OTHER; note = 2'-O-methyl ribonucleotide
  modified_base 2: mod_base = OTHER; note = 2'-O-methyl ribonucleotide
  modified_base 3: mod_base = OTHER; note = 2'-O-methyl ribonucleotide
  modified_base 21: mod_base = OTHER; note = 2'-O-methyl ribonucleotide
  modified_base 28: mod_base = OTHER; note = 2'-O-methyl ribonucleotide
  modified_base 29: mod_base = OTHER; note = 2'-O-methyl ribonucleotide
  modified_base 30: mod_base = OTHER; note = 2'-O-methyl ribonucleotide
  modified_base 31: mod_base = OTHER; note = 2'-O-methyl ribonucleotide
  modified_base 32: mod_base = OTHER; note = 2'-O-methyl ribonucleotide
  modified_base 33: mod_base = OTHER; note = 2'-O-methyl ribonucleotide
  modified_base 34: mod_base = OTHER; note = 2'-O-methyl ribonucleotide
  modified_base 35: mod_base = OTHER; note = 2'-O-methyl ribonucleotide
  modified_base 36: mod_base = OTHER; note = 2'-O-methyl ribonucleotide
  modified_base 37: mod_base = OTHER; note = 2'-O-methyl ribonucleotide
  modified_base 38: mod_base = OTHER; note = 2'-O-methyl ribonucleotide
  modified_base 39: mod_base = OTHER; note = 2'-O-methyl ribonucleotide
  modified_base 40: mod_base = OTHER; note = 2'-O-methyl ribonucleotide
  modified_base 41: mod_base = OTHER; note = 2'-O-methyl ribonucleotide
  modified_base 42: mod_base = OTHER; note = 2'-O-methyl ribonucleotide
  modified_base 46: mod_base = OTHER; note = 2'-O-methyl ribonucleotide
  modified_base 48: mod_base = OTHER; note = 2'-O-methyl ribonucleotide
  modified_base 50: mod_base = OTHER; note = 2'-O-methyl ribonucleotide
  modified_base 52: mod_base = OTHER; note = 2'-O-methyl ribonucleotide
  modified_base 53: mod_base = OTHER; note = 2'-O-methyl ribonucleotide
  modified_base 54: mod_base = OTHER; note = 2'-O-methyl ribonucleotide
  modified_base 57: mod_base = OTHER; note = 2'-O-methyl ribonucleotide
  modified_base 61: mod_base = OTHER; note = 2'-O-methyl ribonucleotide
  modified_base 66: mod_base = OTHER; note = 2'-O-methyl ribonucleotide
  modified_base 67: mod_base = OTHER; note = 2'-O-methyl ribonucleotide
  modified_base 70: mod_base = OTHER; note = 2'-O-methyl ribonucleotide
  modified_base 71: mod_base = OTHER; note = 2'-O-methyl ribonucleotide
  modified_base 72: mod_base = OTHER; note = 2'-O-methyl ribonucleotide
  modified_base 73: mod_base = OTHER; note = 2'-O-methyl ribonucleotide
  modified_base 74: mod_base = OTHER; note = 2'-O-methyl ribonucleotide
  modified_base 75: mod_base = OTHER; note = 2'-O-methyl ribonucleotide
  modified_base 76: mod_base = OTHER; note = 2'-O-methyl ribonucleotide
  modified_base 77: mod_base = OTHER; note = 2'-O-methyl ribonucleotide
  modified_base 78: mod_base = OTHER; note = 2'-O-methyl ribonucleotide
  modified_base 79: mod_base = OTHER; note = 2'-O-methyl ribonucleotide
  modified_base 80: mod_base = OTHER; note = 2'-O-methyl ribonucleotide
  modified_base 82: mod_base = OTHER; note = 2'-O-methyl ribonucleotide
  modified_base 83: mod_base = OTHER; note = 2'-O-methyl ribonucleotide
  modified_base 84: mod_base = OTHER; note = 2'-O-methyl ribonucleotide
  modified_base 85: mod_base = OTHER; note = 2'-O-methyl ribonucleotide
  modified_base 86: mod_base = OTHER; note = 2'-O-methyl ribonucleotide
  modified_base 87: mod_base = OTHER; note = 2'-O-methyl ribonucleotide
  modified_base 89: mod_base = OTHER; note = 2'-O-methyl ribonucleotide
  modified_base 92: mod_base = OTHER; note = 2'-O-methyl ribonucleotide
  modified_base 93: mod_base = OTHER; note = 2'-O-methyl ribonucleotide
  modified_base 94: mod_base = OTHER; note = 2'-O-methyl ribonucleotide
  modified_base 95: mod_base = OTHER; note = 2'-O-methyl ribonucleotide
  modified_base 96: mod_base = OTHER; note = 2'-O-methyl ribonucleotide
  modified_base 97: mod_base = OTHER; note = 2'-O-methyl ribonucleotide
  modified_base 98: mod_base = OTHER; note = 2'-O-methyl ribonucleotide
  modified_base 99: mod_base = OTHER; note = 2'-O-methyl ribonucleotide
  modified_base 100: mod_base = OTHER; note = 2'-O-methyl ribonucleotide
  modified_base 1..3: mod_base = OTHER; note = phosphorothioate linkage
  modified_base 25..26: mod_base = OTHER; note = phosphorothioate linkage
  modified_base 45..46: mod_base = OTHER; note = phosphorothioate linkage
  modified_base 97..100: mod_base = OTHER; note = phosphorothioate linkage

SEQ ID NO: 2603 - RNA, 103 nt, synthetic construct; identical to SEQ ID NO: 1700
  source 1..103: mol_type = other RNA
  modified_base 1: mod_base = OTHER; note = 2'-O-methyl ribonucleotide
  modified_base 2: mod_base = OTHER; note = 2'-O-methyl ribonucleotide
  modified_base 3: mod_base = OTHER; note = 2'-O-methyl ribonucleotide
  modified_base 21: mod_base = OTHER; note = 2'-O-methyl ribonucleotide
  modified_base 28: mod_base = OTHER; note = 2'-O-methyl ribonucleotide
  modified_base 29: mod_base = OTHER; note = 2'-O-methyl ribonucleotide
  modified_base 30: mod_base = OTHER; note = 2'-O-methyl ribonucleotide
  modified_base 31: mod_base = OTHER; note = 2'-O-methyl ribonucleotide
  modified_base 32: mod_base = OTHER; note = 2'-O-methyl ribonucleotide
  modified_base 33: mod_base = OTHER; note = 2'-O-methyl ribonucleotide
  modified_base 34: mod_base = OTHER; note = 2'-O-methyl ribonucleotide
  modified_base 35: mod_base = OTHER; note = 2'-O-methyl ribonucleotide
  modified_base 36: mod_base = OTHER; note = 2'-O-methyl ribonucleotide
  modified_base 37: mod_base = OTHER; note = 2'-O-methyl ribonucleotide
  modified_base 38: mod_base = OTHER; note = 2'-O-methyl ribonucleotide
  modified_base 39: mod_base = OTHER; note = 2'-O-methyl ribonucleotide
  modified_base 40: mod_base = OTHER; note = 2'-O-methyl ribonucleotide
  modified_base 41: mod_base = OTHER; note = 2'-O-methyl ribonucleotide
  modified_base 42: mod_base = OTHER; note = 2'-O-methyl ribonucleotide
  modified_base 46: mod_base = OTHER; note = 2'-O-methyl ribonucleotide
  modified_base 48: mod_base = OTHER; note = 2'-O-methyl ribonucleotide
  modified_base 50: mod_base = OTHER; note = 2'-O-methyl ribonucleotide
  modified_base 52: mod_base = OTHER; note = 2'-O-methyl ribonucleotide
  modified_base 53: mod_base = OTHER; note = 2'-O-methyl ribonucleotide
  modified_base 54: mod_base = OTHER; note = 2'-O-methyl ribonucleotide
  modified_base 57: mod_base = OTHER; note = 2'-O-methyl ribonucleotide
  modified_base 61: mod_base = OTHER; note = 2'-O-methyl ribonucleotide
  modified_base 66: mod_base = OTHER; note = 2'-O-methyl ribonucleotide
  modified_base 67: mod_base = OTHER; note = 2'-O-methyl ribonucleotide
  modified_base 70: mod_base = OTHER; note = 2'-O-methyl ribonucleotide
  modified_base 71: mod_base = OTHER; note = 2'-O-methyl ribonucleotide
  modified_base 72: mod_base = OTHER; note = 2'-O-methyl ribonucleotide
  modified_base 73: mod_base = OTHER; note = 2'-O-methyl ribonucleotide
  modified_base 74: mod_base = OTHER; note = 2'-O-methyl ribonucleotide
  modified_base 75: mod_base = OTHER; note = 2'-O-methyl ribonucleotide
  modified_base 76: mod_base = OTHER; note = 2'-O-methyl ribonucleotide
  modified_base 77: mod_base = OTHER; note = 2'-O-methyl ribonucleotide
  modified_base 78: mod_base = OTHER; note = 2'-O-methyl ribonucleotide
  modified_base 79: mod_base = OTHER; note = 2'-O-methyl ribonucleotide
  modified_base 80: mod_base = OTHER; note = 2'-O-methyl ribonucleotide
  modified_base 82: mod_base = OTHER; note = 2'-O-methyl ribonucleotide
  modified_base 83: mod_base = OTHER; note = 2'-O-methyl ribonucleotide
  modified_base 84: mod_base = OTHER; note = 2'-O-methyl ribonucleotide
  modified_base 85: mod_base = OTHER; note = 2'-O-methyl ribonucleotide
  modified_base 86: mod_base = OTHER; note = 2'-O-methyl ribonucleotide
  modified_base 87: mod_base = OTHER; note = 2'-O-methyl ribonucleotide
  modified_base 89: mod_base = OTHER; note = 2'-O-methyl ribonucleotide
  modified_base 91: mod_base = OTHER; note = 2'-O-methyl ribonucleotide
  modified_base 92: mod_base = OTHER; note = 2'-O-methyl ribonucleotide
  modified_base 93: mod_base = OTHER; note = 2'-O-methyl ribonucleotide
  modified_base 94: mod_base = OTHER; note = 2'-O-methyl ribonucleotide
  modified_base 95: mod_base = OTHER; note = 2'-O-methyl ribonucleotide
  modified_base 96: mod_base = OTHER; note = 2'-O-methyl ribonucleotide
  modified_base 97: mod_base = OTHER; note = 2'-O-methyl ribonucleotide
  modified_base 98: mod_base = OTHER; note = 2'-O-methyl ribonucleotide
  modified_base 99: mod_base = OTHER; note = 2'-O-methyl ribonucleotide
  modified_base 100: mod_base = OTHER; note = 2'-O-methyl ribonucleotide
  modified_base 1..3: mod_base = OTHER; note = phosphorothioate linkage
  modified_base 25..26: mod_base = OTHER; note = phosphorothioate linkage
  modified_base 45..46: mod_base = OTHER; note = phosphorothioate linkage
  modified_base 97..100: mod_base = OTHER; note = phosphorothioate linkage

SEQ ID NO: 2604 - RNA, 103 nt, synthetic construct; identical to SEQ ID NO: 1700
  source 1..103: mol_type = other RNA
  modified_base 1: mod_base = OTHER; note = 2'-O-methyl ribonucleotide
  modified_base 2: mod_base = OTHER; note = 2'-O-methyl ribonucleotide
  modified_base 3: mod_base = OTHER; note = 2'-O-methyl ribonucleotide
  modified_base 21: mod_base = OTHER; note = 2'-O-methyl ribonucleotide
  modified_base 28: mod_base = OTHER; note = 2'-O-methyl ribonucleotide
  modified_base 29: mod_base = OTHER; note = 2'-O-methyl ribonucleotide
  modified_base 30: mod_base = OTHER; note = 2'-O-methyl ribonucleotide
  modified_base 31: mod_base = OTHER; note = 2'-O-methyl ribonucleotide
  modified_base 32: mod_base = OTHER; note = 2'-O-methyl ribonucleotide
  modified_base 34: mod_base = OTHER; note = 2'-O-methyl ribonucleotide
  modified_base 35: mod_base = OTHER; note = 2'-O-methyl ribonucleotide
  modified_base 36: mod_base = OTHER; note = 2'-O-methyl ribonucleotide
  modified_base 37: mod_base = OTHER; note = 2'-O-methyl ribonucleotide
  modified_base 38: mod_base = OTHER; note = 2'-O-methyl ribonucleotide
  modified_base 39: mod_base = OTHER; note = 2'-O-methyl ribonucleotide
  modified_base 40: mod_base = OTHER; note = 2'-O-methyl ribonucleotide
  modified_base 41: mod_base = OTHER; note = 2'-O-methyl ribonucleotide
  modified_base 42: mod_base = OTHER; note = 2'-O-methyl ribonucleotide
  modified_base 46: mod_base = OTHER; note = 2'-O-methyl ribonucleotide
  modified_base 48: mod_base = OTHER; note = 2'-O-methyl ribonucleotide
  modified_base 50: mod_base = OTHER; note = 2'-O-methyl ribonucleotide
  modified_base 52: mod_base = OTHER; note = 2'-O-methyl ribonucleotide
  modified_base 53: mod_base = OTHER; note = 2'-O-methyl ribonucleotide
  modified_base 54: mod_base = OTHER; note = 2'-O-methyl ribonucleotide
  modified_base 57: mod_base = OTHER; note = 2'-O-methyl ribonucleotide
  modified_base 61: mod_base = OTHER; note = 2'-O-methyl ribonucleotide
  modified_base 66: mod_base = OTHER; note = 2'-O-methyl ribonucleotide
  modified_base 67: mod_base = OTHER; note = 2'-O-methyl ribonucleotide
  modified_base 70: mod_base = OTHER; note = 2'-O-methyl ribonucleotide
  modified_base 71: mod_base = OTHER; note = 2'-O-methyl ribonucleotide
  modified_base 72: mod_base = OTHER; note = 2'-O-methyl ribonucleotide
  modified_base 73: mod_base = OTHER; note = 2'-O-methyl ribonucleotide
  modified_base 74: mod_base = OTHER; note = 2'-O-methyl ribonucleotide
  modified_base 75: mod_base = OTHER; note = 2'-O-methyl ribonucleotide
  modified_base 76: mod_base = OTHER; note = 2'-O-methyl ribonucleotide
  modified_base 77: mod_base = OTHER; note = 2'-O-methyl ribonucleotide
  modified_base 78: mod_base = OTHER; note = 2'-O-methyl ribonucleotide
  modified_base 79: mod_base = OTHER; note = 2'-O-methyl ribonucleotide
  modified_base 80: mod_base = OTHER; note = 2'-O-methyl ribonucleotide
  modified_base 82: mod_base = OTHER; note = 2'-O-methyl ribonucleotide
  modified_base 83: mod_base = OTHER; note = 2'-O-methyl ribonucleotide
  modified_base 84: mod_base = OTHER; note = 2'-O-methyl ribonucleotide
  modified_base 85: mod_base = OTHER; note = 2'-O-methyl ribonucleotide
  modified_base 86: mod_base = OTHER; note = 2'-O-methyl ribonucleotide
  modified_base 87: mod_base = OTHER; note = 2'-O-methyl ribonucleotide
  modified_base 89: mod_base = OTHER; note = 2'-O-methyl ribonucleotide
  modified_base 92: mod_base = OTHER; note = 2'-O-methyl ribonucleotide
  modified_base 93: mod_base = OTHER; note = 2'-O-methyl ribonucleotide
  modified_base 94: mod_base = OTHER; note = 2'-O-methyl ribonucleotide
  modified_base 95: mod_base = OTHER; note = 2'-O-methyl ribonucleotide
  modified_base 96: mod_base = OTHER; note = 2'-O-methyl ribonucleotide
  modified_base 97: mod_base = OTHER; note = 2'-O-methyl ribonucleotide
  modified_base 98: mod_base = OTHER; note = 2'-O-methyl ribonucleotide
  modified_base 99: mod_base = OTHER; note = 2'-O-methyl ribonucleotide
  modified_base 100: mod_base = OTHER; note = 2'-O-methyl ribonucleotide
  modified_base 1..3: mod_base = OTHER; note = phosphorothioate linkage
  modified_base 25..26: mod_base = OTHER; note = phosphorothioate linkage
  modified_base 45..46: mod_base = OTHER; note = phosphorothioate linkage
  modified_base 97..100: mod_base = OTHER; note = phosphorothioate linkage

SEQ ID NO: 2605 - RNA, 103 nt, synthetic construct; identical to SEQ ID NO: 1700
  source 1..103: mol_type = other RNA
  modified_base 1: mod_base = OTHER; note = 2'-O-methyl ribonucleotide
  modified_base 2: mod_base = OTHER; note = 2'-O-methyl ribonucleotide
  modified_base 3: mod_base = OTHER; note = 2'-O-methyl ribonucleotide
  modified_base 21: mod_base = OTHER; note = 2'-O-methyl ribonucleotide
  modified_base 28: mod_base = OTHER; note = 2'-O-methyl ribonucleotide
  modified_base 29: mod_base = OTHER; note = 2'-O-methyl ribonucleotide
  modified_base 30: mod_base = OTHER; note = 2'-O-methyl ribonucleotide
  modified_base 31: mod_base = OTHER; note = 2'-O-methyl ribonucleotide
  modified_base 32: mod_base = OTHER; note = 2'-O-methyl ribonucleotide
  modified_base 34: mod_base = OTHER; note = 2'-O-methyl ribonucleotide
  modified_base 35: mod_base = OTHER; note = 2'-O-methyl ribonucleotide
  modified_base 36: mod_base = OTHER; note = 2'-O-methyl ribonucleotide
  modified_base 37: mod_base = OTHER; note = 2'-O-methyl ribonucleotide
  modified_base 38: mod_base = OTHER; note = 2'-O-methyl ribonucleotide
  modified_base 39: mod_base = OTHER; note = 2'-O-methyl ribonucleotide
  modified_base 40: mod_base = OTHER; note = 2'-O-methyl ribonucleotide
  modified_base 41: mod_base = OTHER; note = 2'-O-methyl ribonucleotide
  modified_base 42: mod_base = OTHER; note = 2'-O-methyl ribonucleotide
  modified_base 46: mod_base = OTHER; note = 2'-O-methyl ribonucleotide
  modified_base 48: mod_base = OTHER; note = 2'-O-methyl ribonucleotide
  modified_base 50: mod_base = OTHER; note = 2'-O-methyl ribonucleotide
  modified_base 52: mod_base = OTHER; note = 2'-O-methyl ribonucleotide
  modified_base 53: mod_base = OTHER; note = 2'-O-methyl ribonucleotide
  modified_base 54: mod_base = OTHER; note = 2'-O-methyl ribonucleotide
  modified_base 57: mod_base = OTHER; note = 2'-O-methyl ribonucleotide
  modified_base 61: mod_base = OTHER; note = 2'-O-methyl ribonucleotide
  modified_base 66: mod_base = OTHER; note = 2'-O-methyl ribonucleotide
  modified_base 67: mod_base = OTHER; note = 2'-O-methyl ribonucleotide
  modified_base 70: mod_base = OTHER; note = 2'-O-methyl ribonucleotide
  modified_base 71: mod_base = OTHER; note = 2'-O-methyl ribonucleotide
  modified_base 72: mod_base = OTHER; note = 2'-O-methyl ribonucleotide
  modified_base 73: mod_base = OTHER; note = 2'-O-methyl ribonucleotide
  modified_base 74: mod_base = OTHER; note = 2'-O-methyl ribonucleotide
  modified_base 75: mod_base = OTHER; note = 2'-O-methyl ribonucleotide
  modified_base 76: mod_base = OTHER; note = 2'-O-methyl ribonucleotide
  modified_base 77: mod_base = OTHER; note = 2'-O-methyl ribonucleotide
  modified_base 78: mod_base = OTHER; note = 2'-O-methyl ribonucleotide
  modified_base 79: mod_base = OTHER; note = 2'-O-methyl ribonucleotide
  modified_base 80: mod_base = OTHER; note = 2'-O-methyl ribonucleotide
  modified_base 82: mod_base = OTHER; note = 2'-O-methyl ribonucleotide
  modified_base 83: mod_base = OTHER; note = 2'-O-methyl ribonucleotide
  modified_base 84: mod_base = OTHER; note = 2'-O-methyl ribonucleotide
  modified_base 85: mod_base = OTHER; note = 2'-O-methyl ribonucleotide
  modified_base 86: mod_base = OTHER; note = 2'-O-methyl ribonucleotide
  modified_base 87: mod_base = OTHER; note = 2'-O-methyl ribonucleotide
  modified_base 89: mod_base = OTHER; note = 2'-O-methyl ribonucleotide
  modified_base 91: mod_base = OTHER; note = 2'-O-methyl ribonucleotide
  modified_base 92: mod_base = OTHER; note = 2'-O-methyl ribonucleotide
  modified_base 93: mod_base = OTHER; note = 2'-O-methyl ribonucleotide
  modified_base 94: mod_base = OTHER; note = 2'-O-methyl ribonucleotide
  modified_base 95: mod_base = OTHER; note = 2'-O-methyl ribonucleotide
  modified_base 96: mod_base = OTHER; note = 2'-O-methyl ribonucleotide
  modified_base 97: mod_base = OTHER; note = 2'-O-methyl ribonucleotide
  modified_base 98: mod_base = OTHER; note = 2'-O-methyl ribonucleotide
  modified_base 99: mod_base = OTHER; note = 2'-O-methyl ribonucleotide
  modified_base 100: mod_base = OTHER; note = 2'-O-methyl ribonucleotide
  modified_base 1..3: mod_base = OTHER; note = phosphorothioate linkage
  modified_base 25..26: mod_base = OTHER; note = phosphorothioate linkage
  modified_base 45..46: mod_base = OTHER; note = phosphorothioate linkage
  modified_base 97..100: mod_base = OTHER; note = phosphorothioate linkage

SEQ ID NO: 2606 - RNA, 103 nt, synthetic construct; identical to SEQ ID NO: 1700
  source 1..103: mol_type = other RNA
  modified_base 1: mod_base = OTHER; note = 2'-O-methyl ribonucleotide
  modified_base 2: mod_base = OTHER; note = 2'-O-methyl ribonucleotide
  modified_base 3: mod_base = OTHER; note = 2'-O-methyl ribonucleotide
  modified_base 21: mod_base = OTHER; note = 2'-O-methyl ribonucleotide
  modified_base 28: mod_base = OTHER; note = 2'-O-methyl ribonucleotide
  modified_base 29: mod_base = OTHER; note = 2'-O-methyl ribonucleotide
  modified_base 30: mod_base = OTHER; note = 2'-O-methyl ribonucleotide
  modified_base 31: mod_base = OTHER; note = 2'-O-methyl ribonucleotide
  modified_base 32: mod_base = OTHER; note = 2'-O-methyl ribonucleotide
  modified_base 34: mod_base = OTHER; note = 2'-O-methyl ribonucleotide
  modified_base 35: mod_base = OTHER; note = 2'-O-methyl ribonucleotide
  modified_base 36: mod_base = OTHER; note = 2'-O-methyl ribonucleotide
  modified_base 37: mod_base = OTHER; note = 2'-O-methyl ribonucleotide
  modified_base 38: mod_base = OTHER; note = 2'-O-methyl ribonucleotide
  modified_base 39: mod_base = OTHER; note = 2'-O-methyl ribonucleotide
  modified_base 40: mod_base = OTHER; note = 2'-O-methyl ribonucleotide
  modified_base 41: mod_base = OTHER; note = 2'-O-methyl ribonucleotide
  modified_base 42: mod_base = OTHER; note = 2'-O-methyl ribonucleotide
  modified_base 46: mod_base = OTHER; note = 2'-O-methyl ribonucleotide
  modified_base 48: mod_base = OTHER; note = 2'-O-methyl ribonucleotide
  modified_base 50: mod_base = OTHER; note = 2'-O-methyl ribonucleotide
  modified_base 52: mod_base = OTHER; note = 2'-O-methyl ribonucleotide
  modified_base 53: mod_base = OTHER; note = 2'-O-methyl ribonucleotide
  modified_base 54: mod_base = OTHER; note = 2'-O-methyl ribonucleotide
  modified_base 55: mod_base = OTHER; note = 2'-O-methyl ribonucleotide
  modified_base 56: mod_base = OTHER; note = 2'-O-methyl ribonucleotide
  modified_base 57: mod_base = OTHER; note = 2'-O-methyl ribonucleotide
  modified_base 60: mod_base = OTHER; note = 2'-O-methyl ribonucleotide
  modified_base 61: mod_base = OTHER; note = 2'-O-methyl ribonucleotide
  modified_base 66: mod_base = OTHER; note = 2'-O-methyl ribonucleotide
  modified_base 67: mod_base = OTHER; note = 2'-O-methyl ribonucleotide
  modified_base 70: mod_base = OTHER; note = 2'-O-methyl ribonucleotide
  modified_base 71: mod_base = OTHER; note = 2'-O-methyl ribonucleotide
  modified_base 72: mod_base = OTHER; note = 2'-O-methyl ribonucleotide
  modified_base 74: mod_base = OTHER; note = 2'-O-methyl ribonucleotide
  modified_base 75: mod_base = OTHER; note = 2'-O-methyl ribonucleotide
  modified_base 76: mod_base = OTHER; note = 2'-O-methyl ribonucleotide
  modified_base 77: mod_base = OTHER; note = 2'-O-methyl ribonucleotide
  modified_base 78: mod_base = OTHER; note = 2'-O-methyl ribonucleotide
  modified_base 79: mod_base = OTHER; note = 2'-O-methyl ribonucleotide
  modified_base 80: mod_base = OTHER; note = 2'-O-methyl ribonucleotide
  modified_base 82: mod_base = OTHER; note = 2'-O-methyl ribonucleotide
  modified_base 83: mod_base = OTHER; note = 2'-O-methyl ribonucleotide
  modified_base 84: mod_base = OTHER; note = 2'-O-methyl ribonucleotide
  modified_base 85: mod_base = OTHER; note = 2'-O-methyl ribonucleotide
  modified_base 86: mod_base = OTHER; note = 2'-O-methyl ribonucleotide
  modified_base 87: mod_base = OTHER; note = 2'-O-methyl ribonucleotide
  modified_base 89: mod_base = OTHER; note = 2'-O-methyl ribonucleotide
  modified_base 92: mod_base = OTHER; note = 2'-O-methyl ribonucleotide
  modified_base 93: mod_base = OTHER; note = 2'-O-methyl ribonucleotide
  modified_base 94: mod_base = OTHER; note = 2'-O-methyl ribonucleotide
  modified_base 95: mod_base = OTHER; note = 2'-O-methyl ribonucleotide
  modified_base 96: mod_base = OTHER; note = 2'-O-methyl ribonucleotide
  modified_base 97: mod_base = OTHER; note = 2'-O-methyl ribonucleotide
  modified_base 98: mod_base = OTHER; note = 2'-O-methyl ribonucleotide
  modified_base 99: mod_base = OTHER; note = 2'-O-methyl ribonucleotide
  modified_base 100: mod_base = OTHER; note = 2'-O-methyl ribonucleotide
  modified_base 1..3: mod_base = OTHER; note = phosphorothioate linkage
  modified_base 25..26: mod_base = OTHER; note = phosphorothioate linkage
  modified_base 45..46: mod_base = OTHER; note = phosphorothioate linkage
  modified_base 97..100: mod_base = OTHER; note = phosphorothioate linkage

SEQ ID NO: 2607 - RNA, 103 nt, synthetic construct; identical to SEQ ID NO: 1643
  source 1..103: mol_type = other RNA
  modified_base 1: mod_base = OTHER; note = 2'-O-methyl ribonucleotide
  modified_base 2: mod_base = OTHER; note = 2'-O-methyl ribonucleotide
  modified_base 3: mod_base = OTHER; note = 2'-O-methyl ribonucleotide
  modified_base 21: mod_base = OTHER; note = 2'-O-methyl ribonucleotide
  modified_base 28: mod_base = OTHER; note = 2'-O-methyl ribonucleotide
  modified_base 29: mod_base = OTHER; note = 2'-O-methyl ribonucleotide
  modified_base 30: mod_base = OTHER; note = 2'-O-methyl ribonucleotide
  modified_base 31: mod_base = OTHER; note = 2'-O-methyl ribonucleotide
  modified_base 32: mod_base = OTHER; note = 2'-O-methyl ribonucleotide
  modified_base 33: mod_base = OTHER; note = 2'-O-methyl ribonucleotide
  modified_base 34: mod_base = OTHER; note = 2'-O-methyl ribonucleotide
  modified_base 35: mod_base = OTHER; note = 2'-O-methyl ribonucleotide
  modified_base 36: mod_base = OTHER; note = 2'-O-methyl ribonucleotide
  modified_base 37: mod_base = OTHER; note = 2'-O-methyl ribonucleotide
  modified_base 38: mod_base = OTHER; note = 2'-O-methyl ribonucleotide
  modified_base 39: mod_base = OTHER; note = 2'-O-methyl ribonucleotide
  modified_base 40: mod_base = OTHER; note = 2'-O-methyl ribonucleotide
  modified_base 41: mod_base = OTHER; note = 2'-O-methyl ribonucleotide
  modified_base 42: mod_base = OTHER; note = 2'-O-methyl ribonucleotide
  modified_base 46: mod_base = OTHER; note = 2'-O-methyl ribonucleotide
  modified_base 48: mod_base = OTHER; note = 2'-O-methyl ribonucleotide
  modified_base 50: mod_base = OTHER; note = 2'-O-methyl ribonucleotide
  modified_base 52: mod_base = OTHER; note = 2'-O-methyl ribonucleotide
  modified_base 53: mod_base = OTHER; note = 2'-O-methyl ribonucleotide
  modified_base 54: mod_base = OTHER; note = 2'-O-methyl ribonucleotide
  modified_base 55: mod_base = OTHER; note = 2'-O-methyl ribonucleotide
  modified_base 56: mod_base = OTHER; note = 2'-O-methyl ribonucleotide
  modified_base 57: mod_base = OTHER; note = 2'-O-methyl ribonucleotide
  modified_base 60: mod_base = OTHER; note = 2'-O-methyl ribonucleotide
  modified_base 61: mod_base = OTHER; note = 2'-O-methyl ribonucleotide
  modified_base 66: mod_base = OTHER; note = 2'-O-methyl ribonucleotide
  modified_base 67: mod_base = OTHER; note = 2'-O-methyl ribonucleotide
  modified_base 70: mod_base = OTHER; note = 2'-O-methyl ribonucleotide
  modified_base 71: mod_base = OTHER; note = 2'-O-methyl ribonucleotide
  modified_base 72: mod_base = OTHER; note = 2'-O-methyl ribonucleotide
  modified_base 73: mod_base = OTHER; note = 2'-O-methyl ribonucleotide
  modified_base 74: mod_base = OTHER; note = 2'-O-methyl ribonucleotide
  modified_base 75: mod_base = OTHER; note = 2'-O-methyl ribonucleotide
  modified_base 76: mod_base = OTHER; note = 2'-O-methyl ribonucleotide
  modified_base 77: mod_base = OTHER; note = 2'-O-methyl ribonucleotide
  modified_base 78: mod_base = OTHER; note = 2'-O-methyl ribonucleotide
  modified_base 79: mod_base = OTHER; note = 2'-O-methyl ribonucleotide
  modified_base 80: mod_base = OTHER; note = 2'-O-methyl ribonucleotide
  modified_base 81: mod_base = OTHER; note = 2'-O-methyl ribonucleotide
  modified_base 83: mod_base = OTHER; note = 2'-O-methyl ribonucleotide
  modified_base 84: mod_base = OTHER; note = 2'-O-methyl ribonucleotide
  modified_base 85: mod_base = OTHER; note = 2'-O-methyl ribonucleotide
  modified_base 86: mod_base = OTHER; note = 2'-O-methyl ribonucleotide
  modified_base 87: mod_base = OTHER; note = 2'-O-methyl ribonucleotide
  modified_base 88: mod_base = OTHER; note = 2'-O-methyl ribonucleotide
  modified_base 89: mod_base = OTHER; note = 2'-O-methyl ribonucleotide
  modified_base 90: mod_base = OTHER; note = 2'-O-methyl ribonucleotide
  modified_base 91: mod_base = OTHER; note = 2'-O-methyl ribonucleotide
  modified_base 92: mod_base = OTHER; note = 2'-O-methyl ribonucleotide
  modified_base 93: mod_base = OTHER; note = 2'-O-methyl ribonucleotide
  modified_base 94: mod_base = OTHER; note = 2'-O-methyl ribonucleotide
  modified_base 95: mod_base = OTHER; note = 2'-O-methyl ribonucleotide
  modified_base 96: mod_base = OTHER; note = 2'-O-methyl ribonucleotide
  modified_base 97: mod_base = OTHER; note = 2'-O-methyl ribonucleotide
  modified_base 98: mod_base = OTHER; note = 2'-O-methyl ribonucleotide
  modified_base 99: mod_base = OTHER; note = 2'-O-methyl ribonucleotide
  modified_base 100: mod_base = OTHER; note = 2'-O-methyl ribonucleotide
  modified_base 1..3: mod_base = OTHER; note = phosphorothioate linkage
  modified_base 25..26: mod_base = OTHER; note = phosphorothioate linkage
  modified_base 64..65: mod_base = OTHER; note = phosphorothioate linkage
  modified_base 97..100: mod_base = OTHER; note = phosphorothioate linkage

SEQ ID NO: 2608 - RNA, 103 nt, synthetic construct; identical to SEQ ID NO: 1643
  source 1..103: mol_type = other RNA
  modified_base 1: mod_base = OTHER; note = 2'-O-methyl ribonucleotide
  modified_base 2: mod_base = OTHER; note = 2'-O-methyl ribonucleotide
  modified_base 3: mod_base = OTHER; note = 2'-O-methyl ribonucleotide
  modified_base 21: mod_base = OTHER; note = 2'-O-methyl ribonucleotide
  modified_base 28: mod_base = OTHER; note = 2'-O-methyl ribonucleotide
  modified_base 29: mod_base = OTHER; note = 2'-O-methyl ribonucleotide
  modified_base 30: mod_base = OTHER; note = 2'-O-methyl ribonucleotide
  modified_base 31: mod_base = OTHER; note = 2'-O-methyl ribonucleotide
  modified_base 32: mod_base = OTHER; note = 2'-O-methyl ribonucleotide
  modified_base 34: mod_base = OTHER; note = 2'-O-methyl ribonucleotide
  modified_base 35: mod_base = OTHER; note = 2'-O-methyl ribonucleotide
  modified_base 36: mod_base = OTHER; note = 2'-O-methyl ribonucleotide
  modified_base 37: mod_base = OTHER; note = 2'-O-methyl ribonucleotide
  modified_base 38: mod_base = OTHER; note = 2'-O-methyl ribonucleotide
  modified_base 39: mod_base = OTHER; note = 2'-O-methyl ribonucleotide
  modified_base 40: mod_base = OTHER; note = 2'-O-methyl ribonucleotide
  modified_base 41: mod_base = OTHER; note = 2'-O-methyl ribonucleotide
  modified_base 42: mod_base = OTHER; note = 2'-O-methyl ribonucleotide
  modified_base 46: mod_base = OTHER; note = 2'-O-methyl ribonucleotide
  modified_base 48: mod_base = OTHER; note = 2'-O-methyl ribonucleotide
  modified_base 50: mod_base = OTHER; note = 2'-O-methyl ribonucleotide
  modified_base 52: mod_base = OTHER; note = 2'-O-methyl ribonucleotide
  modified_base 53: mod_base = OTHER; note = 2'-O-methyl ribonucleotide
  modified_base 54: mod_base = OTHER; note = 2'-O-methyl ribonucleotide
  modified_base 55: mod_base = OTHER; note = 2'-O-methyl ribonucleotide
  modified_base 56: mod_base = OTHER; note = 2'-O-methyl ribonucleotide
  modified_base 57: mod_base = OTHER; note = 2'-O-methyl ribonucleotide
  modified_base 60: mod_base = OTHER; note = 2'-O-methyl ribonucleotide
  modified_base 61: mod_base = OTHER; note = 2'-O-methyl ribonucleotide
  modified_base 66: mod_base = OTHER; note = 2'-O-methyl ribonucleotide
  modified_base 67: mod_base = OTHER; note = 2'-O-methyl ribonucleotide
  modified_base 70: mod_base = OTHER; note = 2'-O-methyl ribonucleotide
  modified_base 71: mod_base = OTHER; note = 2'-O-methyl ribonucleotide
  modified_base 72: mod_base = OTHER; note = 2'-O-methyl ribonucleotide
  modified_base 74: mod_base = OTHER; note = 2'-O-methyl ribonucleotide
  modified_base 75: mod_base = OTHER; note = 2'-O-methyl ribonucleotide
  modified_base 76: mod_base = OTHER; note = 2'-O-methyl ribonucleotide
  modified_base 77: mod_base = OTHER; note = 2'-O-methyl ribonucleotide
  modified_base 78: mod_base = OTHER; note = 2'-O-methyl ribonucleotide
  modified_base 79: mod_base = OTHER; note = 2'-O-methyl ribonucleotide
  modified_base 80: mod_base = OTHER; note = 2'-O-methyl ribonucleotide
  modified_base 81: mod_base = OTHER; note = 2'-O-methyl ribonucleotide
  modified_base 83: mod_base = OTHER; note = 2'-O-methyl ribonucleotide
  modified_base 84: mod_base = OTHER; note = 2'-O-methyl ribonucleotide
  modified_base 85: mod_base = OTHER; note = 2'-O-methyl ribonucleotide
  modified_base 86: mod_base = OTHER; note = 2'-O-methyl ribonucleotide
  modified_base 87: mod_base = OTHER; note = 2'-O-methyl ribonucleotide
  modified_base 88: mod_base = OTHER; note = 2'-O-methyl ribonucleotide
  modified_base 89: mod_base = OTHER; note = 2'-O-methyl ribonucleotide
  modified_base 90: mod_base = OTHER; note = 2'-O-methyl ribonucleotide
  modified_base 91: mod_base = OTHER; note = 2'-O-methyl ribonucleotide
  modified_base 92: mod_base = OTHER; note = 2'-O-methyl ribonucleotide
  modified_base 93: mod_base = OTHER; note = 2'-O-methyl ribonucleotide
  modified_base 94: mod_base = OTHER; note = 2'-O-methyl ribonucleotide
  modified_base 95: mod_base = OTHER; note = 2'-O-methyl ribonucleotide
  modified_base 96: mod_base = OTHER; note = 2'-O-methyl ribonucleotide
  modified_base 97: mod_base = OTHER; note = 2'-O-methyl ribonucleotide
  modified_base 98: mod_base = OTHER; note = 2'-O-methyl ribonucleotide
  modified_base 99: mod_base = OTHER; note = 2'-O-methyl ribonucleotide
  modified_base 100: mod_base = OTHER; note = 2'-O-methyl ribonucleotide
  modified_base 1..3: mod_base = OTHER; note = phosphorothioate linkage
  modified_base 25..26: mod_base = OTHER; note = phosphorothioate linkage
  modified_base 64..65: mod_base = OTHER; note = phosphorothioate linkage
  modified_base 97..100: mod_base = OTHER; note = phosphorothioate linkage

SEQ ID NO: 2609 - RNA, 103 nt, synthetic construct; identical to SEQ ID NO: 1699
  source 1..103: mol_type = other RNA
  modified_base 1: mod_base = OTHER; note = 2'-O-methyl ribonucleotide
  modified_base 2: mod_base = OTHER; note = 2'-O-methyl ribonucleotide
  modified_base 3: mod_base = OTHER; note = 2'-O-methyl ribonucleotide
  modified_base 21: mod_base = OTHER; note = 2'-O-methyl ribonucleotide
  modified_base 28: mod_base = OTHER; note = 2'-O-methyl ribonucleotide
  modified_base 29: mod_base = OTHER; note = 2'-O-methyl ribonucleotide
  modified_base 30: mod_base = OTHER; note = 2'-O-methyl ribonucleotide
  modified_base 31: mod_base = OTHER; note = 2'-O-methyl ribonucleotide
  modified_base 32: mod_base = OTHER; note = 2'-O-methyl ribonucleotide
  modified_base 33: mod_base = OTHER; note = 2'-O-methyl ribonucleotide
  modified_base 34: mod_base = OTHER; note = 2'-O-methyl ribonucleotide
  modified_base 35: mod_base = OTHER; note = 2'-O-methyl ribonucleotide
  modified_base 36: mod_base = OTHER; note = 2'-O-methyl ribonucleotide
  modified_base 37: mod_base = OTHER; note = 2'-O-methyl ribonucleotide
  modified_base 38: mod_base = OTHER; note = 2'-O-methyl ribonucleotide
  modified_base 39: mod_base = OTHER; note = 2'-O-methyl ribonucleotide
  modified_base 40: mod_base = OTHER; note = 2'-O-methyl ribonucleotide
  modified_base 41: mod_base = OTHER; note = 2'-O-methyl ribonucleotide
  modified_base 42: mod_base = OTHER; note = 2'-O-methyl ribonucleotide
  modified_base 46: mod_base = OTHER; note = 2'-O-methyl ribonucleotide
  modified_base 48: mod_base = OTHER; note = 2'-O-methyl ribonucleotide
  modified_base 50: mod_base = OTHER; note = 2'-O-methyl ribonucleotide
  modified_base 52: mod_base = OTHER; note = 2'-O-methyl ribonucleotide
  modified_base 53: mod_base = OTHER; note = 2'-O-methyl ribonucleotide
  modified_base 54: mod_base = OTHER; note = 2'-O-methyl ribonucleotide
  modified_base 55: mod_base = OTHER; note = 2'-O-methyl ribonucleotide
  modified_base 56: mod_base = OTHER; note = 2'-O-methyl ribonucleotide
  modified_base 57: mod_base = OTHER; note = 2'-O-methyl ribonucleotide
  modified_base 60: mod_base = OTHER; note = 2'-O-methyl ribonucleotide
  modified_base 61: mod_base = OTHER; note = 2'-O-methyl ribonucleotide
  modified_base 66: mod_base = OTHER; note = 2'-O-methyl ribonucleotide
  modified_base 67: mod_base = OTHER; note = 2'-O-methyl ribonucleotide
  modified_base 70: mod_base = OTHER; note = 2'-O-methyl ribonucleotide
  modified_base 71: mod_base = OTHER; note = 2'-O-methyl ribonucleotide
  modified_base 72: mod_base = OTHER; note = 2'-O-methyl ribonucleotide
  modified_base 73: mod_base = OTHER; note = 2'-O-methyl ribonucleotide
  modified_base 74: mod_base = OTHER; note = 2'-O-methyl ribonucleotide
  modified_base 75: mod_base = OTHER; note = 2'-O-methyl ribonucleotide
  modified_base 76: mod_base = OTHER; note = 2'-O-methyl ribonucleotide
  modified_base 77: mod_base = OTHER; note = 2'-O-methyl ribonucleotide
  modified_base 78: mod_base = OTHER; note = 2'-O-methyl ribonucleotide
  modified_base 79: mod_base = OTHER; note = 2'-O-methyl ribonucleotide
  modified_base 80: mod_base = OTHER; note = 2'-O-methyl ribonucleotide
  modified_base 81: mod_base = OTHER; note = 2'-O-methyl ribonucleotide
  modified_base 83: mod_base = OTHER; note = 2'-O-methyl ribonucleotide
  modified_base 84: mod_base = OTHER; note = 2'-O-methyl ribonucleotide
  modified_base 85: mod_base = OTHER; note = 2'-O-methyl ribonucleotide
  modified_base 86: mod_base = OTHER; note = 2'-O-methyl ribonucleotide
  modified_base 87: mod_base = OTHER; note = 2'-O-methyl ribonucleotide
  modified_base 88: mod_base = OTHER; note = 2'-O-methyl ribonucleotide
  modified_base 89: mod_base = OTHER; note = 2'-O-methyl ribonucleotide
  modified_base 90: mod_base = OTHER; note = 2'-O-methyl ribonucleotide
  modified_base 91: mod_base = OTHER; note = 2'-O-methyl ribonucleotide
  modified_base 92: mod_base = OTHER; note = 2'-O-methyl ribonucleotide
  modified_base 93: mod_base = OTHER; note = 2'-O-methyl ribonucleotide
  modified_base 94: mod_base = OTHER; note = 2'-O-methyl ribonucleotide
  modified_base 95: mod_base = OTHER; note = 2'-O-methyl ribonucleotide
  modified_base 96: mod_base = OTHER; note = 2'-O-methyl ribonucleotide
  modified_base 97: mod_base = OTHER; note = 2'-O-methyl ribonucleotide
  modified_base 98: mod_base = OTHER; note = 2'-O-methyl ribonucleotide
  modified_base 99: mod_base = OTHER; note = 2'-O-methyl ribonucleotide
  modified_base 100: mod_base = OTHER; note = 2'-O-methyl ribonucleotide
  modified_base 1..3: mod_base = OTHER; note = phosphorothioate linkage
  modified_base 25..26: mod_base = OTHER; note = phosphorothioate linkage
  modified_base 64..65: mod_base = OTHER; note = phosphorothioate linkage
  modified_base 97..100: mod_base = OTHER; note = phosphorothioate linkage

SEQ ID NO: 2610 - RNA, 103 nt, synthetic construct; identical to SEQ ID NO: 1699
  source 1..103: mol_type = other RNA
  modified_base 1: mod_base = OTHER; note = 2'-O-methyl ribonucleotide
  modified_base 2: mod_base = OTHER; note = 2'-O-methyl ribonucleotide
  modified_base 3: mod_base = OTHER; note = 2'-O-methyl ribonucleotide
  modified_base 21: mod_base = OTHER; note = 2'-O-methyl ribonucleotide
  modified_base 28: mod_base = OTHER; note = 2'-O-methyl ribonucleotide
  modified_base 29: mod_base = OTHER; note = 2'-O-methyl ribonucleotide
  modified_base 30: mod_base = OTHER; note = 2'-O-methyl ribonucleotide
  modified_base 31: mod_base = OTHER; note = 2'-O-methyl ribonucleotide
  modified_base 32: mod_base = OTHER; note = 2'-O-methyl ribonucleotide
  modified_base 34: mod_base = OTHER; note = 2'-O-methyl ribonucleotide
  modified_base 35: mod_base = OTHER; note = 2'-O-methyl ribonucleotide
  modified_base 36: mod_base = OTHER; note = 2'-O-methyl ribonucleotide
  modified_base 37: mod_base = OTHER; note = 2'-O-methyl ribonucleotide
  modified_base 38: mod_base = OTHER; note = 2'-O-methyl ribonucleotide
  modified_base 39: mod_base = OTHER; note = 2'-O-methyl ribonucleotide
  modified_base 40: mod_base = OTHER; note = 2'-O-methyl ribonucleotide
  modified_base 41: mod_base = OTHER; note = 2'-O-methyl ribonucleotide
  modified_base 42: mod_base = OTHER; note = 2'-O-methyl ribonucleotide
  modified_base 46: mod_base = OTHER; note = 2'-O-methyl ribonucleotide
  modified_base 48: mod_base = OTHER; note = 2'-O-methyl ribonucleotide
  modified_base 50: mod_base = OTHER; note = 2'-O-methyl ribonucleotide
  modified_base 52: mod_base = OTHER; note = 2'-O-methyl ribonucleotide
  modified_base 53: mod_base = OTHER; note = 2'-O-methyl ribonucleotide
  modified_base 54: mod_base = OTHER; note = 2'-O-methyl ribonucleotide
  modified_base 55: mod_base = OTHER; note = 2'-O-methyl ribonucleotide
  modified_base 56: mod_base = OTHER; note = 2'-O-methyl ribonucleotide
  modified_base 57: mod_base = OTHER; note = 2'-O-methyl ribonucleotide
  modified_base 60: mod_base = OTHER; note = 2'-O-methyl ribonucleotide
  modified_base 61: mod_base = OTHER; note = 2'-O-methyl ribonucleotide
  modified_base 66: mod_base = OTHER; note = 2'-O-methyl ribonucleotide
  modified_base 67: mod_base = OTHER; note = 2'-O-methyl ribonucleotide
  modified_base 70: mod_base = OTHER; note = 2'-O-methyl ribonucleotide
  modified_base 71: mod_base = OTHER; note = 2'-O-methyl ribonucleotide
  modified_base 72: mod_base = OTHER; note = 2'-O-methyl ribonucleotide
  modified_base 74: mod_base = OTHER; note = 2'-O-methyl ribonucleotide
  modified_base 75: mod_base = OTHER; note = 2'-O-methyl ribonucleotide
  modified_base 76: mod_base = OTHER; note = 2'-O-methyl ribonucleotide
  modified_base 77: mod_base = OTHER; note = 2'-O-methyl ribonucleotide
  modified_base 78: mod_base = OTHER; note = 2'-O-methyl ribonucleotide
  modified_base 79: mod_base = OTHER; note = 2'-O-methyl ribonucleotide
  modified_base 80: mod_base = OTHER; note = 2'-O-methyl ribonucleotide
  modified_base 81: mod_base = OTHER; note = 2'-O-methyl ribonucleotide
  modified_base 83: mod_base = OTHER; note = 2'-O-methyl ribonucleotide
  modified_base 84: mod_base = OTHER; note = 2'-O-methyl ribonucleotide
  modified_base 85: mod_base = OTHER; note = 2'-O-methyl ribonucleotide
  modified_base 86: mod_base = OTHER; note = 2'-O-methyl ribonucleotide
  modified_base 87: mod_base = OTHER; note = 2'-O-methyl ribonucleotide
  modified_base 88: mod_base = OTHER; note = 2'-O-methyl ribonucleotide
  modified_base 89: mod_base = OTHER; note = 2'-O-methyl ribonucleotide
  modified_base 90: mod_base = OTHER; note = 2'-O-methyl ribonucleotide
  modified_base 91: mod_base = OTHER; note = 2'-O-methyl ribonucleotide
  modified_base 92: mod_base = OTHER; note = 2'-O-methyl ribonucleotide
  modified_base 93: mod_base = OTHER; note = 2'-O-methyl ribonucleotide
  modified_base 94: mod_base = OTHER; note = 2'-O-methyl ribonucleotide
  modified_base 95: mod_base = OTHER; note = 2'-O-methyl ribonucleotide
  modified_base 96: mod_base = OTHER; note = 2'-O-methyl ribonucleotide
  modified_base 97: mod_base = OTHER; note = 2'-O-methyl ribonucleotide
  modified_base 98: mod_base = OTHER; note = 2'-O-methyl ribonucleotide
  modified_base 99: mod_base = OTHER; note = 2'-O-methyl ribonucleotide
  modified_base 100: mod_base = OTHER; note = 2'-O-methyl ribonucleotide
  modified_base 1..3: mod_base = OTHER; note = phosphorothioate linkage
  modified_base 25..26: mod_base = OTHER; note = phosphorothioate linkage
  modified_base 64..65: mod_base = OTHER; note = phosphorothioate linkage
  modified_base 97..100: mod_base = OTHER; note = phosphorothioate linkage

SEQ ID NO: 2611 - RNA, 103 nt, synthetic construct; identical to SEQ ID NO: 1700
  source 1..103: mol_type = other RNA
  modified_base 1: mod_base = OTHER; note = 2'-O-methyl ribonucleotide
  modified_base 2: mod_base = OTHER; note = 2'-O-methyl ribonucleotide
  modified_base 3: mod_base = OTHER; note = 2'-O-methyl ribonucleotide
  modified_base 21: mod_base = OTHER; note = 2'-O-methyl ribonucleotide
  modified_base 28: mod_base = OTHER; note = 2'-O-methyl ribonucleotide
  modified_base 29: mod_base = OTHER; note = 2'-O-methyl ribonucleotide
  modified_base 30: mod_base = OTHER; note = 2'-O-methyl ribonucleotide
  modified_base 31: mod_base = OTHER; note = 2'-O-methyl ribonucleotide
  modified_base 32: mod_base = OTHER; note = 2'-O-methyl ribonucleotide
  modified_base 33: mod_base = OTHER; note = 2'-O-methyl ribonucleotide
  modified_base 34: mod_base = OTHER; note = 2'-O-methyl ribonucleotide
  modified_base 35: mod_base = OTHER; note = 2'-O-methyl ribonucleotide
  modified_base 36: mod_base = OTHER; note = 2'-O-methyl ribonucleotide
  modified_base 37: mod_base = OTHER; note = 2'-O-methyl ribonucleotide
  modified_base 38: mod_base = OTHER; note = 2'-O-methyl ribonucleotide
  modified_base 39: mod_base = OTHER; note = 2'-O-methyl ribonucleotide
  modified_base 40: mod_base = OTHER; note = 2'-O-methyl ribonucleotide
  modified_base 41: mod_base = OTHER; note = 2'-O-methyl ribonucleotide
  modified_base 42: mod_base = OTHER; note = 2'-O-methyl ribonucleotide
  modified_base 46: mod_base = OTHER; note = 2'-O-methyl ribonucleotide
  modified_base 48: mod_base = OTHER; note = 2'-O-methyl ribonucleotide
  modified_base 50: mod_base = OTHER; note = 2'-O-methyl ribonucleotide
  modified_base 52: mod_base = OTHER; note = 2'-O-methyl ribonucleotide
  modified_base 53: mod_base = OTHER; note = 2'-O-methyl ribonucleotide
  modified_base 54: mod_base = OTHER; note = 2'-O-methyl ribonucleotide
  modified_base 57: mod_base = OTHER; note = 2'-O-methyl ribonucleotide
  modified_base 61: mod_base = OTHER; note = 2'-O-methyl ribonucleotide
  modified_base 66: mod_base = OTHER; note = 2'-O-methyl ribonucleotide
  modified_base 67: mod_base = OTHER; note = 2'-O-methyl ribonucleotide
  modified_base 70: mod_base = OTHER; note = 2'-O-methyl ribonucleotide
  modified_base 71: mod_base = OTHER; note = 2'-O-methyl ribonucleotide
  modified_base 72: mod_base = OTHER; note = 2'-O-methyl ribonucleotide
  modified_base 74: mod_base = OTHER; note = 2'-O-methyl ribonucleotide
  modified_base 75: mod_base = OTHER; note = 2'-O-methyl ribonucleotide
  modified_base 76: mod_base = OTHER; note = 2'-O-methyl ribonucleotide
  modified_base 77: mod_base = OTHER; note = 2'-O-methyl ribonucleotide
  modified_base 78: mod_base = OTHER; note = 2'-O-methyl ribonucleotide
  modified_base 79: mod_base = OTHER; note = 2'-O-methyl ribonucleotide
  modified_base 80: mod_base = OTHER; note = 2'-O-methyl ribonucleotide
  modified_base 82: mod_base = OTHER; note = 2'-O-methyl ribonucleotide
  modified_base 83: mod_base = OTHER; note = 2'-O-methyl ribonucleotide
  modified_base 84: mod_base = OTHER; note = 2'-O-methyl ribonucleotide
  modified_base 85: mod_base = OTHER; note = 2'-O-methyl ribonucleotide
  modified_base 86: mod_base = OTHER; note = 2'-O-methyl ribonucleotide
  modified_base 87: mod_base = OTHER; note = 2'-O-methyl ribonucleotide
  modified_base 89: mod_base = OTHER; note = 2'-O-methyl ribonucleotide
  modified_base 92: mod_base = OTHER; note = 2'-O-methyl ribonucleotide
  modified_base 93: mod_base = OTHER; note = 2'-O-methyl ribonucleotide
  modified_base 94: mod_base = OTHER; note = 2'-O-methyl ribonucleotide
  modified_base 95: mod_base = OTHER; note = 2'-O-methyl ribonucleotide
  modified_base 96: mod_base = OTHER; note = 2'-O-methyl ribonucleotide
  modified_base 97: mod_base = OTHER; note = 2'-O-methyl ribonucleotide
  modified_base 98: mod_base = OTHER; note = 2'-O-methyl ribonucleotide
  modified_base 99: mod_base = OTHER; note = 2'-O-methyl ribonucleotide
  modified_base 100: mod_base = OTHER; note = 2'-O-methyl ribonucleotide
  modified_base 1..3: mod_base = OTHER; note = phosphorothioate linkage
  modified_base 25..26: mod_base = OTHER; note = phosphorothioate linkage
  modified_base 64..65: mod_base = OTHER; note = phosphorothioate linkage
  modified_base 97..100: mod_base = OTHER; note = phosphorothioate linkage

SEQ ID NO: 2612 - RNA, 103 nt, synthetic construct; identical to SEQ ID NO: 1700
  source 1..103: mol_type = other RNA
  modified_base 1: mod_base = OTHER; note = 2'-O-methyl ribonucleotide
  modified_base 2: mod_base = OTHER; note = 2'-O-methyl ribonucleotide
  modified_base 3: mod_base = OTHER; note = 2'-O-methyl ribonucleotide
  modified_base 21: mod_base = OTHER; note = 2'-O-methyl ribonucleotide
  modified_base 28: mod_base = OTHER; note = 2'-O-methyl ribonucleotide
  modified_base 29: mod_base = OTHER; note = 2'-O-methyl ribonucleotide
  modified_base 30: mod_base = OTHER; note = 2'-O-methyl ribonucleotide
  modified_base 31: mod_base = OTHER; note = 2'-O-methyl ribonucleotide
  modified_base 32: mod_base = OTHER; note = 2'-O-methyl ribonucleotide
  modified_base 33: mod_base = OTHER; note = 2'-O-methyl ribonucleotide
  modified_base 34: mod_base = OTHER; note = 2'-O-methyl ribonucleotide
  modified_base 35: mod_base = OTHER; note = 2'-O-methyl ribonucleotide
  modified_base 36: mod_base = OTHER; note = 2'-O-methyl ribonucleotide
  modified_base 37: mod_base = OTHER; note = 2'-O-methyl ribonucleotide
  modified_base 38: mod_base = OTHER; note = 2'-O-methyl ribonucleotide
  modified_base 39: mod_base = OTHER; note = 2'-O-methyl ribonucleotide
  modified_base 40: mod_base = OTHER; note = 2'-O-methyl ribonucleotide
  modified_base 41: mod_base = OTHER; note = 2'-O-methyl ribonucleotide
  modified_base 42: mod_base = OTHER; note = 2'-O-methyl ribonucleotide
  modified_base 46: mod_base = OTHER; note = 2'-O-methyl ribonucleotide
  modified_base 48: mod_base = OTHER; note = 2'-O-methyl ribonucleotide
  modified_base 50: mod_base = OTHER; note = 2'-O-methyl ribonucleotide
  modified_base 52: mod_base = OTHER; note = 2'-O-methyl ribonucleotide
  modified_base 53: mod_base = OTHER; note = 2'-O-methyl ribonucleotide
  modified_base 54: mod_base = OTHER; note = 2'-O-methyl ribonucleotide
  modified_base 55: mod_base = OTHER; note = 2'-O-methyl ribonucleotide
  modified_base 56: mod_base = OTHER; note = 2'-O-methyl ribonucleotide
  modified_base 57: mod_base = OTHER; note = 2'-O-methyl ribonucleotide
  modified_base 60: mod_base = OTHER; note = 2'-O-methyl ribonucleotide
  modified_base 61: mod_base = OTHER; note = 2'-O-methyl ribonucleotide
  modified_base 66: mod_base = OTHER; note = 2'-O-methyl ribonucleotide
  modified_base 67: mod_base = OTHER; note = 2'-O-methyl ribonucleotide
  modified_base 70: mod_base = OTHER; note = 2'-O-methyl ribonucleotide
  modified_base 71: mod_base = OTHER; note = 2'-O-methyl ribonucleotide
  modified_base 72: mod_base = OTHER; note = 2'-O-methyl ribonucleotide
  modified_base 74: mod_base = OTHER; note = 2'-O-methyl ribonucleotide
  modified_base 75: mod_base = OTHER; note = 2'-O-methyl ribonucleotide
  modified_base 76: mod_base = OTHER; note = 2'-O-methyl ribonucleotide
  modified_base 77: mod_base = OTHER; note = 2'-O-methyl ribonucleotide
  modified_base 78: mod_base = OTHER; note = 2'-O-methyl ribonucleotide
  modified_base 79: mod_base = OTHER; note = 2'-O-methyl ribonucleotide
  modified_base 80: mod_base = OTHER; note = 2'-O-methyl ribonucleotide
  modified_base 82: mod_base = OTHER; note = 2'-O-methyl ribonucleotide
  modified_base 83: mod_base = OTHER; note = 2'-O-methyl ribonucleotide
  modified_base 84: mod_base = OTHER; note = 2'-O-methyl ribonucleotide
  modified_base 85: mod_base = OTHER; note = 2'-O-methyl ribonucleotide
  modified_base 86: mod_base = OTHER; note = 2'-O-methyl ribonucleotide
  modified_base 87: mod_base = OTHER; note = 2'-O-methyl ribonucleotide
  modified_base 89: mod_base = OTHER; note = 2'-O-methyl ribonucleotide
  modified_base 92: mod_base = OTHER; note = 2'-O-methyl ribonucleotide
  modified_base 93: mod_base = OTHER; note = 2'-O-methyl ribonucleotide
  modified_base 94: mod_base = OTHER; note = 2'-O-methyl ribonucleotide
  modified_base 95: mod_base = OTHER; note = 2'-O-methyl ribonucleotide
  modified_base 96: mod_base = OTHER; note = 2'-O-methyl ribonucleotide
  modified_base 97: mod_base = OTHER; note = 2'-O-methyl ribonucleotide
  modified_base 98: mod_base = OTHER; note = 2'-O-methyl ribonucleotide
  modified_base 99: mod_base = OTHER; note = 2'-O-methyl ribonucleotide
  modified_base 100: mod_base = OTHER; note = 2'-O-methyl ribonucleotide
  modified_base 1..3: mod_base = OTHER; note = phosphorothioate linkage
  modified_base 25..26: mod_base = OTHER; note = phosphorothioate linkage
  modified_base 64..65: mod_base = OTHER; note = phosphorothioate linkage
  modified_base 97..100: mod_base = OTHER; note = phosphorothioate linkage

SEQ ID NO: 2613 - RNA, 103 nt, synthetic construct; identical to SEQ ID NO: 1700
  source 1..103: mol_type = other RNA
  modified_base 1: mod_base = OTHER; note = 2'-O-methyl ribonucleotide
  modified_base 2: mod_base = OTHER; note = 2'-O-methyl ribonucleotide
  modified_base 3: mod_base = OTHER; note = 2'-O-methyl ribonucleotide
  modified_base 21: mod_base = OTHER; note = 2'-O-methyl ribonucleotide
  modified_base 28: mod_base = OTHER; note = 2'-O-methyl ribonucleotide
  modified_base 29: mod_base = OTHER; note = 2'-O-methyl ribonucleotide
  modified_base 30: mod_base = OTHER; note = 2'-O-methyl ribonucleotide
  modified_base 31: mod_base = OTHER; note = 2'-O-methyl ribonucleotide
  modified_base 32: mod_base = OTHER; note = 2'-O-methyl ribonucleotide
  modified_base 33: mod_base = OTHER; note = 2'-O-methyl ribonucleotide
  modified_base 34: mod_base = OTHER; note = 2'-O-methyl ribonucleotide
  modified_base 35: mod_base = OTHER; note = 2'-O-methyl ribonucleotide
  modified_base 36: mod_base = OTHER; note = 2'-O-methyl ribonucleotide
  modified_base 37: mod_base = OTHER; note = 2'-O-methyl ribonucleotide
  modified_base 38: mod_base = OTHER; note = 2'-O-methyl ribonucleotide
  modified_base 39: mod_base = OTHER; note = 2'-O-methyl ribonucleotide
  modified_base 40: mod_base = OTHER; note = 2'-O-methyl ribonucleotide
  modified_base 41: mod_base = OTHER; note = 2'-O-methyl ribonucleotide
  modified_base 42: mod_base = OTHER; note = 2'-O-methyl ribonucleotide
  modified_base 46: mod_base = OTHER; note = 2'-O-methyl ribonucleotide
  modified_base 48: mod_base = OTHER; note = 2'-O-methyl ribonucleotide
  modified_base 50: mod_base = OTHER; note = 2'-O-methyl ribonucleotide
  modified_base 52: mod_base = OTHER; note = 2'-O-methyl ribonucleotide
  modified_base 53: mod_base = OTHER; note = 2'-O-methyl ribonucleotide
  modified_base 54: mod_base = OTHER; note = 2'-O-methyl ribonucleotide
  modified_base 57: mod_base = OTHER; note = 2'-O-methyl ribonucleotide
  modified_base 61: mod_base = OTHER; note = 2'-O-methyl ribonucleotide
  modified_base 66: mod_base = OTHER; note = 2'-O-methyl ribonucleotide
  modified_base 67: mod_base = OTHER; note = 2'-O-methyl ribonucleotide
  modified_base 70: mod_base = OTHER; note = 2'-O-methyl ribonucleotide
  modified_base 71: mod_base = OTHER; note = 2'-O-methyl ribonucleotide
  modified_base 72: mod_base = OTHER; note = 2'-O-methyl ribonucleotide
  modified_base 73: mod_base = OTHER; note = 2'-O-methyl ribonucleotide
  modified_base 74: mod_base = OTHER; note = 2'-O-methyl ribonucleotide
  modified_base 75: mod_base = OTHER; note = 2'-O-methyl ribonucleotide
  modified_base 76: mod_base = OTHER; note = 2'-O-methyl ribonucleotide
  modified_base 77: mod_base = OTHER; note = 2'-O-methyl ribonucleotide
  modified_base 78: mod_base = OTHER; note = 2'-O-methyl ribonucleotide
  modified_base 79: mod_base = OTHER; note = 2'-O-methyl ribonucleotide
  modified_base 80: mod_base = OTHER; note = 2'-O-methyl ribonucleotide
  modified_base 82: mod_base = OTHER; note = 2'-O-methyl ribonucleotide
  modified_base 83: mod_base = OTHER; note = 2'-O-methyl ribonucleotide
  modified_base 84: mod_base = OTHER; note = 2'-O-methyl ribonucleotide
  modified_base 85: mod_base = OTHER; note = 2'-O-methyl ribonucleotide
  modified_base 86: mod_base = OTHER; note = 2'-O-methyl ribonucleotide
  modified_base 87: mod_base = OTHER; note = 2'-O-methyl ribonucleotide
  modified_base 89: mod_base = OTHER; note = 2'-O-methyl ribonucleotide
  modified_base 92: mod_base = OTHER; note = 2'-O-methyl ribonucleotide
  modified_base 93: mod_base = OTHER; note = 2'-O-methyl ribonucleotide
  modified_base 94: mod_base = OTHER; note = 2'-O-methyl ribonucleotide
  modified_base 95: mod_base = OTHER; note = 2'-O-methyl ribonucleotide
  modified_base 96: mod_base = OTHER; note = 2'-O-methyl ribonucleotide
  modified_base 97: mod_base = OTHER; note = 2'-O-methyl ribonucleotide
  modified_base 98: mod_base = OTHER; note = 2'-O-methyl ribonucleotide
  modified_base 99: mod_base = OTHER; note = 2'-O-methyl ribonucleotide
  modified_base 100: mod_base = OTHER; note = 2'-O-methyl ribonucleotide
  modified_base 1..3: mod_base = OTHER; note = phosphorothioate linkage
  modified_base 25..26: mod_base = OTHER; note = phosphorothioate linkage
  modified_base 64..65: mod_base = OTHER; note = phosphorothioate linkage
  modified_base 97..100: mod_base = OTHER; note = phosphorothioate linkage

SEQ ID NO: 2614 - RNA, 103 nt, synthetic construct; identical to SEQ ID NO: 1700
  source 1..103: mol_type = other RNA
  modified_base 1: mod_base = OTHER; note = 2'-O-methyl ribonucleotide
  modified_base 2: mod_base = OTHER; note = 2'-O-methyl ribonucleotide
  modified_base 3: mod_base = OTHER; note = 2'-O-methyl ribonucleotide
  modified_base 21: mod_base = OTHER; note = 2'-O-methyl ribonucleotide
  modified_base 28: mod_base = OTHER; note = 2'-O-methyl ribonucleotide
  modified_base 29: mod_base = OTHER; note = 2'-O-methyl ribonucleotide
  modified_base 30: mod_base = OTHER; note = 2'-O-methyl ribonucleotide
  modified_base 31: mod_base = OTHER; note = 2'-O-methyl ribonucleotide
  modified_base 32: mod_base = OTHER; note = 2'-O-methyl ribonucleotide
  modified_base 33: mod_base = OTHER; note = 2'-O-methyl ribonucleotide
  modified_base 34: mod_base = OTHER; note = 2'-O-methyl ribonucleotide
  modified_base 35: mod_base = OTHER; note = 2'-O-methyl ribonucleotide
  modified_base 36: mod_base = OTHER; note = 2'-O-methyl ribonucleotide
  modified_base 37: mod_base = OTHER; note = 2'-O-methyl ribonucleotide
  modified_base 38: mod_base = OTHER; note = 2'-O-methyl ribonucleotide
  modified_base 39: mod_base = OTHER; note = 2'-O-methyl ribonucleotide
  modified_base 40: mod_base = OTHER; note = 2'-O-methyl ribonucleotide
  modified_base 41: mod_base = OTHER; note = 2'-O-methyl ribonucleotide
  modified_base 42: mod_base = OTHER; note = 2'-O-methyl ribonucleotide
  modified_base 46: mod_base = OTHER; note = 2'-O-methyl ribonucleotide
  modified_base 48: mod_base = OTHER; note = 2'-O-methyl ribonucleotide
  modified_base 50: mod_base = OTHER; note = 2'-O-methyl ribonucleotide
  modified_base 52: mod_base = OTHER; note = 2'-O-methyl ribonucleotide
  modified_base 53: mod_base = OTHER; note = 2'-O-methyl ribonucleotide
  modified_base 54: mod_base = OTHER; note = 2'-O-methyl ribonucleotide
  modified_base 57: mod_base = OTHER; note = 2'-O-methyl ribonucleotide
  modified_base 61: mod_base = OTHER; note = 2'-O-methyl ribonucleotide
  modified_base 66: mod_base = OTHER; note = 2'-O-methyl ribonucleotide
  modified_base 67: mod_base = OTHER; note = 2'-O-methyl ribonucleotide
  modified_base 70: mod_base = OTHER; note = 2'-O-methyl ribonucleotide
  modified_base 71: mod_base = OTHER; note = 2'-O-methyl ribonucleotide
  modified_base 72: mod_base = OTHER; note = 2'-O-methyl ribonucleotide
  modified_base 73: mod_base = OTHER; note = 2'-O-methyl ribonucleotide
  modified_base 74: mod_base = OTHER; note = 2'-O-methyl ribonucleotide
  modified_base 75: mod_base = OTHER; note = 2'-O-methyl ribonucleotide
  modified_base 76: mod_base = OTHER; note = 2'-O-methyl ribonucleotide
  modified_base 77: mod_base = OTHER; note = 2'-O-methyl ribonucleotide
  modified_base 78: mod_base = OTHER; note = 2'-O-methyl ribonucleotide
  modified_base 79: mod_base = OTHER; note = 2'-O-methyl ribonucleotide
  modified_base 80: mod_base = OTHER; note = 2'-O-methyl ribonucleotide
  modified_base 82: mod_base = OTHER; note = 2'-O-methyl ribonucleotide
  modified_base 83: mod_base = OTHER; note = 2'-O-methyl ribonucleotide
  modified_base 84: mod_base = OTHER; note = 2'-O-methyl ribonucleotide
  modified_base 85: mod_base = OTHER; note = 2'-O-methyl ribonucleotide
  modified_base 86: mod_base = OTHER; note = 2'-O-methyl ribonucleotide
  modified_base 87: mod_base = OTHER; note = 2'-O-methyl ribonucleotide
  modified_base 89: mod_base = OTHER; note = 2'-O-methyl ribonucleotide
  modified_base 91: mod_base = OTHER; note = 2'-O-methyl ribonucleotide
  modified_base 92: mod_base = OTHER; note = 2'-O-methyl ribonucleotide
  modified_base 93: mod_base = OTHER; note = 2'-O-methyl ribonucleotide
  modified_base 94: mod_base = OTHER; note = 2'-O-methyl ribonucleotide
  modified_base 95: mod_base = OTHER; note = 2'-O-methyl ribonucleotide
  modified_base 96: mod_base = OTHER; note = 2'-O-methyl ribonucleotide
  modified_base 97: mod_base = OTHER; note = 2'-O-methyl ribonucleotide
  modified_base 98: mod_base = OTHER; note = 2'-O-methyl ribonucleotide
  modified_base 99: mod_base = OTHER; note = 2'-O-methyl ribonucleotide
  modified_base 100: mod_base = OTHER; note = 2'-O-methyl ribonucleotide
  modified_base 1..3: mod_base = OTHER; note = phosphorothioate linkage
  modified_base 25..26: mod_base = OTHER; note = phosphorothioate linkage
  modified_base 64..65: mod_base = OTHER; note = phosphorothioate linkage
  modified_base 97..100: mod_base = OTHER; note = phosphorothioate linkage

SEQ ID NO: 2615 - RNA, 103 nt, synthetic construct; identical to SEQ ID NO: 1700
  source 1..103: mol_type = other RNA
  modified_base 1: mod_base = OTHER; note = 2'-O-methyl ribonucleotide
  modified_base 2: mod_base = OTHER; note = 2'-O-methyl ribonucleotide
  modified_base 3: mod_base = OTHER; note = 2'-O-methyl ribonucleotide
  modified_base 21: mod_base = OTHER; note = 2'-O-methyl ribonucleotide
  modified_base 28: mod_base = OTHER; note = 2'-O-methyl ribonucleotide
  modified_base 29: mod_base = OTHER; note = 2'-O-methyl ribonucleotide
  modified_base 30: mod_base = OTHER; note = 2'-O-methyl ribonucleotide
  modified_base 31: mod_base = OTHER; note = 2'-O-methyl ribonucleotide
  modified_base 32: mod_base = OTHER; note = 2'-O-methyl ribonucleotide
  modified_base 34: mod_base = OTHER; note = 2'-O-methyl ribonucleotide
  modified_base 35: mod_base = OTHER; note = 2'-O-methyl ribonucleotide
  modified_base 36: mod_base = OTHER; note = 2'-O-methyl ribonucleotide
  modified_base 37: mod_base = OTHER; note = 2'-O-methyl ribonucleotide
  modified_base 38: mod_base = OTHER; note = 2'-O-methyl ribonucleotide
  modified_base 39: mod_base = OTHER; note = 2'-O-methyl ribonucleotide
  modified_base 40: mod_base = OTHER; note = 2'-O-methyl ribonucleotide
  modified_base 41: mod_base = OTHER; note = 2'-O-methyl ribonucleotide
  modified_base 42: mod_base = OTHER; note = 2'-O-methyl ribonucleotide
  modified_base 46: mod_base = OTHER; note = 2'-O-methyl ribonucleotide
  modified_base 48: mod_base = OTHER; note = 2'-O-methyl ribonucleotide
  modified_base 50: mod_base = OTHER; note = 2'-O-methyl ribonucleotide
  modified_base 52: mod_base = OTHER; note = 2'-O-methyl ribonucleotide
  modified_base 53: mod_base = OTHER; note = 2'-O-methyl ribonucleotide
  modified_base 54: mod_base = OTHER; note = 2'-O-methyl ribonucleotide
  modified_base 57: mod_base = OTHER; note = 2'-O-methyl ribonucleotide
  modified_base 61: mod_base = OTHER; note = 2'-O-methyl ribonucleotide
  modified_base 66: mod_base = OTHER; note = 2'-O-methyl ribonucleotide
  modified_base 67: mod_base = OTHER; note = 2'-O-methyl ribonucleotide
  modified_base 70: mod_base = OTHER; note = 2'-O-methyl ribonucleotide
  modified_base 71: mod_base = OTHER; note = 2'-O-methyl ribonucleotide
  modified_base 72: mod_base = OTHER; note = 2'-O-methyl ribonucleotide
  modified_base 73: mod_base = OTHER; note = 2'-O-methyl ribonucleotide
  modified_base 74: mod_base = OTHER; note = 2'-O-methyl ribonucleotide
  modified_base 75: mod_base = OTHER; note = 2'-O-methyl ribonucleotide
  modified_base 76: mod_base = OTHER; note = 2'-O-methyl ribonucleotide
  modified_base 77: mod_base = OTHER; note = 2'-O-methyl ribonucleotide
  modified_base 78: mod_base = OTHER; note = 2'-O-methyl ribonucleotide
  modified_base 79: mod_base = OTHER; note = 2'-O-methyl ribonucleotide
  modified_base 80: mod_base = OTHER; note = 2'-O-methyl ribonucleotide
  modified_base 82: mod_base = OTHER; note = 2'-O-methyl ribonucleotide
  modified_base 83: mod_base = OTHER; note = 2'-O-methyl ribonucleotide
  modified_base 84: mod_base = OTHER; note = 2'-O-methyl ribonucleotide
  modified_base 85: mod_base = OTHER; note = 2'-O-methyl ribonucleotide
  modified_base 86: mod_base = OTHER; note = 2'-O-methyl ribonucleotide
  modified_base 87: mod_base = OTHER; note = 2'-O-methyl ribonucleotide
  modified_base 89: mod_base = OTHER; note = 2'-O-methyl ribonucleotide
  modified_base 92: mod_base = OTHER; note = 2'-O-methyl ribonucleotide
  modified_base 93: mod_base = OTHER; note = 2'-O-methyl ribonucleotide
  modified_base 94: mod_base = OTHER; note = 2'-O-methyl ribonucleotide
  modified_base 95: mod_base = OTHER; note = 2'-O-methyl ribonucleotide
  modified_base 96: mod_base = OTHER; note = 2'-O-methyl ribonucleotide
  modified_base 97: mod_base = OTHER; note = 2'-O-methyl ribonucleotide
  modified_base 98: mod_base = OTHER; note = 2'-O-methyl ribonucleotide
  modified_base 99: mod_base = OTHER; note = 2'-O-methyl ribonucleotide
  modified_base 100: mod_base = OTHER; note = 2'-O-methyl ribonucleotide
  modified_base 1..3: mod_base = OTHER; note = phosphorothioate linkage
  modified_base 25..26: mod_base = OTHER; note = phosphorothioate linkage
  modified_base 64..65: mod_base = OTHER; note = phosphorothioate linkage
  modified_base 97..100: mod_base = OTHER; note = phosphorothioate linkage

SEQ ID NO: 2616 - RNA, 103 nt, synthetic construct; identical to SEQ ID NO: 1700
  source 1..103: mol_type = other RNA
  modified_base 1: mod_base = OTHER; note = 2'-O-methyl ribonucleotide
  modified_base 2: mod_base = OTHER; note = 2'-O-methyl ribonucleotide
  modified_base 3: mod_base = OTHER; note = 2'-O-methyl ribonucleotide
  modified_base 21: mod_base = OTHER; note = 2'-O-methyl ribonucleotide
  modified_base 28: mod_base = OTHER; note = 2'-O-methyl ribonucleotide
  modified_base 29: mod_base = OTHER; note = 2'-O-methyl ribonucleotide
  modified_base 30: mod_base = OTHER; note = 2'-O-methyl ribonucleotide
  modified_base 31: mod_base = OTHER; note = 2'-O-methyl ribonucleotide
  modified_base 32: mod_base = OTHER; note = 2'-O-methyl ribonucleotide
  modified_base 34: mod_base = OTHER; note = 2'-O-methyl ribonucleotide
  modified_base 35: mod_base = OTHER; note = 2'-O-methyl ribonucleotide
  modified_base 36: mod_base = OTHER; note = 2'-O-methyl ribonucleotide
  modified_base 37: mod_base = OTHER; note = 2'-O-methyl ribonucleotide
  modified_base 38: mod_base = OTHER; note = 2'-O-methyl ribonucleotide
  modified_base 39: mod_base = OTHER; note = 2'-O-methyl ribonucleotide
  modified_base 40: mod_base = OTHER; note = 2'-O-methyl ribonucleotide
  modified_base 41: mod_base = OTHER; note = 2'-O-methyl ribonucleotide
  modified_base 42: mod_base = OTHER; note = 2'-O-methyl ribonucleotide
  modified_base 46: mod_base = OTHER; note = 2'-O-methyl ribonucleotide
  modified_base 48: mod_base = OTHER; note = 2'-O-methyl ribonucleotide
  modified_base 50: mod_base = OTHER; note = 2'-O-methyl ribonucleotide
  modified_base 52: mod_base = OTHER; note = 2'-O-methyl ribonucleotide
  modified_base 53: mod_base = OTHER; note = 2'-O-methyl ribonucleotide
  modified_base 54: mod_base = OTHER; note = 2'-O-methyl ribonucleotide
  modified_base 57: mod_base = OTHER; note = 2'-O-methyl ribonucleotide
  modified_base 61: mod_base = OTHER; note = 2'-O-methyl ribonucleotide
  modified_base 66: mod_base = OTHER; note = 2'-O-methyl ribonucleotide
  modified_base 67: mod_base = OTHER; note = 2'-O-methyl ribonucleotide
  modified_base 70: mod_base = OTHER; note = 2'-O-methyl ribonucleotide
  modified_base 71: mod_base = OTHER; note = 2'-O-methyl ribonucleotide
  modified_base 72: mod_base = OTHER; note = 2'-O-methyl ribonucleotide
  modified_base 73: mod_base = OTHER; note = 2'-O-methyl ribonucleotide
  modified_base 74: mod_base = OTHER; note = 2'-O-methyl ribonucleotide
  modified_base 75: mod_base = OTHER; note = 2'-O-methyl ribonucleotide
  modified_base 76: mod_base = OTHER; note = 2'-O-methyl ribonucleotide
  modified_base 77: mod_base = OTHER; note = 2'-O-methyl ribonucleotide
  modified_base 78: mod_base = OTHER; note = 2'-O-methyl ribonucleotide
  modified_base 79: mod_base = OTHER; note = 2'-O-methyl ribonucleotide
  modified_base 80: mod_base = OTHER; note = 2'-O-methyl ribonucleotide
  modified_base 82: mod_base = OTHER; note = 2'-O-methyl ribonucleotide
  modified_base 83: mod_base = OTHER; note = 2'-O-methyl ribonucleotide
  modified_base 84: mod_base = OTHER; note = 2'-O-methyl ribonucleotide
  modified_base 85: mod_base = OTHER; note = 2'-O-methyl ribonucleotide
  modified_base 86: mod_base = OTHER; note = 2'-O-methyl ribonucleotide
  modified_base 87: mod_base = OTHER; note = 2'-O-methyl ribonucleotide
  modified_base 89: mod_base = OTHER; note = 2'-O-methyl ribonucleotide
  modified_base 91: mod_base = OTHER; note = 2'-O-methyl ribonucleotide
  modified_base 92: mod_base = OTHER; note = 2'-O-methyl ribonucleotide
  modified_base 93: mod_base = OTHER; note = 2'-O-methyl ribonucleotide
  modified_base 94: mod_base = OTHER; note = 2'-O-methyl ribonucleotide
  modified_base 95: mod_base = OTHER; note = 2'-O-methyl ribonucleotide
  modified_base 96: mod_base = OTHER; note = 2'-O-methyl ribonucleotide
  modified_base 97: mod_base = OTHER; note = 2'-O-methyl ribonucleotide
  modified_base 98: mod_base = OTHER; note = 2'-O-methyl ribonucleotide
  modified_base 99: mod_base = OTHER; note = 2'-O-methyl ribonucleotide
  modified_base 100: mod_base = OTHER; note = 2'-O-methyl ribonucleotide
  modified_base 1..3: mod_base = OTHER; note = phosphorothioate linkage
  modified_base 25..26: mod_base = OTHER; note = phosphorothioate linkage
  modified_base 64..65: mod_base = OTHER; note = phosphorothioate linkage
  modified_base 97..100: mod_base = OTHER; note = phosphorothioate linkage

SEQ ID NO: 2617 - RNA, 103 nt, synthetic construct; identical to SEQ ID NO: 1700
  source 1..103: mol_type = other RNA
  modified_base 1: mod_base = OTHER; note = 2'-O-methyl ribonucleotide
  modified_base 2: mod_base = OTHER; note = 2'-O-methyl ribonucleotide
  modified_base 3: mod_base = OTHER; note = 2'-O-methyl ribonucleotide
  modified_base 21: mod_base = OTHER; note = 2'-O-methyl ribonucleotide
  modified_base 28: mod_base = OTHER; note = 2'-O-methyl ribonucleotide
  modified_base 29: mod_base = OTHER; note = 2'-O-methyl ribonucleotide
  modified_base 30: mod_base = OTHER; note = 2'-O-methyl ribonucleotide
  modified_base 31: mod_base = OTHER; note = 2'-O-methyl ribonucleotide
  modified_base 32: mod_base = OTHER; note = 2'-O-methyl ribonucleotide
  modified_base 34: mod_base = OTHER; note = 2'-O-methyl ribonucleotide
  modified_base 35: mod_base = OTHER; note = 2'-O-methyl ribonucleotide
  modified_base 36: mod_base = OTHER; note = 2'-O-methyl ribonucleotide
  modified_base 37: mod_base = OTHER; note = 2'-O-methyl ribonucleotide
  modified_base 38: mod_base = OTHER; note = 2'-O-methyl ribonucleotide
  modified_base 39: mod_base = OTHER; note = 2'-O-methyl ribonucleotide
  modified_base 40: mod_base = OTHER; note = 2'-O-methyl ribonucleotide
  modified_base 41: mod_base = OTHER; note = 2'-O-methyl ribonucleotide
  modified_base 42: mod_base = OTHER; note = 2'-O-methyl ribonucleotide
  modified_base 46: mod_base = OTHER; note = 2'-O-methyl ribonucleotide
  modified_base 48: mod_base = OTHER; note = 2'-O-methyl ribonucleotide
  modified_base 50: mod_base = OTHER; note = 2'-O-methyl ribonucleotide
  modified_base 52: mod_base = OTHER; note = 2'-O-methyl ribonucleotide
  modified_base 53: mod_base = OTHER; note = 2'-O-methyl ribonucleotide
  modified_base 54: mod_base = OTHER; note = 2'-O-methyl ribonucleotide
  modified_base 55: mod_base = OTHER; note = 2'-O-methyl ribonucleotide
  modified_base 56: mod_base = OTHER; note = 2'-O-methyl ribonucleotide
  modified_base 57: mod_base = OTHER; note = 2'-O-methyl ribonucleotide
  modified_base 60: mod_base = OTHER; note = 2'-O-methyl ribonucleotide
  modified_base 61: mod_base = OTHER; note = 2'-O-methyl ribonucleotide
  modified_base 66: mod_base = OTHER; note = 2'-O-methyl ribonucleotide
  modified_base 67: mod_base = OTHER; note = 2'-O-methyl ribonucleotide
  modified_base 70: mod_base = OTHER; note = 2'-O-methyl ribonucleotide
  modified_base 71: mod_base = OTHER; note = 2'-O-methyl ribonucleotide
  modified_base 72: mod_base = OTHER; note = 2'-O-methyl ribonucleotide
  modified_base 74: mod_base = OTHER; note = 2'-O-methyl ribonucleotide
  modified_base 75: mod_base = OTHER; note = 2'-O-methyl ribonucleotide
  modified_base 76: mod_base = OTHER; note = 2'-O-methyl ribonucleotide
  modified_base 77: mod_base = OTHER; note = 2'-O-methyl ribonucleotide
  modified_base 78: mod_base = OTHER; note = 2'-O-methyl ribonucleotide
  modified_base 79: mod_base = OTHER; note = 2'-O-methyl ribonucleotide
  modified_base 80: mod_base = OTHER; note = 2'-O-methyl ribonucleotide
  modified_base 82: mod_base = OTHER; note = 2'-O-methyl ribonucleotide
  modified_base 83: mod_base = OTHER; note = 2'-O-methyl ribonucleotide
  modified_base 84: mod_base = OTHER; note = 2'-O-methyl ribonucleotide
  modified_base 85: mod_base = OTHER; note = 2'-O-methyl ribonucleotide
  modified_base 86: mod_base = OTHER; note = 2'-O-methyl ribonucleotide
  modified_base 87: mod_base = OTHER; note = 2'-O-methyl ribonucleotide
  modified_base 89: mod_base = OTHER; note = 2'-O-methyl ribonucleotide
  modified_base 92: mod_base = OTHER; note = 2'-O-methyl ribonucleotide
  modified_base 93: mod_base = OTHER; note = 2'-O-methyl ribonucleotide
  modified_base 94: mod_base = OTHER; note = 2'-O-methyl ribonucleotide
  modified_base 95: mod_base = OTHER; note = 2'-O-methyl ribonucleotide
  modified_base 96: mod_base = OTHER; note = 2'-O-methyl ribonucleotide
  modified_base 97: mod_base = OTHER; note = 2'-O-methyl ribonucleotide
  modified_base 98: mod_base = OTHER; note = 2'-O-methyl ribonucleotide
  modified_base 99: mod_base = OTHER; note = 2'-O-methyl ribonucleotide
  modified_base 100: mod_base = OTHER; note = 2'-O-methyl ribonucleotide
  modified_base 1..3: mod_base = OTHER; note = phosphorothioate linkage
  modified_base 25..26: mod_base = OTHER; note = phosphorothioate linkage
  modified_base 64..65: mod_base = OTHER; note = phosphorothioate linkage
  modified_base 97..100: mod_base = OTHER; note = phosphorothioate linkage

SEQ ID NO: 2618 - RNA, 103 nt, synthetic construct; identical to SEQ ID NO: 1643
  source 1..103: mol_type = other RNA
  modified_base 1: mod_base = OTHER; note = 2'-O-methyl ribonucleotide
  modified_base 2: mod_base = OTHER; note = 2'-O-methyl ribonucleotide
  modified_base 3: mod_base = OTHER; note = 2'-O-methyl ribonucleotide
  modified_base 21: mod_base = OTHER; note = 2'-O-methyl ribonucleotide
  modified_base 28: mod_base = OTHER; note = 2'-O-methyl ribonucleotide
  modified_base 29: mod_base = OTHER; note = 2'-O-methyl ribonucleotide
  modified_base 30: mod_base = OTHER; note = 2'-O-methyl ribonucleotide
  modified_base 31: mod_base = OTHER; note = 2'-O-methyl ribonucleotide
  modified_base 32: mod_base = OTHER; note = 2'-O-methyl ribonucleotide
  modified_base 33: mod_base = OTHER; note = 2'-O-methyl ribonucleotide
  modified_base 34: mod_base = OTHER; note = 2'-O-methyl ribonucleotide
  modified_base 35: mod_base = OTHER; note = 2'-O-methyl ribonucleotide
  modified_base 36: mod_base = OTHER; note = 2'-O-methyl ribonucleotide
  modified_base 37: mod_base = OTHER; note = 2'-O-methyl ribonucleotide
  modified_base 38: mod_base = OTHER; note = 2'-O-methyl ribonucleotide
  modified_base 39: mod_base = OTHER; note = 2'-O-methyl ribonucleotide
  modified_base 40: mod_base = OTHER; note = 2'-O-methyl ribonucleotide
  modified_base 41: mod_base = OTHER; note = 2'-O-methyl ribonucleotide
  modified_base 42: mod_base = OTHER; note = 2'-O-methyl ribonucleotide
  modified_base 46: mod_base = OTHER; note = 2'-O-methyl ribonucleotide
  modified_base 48: mod_base = OTHER; note = 2'-O-methyl ribonucleotide
  modified_base 50: mod_base = OTHER; note = 2'-O-methyl ribonucleotide
  modified_base 52: mod_base = OTHER; note = 2'-O-methyl ribonucleotide
  modified_base 53: mod_base = OTHER; note = 2'-O-methyl ribonucleotide
  modified_base 54: mod_base = OTHER; note = 2'-O-methyl ribonucleotide
  modified_base 55: mod_base = OTHER; note = 2'-O-methyl ribonucleotide
  modified_base 56: mod_base = OTHER; note = 2'-O-methyl ribonucleotide
  modified_base 57: mod_base = OTHER; note = 2'-O-methyl ribonucleotide
  modified_base 60: mod_base = OTHER; note = 2'-O-methyl ribonucleotide
  modified_base 61: mod_base = OTHER; note = 2'-O-methyl ribonucleotide
  modified_base 66: mod_base = OTHER; note = 2'-O-methyl ribonucleotide
  modified_base 67: mod_base = OTHER; note = 2'-O-methyl ribonucleotide
  modified_base 70: mod_base = OTHER; note = 2'-O-methyl ribonucleotide
  modified_base 71: mod_base = OTHER; note = 2'-O-methyl ribonucleotide
  modified_base 72: mod_base = OTHER; note = 2'-O-methyl ribonucleotide
  modified_base 73: mod_base = OTHER; note = 2'-O-methyl ribonucleotide
  modified_base 74: mod_base = OTHER; note = 2'-O-methyl ribonucleotide
  modified_base 75: mod_base = OTHER; note = 2'-O-methyl ribonucleotide
  modified_base 76: mod_base = OTHER; note = 2'-O-methyl ribonucleotide
  modified_base 77: mod_base = OTHER; note = 2'-O-methyl ribonucleotide
  modified_base 78: mod_base = OTHER; note = 2'-O-methyl ribonucleotide
  modified_base 79: mod_base = OTHER; note = 2'-O-methyl ribonucleotide
  modified_base 80: mod_base = OTHER; note = 2'-O-methyl ribonucleotide
  modified_base 81: mod_base = OTHER; note = 2'-O-methyl ribonucleotide
  modified_base 83: mod_base = OTHER; note = 2'-O-methyl ribonucleotide
  modified_base 84: mod_base = OTHER; note = 2'-O-methyl ribonucleotide
  modified_base 85: mod_base = OTHER; note = 2'-O-methyl ribonucleotide
  modified_base 86: mod_base = OTHER; note = 2'-O-methyl ribonucleotide
  modified_base 87: mod_base = OTHER; note = 2'-O-methyl ribonucleotide
  modified_base 88: mod_base = OTHER; note = 2'-O-methyl ribonucleotide
  modified_base 89: mod_base = OTHER; note = 2'-O-methyl ribonucleotide
  modified_base 90: mod_base = OTHER; note = 2'-O-methyl ribonucleotide
  modified_base 91: mod_base = OTHER; note = 2'-O-methyl ribonucleotide
  modified_base 92: mod_base = OTHER; note = 2'-O-methyl ribonucleotide
  modified_base 93: mod_base = OTHER; note = 2'-O-methyl ribonucleotide
  modified_base 94: mod_base = OTHER; note = 2'-O-methyl ribonucleotide
  modified_base 95: mod_base = OTHER; note = 2'-O-methyl ribonucleotide
  modified_base 96: mod_base = OTHER; note = 2'-O-methyl ribonucleotide
  modified_base 97: mod_base = OTHER; note = 2'-O-methyl ribonucleotide
  modified_base 98: mod_base = OTHER; note = 2'-O-methyl ribonucleotide
  modified_base 99: mod_base = OTHER; note = 2'-O-methyl ribonucleotide
  modified_base 100: mod_base = OTHER; note = 2'-O-methyl ribonucleotide
  modified_base 1..3: mod_base = OTHER; note = phosphorothioate linkage
  modified_base 25..26: mod_base = OTHER; note = phosphorothioate linkage
  modified_base 45..46: mod_base = OTHER; note = phosphorothioate linkage
  modified_base 64..65: mod_base = OTHER; note = phosphorothioate linkage
  modified_base 97..100: mod_base = OTHER; note = phosphorothioate linkage

SEQ ID NO: 2619 - RNA, 103 nt, synthetic construct; identical to SEQ ID NO: 1643
  source 1..103: mol_type = other RNA
  modified_base 1: mod_base = OTHER; note = 2'-O-methyl ribonucleotide
  modified_base 2: mod_base = OTHER; note = 2'-O-methyl ribonucleotide
  modified_base 3: mod_base = OTHER; note = 2'-O-methyl ribonucleotide
  modified_base 21: mod_base = OTHER; note = 2'-O-methyl ribonucleotide
  modified_base 28: mod_base = OTHER; note = 2'-O-methyl ribonucleotide
  modified_base 29: mod_base = OTHER; note = 2'-O-methyl ribonucleotide
  modified_base 30: mod_base = OTHER; note = 2'-O-methyl ribonucleotide
  modified_base 31: mod_base = OTHER; note = 2'-O-methyl ribonucleotide
  modified_base 32: mod_base = OTHER; note = 2'-O-methyl ribonucleotide
  modified_base 34: mod_base = OTHER; note = 2'-O-methyl ribonucleotide
  modified_base 35: mod_base = OTHER; note = 2'-O-methyl ribonucleotide
  modified_base 36: mod_base = OTHER; note = 2'-O-methyl ribonucleotide
  modified_base 37: mod_base = OTHER; note = 2'-O-methyl ribonucleotide
  modified_base 38: mod_base = OTHER; note = 2'-O-methyl ribonucleotide
  modified_base 39: mod_base = OTHER; note = 2'-O-methyl ribonucleotide
  modified_base 40: mod_base = OTHER; note = 2'-O-methyl ribonucleotide
  modified_base 41: mod_base = OTHER; note = 2'-O-methyl ribonucleotide
  modified_base 42: mod_base = OTHER; note = 2'-O-methyl ribonucleotide
  modified_base 46: mod_base = OTHER; note = 2'-O-methyl ribonucleotide
  modified_base 48: mod_base = OTHER; note = 2'-O-methyl ribonucleotide
  modified_base 50: mod_base = OTHER; note = 2'-O-methyl ribonucleotide
  modified_base 52: mod_base = OTHER; note = 2'-O-methyl ribonucleotide
  modified_base 53: mod_base = OTHER; note = 2'-O-methyl ribonucleotide
  modified_base 54: mod_base = OTHER; note = 2'-O-methyl ribonucleotide
  modified_base 55: mod_base = OTHER; note = 2'-O-methyl ribonucleotide
  modified_base 56: mod_base = OTHER; note = 2'-O-methyl ribonucleotide
  modified_base 57: mod_base = OTHER; note = 2'-O-methyl ribonucleotide
  modified_base 60: mod_base = OTHER; note = 2'-O-methyl ribonucleotide
  modified_base 61: mod_base = OTHER; note = 2'-O-methyl ribonucleotide
  modified_base 66: mod_base = OTHER; note = 2'-O-methyl ribonucleotide
  modified_base 67: mod_base = OTHER; note = 2'-O-methyl ribonucleotide
  modified_base 70: mod_base = OTHER; note = 2'-O-methyl ribonucleotide
  modified_base 71: mod_base = OTHER; note = 2'-O-methyl ribonucleotide
  modified_base 72: mod_base = OTHER; note = 2'-O-methyl ribonucleotide
  modified_base 74: mod_base = OTHER; note = 2'-O-methyl ribonucleotide
  modified_base 75: mod_base = OTHER; note = 2'-O-methyl ribonucleotide
  modified_base 76: mod_base = OTHER; note = 2'-O-methyl ribonucleotide
  modified_base 77: mod_base = OTHER; note = 2'-O-methyl ribonucleotide
  modified_base 78: mod_base = OTHER; note = 2'-O-methyl ribonucleotide
  modified_base 79: mod_base = OTHER; note = 2'-O-methyl ribonucleotide
  modified_base 80: mod_base = OTHER; note = 2'-O-methyl ribonucleotide
  modified_base 81: mod_base = OTHER; note = 2'-O-methyl ribonucleotide
  modified_base 83: mod_base = OTHER; note = 2'-O-methyl ribonucleotide
  modified_base 84: mod_base = OTHER; note = 2'-O-methyl ribonucleotide
  modified_base 85: mod_base = OTHER; note = 2'-O-methyl ribonucleotide
  modified_base 86: mod_base = OTHER; note = 2'-O-methyl ribonucleotide
  modified_base 87: mod_base = OTHER; note = 2'-O-methyl ribonucleotide
  modified_base 88: mod_base = OTHER; note = 2'-O-methyl ribonucleotide
  modified_base 89: mod_base = OTHER; note = 2'-O-methyl ribonucleotide
  modified_base 90: mod_base = OTHER; note = 2'-O-methyl ribonucleotide
  modified_base 91: mod_base = OTHER; note = 2'-O-methyl ribonucleotide
  modified_base 92: mod_base = OTHER; note = 2'-O-methyl ribonucleotide
  modified_base 93: mod_base = OTHER; note = 2'-O-methyl ribonucleotide
  modified_base 94: mod_base = OTHER; note = 2'-O-methyl ribonucleotide
  modified_base 95: mod_base = OTHER; note = 2'-O-methyl ribonucleotide
  modified_base 96: mod_base = OTHER; note = 2'-O-methyl ribonucleotide
  modified_base 97: mod_base = OTHER; note = 2'-O-methyl ribonucleotide
  modified_base 98: mod_base = OTHER; note = 2'-O-methyl ribonucleotide
  modified_base 99: mod_base = OTHER; note = 2'-O-methyl ribonucleotide
  modified_base 100: mod_base = OTHER; note = 2'-O-methyl ribonucleotide
  modified_base 1..3: mod_base = OTHER; note = phosphorothioate linkage
  modified_base 25..26: mod_base = OTHER; note = phosphorothioate linkage
  modified_base 45..46: mod_base = OTHER; note = phosphorothioate linkage
  modified_base 64..65: mod_base = OTHER; note = phosphorothioate linkage
  modified_base 97..100: mod_base = OTHER; note = phosphorothioate linkage

SEQ ID NO: 2620 - RNA, 103 nt, synthetic construct; identical to SEQ ID NO: 1699
  source 1..103: mol_type = other RNA
  modified_base 1: mod_base = OTHER; note = 2'-O-methyl ribonucleotide
  modified_base 2: mod_base = OTHER; note = 2'-O-methyl ribonucleotide
  modified_base 3: mod_base = OTHER; note = 2'-O-methyl ribonucleotide
  modified_base 21: mod_base = OTHER; note = 2'-O-methyl ribonucleotide
  modified_base 28: mod_base = OTHER; note = 2'-O-methyl ribonucleotide
  modified_base 29: mod_base = OTHER; note = 2'-O-methyl ribonucleotide
  modified_base 30: mod_base = OTHER; note = 2'-O-methyl ribonucleotide
  modified_base 31: mod_base = OTHER; note = 2'-O-methyl ribonucleotide
  modified_base 32: mod_base = OTHER; note = 2'-O-methyl ribonucleotide
  modified_base 34: mod_base = OTHER; note = 2'-O-methyl ribonucleotide
  modified_base 35: mod_base = OTHER; note = 2'-O-methyl ribonucleotide
  modified_base 36: mod_base = OTHER; note = 2'-O-methyl ribonucleotide
  modified_base 37: mod_base = OTHER; note = 2'-O-methyl ribonucleotide
  modified_base 38: mod_base = OTHER; note = 2'-O-methyl ribonucleotide
  modified_base 39: mod_base = OTHER; note = 2'-O-methyl ribonucleotide
  modified_base 40: mod_base = OTHER; note = 2'-O-methyl ribonucleotide
  modified_base 41: mod_base = OTHER; note = 2'-O-methyl ribonucleotide
  modified_base 42: mod_base = OTHER; note = 2'-O-methyl ribonucleotide
  modified_base 46: mod_base = OTHER; note = 2'-O-methyl ribonucleotide
  modified_base 48: mod_base = OTHER; note = 2'-O-methyl ribonucleotide
  modified_base 50: mod_base = OTHER; note = 2'-O-methyl ribonucleotide
  modified_base 52: mod_base = OTHER; note = 2'-O-methyl ribonucleotide
  modified_base 53: mod_base = OTHER; note = 2'-O-methyl ribonucleotide
  modified_base 54: mod_base = OTHER; note = 2'-O-methyl ribonucleotide
  modified_base 55: mod_base = OTHER; note = 2'-O-methyl ribonucleotide
  modified_base 56: mod_base = OTHER; note = 2'-O-methyl ribonucleotide
  modified_base 57: mod_base = OTHER; note = 2'-O-methyl ribonucleotide
  modified_base 60: mod_base = OTHER; note = 2'-O-methyl ribonucleotide
  modified_base 61: mod_base = OTHER; note = 2'-O-methyl ribonucleotide
  modified_base 66: mod_base = OTHER; note = 2'-O-methyl ribonucleotide
  modified_base 67: mod_base = OTHER; note = 2'-O-methyl ribonucleotide
  modified_base 70: mod_base = OTHER; note = 2'-O-methyl ribonucleotide
  modified_base 71: mod_base = OTHER; note = 2'-O-methyl ribonucleotide
  modified_base 72: mod_base = OTHER; note = 2'-O-methyl ribonucleotide
  modified_base 74: mod_base = OTHER; note = 2'-O-methyl ribonucleotide
  modified_base 75: mod_base = OTHER; note = 2'-O-methyl ribonucleotide
  modified_base 76: mod_base = OTHER; note = 2'-O-methyl ribonucleotide
  modified_base 77: mod_base = OTHER; note = 2'-O-methyl ribonucleotide
  modified_base 78: mod_base = OTHER; note = 2'-O-methyl ribonucleotide
  modified_base 79: mod_base = OTHER; note = 2'-O-methyl ribonucleotide
  modified_base 80: mod_base = OTHER; note = 2'-O-methyl ribonucleotide
  modified_base 81: mod_base = OTHER; note = 2'-O-methyl ribonucleotide
  modified_base 83: mod_base = OTHER; note = 2'-O-methyl ribonucleotide
  modified_base 84: mod_base = OTHER; note = 2'-O-methyl ribonucleotide
  modified_base 85: mod_base = OTHER; note = 2'-O-methyl ribonucleotide
  modified_base 86: mod_base = OTHER; note = 2'-O-methyl ribonucleotide
  modified_base 87: mod_base = OTHER; note = 2'-O-methyl ribonucleotide
  modified_base 88: mod_base = OTHER; note = 2'-O-methyl ribonucleotide
  modified_base 89: mod_base = OTHER; note = 2'-O-methyl ribonucleotide
  modified_base 90: mod_base = OTHER; note = 2'-O-methyl ribonucleotide
  modified_base 91: mod_base = OTHER; note = 2'-O-methyl ribonucleotide
  modified_base 92: mod_base = OTHER; note = 2'-O-methyl ribonucleotide
  modified_base 93: mod_base = OTHER; note = 2'-O-methyl ribonucleotide
  modified_base 94: mod_base = OTHER; note = 2'-O-methyl ribonucleotide
  modified_base 95: mod_base = OTHER; note = 2'-O-methyl ribonucleotide
  modified_base 96: mod_base = OTHER; note = 2'-O-methyl ribonucleotide
  modified_base 97: mod_base = OTHER; note = 2'-O-methyl ribonucleotide
  modified_base 98: mod_base = OTHER; note = 2'-O-methyl ribonucleotide
  modified_base 99: mod_base = OTHER; note = 2'-O-methyl ribonucleotide
  modified_base 100: mod_base = OTHER; note = 2'-O-methyl ribonucleotide
  modified_base 1..3: mod_base = OTHER; note = phosphorothioate linkage
  modified_base 25..26: mod_base = OTHER; note = phosphorothioate linkage
  modified_base 45..46: mod_base = OTHER; note = phosphorothioate linkage
  modified_base 64..65: mod_base = OTHER; note = phosphorothioate linkage
  modified_base 97..100: mod_base = OTHER; note = phosphorothioate linkage

SEQ ID NO: 2621 - RNA, 103 nt, synthetic construct; identical to SEQ ID NO: 1700
  source 1..103: mol_type = other RNA
  modified_base 1: mod_base = OTHER; note = 2'-O-methyl ribonucleotide
  modified_base 2: mod_base = OTHER; note = 2'-O-methyl ribonucleotide
  modified_base 3: mod_base = OTHER; note = 2'-O-methyl ribonucleotide
  modified_base 21: mod_base = OTHER; note = 2'-O-methyl ribonucleotide
  modified_base 28: mod_base = OTHER; note = 2'-O-methyl ribonucleotide
  modified_base 29: mod_base = OTHER; note = 2'-O-methyl ribonucleotide
  modified_base 30: mod_base = OTHER; note = 2'-O-methyl ribonucleotide
  modified_base 31: mod_base = OTHER; note = 2'-O-methyl ribonucleotide
  modified_base 32: mod_base = OTHER; note = 2'-O-methyl ribonucleotide
  modified_base 33: mod_base = OTHER; note = 2'-O-methyl ribonucleotide
  modified_base 34: mod_base = OTHER; note = 2'-O-methyl ribonucleotide
  modified_base 35: mod_base = OTHER; note = 2'-O-methyl ribonucleotide
  modified_base 36: mod_base = OTHER; note = 2'-O-methyl ribonucleotide
  modified_base 37: mod_base = OTHER; note = 2'-O-methyl ribonucleotide
  modified_base 38: mod_base = OTHER; note = 2'-O-methyl ribonucleotide
  modified_base 39: mod_base = OTHER; note = 2'-O-methyl ribonucleotide
  modified_base 40: mod_base = OTHER; note = 2'-O-methyl ribonucleotide
  modified_base 41: mod_base = OTHER; note = 2'-O-methyl ribonucleotide
  modified_base 42: mod_base = OTHER; note = 2'-O-methyl ribonucleotide
  modified_base 46: mod_base = OTHER; note = 2'-O-methyl ribonucleotide
  modified_base 48: mod_base = OTHER; note = 2'-O-methyl ribonucleotide
  modified_base 50: mod_base = OTHER; note = 2'-O-methyl ribonucleotide
  modified_base 52: mod_base = OTHER; note = 2'-O-methyl ribonucleotide
  modified_base 53: mod_base = OTHER; note = 2'-O-methyl ribonucleotide
  modified_base 54: mod_base = OTHER; note = 2'-O-methyl ribonucleotide
  modified_base 57: mod_base = OTHER; note = 2'-O-methyl ribonucleotide
  modified_base 61: mod_base = OTHER; note = 2'-O-methyl ribonucleotide
  modified_base 66: mod_base = OTHER; note = 2'-O-methyl ribonucleotide
  modified_base 67: mod_base = OTHER; note = 2'-O-methyl ribonucleotide
  modified_base 70: mod_base = OTHER; note = 2'-O-methyl ribonucleotide
  modified_base 71: mod_base = OTHER; note = 2'-O-methyl ribonucleotide
  modified_base 72: mod_base = OTHER; note = 2'-O-methyl ribonucleotide
  modified_base 74: mod_base = OTHER; note = 2'-O-methyl ribonucleotide
  modified_base 75: mod_base = OTHER; note = 2'-O-methyl ribonucleotide
  modified_base 76: mod_base = OTHER; note = 2'-O-methyl ribonucleotide
  modified_base 77: mod_base = OTHER; note = 2'-O-methyl ribonucleotide
  modified_base 78: mod_base = OTHER; note = 2'-O-methyl ribonucleotide
  modified_base 79: mod_base = OTHER; note = 2'-O-methyl ribonucleotide
  modified_base 80: mod_base = OTHER; note = 2'-O-methyl ribonucleotide
  modified_base 82: mod_base = OTHER; note = 2'-O-methyl ribonucleotide
  modified_base 83: mod_base = OTHER; note = 2'-O-methyl ribonucleotide
  modified_base 84: mod_base = OTHER; note = 2'-O-methyl ribonucleotide
  modified_base 85: mod_base = OTHER; note = 2'-O-methyl ribonucleotide
  modified_base 86: mod_base = OTHER; note = 2'-O-methyl ribonucleotide
  modified_base 87: mod_base = OTHER; note = 2'-O-methyl ribonucleotide
  modified_base 89: mod_base = OTHER; note = 2'-O-methyl ribonucleotide
  modified_base 92: mod_base = OTHER; note = 2'-O-methyl ribonucleotide
  modified_base 93: mod_base = OTHER; note = 2'-O-methyl ribonucleotide
  modified_base 94: mod_base = OTHER; note = 2'-O-methyl ribonucleotide
  modified_base 95: mod_base = OTHER; note = 2'-O-methyl ribonucleotide
  modified_base 96: mod_base = OTHER; note = 2'-O-methyl ribonucleotide
  modified_base 97: mod_base = OTHER; note = 2'-O-methyl ribonucleotide
  modified_base 98: mod_base = OTHER; note = 2'-O-methyl ribonucleotide
  modified_base 99: mod_base = OTHER; note = 2'-O-methyl ribonucleotide
  modified_base 100: mod_base = OTHER; note = 2'-O-methyl ribonucleotide
  modified_base 1..3: mod_base = OTHER; note = phosphorothioate linkage
  modified_base 25..26: mod_base = OTHER; note = phosphorothioate linkage
  modified_base 45..46: mod_base = OTHER; note = phosphorothioate linkage
  modified_base 64..65: mod_base = OTHER; note = phosphorothioate linkage
  modified_base 97..100: mod_base = OTHER; note = phosphorothioate linkage

SEQ ID NO: 2622 - RNA, 103 nt, synthetic construct; identical to SEQ ID NO: 1700
  source 1..103: mol_type = other RNA
  modified_base 1: mod_base = OTHER; note = 2'-O-methyl ribonucleotide
  modified_base 2: mod_base = OTHER; note = 2'-O-methyl ribonucleotide
  modified_base 3: mod_base = OTHER; note = 2'-O-methyl ribonucleotide
  modified_base 21: mod_base = OTHER; note = 2'-O-methyl ribonucleotide
  modified_base 28: mod_base = OTHER; note = 2'-O-methyl ribonucleotide
  modified_base 29: mod_base = OTHER; note = 2'-O-methyl ribonucleotide
  modified_base 30: mod_base = OTHER; note = 2'-O-methyl ribonucleotide
  modified_base 31: mod_base = OTHER; note = 2'-O-methyl ribonucleotide
  modified_base 32: mod_base = OTHER; note = 2'-O-methyl ribonucleotide
  modified_base 33: mod_base = OTHER; note = 2'-O-methyl ribonucleotide
  modified_base 34: mod_base = OTHER; note = 2'-O-methyl ribonucleotide
  modified_base 35: mod_base = OTHER; note = 2'-O-methyl ribonucleotide
  modified_base 36: mod_base = OTHER; note = 2'-O-methyl ribonucleotide
  modified_base 37: mod_base = OTHER; note = 2'-O-methyl ribonucleotide
  modified_base 38: mod_base = OTHER; note = 2'-O-methyl ribonucleotide
  modified_base 39: mod_base = OTHER; note = 2'-O-methyl ribonucleotide
  modified_base 40: mod_base = OTHER; note = 2'-O-methyl ribonucleotide
  modified_base 41: mod_base = OTHER; note = 2'-O-methyl ribonucleotide
  modified_base 42: mod_base = OTHER; note = 2'-O-methyl ribonucleotide
  modified_base 46: mod_base = OTHER; note = 2'-O-methyl ribonucleotide
  modified_base 48: mod_base = OTHER; note = 2'-O-methyl ribonucleotide
  modified_base 50: mod_base = OTHER; note = 2'-O-methyl ribonucleotide
  modified_base 52: mod_base = OTHER; note = 2'-O-methyl ribonucleotide
  modified_base 53: mod_base = OTHER; note = 2'-O-methyl ribonucleotide
  modified_base 54: mod_base = OTHER; note = 2'-O-methyl ribonucleotide
  modified_base 55: mod_base = OTHER; note = 2'-O-methyl ribonucleotide
  modified_base 56: mod_base = OTHER; note = 2'-O-methyl ribonucleotide
  modified_base 57: mod_base = OTHER; note = 2'-O-methyl ribonucleotide
  modified_base 60: mod_base = OTHER; note = 2'-O-methyl ribonucleotide
  modified_base 61: mod_base = OTHER; note = 2'-O-methyl ribonucleotide
  modified_base 66: mod_base = OTHER; note = 2'-O-methyl ribonucleotide
  modified_base 67: mod_base = OTHER; note = 2'-O-methyl ribonucleotide
  modified_base 70: mod_base = OTHER; note = 2'-O-methyl ribonucleotide
  modified_base 71: mod_base = OTHER; note = 2'-O-methyl ribonucleotide
  modified_base 72: mod_base = OTHER; note = 2'-O-methyl ribonucleotide
  modified_base 74: mod_base = OTHER; note = 2'-O-methyl ribonucleotide
  modified_base 75: mod_base = OTHER; note = 2'-O-methyl ribonucleotide
  modified_base 76: mod_base = OTHER; note = 2'-O-methyl ribonucleotide
  modified_base 77: mod_base = OTHER; note = 2'-O-methyl ribonucleotide
  modified_base 78: mod_base = OTHER; note = 2'-O-methyl ribonucleotide
  modified_base 79: mod_base = OTHER; note = 2'-O-methyl ribonucleotide
  modified_base 80: mod_base = OTHER; note = 2'-O-methyl ribonucleotide
  modified_base 82: mod_base = OTHER; note = 2'-O-methyl ribonucleotide
  modified_base 83: mod_base = OTHER; note = 2'-O-methyl ribonucleotide
  modified_base 84: mod_base = OTHER; note = 2'-O-methyl ribonucleotide
  modified_base 85: mod_base = OTHER; note = 2'-O-methyl ribonucleotide
  modified_base 86: mod_base = OTHER; note = 2'-O-methyl ribonucleotide
  modified_base 87: mod_base = OTHER; note = 2'-O-methyl ribonucleotide
  modified_base 89: mod_base = OTHER; note = 2'-O-methyl ribonucleotide
  modified_base 92: mod_base = OTHER; note = 2'-O-methyl ribonucleotide
  modified_base 93: mod_base = OTHER; note = 2'-O-methyl ribonucleotide
  modified_base 94: mod_base = OTHER; note = 2'-O-methyl ribonucleotide
  modified_base 95: mod_base = OTHER; note = 2'-O-methyl ribonucleotide
  modified_base 96: mod_base = OTHER; note = 2'-O-methyl ribonucleotide
  modified_base 97: mod_base = OTHER; note = 2'-O-methyl ribonucleotide
  modified_base 98: mod_base = OTHER; note = 2'-O-methyl ribonucleotide
  modified_base 99: mod_base = OTHER; note = 2'-O-methyl ribonucleotide
  modified_base 100: mod_base = OTHER; note = 2'-O-methyl ribonucleotide
  modified_base 1..3: mod_base = OTHER; note = phosphorothioate linkage
  modified_base 25..26: mod_base = OTHER; note = phosphorothioate linkage
  modified_base 45..46: mod_base = OTHER; note = phosphorothioate linkage
  modified_base 64..65: mod_base = OTHER; note = phosphorothioate linkage
  modified_base 97..100: mod_base = OTHER; note = phosphorothioate linkage

SEQ ID NO: 2623 - RNA, 103 nt, synthetic construct; identical to SEQ ID NO: 1700
  source 1..103: mol_type = other RNA
  modified_base 1: mod_base = OTHER; note = 2'-O-methyl ribonucleotide
  modified_base 2: mod_base = OTHER; note = 2'-O-methyl ribonucleotide
  modified_base 3: mod_base = OTHER; note = 2'-O-methyl ribonucleotide
  modified_base 21: mod_base = OTHER; note = 2'-O-methyl ribonucleotide
  modified_base 28: mod_base = OTHER; note = 2'-O-methyl ribonucleotide
  modified_base 29: mod_base = OTHER; note = 2'-O-methyl ribonucleotide
  modified_base 30: mod_base = OTHER; note = 2'-O-methyl ribonucleotide
  modified_base 31: mod_base = OTHER; note = 2'-O-methyl ribonucleotide
  modified_base 32: mod_base = OTHER; note = 2'-O-methyl ribonucleotide
  modified_base 33: mod_base = OTHER; note = 2'-O-methyl ribonucleotide
  modified_base 34: mod_base = OTHER; note = 2'-O-methyl ribonucleotide
  modified_base 35: mod_base = OTHER; note = 2'-O-methyl ribonucleotide
  modified_base 36: mod_base = OTHER; note = 2'-O-methyl ribonucleotide
  modified_base 37: mod_base = OTHER; note = 2'-O-methyl ribonucleotide
  modified_base 38: mod_base = OTHER; note = 2'-O-methyl ribonucleotide
  modified_base 39: mod_base = OTHER; note = 2'-O-methyl ribonucleotide
  modified_base 40: mod_base = OTHER; note = 2'-O-methyl ribonucleotide
  modified_base 41: mod_base = OTHER; note = 2'-O-methyl ribonucleotide
  modified_base 42: mod_base = OTHER; note = 2'-O-methyl ribonucleotide
  modified_base 46: mod_base = OTHER; note = 2'-O-methyl ribonucleotide
  modified_base 48: mod_base = OTHER; note = 2'-O-methyl ribonucleotide
  modified_base 50: mod_base = OTHER; note = 2'-O-methyl ribonucleotide
  modified_base 52: mod_base = OTHER; note = 2'-O-methyl ribonucleotide
  modified_base 53: mod_base = OTHER; note = 2'-O-methyl ribonucleotide
  modified_base 54: mod_base = OTHER; note = 2'-O-methyl ribonucleotide
  modified_base 57: mod_base = OTHER; note = 2'-O-methyl ribonucleotide
  modified_base 61: mod_base = OTHER; note = 2'-O-methyl ribonucleotide
  modified_base 66: mod_base = OTHER; note = 2'-O-methyl ribonucleotide
  modified_base 67: mod_base = OTHER; note = 2'-O-methyl ribonucleotide
  modified_base 70: mod_base = OTHER; note = 2'-O-methyl ribonucleotide
  modified_base 71: mod_base = OTHER; note = 2'-O-methyl ribonucleotide
  modified_base 72: mod_base = OTHER; note = 2'-O-methyl ribonucleotide
  modified_base 73: mod_base = OTHER; note = 2'-O-methyl ribonucleotide
  modified_base 74: mod_base = OTHER; note = 2'-O-methyl ribonucleotide
  modified_base 75: mod_base = OTHER; note = 2'-O-methyl ribonucleotide
  modified_base 76: mod_base = OTHER; note = 2'-O-methyl ribonucleotide
  modified_base 77: mod_base = OTHER; note = 2'-O-methyl ribonucleotide
  modified_base 78: mod_base = OTHER; note = 2'-O-methyl ribonucleotide
  modified_base 79: mod_base = OTHER; note = 2'-O-methyl ribonucleotide
  modified_base 80: mod_base = OTHER; note = 2'-O-methyl ribonucleotide
  modified_base 82: mod_base = OTHER; note = 2'-O-methyl ribonucleotide
  modified_base 83: mod_base = OTHER; note = 2'-O-methyl ribonucleotide
  modified_base 84: mod_base = OTHER; note = 2'-O-methyl ribonucleotide
  modified_base 85: mod_base = OTHER; note = 2'-O-methyl ribonucleotide
  modified_base 86: mod_base = OTHER; note = 2'-O-methyl ribonucleotide
  modified_base 87: mod_base = OTHER; note = 2'-O-methyl ribonucleotide
  modified_base 89: mod_base = OTHER; note = 2'-O-methyl ribonucleotide
  modified_base 92: mod_base = OTHER; note = 2'-O-methyl ribonucleotide
  modified_base 93: mod_base = OTHER; note = 2'-O-methyl ribonucleotide
  modified_base 94: mod_base = OTHER; note = 2'-O-methyl ribonucleotide
  modified_base 95: mod_base = OTHER; note = 2'-O-methyl ribonucleotide
  modified_base 96: mod_base = OTHER; note = 2'-O-methyl ribonucleotide
  modified_base 97: mod_base = OTHER; note = 2'-O-methyl ribonucleotide
  modified_base 98: mod_base = OTHER; note = 2'-O-methyl ribonucleotide
  modified_base 99: mod_base = OTHER; note = 2'-O-methyl ribonucleotide
  modified_base 100: mod_base = OTHER; note = 2'-O-methyl ribonucleotide
  modified_base 1..3: mod_base = OTHER; note = phosphorothioate linkage
  modified_base 25..26: mod_base = OTHER; note = phosphorothioate linkage
  modified_base 45..46: mod_base = OTHER; note = phosphorothioate linkage
  modified_base 64..65: mod_base = OTHER; note = phosphorothioate linkage
  modified_base 97..100: mod_base = OTHER; note = phosphorothioate linkage

SEQ ID NO: 2624 - RNA, 103 nt, synthetic construct; identical to SEQ ID NO: 1700
  source 1..103: mol_type = other RNA
  modified_base 1: mod_base = OTHER; note = 2'-O-methyl ribonucleotide
  modified_base 2: mod_base = OTHER; note = 2'-O-methyl ribonucleotide
  modified_base 3: mod_base = OTHER; note = 2'-O-methyl ribonucleotide
  modified_base 21: mod_base = OTHER; note = 2'-O-methyl ribonucleotide
  modified_base 28: mod_base = OTHER; note = 2'-O-methyl ribonucleotide
  modified_base 29: mod_base = OTHER; note = 2'-O-methyl ribonucleotide
  modified_base 30: mod_base = OTHER; note = 2'-O-methyl ribonucleotide
  modified_base 31: mod_base = OTHER; note = 2'-O-methyl ribonucleotide
  modified_base 32: mod_base = OTHER; note = 2'-O-methyl ribonucleotide
  modified_base 33: mod_base = OTHER; note = 2'-O-methyl ribonucleotide
  modified_base 34: mod_base = OTHER; note = 2'-O-methyl ribonucleotide
  modified_base 35: mod_base = OTHER; note = 2'-O-methyl ribonucleotide
  modified_base 36: mod_base = OTHER; note = 2'-O-methyl ribonucleotide
  modified_base 37: mod_base = OTHER; note = 2'-O-methyl ribonucleotide
  modified_base 38: mod_base = OTHER; note = 2'-O-methyl ribonucleotide
  modified_base 39: mod_base = OTHER; note = 2'-O-methyl ribonucleotide
  modified_base 40: mod_base = OTHER; note = 2'-O-methyl ribonucleotide
  modified_base 41: mod_base = OTHER; note = 2'-O-methyl ribonucleotide
  modified_base 42: mod_base = OTHER; note = 2'-O-methyl ribonucleotide
  modified_base 46: mod_base = OTHER; note = 2'-O-methyl ribonucleotide
  modified_base 48: mod_base = OTHER; note = 2'-O-methyl ribonucleotide
  modified_base 50: mod_base = OTHER; note = 2'-O-methyl ribonucleotide
  modified_base 52: mod_base = OTHER; note = 2'-O-methyl ribonucleotide
  modified_base 53: mod_base = OTHER; note = 2'-O-methyl ribonucleotide
  modified_base 54: mod_base = OTHER; note = 2'-O-methyl ribonucleotide
  modified_base 57: mod_base = OTHER; note = 2'-O-methyl ribonucleotide
  modified_base 61: mod_base = OTHER; note = 2'-O-methyl ribonucleotide
  modified_base 66: mod_base = OTHER; note = 2'-O-methyl ribonucleotide
  modified_base 67: mod_base = OTHER; note = 2'-O-methyl ribonucleotide
  modified_base 70: mod_base = OTHER; note = 2'-O-methyl ribonucleotide
  modified_base 71: mod_base = OTHER; note = 2'-O-methyl ribonucleotide
  modified_base 72: mod_base = OTHER; note = 2'-O-methyl ribonucleotide
  modified_base 73: mod_base = OTHER; note = 2'-O-methyl ribonucleotide
  modified_base 74: mod_base = OTHER; note = 2'-O-methyl ribonucleotide
  modified_base 75: mod_base = OTHER; note = 2'-O-methyl ribonucleotide
  modified_base 76: mod_base = OTHER; note = 2'-O-methyl ribonucleotide
  modified_base 77: mod_base = OTHER; note = 2'-O-methyl ribonucleotide
  modified_base 78: mod_base = OTHER; note = 2'-O-methyl ribonucleotide
  modified_base 79: mod_base = OTHER; note = 2'-O-methyl ribonucleotide
  modified_base 80: mod_base = OTHER; note = 2'-O-methyl ribonucleotide
  modified_base 82: mod_base = OTHER; note = 2'-O-methyl ribonucleotide
  modified_base 83: mod_base = OTHER; note = 2'-O-methyl ribonucleotide
  modified_base 84: mod_base = OTHER; note = 2'-O-methyl ribonucleotide
  modified_base 85: mod_base = OTHER; note = 2'-O-methyl ribonucleotide
  modified_base 86: mod_base = OTHER; note = 2'-O-methyl ribonucleotide
  modified_base 87: mod_base = OTHER; note = 2'-O-methyl ribonucleotide
  modified_base 89: mod_base = OTHER; note = 2'-O-methyl ribonucleotide
  modified_base 91: mod_base = OTHER; note = 2'-O-methyl ribonucleotide
  modified_base 92: mod_base = OTHER; note = 2'-O-methyl ribonucleotide
  modified_base 93: mod_base = OTHER; note = 2'-O-methyl ribonucleotide
  modified_base 94: mod_base = OTHER; note = 2'-O-methyl ribonucleotide
  modified_base 95: mod_base = OTHER; note = 2'-O-methyl ribonucleotide
  modified_base 96: mod_base = OTHER; note = 2'-O-methyl ribonucleotide
  modified_base 97: mod_base = OTHER; note = 2'-O-methyl ribonucleotide
  modified_base 98: mod_base = OTHER; note = 2'-O-methyl ribonucleotide
  modified_base 99: mod_base = OTHER; note = 2'-O-methyl ribonucleotide
  modified_base 100: mod_base = OTHER; note = 2'-O-methyl ribonucleotide
  modified_base 1..3: mod_base = OTHER; note = phosphorothioate linkage
  modified_base 25..26: mod_base = OTHER; note = phosphorothioate linkage
  modified_base 45..46: mod_base = OTHER; note = phosphorothioate linkage
  modified_base 64..65: mod_base = OTHER; note = phosphorothioate linkage
  modified_base 97..100: mod_base = OTHER; note = phosphorothioate linkage

SEQ ID NO: 2625 - RNA, 103 nt, synthetic construct; identical to SEQ ID NO: 1700
  source 1..103: mol_type = other RNA
  modified_base 1: mod_base = OTHER; note = 2'-O-methyl ribonucleotide
  modified_base 2: mod_base = OTHER; note = 2'-O-methyl ribonucleotide
  modified_base 3: mod_base = OTHER; note = 2'-O-methyl ribonucleotide
  modified_base 21: mod_base = OTHER; note = 2'-O-methyl ribonucleotide
  modified_base 28: mod_base = OTHER; note = 2'-O-methyl ribonucleotide
  modified_base 29: mod_base = OTHER; note = 2'-O-methyl ribonucleotide
  modified_base 30: mod_base = OTHER; note = 2'-O-methyl ribonucleotide
  modified_base 31: mod_base = OTHER; note = 2'-O-methyl ribonucleotide
  modified_base 32: mod_base = OTHER; note = 2'-O-methyl ribonucleotide
  modified_base 34: mod_base = OTHER; note = 2'-O-methyl ribonucleotide
  modified_base 35: mod_base = OTHER; note = 2'-O-methyl ribonucleotide
  modified_base 36: mod_base = OTHER; note = 2'-O-methyl ribonucleotide
  modified_base 37: mod_base = OTHER; note = 2'-O-methyl ribonucleotide
  modified_base 38: mod_base = OTHER; note = 2'-O-methyl ribonucleotide
  modified_base 39: mod_base = OTHER; note = 2'-O-methyl ribonucleotide
  modified_base 40: mod_base = OTHER; note = 2'-O-methyl ribonucleotide
  modified_base 41: mod_base = OTHER; note = 2'-O-methyl ribonucleotide
  modified_base 42: mod_base = OTHER; note = 2'-O-methyl ribonucleotide
  modified_base 46: mod_base = OTHER; note = 2'-O-methyl ribonucleotide
  modified_base 48: mod_base = OTHER; note = 2'-O-methyl ribonucleotide
  modified_base 50: mod_base = OTHER; note = 2'-O-methyl ribonucleotide
  modified_base 52: mod_base = OTHER; note = 2'-O-methyl ribonucleotide
  modified_base 53: mod_base = OTHER; note = 2'-O-methyl ribonucleotide
  modified_base 54: mod_base = OTHER; note = 2'-O-methyl ribonucleotide
  modified_base 57: mod_base = OTHER; note = 2'-O-methyl ribonucleotide
  modified_base 61: mod_base = OTHER; note = 2'-O-methyl ribonucleotide
  modified_base 66: mod_base = OTHER; note = 2'-O-methyl ribonucleotide
  modified_base 67: mod_base = OTHER; note = 2'-O-methyl ribonucleotide
  modified_base 70: mod_base = OTHER; note = 2'-O-methyl ribonucleotide
  modified_base 71: mod_base = OTHER; note = 2'-O-methyl ribonucleotide
  modified_base 72: mod_base = OTHER; note = 2'-O-methyl ribonucleotide
  modified_base 73: mod_base = OTHER; note = 2'-O-methyl ribonucleotide
  modified_base 74: mod_base = OTHER; note = 2'-O-methyl ribonucleotide
  modified_base 75: mod_base = OTHER; note = 2'-O-methyl ribonucleotide
  modified_base 76: mod_base = OTHER; note = 2'-O-methyl ribonucleotide
  modified_base 77: mod_base = OTHER; note = 2'-O-methyl ribonucleotide
  modified_base 78: mod_base = OTHER; note = 2'-O-methyl ribonucleotide
  modified_base 79: mod_base = OTHER; note = 2'-O-methyl ribonucleotide
  modified_base 80: mod_base = OTHER; note = 2'-O-methyl ribonucleotide
  modified_base 82: mod_base = OTHER; note = 2'-O-methyl ribonucleotide
  modified_base 83: mod_base = OTHER; note = 2'-O-methyl ribonucleotide
  modified_base 84: mod_base = OTHER; note = 2'-O-methyl ribonucleotide
  modified_base 85: mod_base = OTHER; note = 2'-O-methyl ribonucleotide
  modified_base 86: mod_base = OTHER; note = 2'-O-methyl ribonucleotide
  modified_base 87: mod_base = OTHER; note = 2'-O-methyl ribonucleotide
  modified_base 89: mod_base = OTHER; note = 2'-O-methyl ribonucleotide
  modified_base 92: mod_base = OTHER; note = 2'-O-methyl ribonucleotide
  modified_base 93: mod_base = OTHER; note = 2'-O-methyl ribonucleotide
  modified_base 94: mod_base = OTHER; note = 2'-O-methyl ribonucleotide
  modified_base 95: mod_base = OTHER; note = 2'-O-methyl ribonucleotide
  modified_base 96: mod_base = OTHER; note = 2'-O-methyl ribonucleotide
  modified_base 97: mod_base = OTHER; note = 2'-O-methyl ribonucleotide
  modified_base 98: mod_base = OTHER; note = 2'-O-methyl ribonucleotide
  modified_base 99: mod_base = OTHER; note = 2'-O-methyl ribonucleotide
  modified_base 100: mod_base = OTHER; note = 2'-O-methyl ribonucleotide
  modified_base 1..3: mod_base = OTHER; note = phosphorothioate linkage
  modified_base 25..26: mod_base = OTHER; note = phosphorothioate linkage
  modified_base 45..46: mod_base = OTHER; note = phosphorothioate linkage
  modified_base 64..65: mod_base = OTHER; note = phosphorothioate linkage
  modified_base 97..100: mod_base = OTHER; note = phosphorothioate linkage

SEQ ID NO: 2626 - RNA, 103 nt, synthetic construct; identical to SEQ ID NO: 1700
  source 1..103: mol_type = other RNA
  modified_base 1: mod_base = OTHER; note = 2'-O-methyl ribonucleotide
  modified_base 2: mod_base = OTHER; note = 2'-O-methyl ribonucleotide
  modified_base 3: mod_base = OTHER; note = 2'-O-methyl ribonucleotide
  modified_base 21: mod_base = OTHER; note = 2'-O-methyl ribonucleotide
  modified_base 28: mod_base = OTHER; note = 2'-O-methyl ribonucleotide
  modified_base 29: mod_base = OTHER; note = 2'-O-methyl ribonucleotide
  modified_base 30: mod_base = OTHER; note = 2'-O-methyl ribonucleotide
  modified_base 31: mod_base = OTHER; note = 2'-O-methyl ribonucleotide
  modified_base 32: mod_base = OTHER; note = 2'-O-methyl ribonucleotide
  modified_base 34: mod_base = OTHER; note = 2'-O-methyl ribonucleotide
  modified_base 35: mod_base = OTHER; note = 2'-O-methyl ribonucleotide
  modified_base 36: mod_base = OTHER; note = 2'-O-methyl ribonucleotide
  modified_base 37: mod_base = OTHER; note = 2'-O-methyl ribonucleotide
  modified_base 38: mod_base = OTHER; note = 2'-O-methyl ribonucleotide
  modified_base 39: mod_base = OTHER; note = 2'-O-methyl ribonucleotide
  modified_base 40: mod_base = OTHER; note = 2'-O-methyl ribonucleotide
  modified_base 41: mod_base = OTHER; note = 2'-O-methyl ribonucleotide
  modified_base 42: mod_base = OTHER; note = 2'-O-methyl ribonucleotide
  modified_base 46: mod_base = OTHER; note = 2'-O-methyl ribonucleotide
  modified_base 48: mod_base = OTHER; note = 2'-O-methyl ribonucleotide
  modified_base 50: mod_base = OTHER; note = 2'-O-methyl ribonucleotide
  modified_base 52: mod_base = OTHER; note = 2'-O-methyl ribonucleotide
  modified_base 53: mod_base = OTHER; note = 2'-O-methyl ribonucleotide
  modified_base 54: mod_base = OTHER; note = 2'-O-methyl ribonucleotide
  modified_base 57: mod_base = OTHER; note = 2'-O-methyl ribonucleotide
  modified_base 61: mod_base = OTHER; note = 2'-O-methyl ribonucleotide
  modified_base 66: mod_base = OTHER; note = 2'-O-methyl ribonucleotide
  modified_base 67: mod_base = OTHER; note = 2'-O-methyl ribonucleotide
  modified_base 70: mod_base = OTHER; note = 2'-O-methyl ribonucleotide
  modified_base 71: mod_base = OTHER; note = 2'-O-methyl ribonucleotide
  modified_base 72: mod_base = OTHER; note = 2'-O-methyl ribonucleotide
  modified_base 73: mod_base = OTHER; note = 2'-O-methyl ribonucleotide
  modified_base 74: mod_base = OTHER; note = 2'-O-methyl ribonucleotide
  modified_base 75: mod_base = OTHER; note = 2'-O-methyl ribonucleotide
  modified_base 76: mod_base = OTHER; note = 2'-O-methyl ribonucleotide
  modified_base 77: mod_base = OTHER; note = 2'-O-methyl ribonucleotide
  modified_base 78: mod_base = OTHER; note = 2'-O-methyl ribonucleotide
  modified_base 79: mod_base = OTHER; note = 2'-O-methyl ribonucleotide
  modified_base 80: mod_base = OTHER; note = 2'-O-methyl ribonucleotide
  modified_base 82: mod_base = OTHER; note = 2'-O-methyl ribonucleotide
  modified_base 83: mod_base = OTHER; note = 2'-O-methyl ribonucleotide
  modified_base 84: mod_base = OTHER; note = 2'-O-methyl ribonucleotide
  modified_base 85: mod_base = OTHER; note = 2'-O-methyl ribonucleotide
  modified_base 86: mod_base = OTHER; note = 2'-O-methyl ribonucleotide
  modified_base 87: mod_base = OTHER; note = 2'-O-methyl ribonucleotide
  modified_base 89: mod_base = OTHER; note = 2'-O-methyl ribonucleotide
  modified_base 91: mod_base = OTHER; note = 2'-O-methyl ribonucleotide
  modified_base 92: mod_base = OTHER; note = 2'-O-methyl ribonucleotide
  modified_base 93: mod_base = OTHER; note = 2'-O-methyl ribonucleotide
  modified_base 94: mod_base = OTHER; note = 2'-O-methyl ribonucleotide
  modified_base 95: mod_base = OTHER; note = 2'-O-methyl ribonucleotide
  modified_base 96: mod_base = OTHER; note = 2'-O-methyl ribonucleotide
  modified_base 97: mod_base = OTHER; note = 2'-O-methyl ribonucleotide
  modified_base 98: mod_base = OTHER; note = 2'-O-methyl ribonucleotide
  modified_base 99: mod_base = OTHER; note = 2'-O-methyl ribonucleotide
  modified_base 100: mod_base = OTHER; note = 2'-O-methyl ribonucleotide
  modified_base 1..3: mod_base = OTHER; note = phosphorothioate linkage
  modified_base 25..26: mod_base = OTHER; note = phosphorothioate linkage
  modified_base 45..46: mod_base = OTHER; note = phosphorothioate linkage
  modified_base 64..65: mod_base = OTHER; note = phosphorothioate linkage
  modified_base 97..100: mod_base = OTHER; note = phosphorothioate linkage

SEQ ID NO: 2627 - RNA, 103 nt, synthetic construct; identical to SEQ ID NO: 1700
  source 1..103: mol_type = other RNA
  modified_base 1: mod_base = OTHER; note = 2'-O-methyl ribonucleotide
  modified_base 2: mod_base = OTHER; note = 2'-O-methyl ribonucleotide
  modified_base 3: mod_base = OTHER; note = 2'-O-methyl ribonucleotide
  modified_base 21: mod_base = OTHER; note = 2'-O-methyl ribonucleotide
  modified_base 28: mod_base = OTHER; note = 2'-O-methyl ribonucleotide
  modified_base 29: mod_base = OTHER; note = 2'-O-methyl ribonucleotide
  modified_base 30: mod_base = OTHER; note = 2'-O-methyl ribonucleotide
  modified_base 31: mod_base = OTHER; note = 2'-O-methyl ribonucleotide
  modified_base 32: mod_base = OTHER; note = 2'-O-methyl ribonucleotide
  modified_base 34: mod_base = OTHER; note = 2'-O-methyl ribonucleotide
  modified_base 35: mod_base = OTHER; note = 2'-O-methyl ribonucleotide
  modified_base 36: mod_base = OTHER; note = 2'-O-methyl ribonucleotide
  modified_base 37: mod_base = OTHER; note = 2'-O-methyl ribonucleotide
  modified_base 38: mod_base = OTHER; note = 2'-O-methyl ribonucleotide
  modified_base 39: mod_base = OTHER; note = 2'-O-methyl ribonucleotide
  modified_base 40: mod_base = OTHER; note = 2'-O-methyl ribonucleotide
  modified_base 41: mod_base = OTHER; note = 2'-O-methyl ribonucleotide
  modified_base 42: mod_base = OTHER; note = 2'-O-methyl ribonucleotide
  modified_base 46: mod_base = OTHER; note = 2'-O-methyl ribonucleotide
  modified_base 48: mod_base = OTHER; note = 2'-O-methyl ribonucleotide
  modified_base 50: mod_base = OTHER; note = 2'-O-methyl ribonucleotide
  modified_base 52: mod_base = OTHER; note = 2'-O-methyl ribonucleotide
  modified_base 53: mod_base = OTHER; note = 2'-O-methyl ribonucleotide
  modified_base 54: mod_base = OTHER; note = 2'-O-methyl ribonucleotide
  modified_base 55: mod_base = OTHER; note = 2'-O-methyl ribonucleotide
  modified_base 56: mod_base = OTHER; note = 2'-O-methyl ribonucleotide
  modified_base 57: mod_base = OTHER; note = 2'-O-methyl ribonucleotide
  modified_base 60: mod_base = OTHER; note = 2'-O-methyl ribonucleotide
  modified_base 61: mod_base = OTHER; note = 2'-O-methyl ribonucleotide
  modified_base 66: mod_base = OTHER; note = 2'-O-methyl ribonucleotide
  modified_base 67: mod_base = OTHER; note = 2'-O-methyl ribonucleotide
  modified_base 70: mod_base = OTHER; note = 2'-O-methyl ribonucleotide
  modified_base 71: mod_base = OTHER; note = 2'-O-methyl ribonucleotide
  modified_base 72: mod_base = OTHER; note = 2'-O-methyl ribonucleotide
  modified_base 74: mod_base = OTHER; note = 2'-O-methyl ribonucleotide
  modified_base 75: mod_base = OTHER; note = 2'-O-methyl ribonucleotide
  modified_base 76: mod_base = OTHER; note = 2'-O-methyl ribonucleotide
  modified_base 77: mod_base = OTHER; note = 2'-O-methyl ribonucleotide
  modified_base 78: mod_base = OTHER; note = 2'-O-methyl ribonucleotide
  modified_base 79: mod_base = OTHER; note = 2'-O-methyl ribonucleotide
  modified_base 80: mod_base = OTHER; note = 2'-O-methyl ribonucleotide
  modified_base 82: mod_base = OTHER; note = 2'-O-methyl ribonucleotide
  modified_base 83: mod_base = OTHER; note = 2'-O-methyl ribonucleotide
  modified_base 84: mod_base = OTHER; note = 2'-O-methyl ribonucleotide
  modified_base 85: mod_base = OTHER; note = 2'-O-methyl ribonucleotide
  modified_base 86: mod_base = OTHER; note = 2'-O-methyl ribonucleotide
  modified_base 87: mod_base = OTHER; note = 2'-O-methyl ribonucleotide
  modified_base 89: mod_base = OTHER; note = 2'-O-methyl ribonucleotide
  modified_base 92: mod_base = OTHER; note = 2'-O-methyl ribonucleotide
  modified_base 93: mod_base = OTHER; note = 2'-O-methyl ribonucleotide
  modified_base 94: mod_base = OTHER; note = 2'-O-methyl ribonucleotide
  modified_base 95: mod_base = OTHER; note = 2'-O-methyl ribonucleotide
  modified_base 96: mod_base = OTHER; note = 2'-O-methyl ribonucleotide
  modified_base 97: mod_base = OTHER; note = 2'-O-methyl ribonucleotide
  modified_base 98: mod_base = OTHER; note = 2'-O-methyl ribonucleotide
  modified_base 99: mod_base = OTHER; note = 2'-O-methyl ribonucleotide
  modified_base 100: mod_base = OTHER; note = 2'-O-methyl ribonucleotide
  modified_base 1..3: mod_base = OTHER; note = phosphorothioate linkage
  modified_base 25..26: mod_base = OTHER; note = phosphorothioate linkage
  modified_base 45..46: mod_base = OTHER; note = phosphorothioate linkage
  modified_base 64..65: mod_base = OTHER; note = phosphorothioate linkage
  modified_base 97..100: mod_base = OTHER; note = phosphorothioate linkage

SEQ ID NO: 2628 - RNA, 103 nt, synthetic construct; identical to SEQ ID NO: 1700
  source 1..103: mol_type = other RNA
  modified_base 1: mod_base = OTHER; note = 2'-O-methyl ribonucleotide
  modified_base 2: mod_base = OTHER; note = 2'-O-methyl ribonucleotide
  modified_base 3: mod_base = OTHER; note = 2'-O-methyl ribonucleotide
  modified_base 21: mod_base = OTHER; note = 2'-O-methyl ribonucleotide
  modified_base 28: mod_base = OTHER; note = 2'-O-methyl ribonucleotide
  modified_base 29: mod_base = OTHER; note = 2'-O-methyl ribonucleotide
  modified_base 30: mod_base = OTHER; note = 2'-O-methyl ribonucleotide
  modified_base 31: mod_base = OTHER; note = 2'-O-methyl ribonucleotide
  modified_base 32: mod_base = OTHER; note = 2'-O-methyl ribonucleotide
  modified_base 34: mod_base = OTHER; note = 2'-O-methyl ribonucleotide
  modified_base 35: mod_base = OTHER; note = 2'-O-methyl ribonucleotide
  modified_base 36: mod_base = OTHER; note = 2'-O-methyl ribonucleotide
  modified_base 37: mod_base = OTHER; note = 2'-O-methyl ribonucleotide
  modified_base 38: mod_base = OTHER; note = 2'-O-methyl ribonucleotide
  modified_base 39: mod_base = OTHER; note = 2'-O-methyl ribonucleotide
  modified_base 40: mod_base = OTHER; note = 2'-O-methyl ribonucleotide
  modified_base 41: mod_base = OTHER; note = 2'-O-methyl ribonucleotide
  modified_base 42: mod_base = OTHER; note = 2'-O-methyl ribonucleotide
  modified_base 46: mod_base = OTHER; note = 2'-O-methyl ribonucleotide
  modified_base 48: mod_base = OTHER; note = 2'-O-methyl ribonucleotide
  modified_base 50: mod_base = OTHER; note = 2'-O-methyl ribonucleotide
  modified_base 52: mod_base = OTHER; note = 2'-O-methyl ribonucleotide
  modified_base 53: mod_base = OTHER; note = 2'-O-methyl ribonucleotide
  modified_base 54: mod_base = OTHER; note = 2'-O-methyl ribonucleotide
  modified_base 55: mod_base = OTHER; note = 2'-O-methyl ribonucleotide
  modified_base 56: mod_base = OTHER; note = 2'-O-methyl ribonucleotide
  modified_base 57: mod_base = OTHER; note = 2'-O-methyl ribonucleotide
  modified_base 60: mod_base = OTHER; note = 2'-O-methyl ribonucleotide
  modified_base 61: mod_base = OTHER; note = 2'-O-methyl ribonucleotide
  modified_base 66: mod_base = OTHER; note = 2'-O-methyl ribonucleotide
  modified_base 67: mod_base = OTHER; note = 2'-O-methyl ribonucleotide
  modified_base 70: mod_base = OTHER; note = 2'-O-methyl ribonucleotide
  modified_base 71: mod_base = OTHER; note = 2'-O-methyl ribonucleotide
  modified_base 72: mod_base = OTHER; note = 2'-O-methyl ribonucleotide
  modified_base 74: mod_base = OTHER; note = 2'-O-methyl ribonucleotide
  modified_base 75: mod_base = OTHER; note = 2'-O-methyl ribonucleotide
  modified_base 76: mod_base = OTHER; note = 2'-O-methyl ribonucleotide
  modified_base 77: mod_base = OTHER; note = 2'-O-methyl ribonucleotide
  modified_base 78: mod_base = OTHER; note = 2'-O-methyl ribonucleotide
  modified_base 79: mod_base = OTHER; note = 2'-O-methyl ribonucleotide
  modified_base 80: mod_base = OTHER; note = 2'-O-methyl ribonucleotide
  modified_base 81: mod_base = OTHER; note = 2'-O-methyl ribonucleotide
  modified_base 83: mod_base = OTHER; note = 2'-O-methyl ribonucleotide
  modified_base 84: mod_base = OTHER; note = 2'-O-methyl ribonucleotide
  modified_base 85: mod_base = OTHER; note = 2'-O-methyl ribonucleotide
  modified_base 86: mod_base = OTHER; note = 2'-O-methyl ribonucleotide
  modified_base 87: mod_base = OTHER; note = 2'-O-methyl ribonucleotide
  modified_base 88: mod_base = OTHER; note = 2'-O-methyl ribonucleotide
  modified_base 89: mod_base = OTHER; note = 2'-O-methyl ribonucleotide
  modified_base 90: mod_base = OTHER; note = 2'-O-methyl ribonucleotide
  modified_base 91: mod_base = OTHER; note = 2'-O-methyl ribonucleotide
  modified_base 92: mod_base = OTHER; note = 2'-O-methyl ribonucleotide
  modified_base 93: mod_base = OTHER; note = 2'-O-methyl ribonucleotide
  modified_base 94: mod_base = OTHER; note = 2'-O-methyl ribonucleotide
  modified_base 95: mod_base = OTHER; note = 2'-O-methyl ribonucleotide
  modified_base 96: mod_base = OTHER; note = 2'-O-methyl ribonucleotide
  modified_base 97: mod_base = OTHER; note = 2'-O-methyl ribonucleotide
  modified_base 98: mod_base = OTHER; note = 2'-O-methyl ribonucleotide
  modified_base 99: mod_base = OTHER; note = 2'-O-methyl ribonucleotide
  modified_base 100: mod_base = OTHER; note = 2'-O-methyl ribonucleotide
  modified_base 1..4: mod_base = OTHER; note = phosphorothioate linkage
  modified_base 98..100: mod_base = OTHER; note = phosphorothioate linkage

SEQ ID NO: 2629 - RNA, 103 nt, synthetic construct; identical to SEQ ID NO: 1700
  source 1..103: mol_type = other RNA
  modified_base 1: mod_base = OTHER; note = 2'-O-methyl ribonucleotide
  modified_base 2: mod_base = OTHER; note = 2'-O-methyl ribonucleotide
  modified_base 3: mod_base = OTHER; note = 2'-O-methyl ribonucleotide
  modified_base 21: mod_base = OTHER; note = 2'-O-methyl ribonucleotide
  modified_base 28: mod_base = OTHER; note = 2'-O-methyl ribonucleotide
  modified_base 29: mod_base = OTHER; note = 2'-O-methyl ribonucleotide
  modified_base 30: mod_base = OTHER; note = 2'-O-methyl ribonucleotide
  modified_base 31: mod_base = OTHER; note = 2'-O-methyl ribonucleotide
  modified_base 32: mod_base = OTHER; note = 2'-O-methyl ribonucleotide
  modified_base 33: mod_base = OTHER; note = 2'-O-methyl ribonucleotide
  modified_base 34: mod_base = OTHER; note = 2'-O-methyl ribonucleotide
  modified_base 35: mod_base = OTHER; note = 2'-O-methyl ribonucleotide
  modified_base 36: mod_base = OTHER; note = 2'-O-methyl ribonucleotide
  modified_base 37: mod_base = OTHER; note = 2'-O-methyl ribonucleotide
  modified_base 38: mod_base = OTHER; note = 2'-O-methyl ribonucleotide
  modified_base 39: mod_base = OTHER; note = 2'-O-methyl ribonucleotide
  modified_base 40: mod_base = OTHER; note = 2'-O-methyl ribonucleotide
  modified_base 41: mod_base = OTHER; note = 2'-O-methyl ribonucleotide
  modified_base 42: mod_base = OTHER; note = 2'-O-methyl ribonucleotide
  modified_base 46: mod_base = OTHER; note = 2'-O-methyl ribonucleotide
  modified_base 48: mod_base = OTHER; note = 2'-O-methyl ribonucleotide
  modified_base 50: mod_base = OTHER; note = 2'-O-methyl ribonucleotide
  modified_base 52: mod_base = OTHER; note = 2'-O-methyl ribonucleotide
  modified_base 53: mod_base = OTHER; note = 2'-O-methyl ribonucleotide
  modified_base 54: mod_base = OTHER; note = 2'-O-methyl ribonucleotide
  modified_base 57: mod_base = OTHER; note = 2'-O-methyl ribonucleotide
  modified_base 61: mod_base = OTHER; note = 2'-O-methyl ribonucleotide
  modified_base 66: mod_base = OTHER; note = 2'-O-methyl ribonucleotide
  modified_base 67: mod_base = OTHER; note = 2'-O-methyl ribonucleotide
  modified_base 70: mod_base = OTHER; note = 2'-O-methyl ribonucleotide
  modified_base 71: mod_base = OTHER; note = 2'-O-methyl ribonucleotide
  modified_base 72: mod_base = OTHER; note = 2'-O-methyl ribonucleotide
  modified_base 74: mod_base = OTHER; note = 2'-O-methyl ribonucleotide
  modified_base 75: mod_base = OTHER; note = 2'-O-methyl ribonucleotide
  modified_base 76: mod_base = OTHER; note = 2'-O-methyl ribonucleotide
  modified_base 77: mod_base = OTHER; note = 2'-O-methyl ribonucleotide
  modified_base 78: mod_base = OTHER; note = 2'-O-methyl ribonucleotide
  modified_base 79: mod_base = OTHER; note = 2'-O-methyl ribonucleotide
  modified_base 80: mod_base = OTHER; note = 2'-O-methyl ribonucleotide
  modified_base 82: mod_base = OTHER; note = 2'-O-methyl ribonucleotide
  modified_base 83: mod_base = OTHER; note = 2'-O-methyl ribonucleotide
  modified_base 84: mod_base = OTHER; note = 2'-O-methyl ribonucleotide
  modified_base 85: mod_base = OTHER; note = 2'-O-methyl ribonucleotide
  modified_base 86: mod_base = OTHER; note = 2'-O-methyl ribonucleotide
  modified_base 87: mod_base = OTHER; note = 2'-O-methyl ribonucleotide
  modified_base 89: mod_base = OTHER; note = 2'-O-methyl ribonucleotide
  modified_base 92: mod_base = OTHER; note = 2'-O-methyl ribonucleotide
  modified_base 93: mod_base = OTHER; note = 2'-O-methyl ribonucleotide
  modified_base 94: mod_base = OTHER; note = 2'-O-methyl ribonucleotide
  modified_base 95: mod_base = OTHER; note = 2'-O-methyl ribonucleotide
  modified_base 96: mod_base = OTHER; note = 2'-O-methyl ribonucleotide
  modified_base 97: mod_base = OTHER; note = 2'-O-methyl ribonucleotide
  modified_base 98: mod_base = OTHER; note = 2'-O-methyl ribonucleotide
  modified_base 99: mod_base = OTHER; note = 2'-O-methyl ribonucleotide
  modified_base 100: mod_base = OTHER; note = 2'-O-methyl ribonucleotide
  modified_base 1..4: mod_base = OTHER; note = phosphorothioate linkage
  modified_base 98..100: mod_base = OTHER; note = phosphorothioate linkage

SEQ ID NO: 2630 - RNA, 103 nt, synthetic construct; identical to SEQ ID NO: 1700
  source 1..103: mol_type = other RNA
  modified_base 1: mod_base = OTHER; note = 2'-O-methyl ribonucleotide
  modified_base 2: mod_base = OTHER; note = 2'-O-methyl ribonucleotide
  modified_base 3: mod_base = OTHER; note = 2'-O-methyl ribonucleotide
  modified_base 21: mod_base = OTHER; note = 2'-O-methyl ribonucleotide
  modified_base 28: mod_base = OTHER; note = 2'-O-methyl ribonucleotide
  modified_base 29: mod_base = OTHER; note = 2'-O-methyl ribonucleotide
  modified_base 30: mod_base = OTHER; note = 2'-O-methyl ribonucleotide
  modified_base 31: mod_base = OTHER; note = 2'-O-methyl ribonucleotide
  modified_base 32: mod_base = OTHER; note = 2'-O-methyl ribonucleotide
  modified_base 33: mod_base = OTHER; note = 2'-O-methyl ribonucleotide
  modified_base 34: mod_base = OTHER; note = 2'-O-methyl ribonucleotide
  modified_base 35: mod_base = OTHER; note = 2'-O-methyl ribonucleotide
  modified_base 36: mod_base = OTHER; note = 2'-O-methyl ribonucleotide
  modified_base 37: mod_base = OTHER; note = 2'-O-methyl ribonucleotide
  modified_base 38: mod_base = OTHER; note = 2'-O-methyl ribonucleotide
  modified_base 39: mod_base = OTHER; note = 2'-O-methyl ribonucleotide
  modified_base 40: mod_base = OTHER; note = 2'-O-methyl ribonucleotide
  modified_base 41: mod_base = OTHER; note = 2'-O-methyl ribonucleotide
  modified_base 42: mod_base = OTHER; note = 2'-O-methyl ribonucleotide
  modified_base 46: mod_base = OTHER; note = 2'-O-methyl ribonucleotide
  modified_base 48: mod_base = OTHER; note = 2'-O-methyl ribonucleotide
  modified_base 50: mod_base = OTHER; note = 2'-O-methyl ribonucleotide
  modified_base 52: mod_base = OTHER; note = 2'-O-methyl ribonucleotide
  modified_base 53: mod_base = OTHER; note = 2'-O-methyl ribonucleotide
  modified_base 54: mod_base = OTHER; note = 2'-O-methyl ribonucleotide
  modified_base 55: mod_base = OTHER; note = 2'-O-methyl ribonucleotide
  modified_base 56: mod_base = OTHER; note = 2'-O-methyl ribonucleotide
  modified_base 57: mod_base = OTHER; note = 2'-O-methyl ribonucleotide
  modified_base 60: mod_base = OTHER; note = 2'-O-methyl ribonucleotide
  modified_base 61: mod_base = OTHER; note = 2'-O-methyl ribonucleotide
  modified_base 66: mod_base = OTHER; note = 2'-O-methyl ribonucleotide
  modified_base 67: mod_base = OTHER; note = 2'-O-methyl ribonucleotide
  modified_base 70: mod_base = OTHER; note = 2'-O-methyl ribonucleotide
  modified_base 71: mod_base = OTHER; note = 2'-O-methyl ribonucleotide
  modified_base 72: mod_base = OTHER; note = 2'-O-methyl ribonucleotide
  modified_base 74: mod_base = OTHER; note = 2'-O-methyl ribonucleotide
  modified_base 75: mod_base = OTHER; note = 2'-O-methyl ribonucleotide
  modified_base 76: mod_base = OTHER; note = 2'-O-methyl ribonucleotide
  modified_base 77: mod_base = OTHER; note = 2'-O-methyl ribonucleotide
  modified_base 78: mod_base = OTHER; note = 2'-O-methyl ribonucleotide
  modified_base 79: mod_base = OTHER; note = 2'-O-methyl ribonucleotide
  modified_base 80: mod_base = OTHER; note = 2'-O-methyl ribonucleotide
  modified_base 82: mod_base = OTHER; note = 2'-O-methyl ribonucleotide
  modified_base 83: mod_base = OTHER; note = 2'-O-methyl ribonucleotide
  modified_base 84: mod_base = OTHER; note = 2'-O-methyl ribonucleotide
  modified_base 85: mod_base = OTHER; note = 2'-O-methyl ribonucleotide
  modified_base 86: mod_base = OTHER; note = 2'-O-methyl ribonucleotide
  modified_base 87: mod_base = OTHER; note = 2'-O-methyl ribonucleotide
  modified_base 89: mod_base = OTHER; note = 2'-O-methyl ribonucleotide
  modified_base 92: mod_base = OTHER; note = 2'-O-methyl ribonucleotide
  modified_base 93: mod_base = OTHER; note = 2'-O-methyl ribonucleotide
  modified_base 94: mod_base = OTHER; note = 2'-O-methyl ribonucleotide
  modified_base 95: mod_base = OTHER; note = 2'-O-methyl ribonucleotide
  modified_base 96: mod_base = OTHER; note = 2'-O-methyl ribonucleotide
  modified_base 97: mod_base = OTHER; note = 2'-O-methyl ribonucleotide
  modified_base 98: mod_base = OTHER; note = 2'-O-methyl ribonucleotide
  modified_base 99: mod_base = OTHER; note = 2'-O-methyl ribonucleotide
  modified_base 100: mod_base = OTHER; note = 2'-O-methyl ribonucleotide
  modified_base 1..4: mod_base = OTHER; note = phosphorothioate linkage
  modified_base 98..100: mod_base = OTHER; note = phosphorothioate linkage

SEQ ID NO: 2631 - RNA, 103 nt, synthetic construct; identical to SEQ ID NO: 1700
  source 1..103: mol_type = other RNA
  modified_base 1: mod_base = OTHER; note = 2'-O-methyl ribonucleotide
  modified_base 2: mod_base = OTHER; note = 2'-O-methyl ribonucleotide
  modified_base 3: mod_base = OTHER; note = 2'-O-methyl ribonucleotide
  modified_base 21: mod_base = OTHER; note = 2'-O-methyl ribonucleotide
  modified_base 28: mod_base = OTHER; note = 2'-O-methyl ribonucleotide
  modified_base 29: mod_base = OTHER; note = 2'-O-methyl ribonucleotide
  modified_base 30: mod_base = OTHER; note = 2'-O-methyl ribonucleotide
  modified_base 31: mod_base = OTHER; note = 2'-O-methyl ribonucleotide
  modified_base 32: mod_base = OTHER; note = 2'-O-methyl ribonucleotide
  modified_base 33: mod_base = OTHER; note = 2'-O-methyl ribonucleotide
  modified_base 34: mod_base = OTHER; note = 2'-O-methyl ribonucleotide
  modified_base 35: mod_base = OTHER; note = 2'-O-methyl ribonucleotide
  modified_base 36: mod_base = OTHER; note = 2'-O-methyl ribonucleotide
  modified_base 37: mod_base = OTHER; note = 2'-O-methyl ribonucleotide
  modified_base 38: mod_base = OTHER; note = 2'-O-methyl ribonucleotide
  modified_base 39: mod_base = OTHER; note = 2'-O-methyl ribonucleotide
  modified_base 40: mod_base = OTHER; note = 2'-O-methyl ribonucleotide
  modified_base 41: mod_base = OTHER; note = 2'-O-methyl ribonucleotide
  modified_base 42: mod_base = OTHER; note = 2'-O-methyl ribonucleotide
  modified_base 46: mod_base = OTHER; note = 2'-O-methyl ribonucleotide
  modified_base 48: mod_base = OTHER; note = 2'-O-methyl ribonucleotide
  modified_base 50: mod_base = OTHER; note = 2'-O-methyl ribonucleotide
  modified_base 52: mod_base = OTHER; note = 2'-O-methyl ribonucleotide
  modified_base 53: mod_base = OTHER; note = 2'-O-methyl ribonucleotide
  modified_base 54: mod_base = OTHER; note = 2'-O-methyl ribonucleotide
  modified_base 57: mod_base = OTHER; note = 2'-O-methyl ribonucleotide
  modified_base 61: mod_base = OTHER; note = 2'-O-methyl ribonucleotide
  modified_base 66: mod_base = OTHER; note = 2'-O-methyl ribonucleotide
  modified_base 67: mod_base = OTHER; note = 2'-O-methyl ribonucleotide
  modified_base 70: mod_base = OTHER; note = 2'-O-methyl ribonucleotide
  modified_base 71: mod_base = OTHER; note = 2'-O-methyl ribonucleotide
  modified_base 72: mod_base = OTHER; note = 2'-O-methyl ribonucleotide
  modified_base 73: mod_base = OTHER; note = 2'-O-methyl ribonucleotide
  modified_base 74: mod_base = OTHER; note = 2'-O-methyl ribonucleotide
  modified_base 75: mod_base = OTHER; note = 2'-O-methyl ribonucleotide
  modified_base 76: mod_base = OTHER; note = 2'-O-methyl ribonucleotide
  modified_base 77: mod_base = OTHER; note = 2'-O-methyl ribonucleotide
  modified_base 78: mod_base = OTHER; note = 2'-O-methyl ribonucleotide
  modified_base 79: mod_base = OTHER; note = 2'-O-methyl ribonucleotide
  modified_base 80: mod_base = OTHER; note = 2'-O-methyl ribonucleotide
  modified_base 82: mod_base = OTHER; note = 2'-O-methyl ribonucleotide
  modified_base 83: mod_base = OTHER; note = 2'-O-methyl ribonucleotide
  modified_base 84: mod_base = OTHER; note = 2'-O-methyl ribonucleotide
  modified_base 85: mod_base = OTHER; note = 2'-O-methyl ribonucleotide
  modified_base 86: mod_base = OTHER; note = 2'-O-methyl ribonucleotide
  modified_base 87: mod_base = OTHER; note = 2'-O-methyl ribonucleotide
  modified_base 89: mod_base = OTHER; note = 2'-O-methyl ribonucleotide
  modified_base 92: mod_base = OTHER; note = 2'-O-methyl ribonucleotide
  modified_base 93: mod_base = OTHER; note = 2'-O-methyl ribonucleotide
  modified_base 94: mod_base = OTHER; note = 2'-O-methyl ribonucleotide
  modified_base 95: mod_base = OTHER; note = 2'-O-methyl ribonucleotide
  modified_base 96: mod_base = OTHER; note = 2'-O-methyl ribonucleotide
  modified_base 97: mod_base = OTHER; note = 2'-O-methyl ribonucleotide
  modified_base 98: mod_base = OTHER; note = 2'-O-methyl ribonucleotide
  modified_base 99: mod_base = OTHER; note = 2'-O-methyl ribonucleotide
  modified_base 100: mod_base = OTHER; note = 2'-O-methyl ribonucleotide
  modified_base 1..4: mod_base = OTHER; note = phosphorothioate linkage
  modified_base 98..100: mod_base = OTHER; note = phosphorothioate linkage

SEQ ID NO: 2632 - RNA, 103 nt, synthetic construct; identical to SEQ ID NO: 1700
  source 1..103: mol_type = other RNA
  modified_base 1: mod_base = OTHER; note = 2'-O-methyl ribonucleotide
  modified_base 2: mod_base = OTHER; note = 2'-O-methyl ribonucleotide
  modified_base 3: mod_base = OTHER; note = 2'-O-methyl ribonucleotide
  modified_base 21: mod_base = OTHER; note = 2'-O-methyl ribonucleotide
  modified_base 28: mod_base = OTHER; note = 2'-O-methyl ribonucleotide
  modified_base 29: mod_base = OTHER; note = 2'-O-methyl ribonucleotide
  modified_base 30: mod_base = OTHER; note = 2'-O-methyl ribonucleotide
  modified_base 31: mod_base = OTHER; note = 2'-O-methyl ribonucleotide
  modified_base 32: mod_base = OTHER; note = 2'-O-methyl ribonucleotide
  modified_base 33: mod_base = OTHER; note = 2'-O-methyl ribonucleotide
  modified_base 34: mod_base = OTHER; note = 2'-O-methyl ribonucleotide
  modified_base 35: mod_base = OTHER; note = 2'-O-methyl ribonucleotide
  modified_base 36: mod_base = OTHER; note = 2'-O-methyl ribonucleotide
  modified_base 37: mod_base = OTHER; note = 2'-O-methyl ribonucleotide
  modified_base 38: mod_base = OTHER; note = 2'-O-methyl ribonucleotide
  modified_base 39: mod_base = OTHER; note = 2'-O-methyl ribonucleotide
  modified_base 40: mod_base = OTHER; note = 2'-O-methyl ribonucleotide
  modified_base 41: mod_base = OTHER; note = 2'-O-methyl ribonucleotide
  modified_base 42: mod_base = OTHER; note = 2'-O-methyl ribonucleotide
  modified_base 46: mod_base = OTHER; note = 2'-O-methyl ribonucleotide
  modified_base 48: mod_base = OTHER; note = 2'-O-methyl ribonucleotide
  modified_base 50: mod_base = OTHER; note = 2'-O-methyl ribonucleotide
  modified_base 52: mod_base = OTHER; note = 2'-O-methyl ribonucleotide
  modified_base 53: mod_base = OTHER; note = 2'-O-methyl ribonucleotide
  modified_base 54: mod_base = OTHER; note = 2'-O-methyl ribonucleotide
  modified_base 57: mod_base = OTHER; note = 2'-O-methyl ribonucleotide
  modified_base 61: mod_base = OTHER; note = 2'-O-methyl ribonucleotide
  modified_base 66: mod_base = OTHER; note = 2'-O-methyl ribonucleotide
  modified_base 67: mod_base = OTHER; note = 2'-O-methyl ribonucleotide
  modified_base 70: mod_base = OTHER; note = 2'-O-methyl ribonucleotide
  modified_base 71: mod_base = OTHER; note = 2'-O-methyl ribonucleotide
  modified_base 72: mod_base = OTHER; note = 2'-O-methyl ribonucleotide
  modified_base 73: mod_base = OTHER; note = 2'-O-methyl ribonucleotide
  modified_base 74: mod_base = OTHER; note = 2'-O-methyl ribonucleotide
  modified_base 75: mod_base = OTHER; note = 2'-O-methyl ribonucleotide
  modified_base 76: mod_base = OTHER; note = 2'-O-methyl ribonucleotide
  modified_base 77: mod_base = OTHER; note = 2'-O-methyl ribonucleotide
  modified_base 78: mod_base = OTHER; note = 2'-O-methyl ribonucleotide
  modified_base 79: mod_base = OTHER; note = 2'-O-methyl ribonucleotide
  modified_base 80: mod_base = OTHER; note = 2'-O-methyl ribonucleotide
  modified_base 82: mod_base = OTHER; note = 2'-O-methyl ribonucleotide
  modified_base 83: mod_base = OTHER; note = 2'-O-methyl ribonucleotide
  modified_base 84: mod_base = OTHER; note = 2'-O-methyl ribonucleotide
  modified_base 85: mod_base = OTHER; note = 2'-O-methyl ribonucleotide
  modified_base 86: mod_base = OTHER; note = 2'-O-methyl ribonucleotide
  modified_base 87: mod_base = OTHER; note = 2'-O-methyl ribonucleotide
  modified_base 89: mod_base = OTHER; note = 2'-O-methyl ribonucleotide
  modified_base 91: mod_base = OTHER; note = 2'-O-methyl ribonucleotide
  modified_base 92: mod_base = OTHER; note = 2'-O-methyl ribonucleotide
  modified_base 93: mod_base = OTHER; note = 2'-O-methyl ribonucleotide
  modified_base 94: mod_base = OTHER; note = 2'-O-methyl ribonucleotide
  modified_base 95: mod_base = OTHER; note = 2'-O-methyl ribonucleotide
  modified_base 96: mod_base = OTHER; note = 2'-O-methyl ribonucleotide
  modified_base 97: mod_base = OTHER; note = 2'-O-methyl ribonucleotide
  modified_base 98: mod_base = OTHER; note = 2'-O-methyl ribonucleotide
  modified_base 99: mod_base = OTHER; note = 2'-O-methyl ribonucleotide
  modified_base 100: mod_base = OTHER; note = 2'-O-methyl ribonucleotide
  modified_base 1..4: mod_base = OTHER; note = phosphorothioate linkage
  modified_base 98..100: mod_base = OTHER; note = phosphorothioate linkage

SEQ ID NO: 2633 - RNA, 103 nt, synthetic construct; identical to SEQ ID NO: 1700
  source 1..103: mol_type = other RNA
  modified_base 1: mod_base = OTHER; note = 2'-O-methyl ribonucleotide
  modified_base 2: mod_base = OTHER; note = 2'-O-methyl ribonucleotide
  modified_base 3: mod_base = OTHER; note = 2'-O-methyl ribonucleotide
  modified_base 21: mod_base = OTHER; note = 2'-O-methyl ribonucleotide
  modified_base 28: mod_base = OTHER; note = 2'-O-methyl ribonucleotide
  modified_base 29: mod_base = OTHER; note = 2'-O-methyl ribonucleotide
  modified_base 30: mod_base = OTHER; note = 2'-O-methyl ribonucleotide
  modified_base 31: mod_base = OTHER; note = 2'-O-methyl ribonucleotide
  modified_base 32: mod_base = OTHER; note = 2'-O-methyl ribonucleotide
  modified_base 34: mod_base = OTHER; note = 2'-O-methyl ribonucleotide
  modified_base 35: mod_base = OTHER; note = 2'-O-methyl ribonucleotide
  modified_base 36: mod_base = OTHER; note = 2'-O-methyl ribonucleotide
  modified_base 37: mod_base = OTHER; note = 2'-O-methyl ribonucleotide
  modified_base 38: mod_base = OTHER; note = 2'-O-methyl ribonucleotide
  modified_base 39: mod_base = OTHER; note = 2'-O-methyl ribonucleotide
  modified_base 40: mod_base = OTHER; note = 2'-O-methyl ribonucleotide
  modified_base 41: mod_base = OTHER; note = 2'-O-methyl ribonucleotide
  modified_base 42: mod_base = OTHER; note = 2'-O-methyl ribonucleotide
  modified_base 46: mod_base = OTHER; note = 2'-O-methyl ribonucleotide
  modified_base 48: mod_base = OTHER; note = 2'-O-methyl ribonucleotide
  modified_base 50: mod_base = OTHER; note = 2'-O-methyl ribonucleotide
  modified_base 52: mod_base = OTHER; note = 2'-O-methyl ribonucleotide
  modified_base 53: mod_base = OTHER; note = 2'-O-methyl ribonucleotide
  modified_base 54: mod_base = OTHER; note = 2'-O-methyl ribonucleotide
  modified_base 57: mod_base = OTHER; note = 2'-O-methyl ribonucleotide
  modified_base 61: mod_base = OTHER; note = 2'-O-methyl ribonucleotide
  modified_base 66: mod_base = OTHER; note = 2'-O-methyl ribonucleotide
  modified_base 67: mod_base = OTHER; note = 2'-O-methyl ribonucleotide
  modified_base 70: mod_base = OTHER; note = 2'-O-methyl ribonucleotide
  modified_base 71: mod_base = OTHER; note = 2'-O-methyl ribonucleotide
  modified_base 72: mod_base = OTHER; note = 2'-O-methyl ribonucleotide
  modified_base 73: mod_base = OTHER; note = 2'-O-methyl ribonucleotide
  modified_base 74: mod_base = OTHER; note = 2'-O-methyl ribonucleotide
  modified_base 75: mod_base = OTHER; note = 2'-O-methyl ribonucleotide
  modified_base 76: mod_base = OTHER; note = 2'-O-methyl ribonucleotide
  modified_base 77: mod_base = OTHER; note = 2'-O-methyl ribonucleotide
  modified_base 78: mod_base = OTHER; note = 2'-O-methyl ribonucleotide
  modified_base 79: mod_base = OTHER; note = 2'-O-methyl ribonucleotide
  modified_base 80: mod_base = OTHER; note = 2'-O-methyl ribonucleotide
  modified_base 82: mod_base = OTHER; note = 2'-O-methyl ribonucleotide
  modified_base 83: mod_base = OTHER; note = 2'-O-methyl ribonucleotide
  modified_base 84: mod_base = OTHER; note = 2'-O-methyl ribonucleotide
  modified_base 85: mod_base = OTHER; note = 2'-O-methyl ribonucleotide
  modified_base 86: mod_base = OTHER; note = 2'-O-methyl ribonucleotide
  modified_base 87: mod_base = OTHER; note = 2'-O-methyl ribonucleotide
  modified_base 89: mod_base = OTHER; note = 2'-O-methyl ribonucleotide
  modified_base 92: mod_base = OTHER; note = 2'-O-methyl ribonucleotide
  modified_base 93: mod_base = OTHER; note = 2'-O-methyl ribonucleotide
  modified_base 94: mod_base = OTHER; note = 2'-O-methyl ribonucleotide
  modified_base 95: mod_base = OTHER; note = 2'-O-methyl ribonucleotide
  modified_base 96: mod_base = OTHER; note = 2'-O-methyl ribonucleotide
  modified_base 97: mod_base = OTHER; note = 2'-O-methyl ribonucleotide
  modified_base 98: mod_base = OTHER; note = 2'-O-methyl ribonucleotide
  modified_base 99: mod_base = OTHER; note = 2'-O-methyl ribonucleotide
  modified_base 100: mod_base = OTHER; note = 2'-O-methyl ribonucleotide
  modified_base 1..4: mod_base = OTHER; note = phosphorothioate linkage
  modified_base 98..100: mod_base = OTHER; note = phosphorothioate linkage

SEQ ID NO: 2634 - RNA, 103 nt, synthetic construct; identical to SEQ ID NO: 1700
  source 1..103: mol_type = other RNA
  modified_base 1: mod_base = OTHER; note = 2'-O-methyl ribonucleotide
  modified_base 2: mod_base = OTHER; note = 2'-O-methyl ribonucleotide
  modified_base 3: mod_base = OTHER; note = 2'-O-methyl ribonucleotide
  modified_base 21: mod_base = OTHER; note = 2'-O-methyl ribonucleotide
  modified_base 28: mod_base = OTHER; note = 2'-O-methyl ribonucleotide
  modified_base 29: mod_base = OTHER; note = 2'-O-methyl ribonucleotide
  modified_base 30: mod_base = OTHER; note = 2'-O-methyl ribonucleotide
  modified_base 31: mod_base = OTHER; note = 2'-O-methyl ribonucleotide
  modified_base 32: mod_base = OTHER; note = 2'-O-methyl ribonucleotide
  modified_base 34: mod_base = OTHER; note = 2'-O-methyl ribonucleotide
  modified_base 35: mod_base = OTHER; note = 2'-O-methyl ribonucleotide
  modified_base 36: mod_base = OTHER; note = 2'-O-methyl ribonucleotide
  modified_base 37: mod_base = OTHER; note = 2'-O-methyl ribonucleotide
  modified_base 38: mod_base = OTHER; note = 2'-O-methyl ribonucleotide
  modified_base 39: mod_base = OTHER; note = 2'-O-methyl ribonucleotide
  modified_base 40: mod_base = OTHER; note = 2'-O-methyl ribonucleotide
  modified_base 41: mod_base = OTHER; note = 2'-O-methyl ribonucleotide
  modified_base 42: mod_base = OTHER; note = 2'-O-methyl ribonucleotide
  modified_base 46: mod_base = OTHER; note = 2'-O-methyl ribonucleotide
  modified_base 48: mod_base = OTHER; note = 2'-O-methyl ribonucleotide
  modified_base 50: mod_base = OTHER; note = 2'-O-methyl ribonucleotide
  modified_base 52: mod_base = OTHER; note = 2'-O-methyl ribonucleotide
  modified_base 53: mod_base = OTHER; note = 2'-O-methyl ribonucleotide
  modified_base 54: mod_base = OTHER; note = 2'-O-methyl ribonucleotide
  modified_base 57: mod_base = OTHER; note = 2'-O-methyl ribonucleotide
  modified_base 61: mod_base = OTHER; note = 2'-O-methyl ribonucleotide
  modified_base 66: mod_base = OTHER; note = 2'-O-methyl ribonucleotide
  modified_base 67: mod_base = OTHER; note = 2'-O-methyl ribonucleotide
  modified_base 70: mod_base = OTHER; note = 2'-O-methyl ribonucleotide
  modified_base 71: mod_base = OTHER; note = 2'-O-methyl ribonucleotide
  modified_base 72: mod_base = OTHER; note = 2'-O-methyl ribonucleotide
  modified_base 73: mod_base = OTHER; note = 2'-O-methyl ribonucleotide
  modified_base 74: mod_base = OTHER; note = 2'-O-methyl ribonucleotide
  modified_base 75: mod_base = OTHER; note = 2'-O-methyl ribonucleotide
  modified_base 76: mod_base = OTHER; note = 2'-O-methyl ribonucleotide
  modified_base 77: mod_base = OTHER; note = 2'-O-methyl ribonucleotide
  modified_base 78: mod_base = OTHER; note = 2'-O-methyl ribonucleotide
  modified_base 79: mod_base = OTHER; note = 2'-O-methyl ribonucleotide
  modified_base 80: mod_base = OTHER; note = 2'-O-methyl ribonucleotide
  modified_base 82: mod_base = OTHER; note = 2'-O-methyl ribonucleotide
  modified_base 83: mod_base = OTHER; note = 2'-O-methyl ribonucleotide
  modified_base 84: mod_base = OTHER; note = 2'-O-methyl ribonucleotide
  modified_base 85: mod_base = OTHER; note = 2'-O-methyl ribonucleotide
  modified_base 86: mod_base = OTHER; note = 2'-O-methyl ribonucleotide
  modified_base 87: mod_base = OTHER; note = 2'-O-methyl ribonucleotide
  modified_base 89: mod_base = OTHER; note = 2'-O-methyl ribonucleotide
  modified_base 91: mod_base = OTHER; note = 2'-O-methyl ribonucleotide
  modified_base 92: mod_base = OTHER; note = 2'-O-methyl ribonucleotide
  modified_base 93: mod_base = OTHER; note = 2'-O-methyl ribonucleotide
  modified_base 94: mod_base = OTHER; note = 2'-O-methyl ribonucleotide
  modified_base 95: mod_base = OTHER; note = 2'-O-methyl ribonucleotide
  modified_base 96: mod_base = OTHER; note = 2'-O-methyl ribonucleotide
  modified_base 97: mod_base = OTHER; note = 2'-O-methyl ribonucleotide
  modified_base 98: mod_base = OTHER; note = 2'-O-methyl ribonucleotide
  modified_base 99: mod_base = OTHER; note = 2'-O-methyl ribonucleotide
  modified_base 100: mod_base = OTHER; note = 2'-O-methyl ribonucleotide
  modified_base 1..4: mod_base = OTHER; note = phosphorothioate linkage
  modified_base 98..100: mod_base = OTHER; note = phosphorothioate linkage

SEQ ID NO: 2635 - RNA, 103 nt, synthetic construct; identical to SEQ ID NO: 1700
  source 1..103: mol_type = other RNA
  modified_base 1: mod_base = OTHER; note = 2'-O-methyl ribonucleotide
  modified_base 2: mod_base = OTHER; note = 2'-O-methyl ribonucleotide
  modified_base 3: mod_base = OTHER; note = 2'-O-methyl ribonucleotide
  modified_base 21: mod_base = OTHER; note = 2'-O-methyl ribonucleotide
  modified_base 28: mod_base = OTHER; note = 2'-O-methyl ribonucleotide
  modified_base 29: mod_base = OTHER; note = 2'-O-methyl ribonucleotide
  modified_base 30: mod_base = OTHER; note = 2'-O-methyl ribonucleotide
  modified_base 31: mod_base = OTHER; note = 2'-O-methyl ribonucleotide
  modified_base 32: mod_base = OTHER; note = 2'-O-methyl ribonucleotide
  modified_base 34: mod_base = OTHER; note = 2'-O-methyl ribonucleotide
  modified_base 35: mod_base = OTHER; note = 2'-O-methyl ribonucleotide
  modified_base 36: mod_base = OTHER; note = 2'-O-methyl ribonucleotide
  modified_base 37: mod_base = OTHER; note = 2'-O-methyl ribonucleotide
  modified_base 38: mod_base = OTHER; note = 2'-O-methyl ribonucleotide
  modified_base 39: mod_base = OTHER; note = 2'-O-methyl ribonucleotide
  modified_base 40: mod_base = OTHER; note = 2'-O-methyl ribonucleotide
  modified_base 41: mod_base = OTHER; note = 2'-O-methyl ribonucleotide
  modified_base 42: mod_base = OTHER; note = 2'-O-methyl ribonucleotide
  modified_base 46: mod_base = OTHER; note = 2'-O-methyl ribonucleotide
  modified_base 48: mod_base = OTHER; note = 2'-O-methyl ribonucleotide
  modified_base 50: mod_base = OTHER; note = 2'-O-methyl ribonucleotide
  modified_base 52: mod_base = OTHER; note = 2'-O-methyl ribonucleotide
  modified_base 53: mod_base = OTHER; note = 2'-O-methyl ribonucleotide
  modified_base 54: mod_base = OTHER; note = 2'-O-methyl ribonucleotide
  modified_base 55: mod_base = OTHER; note = 2'-O-methyl ribonucleotide
  modified_base 56: mod_base = OTHER; note = 2'-O-methyl ribonucleotide
  modified_base 57: mod_base = OTHER; note = 2'-O-methyl ribonucleotide
  modified_base 60: mod_base = OTHER; note = 2'-O-methyl ribonucleotide
  modified_base 61: mod_base = OTHER; note = 2'-O-methyl ribonucleotide
  modified_base 66: mod_base = OTHER; note = 2'-O-methyl ribonucleotide
  modified_base 67: mod_base = OTHER; note = 2'-O-methyl ribonucleotide
  modified_base 70: mod_base = OTHER; note = 2'-O-methyl ribonucleotide
  modified_base 71: mod_base = OTHER; note = 2'-O-methyl ribonucleotide
  modified_base 72: mod_base = OTHER; note = 2'-O-methyl ribonucleotide
  modified_base 74: mod_base = OTHER; note = 2'-O-methyl ribonucleotide
  modified_base 75: mod_base = OTHER; note = 2'-O-methyl ribonucleotide
  modified_base 76: mod_base = OTHER; note = 2'-O-methyl ribonucleotide
  modified_base 77: mod_base = OTHER; note = 2'-O-methyl ribonucleotide
  modified_base 78: mod_base = OTHER; note = 2'-O-methyl ribonucleotide
  modified_base 79: mod_base = OTHER; note = 2'-O-methyl ribonucleotide
  modified_base 80: mod_base = OTHER; note = 2'-O-methyl ribonucleotide
  modified_base 82: mod_base = OTHER; note = 2'-O-methyl ribonucleotide
  modified_base 83: mod_base = OTHER; note = 2'-O-methyl ribonucleotide
  modified_base 84: mod_base = OTHER; note = 2'-O-methyl ribonucleotide
  modified_base 85: mod_base = OTHER; note = 2'-O-methyl ribonucleotide
  modified_base 86: mod_base = OTHER; note = 2'-O-methyl ribonucleotide
  modified_base 87: mod_base = OTHER; note = 2'-O-methyl ribonucleotide
  modified_base 89: mod_base = OTHER; note = 2'-O-methyl ribonucleotide
  modified_base 92: mod_base = OTHER; note = 2'-O-methyl ribonucleotide
  modified_base 93: mod_base = OTHER; note = 2'-O-methyl ribonucleotide
  modified_base 94: mod_base = OTHER; note = 2'-O-methyl ribonucleotide
  modified_base 95: mod_base = OTHER; note = 2'-O-methyl ribonucleotide
  modified_base 96: mod_base = OTHER; note = 2'-O-methyl ribonucleotide
  modified_base 97: mod_base = OTHER; note = 2'-O-methyl ribonucleotide
  modified_base 98: mod_base = OTHER; note = 2'-O-methyl ribonucleotide
  modified_base 99: mod_base = OTHER; note = 2'-O-methyl ribonucleotide
  modified_base 100: mod_base = OTHER; note = 2'-O-methyl ribonucleotide
  modified_base 1..4: mod_base = OTHER; note = phosphorothioate linkage
  modified_base 98..100: mod_base = OTHER; note = phosphorothioate linkage

SEQ ID NO: 2636 - RNA, 103 nt, synthetic construct; identical to SEQ ID NO: 1699
  source 1..103: mol_type = other RNA
  modified_base 1: mod_base = OTHER; note = 2'-O-methyl ribonucleotide
  modified_base 2: mod_base = OTHER; note = 2'-O-methyl ribonucleotide
  modified_base 3: mod_base = OTHER; note = 2'-O-methyl ribonucleotide
  modified_base 21: mod_base = OTHER; note = 2'-O-methyl ribonucleotide
  modified_base 28: mod_base = OTHER; note = 2'-O-methyl ribonucleotide
  modified_base 29: mod_base = OTHER; note = 2'-O-methyl ribonucleotide
  modified_base 30: mod_base = OTHER; note = 2'-O-methyl ribonucleotide
  modified_base 31: mod_base = OTHER; note = 2'-O-methyl ribonucleotide
  modified_base 32: mod_base = OTHER; note = 2'-O-methyl ribonucleotide
  modified_base 33: mod_base = OTHER; note = 2'-O-methyl ribonucleotide
  modified_base 34: mod_base = OTHER; note = 2'-O-methyl ribonucleotide
  modified_base 35: mod_base = OTHER; note = 2'-O-methyl ribonucleotide
  modified_base 36: mod_base = OTHER; note = 2'-O-methyl ribonucleotide
  modified_base 37: mod_base = OTHER; note = 2'-O-methyl ribonucleotide
  modified_base 38: mod_base = OTHER; note = 2'-O-methyl ribonucleotide
  modified_base 39: mod_base = OTHER; note = 2'-O-methyl ribonucleotide
  modified_base 40: mod_base = OTHER; note = 2'-O-methyl ribonucleotide
  modified_base 41: mod_base = OTHER; note = 2'-O-methyl ribonucleotide
  modified_base 42: mod_base = OTHER; note = 2'-O-methyl ribonucleotide
  modified_base 46: mod_base = OTHER; note = 2'-O-methyl ribonucleotide
  modified_base 48: mod_base = OTHER; note = 2'-O-methyl ribonucleotide
  modified_base 50: mod_base = OTHER; note = 2'-O-methyl ribonucleotide
  modified_base 52: mod_base = OTHER; note = 2'-O-methyl ribonucleotide
  modified_base 53: mod_base = OTHER; note = 2'-O-methyl ribonucleotide
  modified_base 54: mod_base = OTHER; note = 2'-O-methyl ribonucleotide
  modified_base 55: mod_base = OTHER; note = 2'-O-methyl ribonucleotide
  modified_base 56: mod_base = OTHER; note = 2'-O-methyl ribonucleotide
  modified_base 57: mod_base = OTHER; note = 2'-O-methyl ribonucleotide
  modified_base 60: mod_base = OTHER; note = 2'-O-methyl ribonucleotide
  modified_base 61: mod_base = OTHER; note = 2'-O-methyl ribonucleotide
  modified_base 66: mod_base = OTHER; note = 2'-O-methyl ribonucleotide
  modified_base 67: mod_base = OTHER; note = 2'-O-methyl ribonucleotide
  modified_base 70: mod_base = OTHER; note = 2'-O-methyl ribonucleotide
  modified_base 71: mod_base = OTHER; note = 2'-O-methyl ribonucleotide
  modified_base 72: mod_base = OTHER; note = 2'-O-methyl ribonucleotide
  modified_base 73: mod_base = OTHER; note = 2'-O-methyl ribonucleotide
  modified_base 74: mod_base = OTHER; note = 2'-O-methyl ribonucleotide
  modified_base 75: mod_base = OTHER; note = 2'-O-methyl ribonucleotide
  modified_base 76: mod_base = OTHER; note = 2'-O-methyl ribonucleotide
  modified_base 77: mod_base = OTHER; note = 2'-O-methyl ribonucleotide
  modified_base 78: mod_base = OTHER; note = 2'-O-methyl ribonucleotide
  modified_base 79: mod_base = OTHER; note = 2'-O-methyl ribonucleotide
  modified_base 80: mod_base = OTHER; note = 2'-O-methyl ribonucleotide
  modified_base 81: mod_base = OTHER; note = 2'-O-methyl ribonucleotide
  modified_base 83: mod_base = OTHER; note = 2'-O-methyl ribonucleotide
  modified_base 84: mod_base = OTHER; note = 2'-O-methyl ribonucleotide
  modified_base 85: mod_base = OTHER; note = 2'-O-methyl ribonucleotide
  modified_base 86: mod_base = OTHER; note = 2'-O-methyl ribonucleotide
  modified_base 87: mod_base = OTHER; note = 2'-O-methyl ribonucleotide
  modified_base 88: mod_base = OTHER; note = 2'-O-methyl ribonucleotide
  modified_base 89: mod_base = OTHER; note = 2'-O-methyl ribonucleotide
  modified_base 90: mod_base = OTHER; note = 2'-O-methyl ribonucleotide
  modified_base 91: mod_base = OTHER; note = 2'-O-methyl ribonucleotide
  modified_base 92: mod_base = OTHER; note = 2'-O-methyl ribonucleotide
  modified_base 93: mod_base = OTHER; note = 2'-O-methyl ribonucleotide
  modified_base 94: mod_base = OTHER; note = 2'-O-methyl ribonucleotide
  modified_base 95: mod_base = OTHER; note = 2'-O-methyl ribonucleotide
  modified_base 96: mod_base = OTHER; note = 2'-O-methyl ribonucleotide
  modified_base 97: mod_base = OTHER; note = 2'-O-methyl ribonucleotide
  modified_base 98: mod_base = OTHER; note = 2'-O-methyl ribonucleotide
  modified_base 99: mod_base = OTHER; note = 2'-O-methyl ribonucleotide
  modified_base 100: mod_base = OTHER; note = 2'-O-methyl ribonucleotide
  modified_base 1..4: mod_base = OTHER; note = phosphorothioate linkage
  modified_base 98..100: mod_base = OTHER; note = phosphorothioate linkage

SEQ ID NO: 2637 - RNA, 103 nt, synthetic construct; identical to SEQ ID NO: 1699
  source 1..103: mol_type = other RNA
  modified_base 1: mod_base = OTHER; note = 2'-O-methyl ribonucleotide
  modified_base 2: mod_base = OTHER; note = 2'-O-methyl ribonucleotide
  modified_base 3: mod_base = OTHER; note = 2'-O-methyl ribonucleotide
  modified_base 21: mod_base = OTHER; note = 2'-O-methyl ribonucleotide
  modified_base 28: mod_base = OTHER; note = 2'-O-methyl ribonucleotide
  modified_base 29: mod_base = OTHER; note = 2'-O-methyl ribonucleotide
  modified_base 30: mod_base = OTHER; note = 2'-O-methyl ribonucleotide
  modified_base 31: mod_base = OTHER; note = 2'-O-methyl ribonucleotide
  modified_base 32: mod_base = OTHER; note = 2'-O-methyl ribonucleotide
  modified_base 34: mod_base = OTHER; note = 2'-O-methyl ribonucleotide
  modified_base 35: mod_base = OTHER; note = 2'-O-methyl ribonucleotide
  modified_base 36: mod_base = OTHER; note = 2'-O-methyl ribonucleotide
  modified_base 37: mod_base = OTHER; note = 2'-O-methyl ribonucleotide
  modified_base 38: mod_base = OTHER; note = 2'-O-methyl ribonucleotide
  modified_base 39: mod_base = OTHER; note = 2'-O-methyl ribonucleotide
  modified_base 40: mod_base = OTHER; note = 2'-O-methyl ribonucleotide
  modified_base 41: mod_base = OTHER; note = 2'-O-methyl ribonucleotide
  modified_base 42: mod_base = OTHER; note = 2'-O-methyl ribonucleotide
  modified_base 46: mod_base = OTHER; note = 2'-O-methyl ribonucleotide
  modified_base 48: mod_base = OTHER; note = 2'-O-methyl ribonucleotide
  modified_base 50: mod_base = OTHER; note = 2'-O-methyl ribonucleotide
  modified_base 52: mod_base = OTHER; note = 2'-O-methyl ribonucleotide
  modified_base 53: mod_base = OTHER; note = 2'-O-methyl ribonucleotide
  modified_base 54: mod_base = OTHER; note = 2'-O-methyl ribonucleotide
  modified_base 55: mod_base = OTHER; note = 2'-O-methyl ribonucleotide
  modified_base 56: mod_base = OTHER; note = 2'-O-methyl ribonucleotide
  modified_base 57: mod_base = OTHER; note = 2'-O-methyl ribonucleotide
  modified_base 60: mod_base = OTHER; note = 2'-O-methyl ribonucleotide
  modified_base 61: mod_base = OTHER; note = 2'-O-methyl ribonucleotide
  modified_base 66: mod_base = OTHER; note = 2'-O-methyl ribonucleotide
  modified_base 67: mod_base = OTHER; note = 2'-O-methyl ribonucleotide
  modified_base 70: mod_base = OTHER; note = 2'-O-methyl ribonucleotide
  modified_base 71: mod_base = OTHER; note = 2'-O-methyl ribonucleotide
  modified_base 72: mod_base = OTHER; note = 2'-O-methyl ribonucleotide
  modified_base 74: mod_base = OTHER; note = 2'-O-methyl ribonucleotide
  modified_base 75: mod_base = OTHER; note = 2'-O-methyl ribonucleotide
  modified_base 76: mod_base = OTHER; note = 2'-O-methyl ribonucleotide
  modified_base 77: mod_base = OTHER; note = 2'-O-methyl ribonucleotide
  modified_base 78: mod_base = OTHER; note = 2'-O-methyl ribonucleotide
  modified_base 79: mod_base = OTHER; note = 2'-O-methyl ribonucleotide
  modified_base 80: mod_base = OTHER; note = 2'-O-methyl ribonucleotide
  modified_base 81: mod_base = OTHER; note = 2'-O-methyl ribonucleotide
  modified_base 83: mod_base = OTHER; note = 2'-O-methyl ribonucleotide
  modified_base 84: mod_base = OTHER; note = 2'-O-methyl ribonucleotide
  modified_base 85: mod_base = OTHER; note = 2'-O-methyl ribonucleotide
  modified_base 86: mod_base = OTHER; note = 2'-O-methyl ribonucleotide
  modified_base 87: mod_base = OTHER; note = 2'-O-methyl ribonucleotide
  modified_base 88: mod_base = OTHER; note = 2'-O-methyl ribonucleotide
  modified_base 89: mod_base = OTHER; note = 2'-O-methyl ribonucleotide
  modified_base 90: mod_base = OTHER; note = 2'-O-methyl ribonucleotide
  modified_base 91: mod_base = OTHER; note = 2'-O-methyl ribonucleotide
  modified_base 92: mod_base = OTHER; note = 2'-O-methyl ribonucleotide
  modified_base 93: mod_base = OTHER; note = 2'-O-methyl ribonucleotide
  modified_base 94: mod_base = OTHER; note = 2'-O-methyl ribonucleotide
  modified_base 95: mod_base = OTHER; note = 2'-O-methyl ribonucleotide
  modified_base 96: mod_base = OTHER; note = 2'-O-methyl ribonucleotide
  modified_base 97: mod_base = OTHER; note = 2'-O-methyl ribonucleotide
  modified_base 98: mod_base = OTHER; note = 2'-O-methyl ribonucleotide
  modified_base 99: mod_base = OTHER; note = 2'-O-methyl ribonucleotide
  modified_base 100: mod_base = OTHER; note = 2'-O-methyl ribonucleotide
  modified_base 1..4: mod_base = OTHER; note = phosphorothioate linkage
  modified_base 98..100: mod_base = OTHER; note = phosphorothioate linkage

SEQ ID NO: 2638 - RNA, 103 nt, synthetic construct; identical to SEQ ID NO: 1699
  source 1..103: mol_type = other RNA
  modified_base 1: mod_base = OTHER; note = 2'-O-methyl ribonucleotide
  modified_base 2: mod_base = OTHER; note = 2'-O-methyl ribonucleotide
  modified_base 3: mod_base = OTHER; note = 2'-O-methyl ribonucleotide
  modified_base 21: mod_base = OTHER; note = 2'-O-methyl ribonucleotide
  modified_base 28: mod_base = OTHER; note = 2'-O-methyl ribonucleotide
  modified_base 29: mod_base = OTHER; note = 2'-O-methyl ribonucleotide
  modified_base 30: mod_base = OTHER; note = 2'-O-methyl ribonucleotide
  modified_base 31: mod_base = OTHER; note = 2'-O-methyl ribonucleotide
  modified_base 32: mod_base = OTHER; note = 2'-O-methyl ribonucleotide
  modified_base 33: mod_base = OTHER; note = 2'-O-methyl ribonucleotide
  modified_base 34: mod_base = OTHER; note = 2'-O-methyl ribonucleotide
  modified_base 35: mod_base = OTHER; note = 2'-O-methyl ribonucleotide
  modified_base 36: mod_base = OTHER; note = 2'-O-methyl ribonucleotide
  modified_base 37: mod_base = OTHER; note = 2'-O-methyl ribonucleotide
  modified_base 38: mod_base = OTHER; note = 2'-O-methyl ribonucleotide
  modified_base 39: mod_base = OTHER; note = 2'-O-methyl ribonucleotide
  modified_base 40: mod_base = OTHER; note = 2'-O-methyl ribonucleotide
  modified_base 41: mod_base = OTHER; note = 2'-O-methyl ribonucleotide
  modified_base 42: mod_base = OTHER; note = 2'-O-methyl ribonucleotide
  modified_base 46: mod_base = OTHER; note = 2'-O-methyl ribonucleotide
  modified_base 48: mod_base = OTHER; note = 2'-O-methyl ribonucleotide
  modified_base 50: mod_base = OTHER; note = 2'-O-methyl ribonucleotide
  modified_base 52: mod_base = OTHER; note = 2'-O-methyl ribonucleotide
  modified_base 53: mod_base = OTHER; note = 2'-O-methyl ribonucleotide
  modified_base 54: mod_base = OTHER; note = 2'-O-methyl ribonucleotide
  modified_base 55: mod_base = OTHER; note = 2'-O-methyl ribonucleotide
  modified_base 56: mod_base = OTHER; note = 2'-O-methyl ribonucleotide
  modified_base 57: mod_base = OTHER; note = 2'-O-methyl ribonucleotide
  modified_base 60: mod_base = OTHER; note = 2'-O-methyl ribonucleotide
  modified_base 61: mod_base = OTHER; note = 2'-O-methyl ribonucleotide
  modified_base 66: mod_base = OTHER; note = 2'-O-methyl ribonucleotide
  modified_base 67: mod_base = OTHER; note = 2'-O-methyl ribonucleotide
  modified_base 70: mod_base = OTHER; note = 2'-O-methyl ribonucleotide
  modified_base 71: mod_base = OTHER; note = 2'-O-methyl ribonucleotide
  modified_base 72: mod_base = OTHER; note = 2'-O-methyl ribonucleotide
  modified_base 73: mod_base = OTHER; note = 2'-O-methyl ribonucleotide
  modified_base 74: mod_base = OTHER; note = 2'-O-methyl ribonucleotide
  modified_base 75: mod_base = OTHER; note = 2'-O-methyl ribonucleotide
  modified_base 76: mod_base = OTHER; note = 2'-O-methyl ribonucleotide
  modified_base 77: mod_base = OTHER; note = 2'-O-methyl ribonucleotide
  modified_base 78: mod_base = OTHER; note = 2'-O-methyl ribonucleotide
  modified_base 79: mod_base = OTHER; note = 2'-O-methyl ribonucleotide
  modified_base 80: mod_base = OTHER; note = 2'-O-methyl ribonucleotide
  modified_base 81: mod_base = OTHER; note = 2'-O-methyl ribonucleotide
  modified_base 83: mod_base = OTHER; note = 2'-O-methyl ribonucleotide
  modified_base 84: mod_base = OTHER; note = 2'-O-methyl ribonucleotide
  modified_base 85: mod_base = OTHER; note = 2'-O-methyl ribonucleotide
  modified_base 86: mod_base = OTHER; note = 2'-O-methyl ribonucleotide
  modified_base 87: mod_base = OTHER; note = 2'-O-methyl ribonucleotide
  modified_base 88: mod_base = OTHER; note = 2'-O-methyl ribonucleotide
  modified_base 89: mod_base = OTHER; note = 2'-O-methyl ribonucleotide
  modified_base 90: mod_base = OTHER; note = 2'-O-methyl ribonucleotide
  modified_base 91: mod_base = OTHER; note = 2'-O-methyl ribonucleotide
  modified_base 92: mod_base = OTHER; note = 2'-O-methyl ribonucleotide
  modified_base 93: mod_base = OTHER; note = 2'-O-methyl ribonucleotide
  modified_base 94: mod_base = OTHER; note = 2'-O-methyl ribonucleotide
  modified_base 95: mod_base = OTHER; note = 2'-O-methyl ribonucleotide
  modified_base 96: mod_base = OTHER; note = 2'-O-methyl ribonucleotide
  modified_base 97: mod_base = OTHER; note = 2'-O-methyl ribonucleotide
  modified_base 98: mod_base = OTHER; note = 2'-O-methyl ribonucleotide
  modified_base 99: mod_base = OTHER; note = 2'-O-methyl ribonucleotide
  modified_base 100: mod_base = OTHER; note = 2'-O-methyl ribonucleotide
  modified_base 1..4: mod_base = OTHER; note = phosphorothioate linkage
  modified_base 64..65: mod_base = OTHER; note = phosphorothioate linkage
  modified_base 98..100: mod_base = OTHER; note = phosphorothioate linkage

SEQ ID NO: 2639 - RNA, 103 nt, synthetic construct; identical to SEQ ID NO: 1699
  source 1..103: mol_type = other RNA
  modified_base 1: mod_base = OTHER; note = 2'-O-methyl ribonucleotide
  modified_base 2: mod_base = OTHER; note = 2'-O-methyl ribonucleotide
  modified_base 3: mod_base = OTHER; note = 2'-O-methyl ribonucleotide
  modified_base 21: mod_base = OTHER; note = 2'-O-methyl ribonucleotide
  modified_base 28: mod_base = OTHER; note = 2'-O-methyl ribonucleotide
  modified_base 29: mod_base = OTHER; note = 2'-O-methyl ribonucleotide
  modified_base 30: mod_base = OTHER; note = 2'-O-methyl ribonucleotide
  modified_base 31: mod_base = OTHER; note = 2'-O-methyl ribonucleotide
  modified_base 32: mod_base = OTHER; note = 2'-O-methyl ribonucleotide
  modified_base 34: mod_base = OTHER; note = 2'-O-methyl ribonucleotide
  modified_base 35: mod_base = OTHER; note = 2'-O-methyl ribonucleotide
  modified_base 36: mod_base = OTHER; note = 2'-O-methyl ribonucleotide
  modified_base 37: mod_base = OTHER; note = 2'-O-methyl ribonucleotide
  modified_base 38: mod_base = OTHER; note = 2'-O-methyl ribonucleotide
  modified_base 39: mod_base = OTHER; note = 2'-O-methyl ribonucleotide
  modified_base 40: mod_base = OTHER; note = 2'-O-methyl ribonucleotide
  modified_base 41: mod_base = OTHER; note = 2'-O-methyl ribonucleotide
  modified_base 42: mod_base = OTHER; note = 2'-O-methyl ribonucleotide
  modified_base 46: mod_base = OTHER; note = 2'-O-methyl ribonucleotide
  modified_base 48: mod_base = OTHER; note = 2'-O-methyl ribonucleotide
  modified_base 50: mod_base = OTHER; note = 2'-O-methyl ribonucleotide
  modified_base 52: mod_base = OTHER; note = 2'-O-methyl ribonucleotide
  modified_base 53: mod_base = OTHER; note = 2'-O-methyl ribonucleotide
  modified_base 54: mod_base = OTHER; note = 2'-O-methyl ribonucleotide
  modified_base 55: mod_base = OTHER; note = 2'-O-methyl ribonucleotide
  modified_base 56: mod_base = OTHER; note = 2'-O-methyl ribonucleotide
  modified_base 57: mod_base = OTHER; note = 2'-O-methyl ribonucleotide
  modified_base 60: mod_base = OTHER; note = 2'-O-methyl ribonucleotide
  modified_base 61: mod_base = OTHER; note = 2'-O-methyl ribonucleotide
  modified_base 66: mod_base = OTHER; note = 2'-O-methyl ribonucleotide
  modified_base 67: mod_base = OTHER; note = 2'-O-methyl ribonucleotide
  modified_base 70: mod_base = OTHER; note = 2'-O-methyl ribonucleotide
  modified_base 71: mod_base = OTHER; note = 2'-O-methyl ribonucleotide
  modified_base 72: mod_base = OTHER; note = 2'-O-methyl ribonucleotide
  modified_base 74: mod_base = OTHER; note = 2'-O-methyl ribonucleotide
  modified_base 75: mod_base = OTHER; note = 2'-O-methyl ribonucleotide
  modified_base 76: mod_base = OTHER; note = 2'-O-methyl ribonucleotide
  modified_base 77: mod_base = OTHER; note = 2'-O-methyl ribonucleotide
  modified_base 78: mod_base = OTHER; note = 2'-O-methyl ribonucleotide
  modified_base 79: mod_base = OTHER; note = 2'-O-methyl ribonucleotide
  modified_base 80: mod_base = OTHER; note = 2'-O-methyl ribonucleotide
  modified_base 81: mod_base = OTHER; note = 2'-O-methyl ribonucleotide
  modified_base 83: mod_base = OTHER; note = 2'-O-methyl ribonucleotide
  modified_base 84: mod_base = OTHER; note = 2'-O-methyl ribonucleotide
  modified_base 85: mod_base = OTHER; note = 2'-O-methyl ribonucleotide
  modified_base 86: mod_base = OTHER; note = 2'-O-methyl ribonucleotide
  modified_base 87: mod_base = OTHER; note = 2'-O-methyl ribonucleotide
  modified_base 88: mod_base = OTHER; note = 2'-O-methyl ribonucleotide
  modified_base 89: mod_base = OTHER; note = 2'-O-methyl ribonucleotide
  modified_base 90: mod_base = OTHER; note = 2'-O-methyl ribonucleotide
  modified_base 91: mod_base = OTHER; note = 2'-O-methyl ribonucleotide
  modified_base 92: mod_base = OTHER; note = 2'-O-methyl ribonucleotide
  modified_base 93: mod_base = OTHER; note = 2'-O-methyl ribonucleotide
  modified_base 94: mod_base = OTHER; note = 2'-O-methyl ribonucleotide
  modified_base 95: mod_base = OTHER; note = 2'-O-methyl ribonucleotide
  modified_base 96: mod_base = OTHER; note = 2'-O-methyl ribonucleotide
  modified_base 97: mod_base = OTHER; note = 2'-O-methyl ribonucleotide
  modified_base 98: mod_base = OTHER; note = 2'-O-methyl ribonucleotide
  modified_base 99: mod_base = OTHER; note = 2'-O-methyl ribonucleotide
  modified_base 100: mod_base = OTHER; note = 2'-O-methyl ribonucleotide
  modified_base 1..4: mod_base = OTHER; note = phosphorothioate linkage
  modified_base 64..65: mod_base = OTHER; note = phosphorothioate linkage
  modified_base 98..100: mod_base = OTHER; note = phosphorothioate linkage

SEQ ID NO: 2640 - RNA, 103 nt, synthetic construct; identical to SEQ ID NO: 1700
  source 1..103: mol_type = other RNA
  modified_base 1: mod_base = OTHER; note = 2'-O-methyl ribonucleotide
  modified_base 2: mod_base = OTHER; note = 2'-O-methyl ribonucleotide
  modified_base 3: mod_base = OTHER; note = 2'-O-methyl ribonucleotide
  modified_base 21: mod_base = OTHER; note = 2'-O-methyl ribonucleotide
  modified_base 28: mod_base = OTHER; note = 2'-O-methyl ribonucleotide
  modified_base 29: mod_base = OTHER; note = 2'-O-methyl ribonucleotide
  modified_base 30: mod_base = OTHER; note = 2'-O-methyl ribonucleotide
  modified_base 31: mod_base = OTHER; note = 2'-O-methyl ribonucleotide
  modified_base 32: mod_base = OTHER; note = 2'-O-methyl ribonucleotide
  modified_base 33: mod_base = OTHER; note = 2'-O-methyl ribonucleotide
  modified_base 34: mod_base = OTHER; note = 2'-O-methyl ribonucleotide
  modified_base 35: mod_base = OTHER; note = 2'-O-methyl ribonucleotide
  modified_base 36: mod_base = OTHER; note = 2'-O-methyl ribonucleotide
  modified_base 37: mod_base = OTHER; note = 2'-O-methyl ribonucleotide
  modified_base 38: mod_base = OTHER; note = 2'-O-methyl ribonucleotide
  modified_base 39: mod_base = OTHER; note = 2'-O-methyl ribonucleotide
  modified_base 40: mod_base = OTHER; note = 2'-O-methyl ribonucleotide
  modified_base 41: mod_base = OTHER; note = 2'-O-methyl ribonucleotide
  modified_base 42: mod_base = OTHER; note = 2'-O-methyl ribonucleotide
  modified_base 46: mod_base = OTHER; note = 2'-O-methyl ribonucleotide
  modified_base 48: mod_base = OTHER; note = 2'-O-methyl ribonucleotide
  modified_base 50: mod_base = OTHER; note = 2'-O-methyl ribonucleotide
  modified_base 52: mod_base = OTHER; note = 2'-O-methyl ribonucleotide
  modified_base 53: mod_base = OTHER; note = 2'-O-methyl ribonucleotide
  modified_base 54: mod_base = OTHER; note = 2'-O-methyl ribonucleotide
  modified_base 57: mod_base = OTHER; note = 2'-O-methyl ribonucleotide
  modified_base 61: mod_base = OTHER; note = 2'-O-methyl ribonucleotide
  modified_base 66: mod_base = OTHER; note = 2'-O-methyl ribonucleotide
  modified_base 67: mod_base = OTHER; note = 2'-O-methyl ribonucleotide
  modified_base 70: mod_base = OTHER; note = 2'-O-methyl ribonucleotide
  modified_base 71: mod_base = OTHER; note = 2'-O-methyl ribonucleotide
  modified_base 72: mod_base = OTHER; note = 2'-O-methyl ribonucleotide
  modified_base 74: mod_base = OTHER; note = 2'-O-methyl ribonucleotide
  modified_base 75: mod_base = OTHER; note = 2'-O-methyl ribonucleotide
  modified_base 76: mod_base = OTHER; note = 2'-O-methyl ribonucleotide
  modified_base 77: mod_base = OTHER; note = 2'-O-methyl ribonucleotide
  modified_base 78: mod_base = OTHER; note = 2'-O-methyl ribonucleotide
  modified_base 79: mod_base = OTHER; note = 2'-O-methyl ribonucleotide
  modified_base 80: mod_base = OTHER; note = 2'-O-methyl ribonucleotide
  modified_base 82: mod_base = OTHER; note = 2'-O-methyl ribonucleotide
  modified_base 83: mod_base = OTHER; note = 2'-O-methyl ribonucleotide
  modified_base 84: mod_base = OTHER; note = 2'-O-methyl ribonucleotide
  modified_base 85: mod_base = OTHER; note = 2'-O-methyl ribonucleotide
  modified_base 86: mod_base = OTHER; note = 2'-O-methyl ribonucleotide
  modified_base 87: mod_base = OTHER; note = 2'-O-methyl ribonucleotide
  modified_base 89: mod_base = OTHER; note = 2'-O-methyl ribonucleotide
  modified_base 92: mod_base = OTHER; note = 2'-O-methyl ribonucleotide
  modified_base 93: mod_base = OTHER; note = 2'-O-methyl ribonucleotide
  modified_base 94: mod_base = OTHER; note = 2'-O-methyl ribonucleotide
  modified_base 95: mod_base = OTHER; note = 2'-O-methyl ribonucleotide
  modified_base 96: mod_base = OTHER; note = 2'-O-methyl ribonucleotide
  modified_base 97: mod_base = OTHER; note = 2'-O-methyl ribonucleotide
  modified_base 98: mod_base = OTHER; note = 2'-O-methyl ribonucleotide
  modified_base 99: mod_base = OTHER; note = 2'-O-methyl ribonucleotide
  modified_base 100: mod_base = OTHER; note = 2'-O-methyl ribonucleotide
  modified_base 1..4: mod_base = OTHER; note = phosphorothioate linkage
  modified_base 64..65: mod_base = OTHER; note = phosphorothioate linkage
  modified_base 98..100: mod_base = OTHER; note = phosphorothioate linkage

SEQ ID NO: 2641 - RNA, 103 nt, synthetic construct; identical to SEQ ID NO: 1700
  source 1..103: mol_type = other RNA
  modified_base 1: mod_base = OTHER; note = 2'-O-methyl ribonucleotide
  modified_base 2: mod_base = OTHER; note = 2'-O-methyl ribonucleotide
  modified_base 3: mod_base = OTHER; note = 2'-O-methyl ribonucleotide
  modified_base 21: mod_base = OTHER; note = 2'-O-methyl ribonucleotide
  modified_base 28: mod_base = OTHER; note = 2'-O-methyl ribonucleotide
  modified_base 29: mod_base = OTHER; note = 2'-O-methyl ribonucleotide
  modified_base 30: mod_base = OTHER; note = 2'-O-methyl ribonucleotide
  modified_base 31: mod_base = OTHER; note = 2'-O-methyl ribonucleotide
  modified_base 32: mod_base = OTHER; note = 2'-O-methyl ribonucleotide
  modified_base 33: mod_base = OTHER; note = 2'-O-methyl ribonucleotide
  modified_base 34: mod_base = OTHER; note = 2'-O-methyl ribonucleotide
  modified_base 35: mod_base = OTHER; note = 2'-O-methyl ribonucleotide
  modified_base 36: mod_base = OTHER; note = 2'-O-methyl ribonucleotide
  modified_base 37: mod_base = OTHER; note = 2'-O-methyl ribonucleotide
  modified_base 38: mod_base = OTHER; note = 2'-O-methyl ribonucleotide
  modified_base 39: mod_base = OTHER; note = 2'-O-methyl ribonucleotide
  modified_base 40: mod_base = OTHER; note = 2'-O-methyl ribonucleotide
  modified_base 41: mod_base = OTHER; note = 2'-O-methyl ribonucleotide
  modified_base 42: mod_base = OTHER; note = 2'-O-methyl ribonucleotide
  modified_base 46: mod_base = OTHER; note = 2'-O-methyl ribonucleotide
  modified_base 48: mod_base = OTHER; note = 2'-O-methyl ribonucleotide
  modified_base 50: mod_base = OTHER; note = 2'-O-methyl ribonucleotide
  modified_base 52: mod_base = OTHER; note = 2'-O-methyl ribonucleotide
  modified_base 53: mod_base = OTHER; note = 2'-O-methyl ribonucleotide
  modified_base 54: mod_base = OTHER; note = 2'-O-methyl ribonucleotide
  modified_base 55: mod_base = OTHER; note = 2'-O-methyl ribonucleotide
  modified_base 56: mod_base = OTHER; note = 2'-O-methyl ribonucleotide
  modified_base 57: mod_base = OTHER; note = 2'-O-methyl ribonucleotide
  modified_base 60: mod_base = OTHER; note = 2'-O-methyl ribonucleotide
  modified_base 61: mod_base = OTHER; note = 2'-O-methyl ribonucleotide
  modified_base 66: mod_base = OTHER; note = 2'-O-methyl ribonucleotide
  modified_base 67: mod_base = OTHER; note = 2'-O-methyl ribonucleotide
  modified_base 70: mod_base = OTHER; note = 2'-O-methyl ribonucleotide
  modified_base 71: mod_base = OTHER; note = 2'-O-methyl ribonucleotide
  modified_base 72: mod_base = OTHER; note = 2'-O-methyl ribonucleotide
  modified_base 74: mod_base = OTHER; note = 2'-O-methyl ribonucleotide
  modified_base 75: mod_base = OTHER; note = 2'-O-methyl ribonucleotide
  modified_base 76: mod_base = OTHER; note = 2'-O-methyl ribonucleotide
  modified_base 77: mod_base = OTHER; note = 2'-O-methyl ribonucleotide
  modified_base 78: mod_base = OTHER; note = 2'-O-methyl ribonucleotide
  modified_base 79: mod_base = OTHER; note = 2'-O-methyl ribonucleotide
  modified_base 80: mod_base = OTHER; note = 2'-O-methyl ribonucleotide
  modified_base 82: mod_base = OTHER; note = 2'-O-methyl ribonucleotide
  modified_base 83: mod_base = OTHER; note = 2'-O-methyl ribonucleotide
  modified_base 84: mod_base = OTHER; note = 2'-O-methyl ribonucleotide
  modified_base 85: mod_base = OTHER; note = 2'-O-methyl ribonucleotide
  modified_base 86: mod_base = OTHER; note = 2'-O-methyl ribonucleotide
  modified_base 87: mod_base = OTHER; note = 2'-O-methyl ribonucleotide
  modified_base 89: mod_base = OTHER; note = 2'-O-methyl ribonucleotide
  modified_base 92: mod_base = OTHER; note = 2'-O-methyl ribonucleotide
  modified_base 93: mod_base = OTHER; note = 2'-O-methyl ribonucleotide
  modified_base 94: mod_base = OTHER; note = 2'-O-methyl ribonucleotide
  modified_base 95: mod_base = OTHER; note = 2'-O-methyl ribonucleotide
  modified_base 96: mod_base = OTHER; note = 2'-O-methyl ribonucleotide
  modified_base 97: mod_base = OTHER; note = 2'-O-methyl ribonucleotide
  modified_base 98: mod_base = OTHER; note = 2'-O-methyl ribonucleotide
  modified_base 99: mod_base = OTHER; note = 2'-O-methyl ribonucleotide
  modified_base 100: mod_base = OTHER; note = 2'-O-methyl ribonucleotide
  modified_base 1..4: mod_base = OTHER; note = phosphorothioate linkage
  modified_base 64..65: mod_base = OTHER; note = phosphorothioate linkage
  modified_base 98..100: mod_base = OTHER; note = phosphorothioate linkage

SEQ ID NO: 2642 - RNA, 103 nt, synthetic construct; identical to SEQ ID NO: 1700
  source 1..103: mol_type = other RNA
  modified_base 1: mod_base = OTHER; note = 2'-O-methyl ribonucleotide
  modified_base 2: mod_base = OTHER; note = 2'-O-methyl ribonucleotide
  modified_base 3: mod_base = OTHER; note = 2'-O-methyl ribonucleotide
  modified_base 21: mod_base = OTHER; note = 2'-O-methyl ribonucleotide
  modified_base 28: mod_base = OTHER; note = 2'-O-methyl ribonucleotide
  modified_base 29: mod_base = OTHER; note = 2'-O-methyl ribonucleotide
  modified_base 30: mod_base = OTHER; note = 2'-O-methyl ribonucleotide
  modified_base 31: mod_base = OTHER; note = 2'-O-methyl ribonucleotide
  modified_base 32: mod_base = OTHER; note = 2'-O-methyl ribonucleotide
  modified_base 33: mod_base = OTHER; note = 2'-O-methyl ribonucleotide
  modified_base 34: mod_base = OTHER; note = 2'-O-methyl ribonucleotide
  modified_base 35: mod_base = OTHER; note = 2'-O-methyl ribonucleotide
  modified_base 36: mod_base = OTHER; note = 2'-O-methyl ribonucleotide
  modified_base 37: mod_base = OTHER; note = 2'-O-methyl ribonucleotide
  modified_base 38: mod_base = OTHER; note = 2'-O-methyl ribonucleotide
  modified_base 39: mod_base = OTHER; note = 2'-O-methyl ribonucleotide
  modified_base 40: mod_base = OTHER; note = 2'-O-methyl ribonucleotide
  modified_base 41: mod_base = OTHER; note = 2'-O-methyl ribonucleotide
  modified_base 42: mod_base = OTHER; note = 2'-O-methyl ribonucleotide
  modified_base 46: mod_base = OTHER; note = 2'-O-methyl ribonucleotide
  modified_base 48: mod_base = OTHER; note = 2'-O-methyl ribonucleotide
  modified_base 50: mod_base = OTHER; note = 2'-O-methyl ribonucleotide
  modified_base 52: mod_base = OTHER; note = 2'-O-methyl ribonucleotide
  modified_base 53: mod_base = OTHER; note = 2'-O-methyl ribonucleotide
  modified_base 54: mod_base = OTHER; note = 2'-O-methyl ribonucleotide
  modified_base 57: mod_base = OTHER; note = 2'-O-methyl ribonucleotide
  modified_base 61: mod_base = OTHER; note = 2'-O-methyl ribonucleotide
  modified_base 66: mod_base = OTHER; note = 2'-O-methyl ribonucleotide
  modified_base 67: mod_base = OTHER; note = 2'-O-methyl ribonucleotide
  modified_base 70: mod_base = OTHER; note = 2'-O-methyl ribonucleotide
  modified_base 71: mod_base = OTHER; note = 2'-O-methyl ribonucleotide
  modified_base 72: mod_base = OTHER; note = 2'-O-methyl ribonucleotide
  modified_base 73: mod_base = OTHER; note = 2'-O-methyl ribonucleotide
  modified_base 74: mod_base = OTHER; note = 2'-O-methyl ribonucleotide
  modified_base 75: mod_base = OTHER; note = 2'-O-methyl ribonucleotide
  modified_base 76: mod_base = OTHER; note = 2'-O-methyl ribonucleotide
  modified_base 77: mod_base = OTHER; note = 2'-O-methyl ribonucleotide
  modified_base 78: mod_base = OTHER; note = 2'-O-methyl ribonucleotide
  modified_base 79: mod_base = OTHER; note = 2'-O-methyl ribonucleotide
  modified_base 80: mod_base = OTHER; note = 2'-O-methyl ribonucleotide
  modified_base 82: mod_base = OTHER; note = 2'-O-methyl ribonucleotide
  modified_base 83: mod_base = OTHER; note = 2'-O-methyl ribonucleotide
  modified_base 84: mod_base = OTHER; note = 2'-O-methyl ribonucleotide
  modified_base 85: mod_base = OTHER; note = 2'-O-methyl ribonucleotide
  modified_base 86: mod_base = OTHER; note = 2'-O-methyl ribonucleotide
  modified_base 87: mod_base = OTHER; note = 2'-O-methyl ribonucleotide
  modified_base 89: mod_base = OTHER; note = 2'-O-methyl ribonucleotide
  modified_base 92: mod_base = OTHER; note = 2'-O-methyl ribonucleotide
  modified_base 93: mod_base = OTHER; note = 2'-O-methyl ribonucleotide
  modified_base 94: mod_base = OTHER; note = 2'-O-methyl ribonucleotide
  modified_base 95: mod_base = OTHER; note = 2'-O-methyl ribonucleotide
  modified_base 96: mod_base = OTHER; note = 2'-O-methyl ribonucleotide
  modified_base 97: mod_base = OTHER; note = 2'-O-methyl ribonucleotide
  modified_base 98: mod_base = OTHER; note = 2'-O-methyl ribonucleotide
  modified_base 99: mod_base = OTHER; note = 2'-O-methyl ribonucleotide
  modified_base 100: mod_base = OTHER; note = 2'-O-methyl ribonucleotide
  modified_base 1..4: mod_base = OTHER; note = phosphorothioate linkage
  modified_base 64..65: mod_base = OTHER; note = phosphorothioate linkage
  modified_base 98..100: mod_base = OTHER; note = phosphorothioate linkage

SEQ ID NO: 2643 - RNA, 103 nt, synthetic construct; identical to SEQ ID NO: 1700
  source 1..103: mol_type = other RNA
  modified_base 1: mod_base = OTHER; note = 2'-O-methyl ribonucleotide
  modified_base 2: mod_base = OTHER; note = 2'-O-methyl ribonucleotide
  modified_base 3: mod_base = OTHER; note = 2'-O-methyl ribonucleotide
  modified_base 21: mod_base = OTHER; note = 2'-O-methyl ribonucleotide
  modified_base 28: mod_base = OTHER; note = 2'-O-methyl ribonucleotide
  modified_base 29: mod_base = OTHER; note = 2'-O-methyl ribonucleotide
  modified_base 30: mod_base = OTHER; note = 2'-O-methyl ribonucleotide
  modified_base 31: mod_base = OTHER; note = 2'-O-methyl ribonucleotide
  modified_base 32: mod_base = OTHER; note = 2'-O-methyl ribonucleotide
  modified_base 33: mod_base = OTHER; note = 2'-O-methyl ribonucleotide
  modified_base 34: mod_base = OTHER; note = 2'-O-methyl ribonucleotide
  modified_base 35: mod_base = OTHER; note = 2'-O-methyl ribonucleotide
  modified_base 36: mod_base = OTHER; note = 2'-O-methyl ribonucleotide
  modified_base 37: mod_base = OTHER; note = 2'-O-methyl ribonucleotide
  modified_base 38: mod_base = OTHER; note = 2'-O-methyl ribonucleotide
  modified_base 39: mod_base = OTHER; note = 2'-O-methyl ribonucleotide
  modified_base 40: mod_base = OTHER; note = 2'-O-methyl ribonucleotide
  modified_base 41: mod_base = OTHER; note = 2'-O-methyl ribonucleotide
  modified_base 42: mod_base = OTHER; note = 2'-O-methyl ribonucleotide
  modified_base 46: mod_base = OTHER; note = 2'-O-methyl ribonucleotide
  modified_base 48: mod_base = OTHER; note = 2'-O-methyl ribonucleotide
  modified_base 50: mod_base = OTHER; note = 2'-O-methyl ribonucleotide
  modified_base 52: mod_base = OTHER; note = 2'-O-methyl ribonucleotide
  modified_base 53: mod_base = OTHER; note = 2'-O-methyl ribonucleotide
  modified_base 54: mod_base = OTHER; note = 2'-O-methyl ribonucleotide
  modified_base 57: mod_base = OTHER; note = 2'-O-methyl ribonucleotide
  modified_base 61: mod_base = OTHER; note = 2'-O-methyl ribonucleotide
  modified_base 66: mod_base = OTHER; note = 2'-O-methyl ribonucleotide
  modified_base 67: mod_base = OTHER; note = 2'-O-methyl ribonucleotide
  modified_base 70: mod_base = OTHER; note = 2'-O-methyl ribonucleotide
  modified_base 71: mod_base = OTHER; note = 2'-O-methyl ribonucleotide
  modified_base 72: mod_base = OTHER; note = 2'-O-methyl ribonucleotide
  modified_base 73: mod_base = OTHER; note = 2'-O-methyl ribonucleotide
  modified_base 74: mod_base = OTHER; note = 2'-O-methyl ribonucleotide
  modified_base 75: mod_base = OTHER; note = 2'-O-methyl ribonucleotide
  modified_base 76: mod_base = OTHER; note = 2'-O-methyl ribonucleotide
  modified_base 77: mod_base = OTHER; note = 2'-O-methyl ribonucleotide
  modified_base 78: mod_base = OTHER; note = 2'-O-methyl ribonucleotide
  modified_base 79: mod_base = OTHER; note = 2'-O-methyl ribonucleotide
  modified_base 80: mod_base = OTHER; note = 2'-O-methyl ribonucleotide
  modified_base 82: mod_base = OTHER; note = 2'-O-methyl ribonucleotide
  modified_base 83: mod_base = OTHER; note = 2'-O-methyl ribonucleotide
  modified_base 84: mod_base = OTHER; note = 2'-O-methyl ribonucleotide
  modified_base 85: mod_base = OTHER; note = 2'-O-methyl ribonucleotide
  modified_base 86: mod_base = OTHER; note = 2'-O-methyl ribonucleotide
  modified_base 87: mod_base = OTHER; note = 2'-O-methyl ribonucleotide
  modified_base 89: mod_base = OTHER; note = 2'-O-methyl ribonucleotide
  modified_base 91: mod_base = OTHER; note = 2'-O-methyl ribonucleotide
  modified_base 92: mod_base = OTHER; note = 2'-O-methyl ribonucleotide
  modified_base 93: mod_base = OTHER; note = 2'-O-methyl ribonucleotide
  modified_base 94: mod_base = OTHER; note = 2'-O-methyl ribonucleotide
  modified_base 95: mod_base = OTHER; note = 2'-O-methyl ribonucleotide
  modified_base 96: mod_base = OTHER; note = 2'-O-methyl ribonucleotide
  modified_base 97: mod_base = OTHER; note = 2'-O-methyl ribonucleotide
  modified_base 98: mod_base = OTHER; note = 2'-O-methyl ribonucleotide
  modified_base 99: mod_base = OTHER; note = 2'-O-methyl ribonucleotide
  modified_base 100: mod_base = OTHER; note = 2'-O-methyl ribonucleotide
  modified_base 1..4: mod_base = OTHER; note = phosphorothioate linkage
  modified_base 64..65: mod_base = OTHER; note = phosphorothioate linkage
  modified_base 98..100: mod_base = OTHER; note = phosphorothioate linkage

SEQ ID NO: 2644 - RNA, 103 nt, synthetic construct; identical to SEQ ID NO: 1700
  source 1..103: mol_type = other RNA
  modified_base 1: mod_base = OTHER; note = 2'-O-methyl ribonucleotide
  modified_base 2: mod_base = OTHER; note = 2'-O-methyl ribonucleotide
  modified_base 3: mod_base = OTHER; note = 2'-O-methyl ribonucleotide
  modified_base 21: mod_base = OTHER; note = 2'-O-methyl ribonucleotide
  modified_base 28: mod_base = OTHER; note = 2'-O-methyl ribonucleotide
  modified_base 29: mod_base = OTHER; note = 2'-O-methyl ribonucleotide
  modified_base 30: mod_base = OTHER; note = 2'-O-methyl ribonucleotide
  modified_base 31: mod_base = OTHER; note = 2'-O-methyl ribonucleotide
  modified_base 32: mod_base = OTHER; note = 2'-O-methyl ribonucleotide
  modified_base 34: mod_base = OTHER; note = 2'-O-methyl ribonucleotide
  modified_base 35: mod_base = OTHER; note = 2'-O-methyl ribonucleotide
  modified_base 36: mod_base = OTHER; note = 2'-O-methyl ribonucleotide
  modified_base 37: mod_base = OTHER; note = 2'-O-methyl ribonucleotide
  modified_base 38: mod_base = OTHER; note = 2'-O-methyl ribonucleotide
  modified_base 39: mod_base = OTHER; note = 2'-O-methyl ribonucleotide
  modified_base 40: mod_base = OTHER; note = 2'-O-methyl ribonucleotide
  modified_base 41: mod_base = OTHER; note = 2'-O-methyl ribonucleotide
  modified_base 42: mod_base = OTHER; note = 2'-O-methyl ribonucleotide
  modified_base 46: mod_base = OTHER; note = 2'-O-methyl ribonucleotide
  modified_base 48: mod_base = OTHER; note = 2'-O-methyl ribonucleotide
  modified_base 50: mod_base = OTHER; note = 2'-O-methyl ribonucleotide
  modified_base 52: mod_base = OTHER; note = 2'-O-methyl ribonucleotide
  modified_base 53: mod_base = OTHER; note = 2'-O-methyl ribonucleotide
  modified_base 54: mod_base = OTHER; note = 2'-O-methyl ribonucleotide
  modified_base 57: mod_base = OTHER; note = 2'-O-methyl ribonucleotide
  modified_base 61: mod_base = OTHER; note = 2'-O-methyl ribonucleotide
  modified_base 66: mod_base = OTHER; note = 2'-O-methyl ribonucleotide
  modified_base 67: mod_base = OTHER; note = 2'-O-methyl ribonucleotide
  modified_base 70: mod_base = OTHER; note = 2'-O-methyl ribonucleotide
  modified_base 71: mod_base = OTHER; note = 2'-O-methyl ribonucleotide
  modified_base 72: mod_base = OTHER; note = 2'-O-methyl ribonucleotide
  modified_base 73: mod_base = OTHER; note = 2'-O-methyl ribonucleotide
  modified_base 74: mod_base = OTHER; note = 2'-O-methyl ribonucleotide
  modified_base 75: mod_base = OTHER; note = 2'-O-methyl ribonucleotide
  modified_base 76: mod_base = OTHER; note = 2'-O-methyl ribonucleotide
  modified_base 77: mod_base = OTHER; note = 2'-O-methyl ribonucleotide
  modified_base 78: mod_base = OTHER; note = 2'-O-methyl ribonucleotide
  modified_base 79: mod_base = OTHER; note = 2'-O-methyl ribonucleotide
  modified_base 80: mod_base = OTHER; note = 2'-O-methyl ribonucleotide
  modified_base 82: mod_base = OTHER; note = 2'-O-methyl ribonucleotide
  modified_base 83: mod_base = OTHER; note = 2'-O-methyl ribonucleotide
  modified_base 84: mod_base = OTHER; note = 2'-O-methyl ribonucleotide
  modified_base 85: mod_base = OTHER; note = 2'-O-methyl ribonucleotide
  modified_base 86: mod_base = OTHER; note = 2'-O-methyl ribonucleotide
  modified_base 87: mod_base = OTHER; note = 2'-O-methyl ribonucleotide
  modified_base 89: mod_base = OTHER; note = 2'-O-methyl ribonucleotide
  modified_base 92: mod_base = OTHER; note = 2'-O-methyl ribonucleotide
  modified_base 93: mod_base = OTHER; note = 2'-O-methyl ribonucleotide
  modified_base 94: mod_base = OTHER; note = 2'-O-methyl ribonucleotide
  modified_base 95: mod_base = OTHER; note = 2'-O-methyl ribonucleotide
  modified_base 96: mod_base = OTHER; note = 2'-O-methyl ribonucleotide
  modified_base 97: mod_base = OTHER; note = 2'-O-methyl ribonucleotide
  modified_base 98: mod_base = OTHER; note = 2'-O-methyl ribonucleotide
  modified_base 99: mod_base = OTHER; note = 2'-O-methyl ribonucleotide
  modified_base 100: mod_base = OTHER; note = 2'-O-methyl ribonucleotide
  modified_base 1..4: mod_base = OTHER; note = phosphorothioate linkage
  modified_base 64..65: mod_base = OTHER; note = phosphorothioate linkage
  modified_base 98..100: mod_base = OTHER; note = phosphorothioate linkage

SEQ ID NO: 2645 - RNA, 103 nt, synthetic construct; identical to SEQ ID NO: 1700
  source 1..103: mol_type = other RNA
  modified_base 1: mod_base = OTHER; note = 2'-O-methyl ribonucleotide
  modified_base 2: mod_base = OTHER; note = 2'-O-methyl ribonucleotide
  modified_base 3: mod_base = OTHER; note = 2'-O-methyl ribonucleotide
  modified_base 21: mod_base = OTHER; note = 2'-O-methyl ribonucleotide
  modified_base 28: mod_base = OTHER; note = 2'-O-methyl ribonucleotide
  modified_base 29: mod_base = OTHER; note = 2'-O-methyl ribonucleotide
  modified_base 30: mod_base = OTHER; note = 2'-O-methyl ribonucleotide
  modified_base 31: mod_base = OTHER; note = 2'-O-methyl ribonucleotide
  modified_base 32: mod_base = OTHER; note = 2'-O-methyl ribonucleotide
  modified_base 34: mod_base = OTHER; note = 2'-O-methyl ribonucleotide
  modified_base 35: mod_base = OTHER; note = 2'-O-methyl ribonucleotide
  modified_base 36: mod_base = OTHER; note = 2'-O-methyl ribonucleotide
  modified_base 37: mod_base = OTHER; note = 2'-O-methyl ribonucleotide
  modified_base 38: mod_base = OTHER; note = 2'-O-methyl ribonucleotide
  modified_base 39: mod_base = OTHER; note = 2'-O-methyl ribonucleotide
  modified_base 40: mod_base = OTHER; note = 2'-O-methyl ribonucleotide
  modified_base 41: mod_base = OTHER; note = 2'-O-methyl ribonucleotide
  modified_base 42: mod_base = OTHER; note = 2'-O-methyl ribonucleotide
  modified_base 46: mod_base = OTHER; note = 2'-O-methyl ribonucleotide
  modified_base 48: mod_base = OTHER; note = 2'-O-methyl ribonucleotide
  modified_base 50: mod_base = OTHER; note = 2'-O-methyl ribonucleotide
  modified_base 52: mod_base = OTHER; note = 2'-O-methyl ribonucleotide
  modified_base 53: mod_base = OTHER; note = 2'-O-methyl ribonucleotide
  modified_base 54: mod_base = OTHER; note = 2'-O-methyl ribonucleotide
  modified_base 57: mod_base = OTHER; note = 2'-O-methyl ribonucleotide
  modified_base 61: mod_base = OTHER; note = 2'-O-methyl ribonucleotide
  modified_base 66: mod_base = OTHER; note = 2'-O-methyl ribonucleotide
  modified_base 67: mod_base = OTHER; note = 2'-O-methyl ribonucleotide
  modified_base 70: mod_base = OTHER; note = 2'-O-methyl ribonucleotide
  modified_base 71: mod_base = OTHER; note = 2'-O-methyl ribonucleotide
  modified_base 72: mod_base = OTHER; note = 2'-O-methyl ribonucleotide
  modified_base 73: mod_base = OTHER; note = 2'-O-methyl ribonucleotide
  modified_base 74: mod_base = OTHER; note = 2'-O-methyl ribonucleotide
  modified_base 75: mod_base = OTHER; note = 2'-O-methyl ribonucleotide
  modified_base 76: mod_base = OTHER; note = 2'-O-methyl ribonucleotide
  modified_base 77: mod_base = OTHER; note = 2'-O-methyl ribonucleotide
  modified_base 78: mod_base = OTHER; note = 2'-O-methyl ribonucleotide
  modified_base 79: mod_base = OTHER; note = 2'-O-methyl ribonucleotide
  modified_base 80: mod_base = OTHER; note = 2'-O-methyl ribonucleotide
  modified_base 82: mod_base = OTHER; note = 2'-O-methyl ribonucleotide
  modified_base 83: mod_base = OTHER; note = 2'-O-methyl ribonucleotide
  modified_base 84: mod_base = OTHER; note = 2'-O-methyl ribonucleotide
  modified_base 85: mod_base = OTHER; note = 2'-O-methyl ribonucleotide
  modified_base 86: mod_base = OTHER; note = 2'-O-methyl ribonucleotide
  modified_base 87: mod_base = OTHER; note = 2'-O-methyl ribonucleotide
  modified_base 89: mod_base = OTHER; note = 2'-O-methyl ribonucleotide
  modified_base 91: mod_base = OTHER; note = 2'-O-methyl ribonucleotide
  modified_base 92: mod_base = OTHER; note = 2'-O-methyl ribonucleotide
  modified_base 93: mod_base = OTHER; note = 2'-O-methyl ribonucleotide
  modified_base 94: mod_base = OTHER; note = 2'-O-methyl ribonucleotide
  modified_base 95: mod_base = OTHER; note = 2'-O-methyl ribonucleotide
  modified_base 96: mod_base = OTHER; note = 2'-O-methyl ribonucleotide
  modified_base 97: mod_base = OTHER; note = 2'-O-methyl ribonucleotide
  modified_base 98: mod_base = OTHER; note = 2'-O-methyl ribonucleotide
  modified_base 99: mod_base = OTHER; note = 2'-O-methyl ribonucleotide
  modified_base 100: mod_base = OTHER; note = 2'-O-methyl ribonucleotide
  modified_base 1..4: mod_base = OTHER; note = phosphorothioate linkage
  modified_base 64..65: mod_base = OTHER; note = phosphorothioate linkage
  modified_base 98..100: mod_base = OTHER; note = phosphorothioate linkage

SEQ ID NO: 2646 - RNA, 103 nt, synthetic construct; identical to SEQ ID NO: 1700
  source 1..103: mol_type = other RNA
  modified_base 1: mod_base = OTHER; note = 2'-O-methyl ribonucleotide
  modified_base 2: mod_base = OTHER; note = 2'-O-methyl ribonucleotide
  modified_base 3: mod_base = OTHER; note = 2'-O-methyl ribonucleotide
  modified_base 21: mod_base = OTHER; note = 2'-O-methyl ribonucleotide
  modified_base 28: mod_base = OTHER; note = 2'-O-methyl ribonucleotide
  modified_base 29: mod_base = OTHER; note = 2'-O-methyl ribonucleotide
  modified_base 30: mod_base = OTHER; note = 2'-O-methyl ribonucleotide
  modified_base 31: mod_base = OTHER; note = 2'-O-methyl ribonucleotide
  modified_base 32: mod_base = OTHER; note = 2'-O-methyl ribonucleotide
  modified_base 34: mod_base = OTHER; note = 2'-O-methyl ribonucleotide
  modified_base 35: mod_base = OTHER; note = 2'-O-methyl ribonucleotide
  modified_base 36: mod_base = OTHER; note = 2'-O-methyl ribonucleotide
  modified_base 37: mod_base = OTHER; note = 2'-O-methyl ribonucleotide
  modified_base 38: mod_base = OTHER; note = 2'-O-methyl ribonucleotide
  modified_base 39: mod_base = OTHER; note = 2'-O-methyl ribonucleotide
  modified_base 40: mod_base = OTHER; note = 2'-O-methyl ribonucleotide
  modified_base 41: mod_base = OTHER; note = 2'-O-methyl ribonucleotide
  modified_base 42: mod_base = OTHER; note = 2'-O-methyl ribonucleotide
  modified_base 46: mod_base = OTHER; note = 2'-O-methyl ribonucleotide
  modified_base 48: mod_base = OTHER; note = 2'-O-methyl ribonucleotide
  modified_base 50: mod_base = OTHER; note = 2'-O-methyl ribonucleotide
  modified_base 52: mod_base = OTHER; note = 2'-O-methyl ribonucleotide
  modified_base 53: mod_base = OTHER; note = 2'-O-methyl ribonucleotide
  modified_base 54: mod_base = OTHER; note = 2'-O-methyl ribonucleotide
  modified_base 55: mod_base = OTHER; note = 2'-O-methyl ribonucleotide
  modified_base 56: mod_base = OTHER; note = 2'-O-methyl ribonucleotide
  modified_base 57: mod_base = OTHER; note = 2'-O-methyl ribonucleotide
  modified_base 60: mod_base = OTHER; note = 2'-O-methyl ribonucleotide
  modified_base 61: mod_base = OTHER; note = 2'-O-methyl ribonucleotide
  modified_base 66: mod_base = OTHER; note = 2'-O-methyl ribonucleotide
  modified_base 67: mod_base = OTHER; note = 2'-O-methyl ribonucleotide
  modified_base 70: mod_base = OTHER; note = 2'-O-methyl ribonucleotide
  modified_base 71: mod_base = OTHER; note = 2'-O-methyl ribonucleotide
  modified_base 72: mod_base = OTHER; note = 2'-O-methyl ribonucleotide
  modified_base 74: mod_base = OTHER; note = 2'-O-methyl ribonucleotide
  modified_base 75: mod_base = OTHER; note = 2'-O-methyl ribonucleotide
  modified_base 76: mod_base = OTHER; note = 2'-O-methyl ribonucleotide
  modified_base 77: mod_base = OTHER; note = 2'-O-methyl ribonucleotide
  modified_base 78: mod_base = OTHER; note = 2'-O-methyl ribonucleotide
  modified_base 79: mod_base = OTHER; note = 2'-O-methyl ribonucleotide
  modified_base 80: mod_base = OTHER; note = 2'-O-methyl ribonucleotide
  modified_base 82: mod_base = OTHER; note = 2'-O-methyl ribonucleotide
  modified_base 83: mod_base = OTHER; note = 2'-O-methyl ribonucleotide
  modified_base 84: mod_base = OTHER; note = 2'-O-methyl ribonucleotide
  modified_base 85: mod_base = OTHER; note = 2'-O-methyl ribonucleotide
  modified_base 86: mod_base = OTHER; note = 2'-O-methyl ribonucleotide
  modified_base 87: mod_base = OTHER; note = 2'-O-methyl ribonucleotide
  modified_base 89: mod_base = OTHER; note = 2'-O-methyl ribonucleotide
  modified_base 92: mod_base = OTHER; note = 2'-O-methyl ribonucleotide
  modified_base 93: mod_base = OTHER; note = 2'-O-methyl ribonucleotide
  modified_base 94: mod_base = OTHER; note = 2'-O-methyl ribonucleotide
  modified_base 95: mod_base = OTHER; note = 2'-O-methyl ribonucleotide
  modified_base 96: mod_base = OTHER; note = 2'-O-methyl ribonucleotide
  modified_base 97: mod_base = OTHER; note = 2'-O-methyl ribonucleotide
  modified_base 98: mod_base = OTHER; note = 2'-O-methyl ribonucleotide
  modified_base 99: mod_base = OTHER; note = 2'-O-methyl ribonucleotide
  modified_base 100: mod_base = OTHER; note = 2'-O-methyl ribonucleotide
  modified_base 1..4: mod_base = OTHER; note = phosphorothioate linkage
  modified_base 64..65: mod_base = OTHER; note = phosphorothioate linkage
  modified_base 98..100: mod_base = OTHER; note = phosphorothioate linkage

SEQ ID NO: 2647 - RNA, 103 nt, synthetic construct; identical to SEQ ID NO: 1700
  source 1..103: mol_type = other RNA
  modified_base 1: mod_base = OTHER; note = 2'-O-methyl ribonucleotide
  modified_base 2: mod_base = OTHER; note = 2'-O-methyl ribonucleotide
  modified_base 3: mod_base = OTHER; note = 2'-O-methyl ribonucleotide
  modified_base 21: mod_base = OTHER; note = 2'-O-methyl ribonucleotide
  modified_base 28: mod_base = OTHER; note = 2'-O-methyl ribonucleotide
  modified_base 29: mod_base = OTHER; note = 2'-O-methyl ribonucleotide
  modified_base 30: mod_base = OTHER; note = 2'-O-methyl ribonucleotide
  modified_base 31: mod_base = OTHER; note = 2'-O-methyl ribonucleotide
  modified_base 32: mod_base = OTHER; note = 2'-O-methyl ribonucleotide
  modified_base 34: mod_base = OTHER; note = 2'-O-methyl ribonucleotide
  modified_base 35: mod_base = OTHER; note = 2'-O-methyl ribonucleotide
  modified_base 36: mod_base = OTHER; note = 2'-O-methyl ribonucleotide
  modified_base 37: mod_base = OTHER; note = 2'-O-methyl ribonucleotide
  modified_base 38: mod_base = OTHER; note = 2'-O-methyl ribonucleotide
  modified_base 39: mod_base = OTHER; note = 2'-O-methyl ribonucleotide
  modified_base 40: mod_base = OTHER; note = 2'-O-methyl ribonucleotide
  modified_base 41: mod_base = OTHER; note = 2'-O-methyl ribonucleotide
  modified_base 42: mod_base = OTHER; note = 2'-O-methyl ribonucleotide
  modified_base 46: mod_base = OTHER; note = 2'-O-methyl ribonucleotide
  modified_base 48: mod_base = OTHER; note = 2'-O-methyl ribonucleotide
  modified_base 50: mod_base = OTHER; note = 2'-O-methyl ribonucleotide
  modified_base 52: mod_base = OTHER; note = 2'-O-methyl ribonucleotide
  modified_base 53: mod_base = OTHER; note = 2'-O-methyl ribonucleotide
  modified_base 54: mod_base = OTHER; note = 2'-O-methyl ribonucleotide
  modified_base 55: mod_base = OTHER; note = 2'-O-methyl ribonucleotide
  modified_base 56: mod_base = OTHER; note = 2'-O-methyl ribonucleotide
  modified_base 57: mod_base = OTHER; note = 2'-O-methyl ribonucleotide
  modified_base 60: mod_base = OTHER; note = 2'-O-methyl ribonucleotide
  modified_base 61: mod_base = OTHER; note = 2'-O-methyl ribonucleotide
  modified_base 66: mod_base = OTHER; note = 2'-O-methyl ribonucleotide
  modified_base 67: mod_base = OTHER; note = 2'-O-methyl ribonucleotide
  modified_base 70: mod_base = OTHER; note = 2'-O-methyl ribonucleotide
  modified_base 71: mod_base = OTHER; note = 2'-O-methyl ribonucleotide
  modified_base 72: mod_base = OTHER; note = 2'-O-methyl ribonucleotide
  modified_base 74: mod_base = OTHER; note = 2'-O-methyl ribonucleotide
  modified_base 75: mod_base = OTHER; note = 2'-O-methyl ribonucleotide
  modified_base 76: mod_base = OTHER; note = 2'-O-methyl ribonucleotide
  modified_base 77: mod_base = OTHER; note = 2'-O-methyl ribonucleotide
  modified_base 78: mod_base = OTHER; note = 2'-O-methyl ribonucleotide
  modified_base 79: mod_base = OTHER; note = 2'-O-methyl ribonucleotide
  modified_base 80: mod_base = OTHER; note = 2'-O-methyl ribonucleotide
  modified_base 81: mod_base = OTHER; note = 2'-O-methyl ribonucleotide
  modified_base 83: mod_base = OTHER; note = 2'-O-methyl ribonucleotide
  modified_base 84: mod_base = OTHER; note = 2'-O-methyl ribonucleotide
  modified_base 85: mod_base = OTHER; note = 2'-O-methyl ribonucleotide
  modified_base 86: mod_base = OTHER; note = 2'-O-methyl ribonucleotide
  modified_base 87: mod_base = OTHER; note = 2'-O-methyl ribonucleotide
  modified_base 88: mod_base = OTHER; note = 2'-O-methyl ribonucleotide
  modified_base 89: mod_base = OTHER; note = 2'-O-methyl ribonucleotide
  modified_base 90: mod_base = OTHER; note = 2'-O-methyl ribonucleotide
  modified_base 91: mod_base = OTHER; note = 2'-O-methyl ribonucleotide
  modified_base 92: mod_base = OTHER; note = 2'-O-methyl ribonucleotide
  modified_base 93: mod_base = OTHER; note = 2'-O-methyl ribonucleotide
  modified_base 94: mod_base = OTHER; note = 2'-O-methyl ribonucleotide
  modified_base 95: mod_base = OTHER; note = 2'-O-methyl ribonucleotide
  modified_base 96: mod_base = OTHER; note = 2'-O-methyl ribonucleotide
  modified_base 97: mod_base = OTHER; note = 2'-O-methyl ribonucleotide
  modified_base 98: mod_base = OTHER; note = 2'-O-methyl ribonucleotide
  modified_base 99: mod_base = OTHER; note = 2'-O-methyl ribonucleotide
  modified_base 100: mod_base = OTHER; note = 2'-O-methyl ribonucleotide
  modified_base 101: mod_base = OTHER; note = 2'-O-methyl ribonucleotide
  modified_base 102: mod_base = OTHER; note = 2'-O-methyl ribonucleotide
  modified_base 103: mod_base = OTHER; note = 2'-O-methyl ribonucleotide
  modified_base 1..4: mod_base = OTHER; note = phosphorothioate linkage
  modified_base 64..65: mod_base = OTHER; note = phosphorothioate linkage
  modified_base 98..100: mod_base = OTHER; note = phosphorothioate linkage

SEQ ID NO: 2648 - RNA, 103 nt, synthetic construct; identical to SEQ ID NO: 1700
  source 1..103: mol_type = other RNA
  modified_base 1: mod_base = OTHER; note = 2'-O-methyl ribonucleotide
  modified_base 2: mod_base = OTHER; note = 2'-O-methyl ribonucleotide
  modified_base 3: mod_base = OTHER; note = 2'-O-methyl ribonucleotide
  modified_base 21: mod_base = OTHER; note = 2'-O-methyl ribonucleotide
  modified_base 28: mod_base = OTHER; note = 2'-O-methyl ribonucleotide
  modified_base 29: mod_base = OTHER; note = 2'-O-methyl ribonucleotide
  modified_base 30: mod_base = OTHER; note = 2'-O-methyl ribonucleotide
  modified_base 31: mod_base = OTHER; note = 2'-O-methyl ribonucleotide
  modified_base 32: mod_base = OTHER; note = 2'-O-methyl ribonucleotide
  modified_base 34: mod_base = OTHER; note = 2'-O-methyl ribonucleotide
  modified_base 35: mod_base = OTHER; note = 2'-O-methyl ribonucleotide
  modified_base 36: mod_base = OTHER; note = 2'-O-methyl ribonucleotide
  modified_base 37: mod_base = OTHER; note = 2'-O-methyl ribonucleotide
  modified_base 38: mod_base = OTHER; note = 2'-O-methyl ribonucleotide
  modified_base 39: mod_base = OTHER; note = 2'-O-methyl ribonucleotide
  modified_base 40: mod_base = OTHER; note = 2'-O-methyl ribonucleotide
  modified_base 41: mod_base = OTHER; note = 2'-O-methyl ribonucleotide
  modified_base 42: mod_base = OTHER; note = 2'-O-methyl ribonucleotide
  modified_base 46: mod_base = OTHER; note = 2'-O-methyl ribonucleotide
  modified_base 48: mod_base = OTHER; note = 2'-O-methyl ribonucleotide
  modified_base 50: mod_base = OTHER; note = 2'-O-methyl ribonucleotide
  modified_base 52: mod_base = OTHER; note = 2'-O-methyl ribonucleotide
  modified_base 53: mod_base = OTHER; note = 2'-O-methyl ribonucleotide
  modified_base 54: mod_base = OTHER; note = 2'-O-methyl ribonucleotide
  modified_base 55: mod_base = OTHER; note = 2'-O-methyl ribonucleotide
  modified_base 56: mod_base = OTHER; note = 2'-O-methyl ribonucleotide
  modified_base 57: mod_base = OTHER; note = 2'-O-methyl ribonucleotide
  modified_base 60: mod_base = OTHER; note = 2'-O-methyl ribonucleotide
  modified_base 61: mod_base = OTHER; note = 2'-O-methyl ribonucleotide
  modified_base 66: mod_base = OTHER; note = 2'-O-methyl ribonucleotide
  modified_base 67: mod_base = OTHER; note = 2'-O-methyl ribonucleotide
  modified_base 70: mod_base = OTHER; note = 2'-O-methyl ribonucleotide
  modified_base 71: mod_base = OTHER; note = 2'-O-methyl ribonucleotide
  modified_base 72: mod_base = OTHER; note = 2'-O-methyl ribonucleotide
  modified_base 74: mod_base = OTHER; note = 2'-O-methyl ribonucleotide
  modified_base 75: mod_base = OTHER; note = 2'-O-methyl ribonucleotide
  modified_base 76: mod_base = OTHER; note = 2'-O-methyl ribonucleotide
  modified_base 77: mod_base = OTHER; note = 2'-O-methyl ribonucleotide
  modified_base 78: mod_base = OTHER; note = 2'-O-methyl ribonucleotide
  modified_base 79: mod_base = OTHER; note = 2'-O-methyl ribonucleotide
  modified_base 80: mod_base = OTHER; note = 2'-O-methyl ribonucleotide
  modified_base 81: mod_base = OTHER; note = 2'-O-methyl ribonucleotide
  modified_base 83: mod_base = OTHER; note = 2'-O-methyl ribonucleotide
  modified_base 84: mod_base = OTHER; note = 2'-O-methyl ribonucleotide
  modified_base 85: mod_base = OTHER; note = 2'-O-methyl ribonucleotide
  modified_base 86: mod_base = OTHER; note = 2'-O-methyl ribonucleotide
  modified_base 87: mod_base = OTHER; note = 2'-O-methyl ribonucleotide
  modified_base 88: mod_base = OTHER; note = 2'-O-methyl ribonucleotide
  modified_base 89: mod_base = OTHER; note = 2'-O-methyl ribonucleotide
  modified_base 90: mod_base = OTHER; note = 2'-O-methyl ribonucleotide
  modified_base 91: mod_base = OTHER; note = 2'-O-methyl ribonucleotide
  modified_base 92: mod_base = OTHER; note = 2'-O-methyl ribonucleotide
  modified_base 93: mod_base = OTHER; note = 2'-O-methyl ribonucleotide
  modified_base 94: mod_base = OTHER; note = 2'-O-methyl ribonucleotide
  modified_base 95: mod_base = OTHER; note = 2'-O-methyl ribonucleotide
  modified_base 96: mod_base = OTHER; note = 2'-O-methyl ribonucleotide
  modified_base 97: mod_base = OTHER; note = 2'-O-methyl ribonucleotide
  modified_base 98: mod_base = OTHER; note = 2'-O-methyl ribonucleotide
  modified_base 99: mod_base = OTHER; note = 2'-O-methyl ribonucleotide
  modified_base 100: mod_base = OTHER; note = 2'-O-methyl ribonucleotide
  modified_base 101: mod_base = OTHER; note = 2'-O-methyl ribonucleotide
  modified_base 103: mod_base = OTHER; note = 2'-O-methyl ribonucleotide
  modified_base 1..4: mod_base = OTHER; note = phosphorothioate linkage
  modified_base 64..65: mod_base = OTHER; note = phosphorothioate linkage
  modified_base 98..100: mod_base = OTHER; note = phosphorothioate linkage

SEQ ID NO: 2649 - RNA, 103 nt, synthetic construct; identical to SEQ ID NO: 1699
  source 1..103: mol_type = other RNA
  modified_base 1: mod_base = OTHER; note = 2'-O-methyl ribonucleotide
  modified_base 2: mod_base = OTHER; note = 2'-O-methyl ribonucleotide
  modified_base 3: mod_base = OTHER; note = 2'-O-methyl ribonucleotide
  modified_base 21: mod_base = OTHER; note = 2'-O-methyl ribonucleotide
  modified_base 28: mod_base = OTHER; note = 2'-O-methyl ribonucleotide
  modified_base 29: mod_base = OTHER; note = 2'-O-methyl ribonucleotide
  modified_base 30: mod_base = OTHER; note = 2'-O-methyl ribonucleotide
  modified_base 31: mod_base = OTHER; note = 2'-O-methyl ribonucleotide
  modified_base 32: mod_base = OTHER; note = 2'-O-methyl ribonucleotide
  modified_base 33: mod_base = OTHER; note = 2'-O-methyl ribonucleotide
  modified_base 34: mod_base = OTHER; note = 2'-O-methyl ribonucleotide
  modified_base 35: mod_base = OTHER; note = 2'-O-methyl ribonucleotide
  modified_base 36: mod_base = OTHER; note = 2'-O-methyl ribonucleotide
  modified_base 37: mod_base = OTHER; note = 2'-O-methyl ribonucleotide
  modified_base 38: mod_base = OTHER; note = 2'-O-methyl ribonucleotide
  modified_base 39: mod_base = OTHER; note = 2'-O-methyl ribonucleotide
  modified_base 40: mod_base = OTHER; note = 2'-O-methyl ribonucleotide
  modified_base 41: mod_base = OTHER; note = 2'-O-methyl ribonucleotide
  modified_base 42: mod_base = OTHER; note = 2'-O-methyl ribonucleotide
  modified_base 46: mod_base = OTHER; note = 2'-O-methyl ribonucleotide
  modified_base 48: mod_base = OTHER; note = 2'-O-methyl ribonucleotide
  modified_base 50: mod_base = OTHER; note = 2'-O-methyl ribonucleotide
  modified_base 52: mod_base = OTHER; note = 2'-O-methyl ribonucleotide
  modified_base 53: mod_base = OTHER; note = 2'-O-methyl ribonucleotide
  modified_base 54: mod_base = OTHER; note = 2'-O-methyl ribonucleotide
  modified_base 55: mod_base = OTHER; note = 2'-O-methyl ribonucleotide
  modified_base 56: mod_base = OTHER; note = 2'-O-methyl ribonucleotide
  modified_base 57: mod_base = OTHER; note = 2'-O-methyl ribonucleotide
  modified_base 60: mod_base = OTHER; note = 2'-O-methyl ribonucleotide
  modified_base 61: mod_base = OTHER; note = 2'-O-methyl ribonucleotide
  modified_base 66: mod_base = OTHER; note = 2'-O-methyl ribonucleotide
  modified_base 67: mod_base = OTHER; note = 2'-O-methyl ribonucleotide
  modified_base 70: mod_base = OTHER; note = 2'-O-methyl ribonucleotide
  modified_base 71: mod_base = OTHER; note = 2'-O-methyl ribonucleotide
  modified_base 72: mod_base = OTHER; note = 2'-O-methyl ribonucleotide
  modified_base 73: mod_base = OTHER; note = 2'-O-methyl ribonucleotide
  modified_base 74: mod_base = OTHER; note = 2'-O-methyl ribonucleotide
  modified_base 75: mod_base = OTHER; note = 2'-O-methyl ribonucleotide
  modified_base 76: mod_base = OTHER; note = 2'-O-methyl ribonucleotide
  modified_base 77: mod_base = OTHER; note = 2'-O-methyl ribonucleotide
  modified_base 78: mod_base = OTHER; note = 2'-O-methyl ribonucleotide
  modified_base 79: mod_base = OTHER; note = 2'-O-methyl ribonucleotide
  modified_base 80: mod_base = OTHER; note = 2'-O-methyl ribonucleotide
  modified_base 81: mod_base = OTHER; note = 2'-O-methyl ribonucleotide
  modified_base 83: mod_base = OTHER; note = 2'-O-methyl ribonucleotide
  modified_base 84: mod_base = OTHER; note = 2'-O-methyl ribonucleotide
  modified_base 85: mod_base = OTHER; note = 2'-O-methyl ribonucleotide
  modified_base 86: mod_base = OTHER; note = 2'-O-methyl ribonucleotide
  modified_base 87: mod_base = OTHER; note = 2'-O-methyl ribonucleotide
  modified_base 88: mod_base = OTHER; note = 2'-O-methyl ribonucleotide
  modified_base 89: mod_base = OTHER; note = 2'-O-methyl ribonucleotide
  modified_base 90: mod_base = OTHER; note = 2'-O-methyl ribonucleotide
  modified_base 91: mod_base = OTHER; note = 2'-O-methyl ribonucleotide
  modified_base 92: mod_base = OTHER; note = 2'-O-methyl ribonucleotide
  modified_base 93: mod_base = OTHER; note = 2'-O-methyl ribonucleotide
  modified_base 94: mod_base = OTHER; note = 2'-O-methyl ribonucleotide
  modified_base 95: mod_base = OTHER; note = 2'-O-methyl ribonucleotide
  modified_base 96: mod_base = OTHER; note = 2'-O-methyl ribonucleotide
  modified_base 97: mod_base = OTHER; note = 2'-O-methyl ribonucleotide
  modified_base 98: mod_base = OTHER; note = 2'-O-methyl ribonucleotide
  modified_base 99: mod_base = OTHER; note = 2'-O-methyl ribonucleotide
  modified_base 100: mod_base = OTHER; note = 2'-O-methyl ribonucleotide
  modified_base 1..4: mod_base = OTHER; note = phosphorothioate linkage
  modified_base 45..46: mod_base = OTHER; note = phosphorothioate linkage
  modified_base 98..100: mod_base = OTHER; note = phosphorothioate linkage

SEQ ID NO: 2650 - RNA, 103 nt, synthetic construct; identical to SEQ ID NO: 1699
  source 1..103: mol_type = other RNA
  modified_base 1: mod_base = OTHER; note = 2'-O-methyl ribonucleotide
  modified_base 2: mod_base = OTHER; note = 2'-O-methyl ribonucleotide
  modified_base 3: mod_base = OTHER; note = 2'-O-methyl ribonucleotide
  modified_base 21: mod_base = OTHER; note = 2'-O-methyl ribonucleotide
  modified_base 28: mod_base = OTHER; note = 2'-O-methyl ribonucleotide
  modified_base 29: mod_base = OTHER; note = 2'-O-methyl ribonucleotide
  modified_base 30: mod_base = OTHER; note = 2'-O-methyl ribonucleotide
  modified_base 31: mod_base = OTHER; note = 2'-O-methyl ribonucleotide
  modified_base 32: mod_base = OTHER; note = 2'-O-methyl ribonucleotide
  modified_base 34: mod_base = OTHER; note = 2'-O-methyl ribonucleotide
  modified_base 35: mod_base = OTHER; note = 2'-O-methyl ribonucleotide
  modified_base 36: mod_base = OTHER; note = 2'-O-methyl ribonucleotide
  modified_base 37: mod_base = OTHER; note = 2'-O-methyl ribonucleotide
  modified_base 38: mod_base = OTHER; note = 2'-O-methyl ribonucleotide
  modified_base 39: mod_base = OTHER; note = 2'-O-methyl ribonucleotide
  modified_base 40: mod_base = OTHER; note = 2'-O-methyl ribonucleotide
  modified_base 41: mod_base = OTHER; note = 2'-O-methyl ribonucleotide
  modified_base 42: mod_base = OTHER; note = 2'-O-methyl ribonucleotide
  modified_base 46: mod_base = OTHER; note = 2'-O-methyl ribonucleotide
  modified_base 48: mod_base = OTHER; note = 2'-O-methyl ribonucleotide
  modified_base 50: mod_base = OTHER; note = 2'-O-methyl ribonucleotide
  modified_base 52: mod_base = OTHER; note = 2'-O-methyl ribonucleotide
  modified_base 53: mod_base = OTHER; note = 2'-O-methyl ribonucleotide
  modified_base 54: mod_base = OTHER; note = 2'-O-methyl ribonucleotide
  modified_base 55: mod_base = OTHER; note = 2'-O-methyl ribonucleotide
  modified_base 56: mod_base = OTHER; note = 2'-O-methyl ribonucleotide
  modified_base 57: mod_base = OTHER; note = 2'-O-methyl ribonucleotide
  modified_base 60: mod_base = OTHER; note = 2'-O-methyl ribonucleotide
  modified_base 61: mod_base = OTHER; note = 2'-O-methyl ribonucleotide
  modified_base 66: mod_base = OTHER; note = 2'-O-methyl ribonucleotide
  modified_base 67: mod_base = OTHER; note = 2'-O-methyl ribonucleotide
  modified_base 70: mod_base = OTHER; note = 2'-O-methyl ribonucleotide
  modified_base 71: mod_base = OTHER; note = 2'-O-methyl ribonucleotide
  modified_base 72: mod_base = OTHER; note = 2'-O-methyl ribonucleotide
  modified_base 74: mod_base = OTHER; note = 2'-O-methyl ribonucleotide
  modified_base 75: mod_base = OTHER; note = 2'-O-methyl ribonucleotide
  modified_base 76: mod_base = OTHER; note = 2'-O-methyl ribonucleotide
  modified_base 77: mod_base = OTHER; note = 2'-O-methyl ribonucleotide
  modified_base 78: mod_base = OTHER; note = 2'-O-methyl ribonucleotide
  modified_base 79: mod_base = OTHER; note = 2'-O-methyl ribonucleotide
  modified_base 80: mod_base = OTHER; note = 2'-O-methyl ribonucleotide
  modified_base 81: mod_base = OTHER; note = 2'-O-methyl ribonucleotide
  modified_base 83: mod_base = OTHER; note = 2'-O-methyl ribonucleotide
  modified_base 84: mod_base = OTHER; note = 2'-O-methyl ribonucleotide
  modified_base 85: mod_base = OTHER; note = 2'-O-methyl ribonucleotide
  modified_base 86: mod_base = OTHER; note = 2'-O-methyl ribonucleotide
  modified_base 87: mod_base = OTHER; note = 2'-O-methyl ribonucleotide
  modified_base 88: mod_base = OTHER; note = 2'-O-methyl ribonucleotide
  modified_base 89: mod_base = OTHER; note = 2'-O-methyl ribonucleotide
  modified_base 90: mod_base = OTHER; note = 2'-O-methyl ribonucleotide
  modified_base 91: mod_base = OTHER; note = 2'-O-methyl ribonucleotide
  modified_base 92: mod_base = OTHER; note = 2'-O-methyl ribonucleotide
  modified_base 93: mod_base = OTHER; note = 2'-O-methyl ribonucleotide
  modified_base 94: mod_base = OTHER; note = 2'-O-methyl ribonucleotide
  modified_base 95: mod_base = OTHER; note = 2'-O-methyl ribonucleotide
  modified_base 96: mod_base = OTHER; note = 2'-O-methyl ribonucleotide
  modified_base 97: mod_base = OTHER; note = 2'-O-methyl ribonucleotide
  modified_base 98: mod_base = OTHER; note = 2'-O-methyl ribonucleotide
  modified_base 99: mod_base = OTHER; note = 2'-O-methyl ribonucleotide
  modified_base 100: mod_base = OTHER; note = 2'-O-methyl ribonucleotide
  modified_base 1..4: mod_base = OTHER; note = phosphorothioate linkage
  modified_base 45..46: mod_base = OTHER; note = phosphorothioate linkage
  modified_base 98..100: mod_base = OTHER; note = phosphorothioate linkage

SEQ ID NO: 2651 - RNA, 103 nt, synthetic construct; identical to SEQ ID NO: 1700
  source 1..103: mol_type = other RNA
  modified_base 1: mod_base = OTHER; note = 2'-O-methyl ribonucleotide
  modified_base 2: mod_base = OTHER; note = 2'-O-methyl ribonucleotide
  modified_base 3: mod_base = OTHER; note = 2'-O-methyl ribonucleotide
  modified_base 21: mod_base = OTHER; note = 2'-O-methyl ribonucleotide
  modified_base 28: mod_base = OTHER; note = 2'-O-methyl ribonucleotide
  modified_base 29: mod_base = OTHER; note = 2'-O-methyl ribonucleotide
  modified_base 30: mod_base = OTHER; note = 2'-O-methyl ribonucleotide
  modified_base 31: mod_base = OTHER; note = 2'-O-methyl ribonucleotide
  modified_base 32: mod_base = OTHER; note = 2'-O-methyl ribonucleotide
  modified_base 33: mod_base = OTHER; note = 2'-O-methyl ribonucleotide
  modified_base 34: mod_base = OTHER; note = 2'-O-methyl ribonucleotide
  modified_base 35: mod_base = OTHER; note = 2'-O-methyl ribonucleotide
  modified_base 36: mod_base = OTHER; note = 2'-O-methyl ribonucleotide
  modified_base 37: mod_base = OTHER; note = 2'-O-methyl ribonucleotide
  modified_base 38: mod_base = OTHER; note = 2'-O-methyl ribonucleotide
  modified_base 39: mod_base = OTHER; note = 2'-O-methyl ribonucleotide
  modified_base 40: mod_base = OTHER; note = 2'-O-methyl ribonucleotide
  modified_base 41: mod_base = OTHER; note = 2'-O-methyl ribonucleotide
  modified_base 42: mod_base = OTHER; note = 2'-O-methyl ribonucleotide
  modified_base 46: mod_base = OTHER; note = 2'-O-methyl ribonucleotide
  modified_base 48: mod_base = OTHER; note = 2'-O-methyl ribonucleotide
  modified_base 50: mod_base = OTHER; note = 2'-O-methyl ribonucleotide
  modified_base 52: mod_base = OTHER; note = 2'-O-methyl ribonucleotide
  modified_base 53: mod_base = OTHER; note = 2'-O-methyl ribonucleotide
  modified_base 54: mod_base = OTHER; note = 2'-O-methyl ribonucleotide
  modified_base 57: mod_base = OTHER; note = 2'-O-methyl ribonucleotide
  modified_base 61: mod_base = OTHER; note = 2'-O-methyl ribonucleotide
  modified_base 66: mod_base = OTHER; note = 2'-O-methyl ribonucleotide
  modified_base 67: mod_base = OTHER; note = 2'-O-methyl ribonucleotide
  modified_base 70: mod_base = OTHER; note = 2'-O-methyl ribonucleotide
  modified_base 71: mod_base = OTHER; note = 2'-O-methyl ribonucleotide
  modified_base 72: mod_base = OTHER; note = 2'-O-methyl ribonucleotide
  modified_base 74: mod_base = OTHER; note = 2'-O-methyl ribonucleotide
  modified_base 75: mod_base = OTHER; note = 2'-O-methyl ribonucleotide
  modified_base 76: mod_base = OTHER; note = 2'-O-methyl ribonucleotide
  modified_base 77: mod_base = OTHER; note = 2'-O-methyl ribonucleotide
  modified_base 78: mod_base = OTHER; note = 2'-O-methyl ribonucleotide
  modified_base 79: mod_base = OTHER; note = 2'-O-methyl ribonucleotide
  modified_base 80: mod_base = OTHER; note = 2'-O-methyl ribonucleotide
  modified_base 82: mod_base = OTHER; note = 2'-O-methyl ribonucleotide
  modified_base 83: mod_base = OTHER; note = 2'-O-methyl ribonucleotide
  modified_base 84: mod_base = OTHER; note = 2'-O-methyl ribonucleotide
  modified_base 85: mod_base = OTHER; note = 2'-O-methyl ribonucleotide
  modified_base 86: mod_base = OTHER; note = 2'-O-methyl ribonucleotide
  modified_base 87: mod_base = OTHER; note = 2'-O-methyl ribonucleotide
  modified_base 89: mod_base = OTHER; note = 2'-O-methyl ribonucleotide
  modified_base 92: mod_base = OTHER; note = 2'-O-methyl ribonucleotide
  modified_base 93: mod_base = OTHER; note = 2'-O-methyl ribonucleotide
  modified_base 94: mod_base = OTHER; note = 2'-O-methyl ribonucleotide
  modified_base 95: mod_base = OTHER; note = 2'-O-methyl ribonucleotide
  modified_base 96: mod_base = OTHER; note = 2'-O-methyl ribonucleotide
  modified_base 97: mod_base = OTHER; note = 2'-O-methyl ribonucleotide
  modified_base 98: mod_base = OTHER; note = 2'-O-methyl ribonucleotide
  modified_base 99: mod_base = OTHER; note = 2'-O-methyl ribonucleotide
  modified_base 100: mod_base = OTHER; note = 2'-O-methyl ribonucleotide
  modified_base 1..4: mod_base = OTHER; note = phosphorothioate linkage
  modified_base 45..46: mod_base = OTHER; note = phosphorothioate linkage
  modified_base 98..100: mod_base = OTHER; note = phosphorothioate linkage

SEQ ID NO: 2652 - RNA, 103 nt, synthetic construct; identical to SEQ ID NO: 1700
  source 1..103: mol_type = other RNA
  modified_base 1: mod_base = OTHER; note = 2'-O-methyl ribonucleotide
  modified_base 2: mod_base = OTHER; note = 2'-O-methyl ribonucleotide
  modified_base 3: mod_base = OTHER; note = 2'-O-methyl ribonucleotide
  modified_base 21: mod_base = OTHER; note = 2'-O-methyl ribonucleotide
  modified_base 28: mod_base = OTHER; note = 2'-O-methyl ribonucleotide
  modified_base 29: mod_base = OTHER; note = 2'-O-methyl ribonucleotide
  modified_base 30: mod_base = OTHER; note = 2'-O-methyl ribonucleotide
  modified_base 31: mod_base = OTHER; note = 2'-O-methyl ribonucleotide
  modified_base 32: mod_base = OTHER; note = 2'-O-methyl ribonucleotide
  modified_base 33: mod_base = OTHER; note = 2'-O-methyl ribonucleotide
  modified_base 34: mod_base = OTHER; note = 2'-O-methyl ribonucleotide
  modified_base 35: mod_base = OTHER; note = 2'-O-methyl ribonucleotide
  modified_base 36: mod_base = OTHER; note = 2'-O-methyl ribonucleotide
  modified_base 37: mod_base = OTHER; note = 2'-O-methyl ribonucleotide
  modified_base 38: mod_base = OTHER; note = 2'-O-methyl ribonucleotide
  modified_base 39: mod_base = OTHER; note = 2'-O-methyl ribonucleotide
  modified_base 40: mod_base = OTHER; note = 2'-O-methyl ribonucleotide
  modified_base 41: mod_base = OTHER; note = 2'-O-methyl ribonucleotide
  modified_base 42: mod_base = OTHER; note = 2'-O-methyl ribonucleotide
  modified_base 46: mod_base = OTHER; note = 2'-O-methyl ribonucleotide
  modified_base 48: mod_base = OTHER; note = 2'-O-methyl ribonucleotide
  modified_base 50: mod_base = OTHER; note = 2'-O-methyl ribonucleotide
  modified_base 52: mod_base = OTHER; note = 2'-O-methyl ribonucleotide
  modified_base 53: mod_base = OTHER; note = 2'-O-methyl ribonucleotide
  modified_base 54: mod_base = OTHER; note = 2'-O-methyl ribonucleotide
  modified_base 55: mod_base = OTHER; note = 2'-O-methyl ribonucleotide
  modified_base 56: mod_base = OTHER; note = 2'-O-methyl ribonucleotide
  modified_base 57: mod_base = OTHER; note = 2'-O-methyl ribonucleotide
  modified_base 60: mod_base = OTHER; note = 2'-O-methyl ribonucleotide
  modified_base 61: mod_base = OTHER; note = 2'-O-methyl ribonucleotide
  modified_base 66: mod_base = OTHER; note = 2'-O-methyl ribonucleotide
  modified_base 67: mod_base = OTHER; note = 2'-O-methyl ribonucleotide
  modified_base 70: mod_base = OTHER; note = 2'-O-methyl ribonucleotide
  modified_base 71: mod_base = OTHER; note = 2'-O-methyl ribonucleotide
  modified_base 72: mod_base = OTHER; note = 2'-O-methyl ribonucleotide
  modified_base 74: mod_base = OTHER; note = 2'-O-methyl ribonucleotide
  modified_base 75: mod_base = OTHER; note = 2'-O-methyl ribonucleotide
  modified_base 76: mod_base = OTHER; note = 2'-O-methyl ribonucleotide
  modified_base 77: mod_base = OTHER; note = 2'-O-methyl ribonucleotide
  modified_base 78: mod_base = OTHER; note = 2'-O-methyl ribonucleotide
  modified_base 79: mod_base = OTHER; note = 2'-O-methyl ribonucleotide
  modified_base 80: mod_base = OTHER; note = 2'-O-methyl ribonucleotide
  modified_base 82: mod_base = OTHER; note = 2'-O-methyl ribonucleotide
  modified_base 83: mod_base = OTHER; note = 2'-O-methyl ribonucleotide
  modified_base 84: mod_base = OTHER; note = 2'-O-methyl ribonucleotide
  modified_base 85: mod_base = OTHER; note = 2'-O-methyl ribonucleotide
  modified_base 86: mod_base = OTHER; note = 2'-O-methyl ribonucleotide
  modified_base 87: mod_base = OTHER; note = 2'-O-methyl ribonucleotide
  modified_base 89: mod_base = OTHER; note = 2'-O-methyl ribonucleotide
  modified_base 92: mod_base = OTHER; note = 2'-O-methyl ribonucleotide
  modified_base 93: mod_base = OTHER; note = 2'-O-methyl ribonucleotide
  modified_base 94: mod_base = OTHER; note = 2'-O-methyl ribonucleotide
  modified_base 95: mod_base = OTHER; note = 2'-O-methyl ribonucleotide
  modified_base 96: mod_base = OTHER; note = 2'-O-methyl ribonucleotide
  modified_base 97: mod_base = OTHER; note = 2'-O-methyl ribonucleotide
  modified_base 98: mod_base = OTHER; note = 2'-O-methyl ribonucleotide
  modified_base 99: mod_base = OTHER; note = 2'-O-methyl ribonucleotide
  modified_base 100: mod_base = OTHER; note = 2'-O-methyl ribonucleotide
  modified_base 1..4: mod_base = OTHER; note = phosphorothioate linkage
  modified_base 45..46: mod_base = OTHER; note = phosphorothioate linkage
  modified_base 98..100: mod_base = OTHER; note = phosphorothioate linkage

SEQ ID NO: 2653 - RNA, 103 nt, synthetic construct; identical to SEQ ID NO: 1700
  source 1..103: mol_type = other RNA
  modified_base 1: mod_base = OTHER; note = 2'-O-methyl ribonucleotide
  modified_base 2: mod_base = OTHER; note = 2'-O-methyl ribonucleotide
  modified_base 3: mod_base = OTHER; note = 2'-O-methyl ribonucleotide
  modified_base 21: mod_base = OTHER; note = 2'-O-methyl ribonucleotide
  modified_base 28: mod_base = OTHER; note = 2'-O-methyl ribonucleotide
  modified_base 29: mod_base = OTHER; note = 2'-O-methyl ribonucleotide
  modified_base 30: mod_base = OTHER; note = 2'-O-methyl ribonucleotide
  modified_base 31: mod_base = OTHER; note = 2'-O-methyl ribonucleotide
  modified_base 32: mod_base = OTHER; note = 2'-O-methyl ribonucleotide
  modified_base 33: mod_base = OTHER; note = 2'-O-methyl ribonucleotide
  modified_base 34: mod_base = OTHER; note = 2'-O-methyl ribonucleotide
  modified_base 35: mod_base = OTHER; note = 2'-O-methyl ribonucleotide
  modified_base 36: mod_base = OTHER; note = 2'-O-methyl ribonucleotide
  modified_base 37: mod_base = OTHER; note = 2'-O-methyl ribonucleotide
  modified_base 38: mod_base = OTHER; note = 2'-O-methyl ribonucleotide
  modified_base 39: mod_base = OTHER; note = 2'-O-methyl ribonucleotide
  modified_base 40: mod_base = OTHER; note = 2'-O-methyl ribonucleotide
  modified_base 41: mod_base = OTHER; note = 2'-O-methyl ribonucleotide
  modified_base 42: mod_base = OTHER; note = 2'-O-methyl ribonucleotide
  modified_base 46: mod_base = OTHER; note = 2'-O-methyl ribonucleotide
  modified_base 48: mod_base = OTHER; note = 2'-O-methyl ribonucleotide
  modified_base 50: mod_base = OTHER; note = 2'-O-methyl ribonucleotide
  modified_base 52: mod_base = OTHER; note = 2'-O-methyl ribonucleotide
  modified_base 53: mod_base = OTHER; note = 2'-O-methyl ribonucleotide
  modified_base 54: mod_base = OTHER; note = 2'-O-methyl ribonucleotide
  modified_base 57: mod_base = OTHER; note = 2'-O-methyl ribonucleotide
  modified_base 61: mod_base = OTHER; note = 2'-O-methyl ribonucleotide
  modified_base 66: mod_base = OTHER; note = 2'-O-methyl ribonucleotide
  modified_base 67: mod_base = OTHER; note = 2'-O-methyl ribonucleotide
  modified_base 70: mod_base = OTHER; note = 2'-O-methyl ribonucleotide
  modified_base 71: mod_base = OTHER; note = 2'-O-methyl ribonucleotide
  modified_base 72: mod_base = OTHER; note = 2'-O-methyl ribonucleotide
  modified_base 73: mod_base = OTHER; note = 2'-O-methyl ribonucleotide
  modified_base 74: mod_base = OTHER; note = 2'-O-methyl ribonucleotide
  modified_base 75: mod_base = OTHER; note = 2'-O-methyl ribonucleotide
  modified_base 76: mod_base = OTHER; note = 2'-O-methyl ribonucleotide
  modified_base 77: mod_base = OTHER; note = 2'-O-methyl ribonucleotide
  modified_base 78: mod_base = OTHER; note = 2'-O-methyl ribonucleotide
  modified_base 79: mod_base = OTHER; note = 2'-O-methyl ribonucleotide
  modified_base 80: mod_base = OTHER; note = 2'-O-methyl ribonucleotide
  modified_base 82: mod_base = OTHER; note = 2'-O-methyl ribonucleotide
  modified_base 83: mod_base = OTHER; note = 2'-O-methyl ribonucleotide
  modified_base 84: mod_base = OTHER; note = 2'-O-methyl ribonucleotide
  modified_base 85: mod_base = OTHER; note = 2'-O-methyl ribonucleotide
  modified_base 86: mod_base = OTHER; note = 2'-O-methyl ribonucleotide
  modified_base 87: mod_base = OTHER; note = 2'-O-methyl ribonucleotide
  modified_base 89: mod_base = OTHER; note = 2'-O-methyl ribonucleotide
  modified_base 91: mod_base = OTHER; note = 2'-O-methyl ribonucleotide
  modified_base 92: mod_base = OTHER; note = 2'-O-methyl ribonucleotide
  modified_base 93: mod_base = OTHER; note = 2'-O-methyl ribonucleotide
  modified_base 94: mod_base = OTHER; note = 2'-O-methyl ribonucleotide
  modified_base 95: mod_base = OTHER; note = 2'-O-methyl ribonucleotide
  modified_base 96: mod_base = OTHER; note = 2'-O-methyl ribonucleotide
  modified_base 97: mod_base = OTHER; note = 2'-O-methyl ribonucleotide
  modified_base 98: mod_base = OTHER; note = 2'-O-methyl ribonucleotide
  modified_base 99: mod_base = OTHER; note = 2'-O-methyl ribonucleotide
  modified_base 100: mod_base = OTHER; note = 2'-O-methyl ribonucleotide
  modified_base 1..4: mod_base = OTHER; note = phosphorothioate linkage
  modified_base 45..46: mod_base = OTHER; note = phosphorothioate linkage
  modified_base 98..100: mod_base = OTHER; note = phosphorothioate linkage

SEQ ID NO: 2654 - RNA, 103 nt, synthetic construct; identical to SEQ ID NO: 1700
  source 1..103: mol_type = other RNA
  modified_base 1: mod_base = OTHER; note = 2'-O-methyl ribonucleotide
  modified_base 2: mod_base = OTHER; note = 2'-O-methyl ribonucleotide
  modified_base 3: mod_base = OTHER; note = 2'-O-methyl ribonucleotide
  modified_base 21: mod_base = OTHER; note = 2'-O-methyl ribonucleotide
  modified_base 28: mod_base = OTHER; note = 2'-O-methyl ribonucleotide
  modified_base 29: mod_base = OTHER; note = 2'-O-methyl ribonucleotide
  modified_base 30: mod_base = OTHER; note = 2'-O-methyl ribonucleotide
  modified_base 31: mod_base = OTHER; note = 2'-O-methyl ribonucleotide
  modified_base 32: mod_base = OTHER; note = 2'-O-methyl ribonucleotide
  modified_base 34: mod_base = OTHER; note = 2'-O-methyl ribonucleotide
  modified_base 35: mod_base = OTHER; note = 2'-O-methyl ribonucleotide
  modified_base 36: mod_base = OTHER; note = 2'-O-methyl ribonucleotide
  modified_base 37: mod_base = OTHER; note = 2'-O-methyl ribonucleotide
  modified_base 38: mod_base = OTHER; note = 2'-O-methyl ribonucleotide
  modified_base 39: mod_base = OTHER; note = 2'-O-methyl ribonucleotide
  modified_base 40: mod_base = OTHER; note = 2'-O-methyl ribonucleotide
  modified_base 41: mod_base = OTHER; note = 2'-O-methyl ribonucleotide
  modified_base 42: mod_base = OTHER; note = 2'-O-methyl ribonucleotide
  modified_base 46: mod_base = OTHER; note = 2'-O-methyl ribonucleotide
  modified_base 48: mod_base = OTHER; note = 2'-O-methyl ribonucleotide
  modified_base 50: mod_base = OTHER; note = 2'-O-methyl ribonucleotide
  modified_base 52: mod_base = OTHER; note = 2'-O-methyl ribonucleotide
  modified_base 53: mod_base = OTHER; note = 2'-O-methyl ribonucleotide
  modified_base 54: mod_base = OTHER; note = 2'-O-methyl ribonucleotide
  modified_base 57: mod_base = OTHER; note = 2'-O-methyl ribonucleotide
  modified_base 61: mod_base = OTHER; note = 2'-O-methyl ribonucleotide
  modified_base 66: mod_base = OTHER; note = 2'-O-methyl ribonucleotide
  modified_base 67: mod_base = OTHER; note = 2'-O-methyl ribonucleotide
  modified_base 70: mod_base = OTHER; note = 2'-O-methyl ribonucleotide
  modified_base 71: mod_base = OTHER; note = 2'-O-methyl ribonucleotide
  modified_base 72: mod_base = OTHER; note = 2'-O-methyl ribonucleotide
  modified_base 73: mod_base = OTHER; note = 2'-O-methyl ribonucleotide
  modified_base 74: mod_base = OTHER; note = 2'-O-methyl ribonucleotide
  modified_base 75: mod_base = OTHER; note = 2'-O-methyl ribonucleotide
  modified_base 76: mod_base = OTHER; note = 2'-O-methyl ribonucleotide
  modified_base 77: mod_base = OTHER; note = 2'-O-methyl ribonucleotide
  modified_base 78: mod_base = OTHER; note = 2'-O-methyl ribonucleotide
  modified_base 79: mod_base = OTHER; note = 2'-O-methyl ribonucleotide
  modified_base 80: mod_base = OTHER; note = 2'-O-methyl ribonucleotide
  modified_base 82: mod_base = OTHER; note = 2'-O-methyl ribonucleotide
  modified_base 83: mod_base = OTHER; note = 2'-O-methyl ribonucleotide
  modified_base 84: mod_base = OTHER; note = 2'-O-methyl ribonucleotide
  modified_base 85: mod_base = OTHER; note = 2'-O-methyl ribonucleotide
  modified_base 86: mod_base = OTHER; note = 2'-O-methyl ribonucleotide
  modified_base 87: mod_base = OTHER; note = 2'-O-methyl ribonucleotide
  modified_base 89: mod_base = OTHER; note = 2'-O-methyl ribonucleotide
  modified_base 92: mod_base = OTHER; note = 2'-O-methyl ribonucleotide
  modified_base 93: mod_base = OTHER; note = 2'-O-methyl ribonucleotide
  modified_base 94: mod_base = OTHER; note = 2'-O-methyl ribonucleotide
  modified_base 95: mod_base = OTHER; note = 2'-O-methyl ribonucleotide
  modified_base 96: mod_base = OTHER; note = 2'-O-methyl ribonucleotide
  modified_base 97: mod_base = OTHER; note = 2'-O-methyl ribonucleotide
  modified_base 98: mod_base = OTHER; note = 2'-O-methyl ribonucleotide
  modified_base 99: mod_base = OTHER; note = 2'-O-methyl ribonucleotide
  modified_base 100: mod_base = OTHER; note = 2'-O-methyl ribonucleotide
  modified_base 1..4: mod_base = OTHER; note = phosphorothioate linkage
  modified_base 45..46: mod_base = OTHER; note = phosphorothioate linkage
  modified_base 98..100: mod_base = OTHER; note = phosphorothioate linkage

SEQ ID NO: 2655 - RNA, 103 nt, synthetic construct; identical to SEQ ID NO: 1700
  source 1..103: mol_type = other RNA
  modified_base 1: mod_base = OTHER; note = 2'-O-methyl ribonucleotide
  modified_base 2: mod_base = OTHER; note = 2'-O-methyl ribonucleotide
  modified_base 3: mod_base = OTHER; note = 2'-O-methyl ribonucleotide
  modified_base 21: mod_base = OTHER; note = 2'-O-methyl ribonucleotide
  modified_base 28: mod_base = OTHER; note = 2'-O-methyl ribonucleotide
  modified_base 29: mod_base = OTHER; note = 2'-O-methyl ribonucleotide
  modified_base 30: mod_base = OTHER; note = 2'-O-methyl ribonucleotide
  modified_base 31: mod_base = OTHER; note = 2'-O-methyl ribonucleotide
  modified_base 32: mod_base = OTHER; note = 2'-O-methyl ribonucleotide
  modified_base 34: mod_base = OTHER; note = 2'-O-methyl ribonucleotide
  modified_base 35: mod_base = OTHER; note = 2'-O-methyl ribonucleotide
  modified_base 36: mod_base = OTHER; note = 2'-O-methyl ribonucleotide
  modified_base 37: mod_base = OTHER; note = 2'-O-methyl ribonucleotide
  modified_base 38: mod_base = OTHER; note = 2'-O-methyl ribonucleotide
  modified_base 39: mod_base = OTHER; note = 2'-O-methyl ribonucleotide
  modified_base 40: mod_base = OTHER; note = 2'-O-methyl ribonucleotide
  modified_base 41: mod_base = OTHER; note = 2'-O-methyl ribonucleotide
  modified_base 42: mod_base = OTHER; note = 2'-O-methyl ribonucleotide
  modified_base 46: mod_base = OTHER; note = 2'-O-methyl ribonucleotide
  modified_base 48: mod_base = OTHER; note = 2'-O-methyl ribonucleotide
  modified_base 50: mod_base = OTHER; note = 2'-O-methyl ribonucleotide
  modified_base 52: mod_base = OTHER; note = 2'-O-methyl ribonucleotide
  modified_base 53: mod_base = OTHER; note = 2'-O-methyl ribonucleotide
  modified_base 54: mod_base = OTHER; note = 2'-O-methyl ribonucleotide
  modified_base 57: mod_base = OTHER; note = 2'-O-methyl ribonucleotide
  modified_base 61: mod_base = OTHER; note = 2'-O-methyl ribonucleotide
  modified_base 66: mod_base = OTHER; note = 2'-O-methyl ribonucleotide
  modified_base 67: mod_base = OTHER; note = 2'-O-methyl ribonucleotide
  modified_base 70: mod_base = OTHER; note = 2'-O-methyl ribonucleotide
  modified_base 71: mod_base = OTHER; note = 2'-O-methyl ribonucleotide
  modified_base 72: mod_base = OTHER; note = 2'-O-methyl ribonucleotide
  modified_base 73: mod_base = OTHER; note = 2'-O-methyl ribonucleotide
  modified_base 74: mod_base = OTHER; note = 2'-O-methyl ribonucleotide
  modified_base 75: mod_base = OTHER; note = 2'-O-methyl ribonucleotide
  modified_base 76: mod_base = OTHER; note = 2'-O-methyl ribonucleotide
  modified_base 77: mod_base = OTHER; note = 2'-O-methyl ribonucleotide
  modified_base 78: mod_base = OTHER; note = 2'-O-methyl ribonucleotide
  modified_base 79: mod_base = OTHER; note = 2'-O-methyl ribonucleotide
  modified_base 80: mod_base = OTHER; note = 2'-O-methyl ribonucleotide
  modified_base 82: mod_base = OTHER; note = 2'-O-methyl ribonucleotide
  modified_base 83: mod_base = OTHER; note = 2'-O-methyl ribonucleotide
  modified_base 84: mod_base = OTHER; note = 2'-O-methyl ribonucleotide
  modified_base 85: mod_base = OTHER; note = 2'-O-methyl ribonucleotide
  modified_base 86: mod_base = OTHER; note = 2'-O-methyl ribonucleotide
  modified_base 87: mod_base = OTHER; note = 2'-O-methyl ribonucleotide
  modified_base 89: mod_base = OTHER; note = 2'-O-methyl ribonucleotide
  modified_base 91: mod_base = OTHER; note = 2'-O-methyl ribonucleotide
  modified_base 92: mod_base = OTHER; note = 2'-O-methyl ribonucleotide
  modified_base 93: mod_base = OTHER; note = 2'-O-methyl ribonucleotide
  modified_base 94: mod_base = OTHER; note = 2'-O-methyl ribonucleotide
  modified_base 95: mod_base = OTHER; note = 2'-O-methyl ribonucleotide
  modified_base 96: mod_base = OTHER; note = 2'-O-methyl ribonucleotide
  modified_base 97: mod_base = OTHER; note = 2'-O-methyl ribonucleotide
  modified_base 98: mod_base = OTHER; note = 2'-O-methyl ribonucleotide
  modified_base 99: mod_base = OTHER; note = 2'-O-methyl ribonucleotide
  modified_base 100: mod_base = OTHER; note = 2'-O-methyl ribonucleotide
  modified_base 1..4: mod_base = OTHER; note = phosphorothioate linkage
  modified_base 45..46: mod_base = OTHER; note = phosphorothioate linkage
  modified_base 98..100: mod_base = OTHER; note = phosphorothioate linkage

SEQ ID NO: 2656 - RNA, 103 nt, synthetic construct; identical to SEQ ID NO: 1700
  source 1..103: mol_type = other RNA
  modified_base 1: mod_base = OTHER; note = 2'-O-methyl ribonucleotide
  modified_base 2: mod_base = OTHER; note = 2'-O-methyl ribonucleotide
  modified_base 3: mod_base = OTHER; note = 2'-O-methyl ribonucleotide
  modified_base 21: mod_base = OTHER; note = 2'-O-methyl ribonucleotide
  modified_base 28: mod_base = OTHER; note = 2'-O-methyl ribonucleotide
  modified_base 29: mod_base = OTHER; note = 2'-O-methyl ribonucleotide
  modified_base 30: mod_base = OTHER; note = 2'-O-methyl ribonucleotide
  modified_base 31: mod_base = OTHER; note = 2'-O-methyl ribonucleotide
  modified_base 32: mod_base = OTHER; note = 2'-O-methyl ribonucleotide
  modified_base 34: mod_base = OTHER; note = 2'-O-methyl ribonucleotide
  modified_base 35: mod_base = OTHER; note = 2'-O-methyl ribonucleotide
  modified_base 36: mod_base = OTHER; note = 2'-O-methyl ribonucleotide
  modified_base 37: mod_base = OTHER; note = 2'-O-methyl ribonucleotide
  modified_base 38: mod_base = OTHER; note = 2'-O-methyl ribonucleotide
  modified_base 39: mod_base = OTHER; note = 2'-O-methyl ribonucleotide
  modified_base 40: mod_base = OTHER; note = 2'-O-methyl ribonucleotide
  modified_base 41: mod_base = OTHER; note = 2'-O-methyl ribonucleotide
  modified_base 42: mod_base = OTHER; note = 2'-O-methyl ribonucleotide
  modified_base 46: mod_base = OTHER; note = 2'-O-methyl ribonucleotide
  modified_base 48: mod_base = OTHER; note = 2'-O-methyl ribonucleotide
  modified_base 50: mod_base = OTHER; note = 2'-O-methyl ribonucleotide
  modified_base 52: mod_base = OTHER; note = 2'-O-methyl ribonucleotide
  modified_base 53: mod_base = OTHER; note = 2'-O-methyl ribonucleotide
  modified_base 54: mod_base = OTHER; note = 2'-O-methyl ribonucleotide
  modified_base 55: mod_base = OTHER; note = 2'-O-methyl ribonucleotide
  modified_base 56: mod_base = OTHER; note = 2'-O-methyl ribonucleotide
  modified_base 57: mod_base = OTHER; note = 2'-O-methyl ribonucleotide
  modified_base 60: mod_base = OTHER; note = 2'-O-methyl ribonucleotide
  modified_base 61: mod_base = OTHER; note = 2'-O-methyl ribonucleotide
  modified_base 66: mod_base = OTHER; note = 2'-O-methyl ribonucleotide
  modified_base 67: mod_base = OTHER; note = 2'-O-methyl ribonucleotide
  modified_base 70: mod_base = OTHER; note = 2'-O-methyl ribonucleotide
  modified_base 71: mod_base = OTHER; note = 2'-O-methyl ribonucleotide
  modified_base 72: mod_base = OTHER; note = 2'-O-methyl ribonucleotide
  modified_base 74: mod_base = OTHER; note = 2'-O-methyl ribonucleotide
  modified_base 75: mod_base = OTHER; note = 2'-O-methyl ribonucleotide
  modified_base 76: mod_base = OTHER; note = 2'-O-methyl ribonucleotide
  modified_base 77: mod_base = OTHER; note = 2'-O-methyl ribonucleotide
  modified_base 78: mod_base = OTHER; note = 2'-O-methyl ribonucleotide
  modified_base 79: mod_base = OTHER; note = 2'-O-methyl ribonucleotide
  modified_base 80: mod_base = OTHER; note = 2'-O-methyl ribonucleotide
  modified_base 82: mod_base = OTHER; note = 2'-O-methyl ribonucleotide
  modified_base 83: mod_base = OTHER; note = 2'-O-methyl ribonucleotide
  modified_base 84: mod_base = OTHER; note = 2'-O-methyl ribonucleotide
  modified_base 85: mod_base = OTHER; note = 2'-O-methyl ribonucleotide
  modified_base 86: mod_base = OTHER; note = 2'-O-methyl ribonucleotide
  modified_base 87: mod_base = OTHER; note = 2'-O-methyl ribonucleotide
  modified_base 89: mod_base = OTHER; note = 2'-O-methyl ribonucleotide
  modified_base 92: mod_base = OTHER; note = 2'-O-methyl ribonucleotide
  modified_base 93: mod_base = OTHER; note = 2'-O-methyl ribonucleotide
  modified_base 94: mod_base = OTHER; note = 2'-O-methyl ribonucleotide
  modified_base 95: mod_base = OTHER; note = 2'-O-methyl ribonucleotide
  modified_base 96: mod_base = OTHER; note = 2'-O-methyl ribonucleotide
  modified_base 97: mod_base = OTHER; note = 2'-O-methyl ribonucleotide
  modified_base 98: mod_base = OTHER; note = 2'-O-methyl ribonucleotide
  modified_base 99: mod_base = OTHER; note = 2'-O-methyl ribonucleotide
  modified_base 100: mod_base = OTHER; note = 2'-O-methyl ribonucleotide
  modified_base 1..4: mod_base = OTHER; note = phosphorothioate linkage
  modified_base 45..46: mod_base = OTHER; note = phosphorothioate linkage
  modified_base 98..100: mod_base = OTHER; note = phosphorothioate linkage

SEQ ID NO: 2657 - RNA, 103 nt, synthetic construct; identical to SEQ ID NO: 1700
  source 1..103: mol_type = other RNA
  modified_base 1: mod_base = OTHER; note = 2'-O-methyl ribonucleotide
  modified_base 2: mod_base = OTHER; note = 2'-O-methyl ribonucleotide
  modified_base 3: mod_base = OTHER; note = 2'-O-methyl ribonucleotide
  modified_base 21: mod_base = OTHER; note = 2'-O-methyl ribonucleotide
  modified_base 28: mod_base = OTHER; note = 2'-O-methyl ribonucleotide
  modified_base 29: mod_base = OTHER; note = 2'-O-methyl ribonucleotide
  modified_base 30: mod_base = OTHER; note = 2'-O-methyl ribonucleotide
  modified_base 31: mod_base = OTHER; note = 2'-O-methyl ribonucleotide
  modified_base 32: mod_base = OTHER; note = 2'-O-methyl ribonucleotide
  modified_base 34: mod_base = OTHER; note = 2'-O-methyl ribonucleotide
  modified_base 35: mod_base = OTHER; note = 2'-O-methyl ribonucleotide
  modified_base 36: mod_base = OTHER; note = 2'-O-methyl ribonucleotide
  modified_base 37: mod_base = OTHER; note = 2'-O-methyl ribonucleotide
  modified_base 38: mod_base = OTHER; note = 2'-O-methyl ribonucleotide
  modified_base 39: mod_base = OTHER; note = 2'-O-methyl ribonucleotide
  modified_base 40: mod_base = OTHER; note = 2'-O-methyl ribonucleotide
  modified_base 41: mod_base = OTHER; note = 2'-O-methyl ribonucleotide
  modified_base 42: mod_base = OTHER; note = 2'-O-methyl ribonucleotide
  modified_base 46: mod_base = OTHER; note = 2'-O-methyl ribonucleotide
  modified_base 48: mod_base = OTHER; note = 2'-O-methyl ribonucleotide
  modified_base 50: mod_base = OTHER; note = 2'-O-methyl ribonucleotide
  modified_base 52: mod_base = OTHER; note = 2'-O-methyl ribonucleotide
  modified_base 53: mod_base = OTHER; note = 2'-O-methyl ribonucleotide
  modified_base 54: mod_base = OTHER; note = 2'-O-methyl ribonucleotide
  modified_base 55: mod_base = OTHER; note = 2'-O-methyl ribonucleotide
  modified_base 56: mod_base = OTHER; note = 2'-O-methyl ribonucleotide
  modified_base 57: mod_base = OTHER; note = 2'-O-methyl ribonucleotide
  modified_base 60: mod_base = OTHER; note = 2'-O-methyl ribonucleotide
  modified_base 61: mod_base = OTHER; note = 2'-O-methyl ribonucleotide
  modified_base 66: mod_base = OTHER; note = 2'-O-methyl ribonucleotide
  modified_base 67: mod_base = OTHER; note = 2'-O-methyl ribonucleotide
  modified_base 70: mod_base = OTHER; note = 2'-O-methyl ribonucleotide
  modified_base 71: mod_base = OTHER; note = 2'-O-methyl ribonucleotide
  modified_base 72: mod_base = OTHER; note = 2'-O-methyl ribonucleotide
  modified_base 74: mod_base = OTHER; note = 2'-O-methyl ribonucleotide
  modified_base 75: mod_base = OTHER; note = 2'-O-methyl ribonucleotide
  modified_base 76: mod_base = OTHER; note = 2'-O-methyl ribonucleotide
  modified_base 77: mod_base = OTHER; note = 2'-O-methyl ribonucleotide
  modified_base 78: mod_base = OTHER; note = 2'-O-methyl ribonucleotide
  modified_base 79: mod_base = OTHER; note = 2'-O-methyl ribonucleotide
  modified_base 80: mod_base = OTHER; note = 2'-O-methyl ribonucleotide
  modified_base 81: mod_base = OTHER; note = 2'-O-methyl ribonucleotide
  modified_base 83: mod_base = OTHER; note = 2'-O-methyl ribonucleotide
  modified_base 84: mod_base = OTHER; note = 2'-O-methyl ribonucleotide
  modified_base 85: mod_base = OTHER; note = 2'-O-methyl ribonucleotide
  modified_base 86: mod_base = OTHER; note = 2'-O-methyl ribonucleotide
  modified_base 87: mod_base = OTHER; note = 2'-O-methyl ribonucleotide
  modified_base 88: mod_base = OTHER; note = 2'-O-methyl ribonucleotide
  modified_base 89: mod_base = OTHER; note = 2'-O-methyl ribonucleotide
  modified_base 90: mod_base = OTHER; note = 2'-O-methyl ribonucleotide
  modified_base 91: mod_base = OTHER; note = 2'-O-methyl ribonucleotide
  modified_base 92: mod_base = OTHER; note = 2'-O-methyl ribonucleotide
  modified_base 93: mod_base = OTHER; note = 2'-O-methyl ribonucleotide
  modified_base 94: mod_base = OTHER; note = 2'-O-methyl ribonucleotide
  modified_base 95: mod_base = OTHER; note = 2'-O-methyl ribonucleotide
  modified_base 96: mod_base = OTHER; note = 2'-O-methyl ribonucleotide
  modified_base 97: mod_base = OTHER; note = 2'-O-methyl ribonucleotide
  modified_base 98: mod_base = OTHER; note = 2'-O-methyl ribonucleotide
  modified_base 99: mod_base = OTHER; note = 2'-O-methyl ribonucleotide
  modified_base 100: mod_base = OTHER; note = 2'-O-methyl ribonucleotide
  modified_base 101: mod_base = OTHER; note = 2'-O-methyl ribonucleotide
  modified_base 102: mod_base = OTHER; note = 2'-O-methyl ribonucleotide
  modified_base 103: mod_base = OTHER; note = 2'-O-methyl ribonucleotide
  modified_base 1..4: mod_base = OTHER; note = phosphorothioate linkage
  modified_base 45..46: mod_base = OTHER; note = phosphorothioate linkage
  modified_base 98..100: mod_base = OTHER; note = phosphorothioate linkage

SEQ ID NO: 2658 - RNA, 103 nt, synthetic construct; identical to SEQ ID NO: 1700
  source 1..103: mol_type = other RNA
  modified_base 1: mod_base = OTHER; note = 2'-O-methyl ribonucleotide
  modified_base 2: mod_base = OTHER; note = 2'-O-methyl ribonucleotide
  modified_base 3: mod_base = OTHER; note = 2'-O-methyl ribonucleotide
  modified_base 21: mod_base = OTHER; note = 2'-O-methyl ribonucleotide
  modified_base 28: mod_base = OTHER; note = 2'-O-methyl ribonucleotide
  modified_base 29: mod_base = OTHER; note = 2'-O-methyl ribonucleotide
  modified_base 30: mod_base = OTHER; note = 2'-O-methyl ribonucleotide
  modified_base 31: mod_base = OTHER; note = 2'-O-methyl ribonucleotide
  modified_base 32: mod_base = OTHER; note = 2'-O-methyl ribonucleotide
  modified_base 34: mod_base = OTHER; note = 2'-O-methyl ribonucleotide
  modified_base 35: mod_base = OTHER; note = 2'-O-methyl ribonucleotide
  modified_base 36: mod_base = OTHER; note = 2'-O-methyl ribonucleotide
  modified_base 37: mod_base = OTHER; note = 2'-O-methyl ribonucleotide
  modified_base 38: mod_base = OTHER; note = 2'-O-methyl ribonucleotide
  modified_base 39: mod_base = OTHER; note = 2'-O-methyl ribonucleotide
  modified_base 40: mod_base = OTHER; note = 2'-O-methyl ribonucleotide
  modified_base 41: mod_base = OTHER; note = 2'-O-methyl ribonucleotide
  modified_base 42: mod_base = OTHER; note = 2'-O-methyl ribonucleotide
  modified_base 46: mod_base = OTHER; note = 2'-O-methyl ribonucleotide
  modified_base 48: mod_base = OTHER; note = 2'-O-methyl ribonucleotide
  modified_base 50: mod_base = OTHER; note = 2'-O-methyl ribonucleotide
  modified_base 52: mod_base = OTHER; note = 2'-O-methyl ribonucleotide
  modified_base 53: mod_base = OTHER; note = 2'-O-methyl ribonucleotide
  modified_base 54: mod_base = OTHER; note = 2'-O-methyl ribonucleotide
  modified_base 55: mod_base = OTHER; note = 2'-O-methyl ribonucleotide
  modified_base 56: mod_base = OTHER; note = 2'-O-methyl ribonucleotide
  modified_base 57: mod_base = OTHER; note = 2'-O-methyl ribonucleotide
  modified_base 60: mod_base = OTHER; note = 2'-O-methyl ribonucleotide
  modified_base 61: mod_base = OTHER; note = 2'-O-methyl ribonucleotide
  modified_base 66: mod_base = OTHER; note = 2'-O-methyl ribonucleotide
  modified_base 67: mod_base = OTHER; note = 2'-O-methyl ribonucleotide
  modified_base 70: mod_base = OTHER; note = 2'-O-methyl ribonucleotide
  modified_base 71: mod_base = OTHER; note = 2'-O-methyl ribonucleotide
  modified_base 72: mod_base = OTHER; note = 2'-O-methyl ribonucleotide
  modified_base 74: mod_base = OTHER; note = 2'-O-methyl ribonucleotide
  modified_base 75: mod_base = OTHER; note = 2'-O-methyl ribonucleotide
  modified_base 76: mod_base = OTHER; note = 2'-O-methyl ribonucleotide
  modified_base 77: mod_base = OTHER; note = 2'-O-methyl ribonucleotide
  modified_base 78: mod_base = OTHER; note = 2'-O-methyl ribonucleotide
  modified_base 79: mod_base = OTHER; note = 2'-O-methyl ribonucleotide
  modified_base 80: mod_base = OTHER; note = 2'-O-methyl ribonucleotide
  modified_base 81: mod_base = OTHER; note = 2'-O-methyl ribonucleotide
  modified_base 83: mod_base = OTHER; note = 2'-O-methyl ribonucleotide
  modified_base 84: mod_base = OTHER; note = 2'-O-methyl ribonucleotide
  modified_base 85: mod_base = OTHER; note = 2'-O-methyl ribonucleotide
  modified_base 86: mod_base = OTHER; note = 2'-O-methyl ribonucleotide
  modified_base 87: mod_base = OTHER; note = 2'-O-methyl ribonucleotide
  modified_base 88: mod_base = OTHER; note = 2'-O-methyl ribonucleotide
  modified_base 89: mod_base = OTHER; note = 2'-O-methyl ribonucleotide
  modified_base 90: mod_base = OTHER; note = 2'-O-methyl ribonucleotide
  modified_base 91: mod_base = OTHER; note = 2'-O-methyl ribonucleotide
  modified_base 92: mod_base = OTHER; note = 2'-O-methyl ribonucleotide
  modified_base 93: mod_base = OTHER; note = 2'-O-methyl ribonucleotide
  modified_base 94: mod_base = OTHER; note = 2'-O-methyl ribonucleotide
  modified_base 95: mod_base = OTHER; note = 2'-O-methyl ribonucleotide
  modified_base 96: mod_base = OTHER; note = 2'-O-methyl ribonucleotide
  modified_base 97: mod_base = OTHER; note = 2'-O-methyl ribonucleotide
  modified_base 98: mod_base = OTHER; note = 2'-O-methyl ribonucleotide
  modified_base 99: mod_base = OTHER; note = 2'-O-methyl ribonucleotide
  modified_base 100: mod_base = OTHER; note = 2'-O-methyl ribonucleotide
  modified_base 101: mod_base = OTHER; note = 2'-O-methyl ribonucleotide
  modified_base 103: mod_base = OTHER; note = 2'-O-methyl ribonucleotide
  modified_base 1..4: mod_base = OTHER; note = phosphorothioate linkage
  modified_base 45..46: mod_base = OTHER; note = phosphorothioate linkage
  modified_base 98..100: mod_base = OTHER; note = phosphorothioate linkage

SEQ ID NO: 2659 - RNA, 103 nt, synthetic construct; identical to SEQ ID NO: 1643
  source 1..103: mol_type = other RNA
  modified_base 1: mod_base = OTHER; note = 2'-O-methyl ribonucleotide
  modified_base 2: mod_base = OTHER; note = 2'-O-methyl ribonucleotide
  modified_base 3: mod_base = OTHER; note = 2'-O-methyl ribonucleotide
  modified_base 21: mod_base = OTHER; note = 2'-O-methyl ribonucleotide
  modified_base 28: mod_base = OTHER; note = 2'-O-methyl ribonucleotide
  modified_base 29: mod_base = OTHER; note = 2'-O-methyl ribonucleotide
  modified_base 30: mod_base = OTHER; note = 2'-O-methyl ribonucleotide
  modified_base 31: mod_base = OTHER; note = 2'-O-methyl ribonucleotide
  modified_base 32: mod_base = OTHER; note = 2'-O-methyl ribonucleotide
  modified_base 33: mod_base = OTHER; note = 2'-O-methyl ribonucleotide
  modified_base 34: mod_base = OTHER; note = 2'-O-methyl ribonucleotide
  modified_base 35: mod_base = OTHER; note = 2'-O-methyl ribonucleotide
  modified_base 36: mod_base = OTHER; note = 2'-O-methyl ribonucleotide
  modified_base 37: mod_base = OTHER; note = 2'-O-methyl ribonucleotide
  modified_base 38: mod_base = OTHER; note = 2'-O-methyl ribonucleotide
  modified_base 39: mod_base = OTHER; note = 2'-O-methyl ribonucleotide
  modified_base 40: mod_base = OTHER; note = 2'-O-methyl ribonucleotide
  modified_base 41: mod_base = OTHER; note = 2'-O-methyl ribonucleotide
  modified_base 42: mod_base = OTHER; note = 2'-O-methyl ribonucleotide
  modified_base 46: mod_base = OTHER; note = 2'-O-methyl ribonucleotide
  modified_base 48: mod_base = OTHER; note = 2'-O-methyl ribonucleotide
  modified_base 50: mod_base = OTHER; note = 2'-O-methyl ribonucleotide
  modified_base 52: mod_base = OTHER; note = 2'-O-methyl ribonucleotide
  modified_base 53: mod_base = OTHER; note = 2'-O-methyl ribonucleotide
  modified_base 54: mod_base = OTHER; note = 2'-O-methyl ribonucleotide
  modified_base 55: mod_base = OTHER; note = 2'-O-methyl ribonucleotide
  modified_base 56: mod_base = OTHER; note = 2'-O-methyl ribonucleotide
  modified_base 57: mod_base = OTHER; note = 2'-O-methyl ribonucleotide
  modified_base 60: mod_base = OTHER; note = 2'-O-methyl ribonucleotide
  modified_base 61: mod_base = OTHER; note = 2'-O-methyl ribonucleotide
  modified_base 66: mod_base = OTHER; note = 2'-O-methyl ribonucleotide
  modified_base 67: mod_base = OTHER; note = 2'-O-methyl ribonucleotide
  modified_base 70: mod_base = OTHER; note = 2'-O-methyl ribonucleotide
  modified_base 71: mod_base = OTHER; note = 2'-O-methyl ribonucleotide
  modified_base 72: mod_base = OTHER; note = 2'-O-methyl ribonucleotide
  modified_base 73: mod_base = OTHER; note = 2'-O-methyl ribonucleotide
  modified_base 74: mod_base = OTHER; note = 2'-O-methyl ribonucleotide
  modified_base 75: mod_base = OTHER; note = 2'-O-methyl ribonucleotide
  modified_base 76: mod_base = OTHER; note = 2'-O-methyl ribonucleotide
  modified_base 77: mod_base = OTHER; note = 2'-O-methyl ribonucleotide
  modified_base 78: mod_base = OTHER; note = 2'-O-methyl ribonucleotide
  modified_base 79: mod_base = OTHER; note = 2'-O-methyl ribonucleotide
  modified_base 80: mod_base = OTHER; note = 2'-O-methyl ribonucleotide
  modified_base 81: mod_base = OTHER; note = 2'-O-methyl ribonucleotide
  modified_base 83: mod_base = OTHER; note = 2'-O-methyl ribonucleotide
  modified_base 84: mod_base = OTHER; note = 2'-O-methyl ribonucleotide
  modified_base 85: mod_base = OTHER; note = 2'-O-methyl ribonucleotide
  modified_base 86: mod_base = OTHER; note = 2'-O-methyl ribonucleotide
  modified_base 87: mod_base = OTHER; note = 2'-O-methyl ribonucleotide
  modified_base 88: mod_base = OTHER; note = 2'-O-methyl ribonucleotide
  modified_base 89: mod_base = OTHER; note = 2'-O-methyl ribonucleotide
  modified_base 90: mod_base = OTHER; note = 2'-O-methyl ribonucleotide
  modified_base 91: mod_base = OTHER; note = 2'-O-methyl ribonucleotide
  modified_base 92: mod_base = OTHER; note = 2'-O-methyl ribonucleotide
  modified_base 93: mod_base = OTHER; note = 2'-O-methyl ribonucleotide
  modified_base 94: mod_base = OTHER; note = 2'-O-methyl ribonucleotide
  modified_base 95: mod_base = OTHER; note = 2'-O-methyl ribonucleotide
  modified_base 96: mod_base = OTHER; note = 2'-O-methyl ribonucleotide
  modified_base 97: mod_base = OTHER; note = 2'-O-methyl ribonucleotide
  modified_base 98: mod_base = OTHER; note = 2'-O-methyl ribonucleotide
  modified_base 99: mod_base = OTHER; note = 2'-O-methyl ribonucleotide
  modified_base 100: mod_base = OTHER; note = 2'-O-methyl ribonucleotide
  modified_base 1..4: mod_base = OTHER; note = phosphorothioate linkage
  modified_base 25..26: mod_base = OTHER; note = phosphorothioate linkage
  modified_base 98..100: mod_base = OTHER; note = phosphorothioate linkage

SEQ ID NO: 2660 - RNA, 103 nt, synthetic construct; identical to SEQ ID NO: 1643
  source 1..103: mol_type = other RNA
  modified_base 1: mod_base = OTHER; note = 2'-O-methyl ribonucleotide
  modified_base 2: mod_base = OTHER; note = 2'-O-methyl ribonucleotide
  modified_base 3: mod_base = OTHER; note = 2'-O-methyl ribonucleotide
  modified_base 21: mod_base = OTHER; note = 2'-O-methyl ribonucleotide
  modified_base 28: mod_base = OTHER; note = 2'-O-methyl ribonucleotide
  modified_base 29: mod_base = OTHER; note = 2'-O-methyl ribonucleotide
  modified_base 30: mod_base = OTHER; note = 2'-O-methyl ribonucleotide
  modified_base 31: mod_base = OTHER; note = 2'-O-methyl ribonucleotide
  modified_base 32: mod_base = OTHER; note = 2'-O-methyl ribonucleotide
  modified_base 34: mod_base = OTHER; note = 2'-O-methyl ribonucleotide
  modified_base 35: mod_base = OTHER; note = 2'-O-methyl ribonucleotide
  modified_base 36: mod_base = OTHER; note = 2'-O-methyl ribonucleotide
  modified_base 37: mod_base = OTHER; note = 2'-O-methyl ribonucleotide
  modified_base 38: mod_base = OTHER; note = 2'-O-methyl ribonucleotide
  modified_base 39: mod_base = OTHER; note = 2'-O-methyl ribonucleotide
  modified_base 40: mod_base = OTHER; note = 2'-O-methyl ribonucleotide
  modified_base 41: mod_base = OTHER; note = 2'-O-methyl ribonucleotide
  modified_base 42: mod_base = OTHER; note = 2'-O-methyl ribonucleotide
  modified_base 46: mod_base = OTHER; note = 2'-O-methyl ribonucleotide
  modified_base 48: mod_base = OTHER; note = 2'-O-methyl ribonucleotide
  modified_base 50: mod_base = OTHER; note = 2'-O-methyl ribonucleotide
  modified_base 52: mod_base = OTHER; note = 2'-O-methyl ribonucleotide
  modified_base 53: mod_base = OTHER; note = 2'-O-methyl ribonucleotide
  modified_base 54: mod_base = OTHER; note = 2'-O-methyl ribonucleotide
  modified_base 55: mod_base = OTHER; note = 2'-O-methyl ribonucleotide
  modified_base 56: mod_base = OTHER; note = 2'-O-methyl ribonucleotide
  modified_base 57: mod_base = OTHER; note = 2'-O-methyl ribonucleotide
  modified_base 60: mod_base = OTHER; note = 2'-O-methyl ribonucleotide
  modified_base 61: mod_base = OTHER; note = 2'-O-methyl ribonucleotide
  modified_base 66: mod_base = OTHER; note = 2'-O-methyl ribonucleotide
  modified_base 67: mod_base = OTHER; note = 2'-O-methyl ribonucleotide
  modified_base 70: mod_base = OTHER; note = 2'-O-methyl ribonucleotide
  modified_base 71: mod_base = OTHER; note = 2'-O-methyl ribonucleotide
  modified_base 72: mod_base = OTHER; note = 2'-O-methyl ribonucleotide
  modified_base 74: mod_base = OTHER; note = 2'-O-methyl ribonucleotide
  modified_base 75: mod_base = OTHER; note = 2'-O-methyl ribonucleotide
  modified_base 76: mod_base = OTHER; note = 2'-O-methyl ribonucleotide
  modified_base 77: mod_base = OTHER; note = 2'-O-methyl ribonucleotide
  modified_base 78: mod_base = OTHER; note = 2'-O-methyl ribonucleotide
  modified_base 79: mod_base = OTHER; note = 2'-O-methyl ribonucleotide
  modified_base 80: mod_base = OTHER; note = 2'-O-methyl ribonucleotide
  modified_base 81: mod_base = OTHER; note = 2'-O-methyl ribonucleotide
  modified_base 83: mod_base = OTHER; note = 2'-O-methyl ribonucleotide
  modified_base 84: mod_base = OTHER; note = 2'-O-methyl ribonucleotide
  modified_base 85: mod_base = OTHER; note = 2'-O-methyl ribonucleotide
  modified_base 86: mod_base = OTHER; note = 2'-O-methyl ribonucleotide
  modified_base 87: mod_base = OTHER; note = 2'-O-methyl ribonucleotide
  modified_base 88: mod_base = OTHER; note = 2'-O-methyl ribonucleotide
  modified_base 89: mod_base = OTHER; note = 2'-O-methyl ribonucleotide
  modified_base 90: mod_base = OTHER; note = 2'-O-methyl ribonucleotide
  modified_base 91: mod_base = OTHER; note = 2'-O-methyl ribonucleotide
  modified_base 92: mod_base = OTHER; note = 2'-O-methyl ribonucleotide
  modified_base 93: mod_base = OTHER; note = 2'-O-methyl ribonucleotide
  modified_base 94: mod_base = OTHER; note = 2'-O-methyl ribonucleotide
  modified_base 95: mod_base = OTHER; note = 2'-O-methyl ribonucleotide
  modified_base 96: mod_base = OTHER; note = 2'-O-methyl ribonucleotide
  modified_base 97: mod_base = OTHER; note = 2'-O-methyl ribonucleotide
  modified_base 98: mod_base = OTHER; note = 2'-O-methyl ribonucleotide
  modified_base 99: mod_base = OTHER; note = 2'-O-methyl ribonucleotide
  modified_base 100: mod_base = OTHER; note = 2'-O-methyl ribonucleotide
  modified_base 1..4: mod_base = OTHER; note = phosphorothioate linkage
  modified_base 25..26: mod_base = OTHER; note = phosphorothioate linkage
  modified_base 98..100: mod_base = OTHER; note = phosphorothioate linkage

SEQ ID NO: 2661 - RNA, 103 nt, synthetic construct; identical to SEQ ID NO: 1699
  source 1..103: mol_type = other RNA
  modified_base 1: mod_base = OTHER; note = 2'-O-methyl ribonucleotide
  modified_base 2: mod_base = OTHER; note = 2'-O-methyl ribonucleotide
  modified_base 3: mod_base = OTHER; note = 2'-O-methyl ribonucleotide
  modified_base 21: mod_base = OTHER; note = 2'-O-methyl ribonucleotide
  modified_base 28: mod_base = OTHER; note = 2'-O-methyl ribonucleotide
  modified_base 29: mod_base = OTHER; note = 2'-O-methyl ribonucleotide
  modified_base 30: mod_base = OTHER; note = 2'-O-methyl ribonucleotide
  modified_base 31: mod_base = OTHER; note = 2'-O-methyl ribonucleotide
  modified_base 32: mod_base = OTHER; note = 2'-O-methyl ribonucleotide
  modified_base 33: mod_base = OTHER; note = 2'-O-methyl ribonucleotide
  modified_base 34: mod_base = OTHER; note = 2'-O-methyl ribonucleotide
  modified_base 35: mod_base = OTHER; note = 2'-O-methyl ribonucleotide
  modified_base 36: mod_base = OTHER; note = 2'-O-methyl ribonucleotide
  modified_base 37: mod_base = OTHER; note = 2'-O-methyl ribonucleotide
  modified_base 38: mod_base = OTHER; note = 2'-O-methyl ribonucleotide
  modified_base 39: mod_base = OTHER; note = 2'-O-methyl ribonucleotide
  modified_base 40: mod_base = OTHER; note = 2'-O-methyl ribonucleotide
  modified_base 41: mod_base = OTHER; note = 2'-O-methyl ribonucleotide
  modified_base 42: mod_base = OTHER; note = 2'-O-methyl ribonucleotide
  modified_base 46: mod_base = OTHER; note = 2'-O-methyl ribonucleotide
  modified_base 48: mod_base = OTHER; note = 2'-O-methyl ribonucleotide
  modified_base 50: mod_base = OTHER; note = 2'-O-methyl ribonucleotide
  modified_base 52: mod_base = OTHER; note = 2'-O-methyl ribonucleotide
  modified_base 53: mod_base = OTHER; note = 2'-O-methyl ribonucleotide
  modified_base 54: mod_base = OTHER; note = 2'-O-methyl ribonucleotide
  modified_base 55: mod_base = OTHER; note = 2'-O-methyl ribonucleotide
  modified_base 56: mod_base = OTHER; note = 2'-O-methyl ribonucleotide
  modified_base 57: mod_base = OTHER; note = 2'-O-methyl ribonucleotide
  modified_base 60: mod_base = OTHER; note = 2'-O-methyl ribonucleotide
  modified_base 61: mod_base = OTHER; note = 2'-O-methyl ribonucleotide
  modified_base 66: mod_base = OTHER; note = 2'-O-methyl ribonucleotide
  modified_base 67: mod_base = OTHER; note = 2'-O-methyl ribonucleotide
  modified_base 70: mod_base = OTHER; note = 2'-O-methyl ribonucleotide
  modified_base 71: mod_base = OTHER; note = 2'-O-methyl ribonucleotide
  modified_base 72: mod_base = OTHER; note = 2'-O-methyl ribonucleotide
  modified_base 73: mod_base = OTHER; note = 2'-O-methyl ribonucleotide
  modified_base 74: mod_base = OTHER; note = 2'-O-methyl ribonucleotide
  modified_base 75: mod_base = OTHER; note = 2'-O-methyl ribonucleotide
  modified_base 76: mod_base = OTHER; note = 2'-O-methyl ribonucleotide
  modified_base 77: mod_base = OTHER; note = 2'-O-methyl ribonucleotide
  modified_base 78: mod_base = OTHER; note = 2'-O-methyl ribonucleotide
  modified_base 79: mod_base = OTHER; note = 2'-O-methyl ribonucleotide
  modified_base 80: mod_base = OTHER; note = 2'-O-methyl ribonucleotide
  modified_base 81: mod_base = OTHER; note = 2'-O-methyl ribonucleotide
  modified_base 83: mod_base = OTHER; note = 2'-O-methyl ribonucleotide
  modified_base 84: mod_base = OTHER; note = 2'-O-methyl ribonucleotide
  modified_base 85: mod_base = OTHER; note = 2'-O-methyl ribonucleotide
  modified_base 86: mod_base = OTHER; note = 2'-O-methyl ribonucleotide
  modified_base 87: mod_base = OTHER; note = 2'-O-methyl ribonucleotide
  modified_base 88: mod_base = OTHER; note = 2'-O-methyl ribonucleotide
  modified_base 89: mod_base = OTHER; note = 2'-O-methyl ribonucleotide
  modified_base 90: mod_base = OTHER; note = 2'-O-methyl ribonucleotide
  modified_base 91: mod_base = OTHER; note = 2'-O-methyl ribonucleotide
  modified_base 92: mod_base = OTHER; note = 2'-O-methyl ribonucleotide
  modified_base 93: mod_base = OTHER; note = 2'-O-methyl ribonucleotide
  modified_base 94: mod_base = OTHER; note = 2'-O-methyl ribonucleotide
  modified_base 95: mod_base = OTHER; note = 2'-O-methyl ribonucleotide
  modified_base 96: mod_base = OTHER; note = 2'-O-methyl ribonucleotide
  modified_base 97: mod_base = OTHER; note = 2'-O-methyl ribonucleotide
  modified_base 98: mod_base = OTHER; note = 2'-O-methyl ribonucleotide
  modified_base 99: mod_base = OTHER; note = 2'-O-methyl ribonucleotide
  modified_base 100: mod_base = OTHER; note = 2'-O-methyl ribonucleotide
  modified_base 1..4: mod_base = OTHER; note = phosphorothioate linkage
  modified_base 25..26: mod_base = OTHER; note = phosphorothioate linkage
  modified_base 98..100: mod_base = OTHER; note = phosphorothioate linkage

SEQ ID NO: 2662 - RNA, 103 nt, synthetic construct; identical to SEQ ID NO: 1699
  source 1..103: mol_type = other RNA
  modified_base 1: mod_base = OTHER; note = 2'-O-methyl ribonucleotide
  modified_base 2: mod_base = OTHER; note = 2'-O-methyl ribonucleotide
  modified_base 3: mod_base = OTHER; note = 2'-O-methyl ribonucleotide
  modified_base 21: mod_base = OTHER; note = 2'-O-methyl ribonucleotide
  modified_base 28: mod_base = OTHER; note = 2'-O-methyl ribonucleotide
  modified_base 29: mod_base = OTHER; note = 2'-O-methyl ribonucleotide
  modified_base 30: mod_base = OTHER; note = 2'-O-methyl ribonucleotide
  modified_base 31: mod_base = OTHER; note = 2'-O-methyl ribonucleotide
  modified_base 32: mod_base = OTHER; note = 2'-O-methyl ribonucleotide
  modified_base 34: mod_base = OTHER; note = 2'-O-methyl ribonucleotide
  modified_base 35: mod_base = OTHER; note = 2'-O-methyl ribonucleotide
  modified_base 36: mod_base = OTHER; note = 2'-O-methyl ribonucleotide
  modified_base 37: mod_base = OTHER; note = 2'-O-methyl ribonucleotide
  modified_base 38: mod_base = OTHER; note = 2'-O-methyl ribonucleotide
  modified_base 39: mod_base = OTHER; note = 2'-O-methyl ribonucleotide
  modified_base 40: mod_base = OTHER; note = 2'-O-methyl ribonucleotide
  modified_base 41: mod_base = OTHER; note = 2'-O-methyl ribonucleotide
  modified_base 42: mod_base = OTHER; note = 2'-O-methyl ribonucleotide
  modified_base 46: mod_base = OTHER; note = 2'-O-methyl ribonucleotide
  modified_base 48: mod_base = OTHER; note = 2'-O-methyl ribonucleotide
  modified_base 50: mod_base = OTHER; note = 2'-O-methyl ribonucleotide
  modified_base 52: mod_base = OTHER; note = 2'-O-methyl ribonucleotide
  modified_base 53: mod_base = OTHER; note = 2'-O-methyl ribonucleotide
  modified_base 54: mod_base = OTHER; note = 2'-O-methyl ribonucleotide
  modified_base 55: mod_base = OTHER; note = 2'-O-methyl ribonucleotide
  modified_base 56: mod_base = OTHER; note = 2'-O-methyl ribonucleotide
  modified_base 57: mod_base = OTHER; note = 2'-O-methyl ribonucleotide
  modified_base 60: mod_base = OTHER; note = 2'-O-methyl ribonucleotide
  modified_base 61: mod_base = OTHER; note = 2'-O-methyl ribonucleotide
  modified_base 66: mod_base = OTHER; note = 2'-O-methyl ribonucleotide
  modified_base 67: mod_base = OTHER; note = 2'-O-methyl ribonucleotide
  modified_base 70: mod_base = OTHER; note = 2'-O-methyl ribonucleotide
  modified_base 71: mod_base = OTHER; note = 2'-O-methyl ribonucleotide
  modified_base 72: mod_base = OTHER; note = 2'-O-methyl ribonucleotide
  modified_base 74: mod_base = OTHER; note = 2'-O-methyl ribonucleotide
  modified_base 75: mod_base = OTHER; note = 2'-O-methyl ribonucleotide
  modified_base 76: mod_base = OTHER; note = 2'-O-methyl ribonucleotide
  modified_base 77: mod_base = OTHER; note = 2'-O-methyl ribonucleotide
  modified_base 78: mod_base = OTHER; note = 2'-O-methyl ribonucleotide
  modified_base 79: mod_base = OTHER; note = 2'-O-methyl ribonucleotide
  modified_base 80: mod_base = OTHER; note = 2'-O-methyl ribonucleotide
  modified_base 81: mod_base = OTHER; note = 2'-O-methyl ribonucleotide
  modified_base 83: mod_base = OTHER; note = 2'-O-methyl ribonucleotide
  modified_base 84: mod_base = OTHER; note = 2'-O-methyl ribonucleotide
  modified_base 85: mod_base = OTHER; note = 2'-O-methyl ribonucleotide
  modified_base 86: mod_base = OTHER; note = 2'-O-methyl ribonucleotide
  modified_base 87: mod_base = OTHER; note = 2'-O-methyl ribonucleotide
  modified_base 88: mod_base = OTHER; note = 2'-O-methyl ribonucleotide
  modified_base 89: mod_base = OTHER; note = 2'-O-methyl ribonucleotide
  modified_base 90: mod_base = OTHER; note = 2'-O-methyl ribonucleotide
  modified_base 91: mod_base = OTHER; note = 2'-O-methyl ribonucleotide
  modified_base 92: mod_base = OTHER; note = 2'-O-methyl ribonucleotide
  modified_base 93: mod_base = OTHER; note = 2'-O-methyl ribonucleotide
  modified_base 94: mod_base = OTHER; note = 2'-O-methyl ribonucleotide
  modified_base 95: mod_base = OTHER; note = 2'-O-methyl ribonucleotide
  modified_base 96: mod_base = OTHER; note = 2'-O-methyl ribonucleotide
  modified_base 97: mod_base = OTHER; note = 2'-O-methyl ribonucleotide
  modified_base 98: mod_base = OTHER; note = 2'-O-methyl ribonucleotide
  modified_base 99: mod_base = OTHER; note = 2'-O-methyl ribonucleotide
  modified_base 100: mod_base = OTHER; note = 2'-O-methyl ribonucleotide
  modified_base 1..4: mod_base = OTHER; note = phosphorothioate linkage
  modified_base 25..26: mod_base = OTHER; note = phosphorothioate linkage
  modified_base 98..100: mod_base = OTHER; note = phosphorothioate linkage

SEQ ID NO: 2663 - RNA, 103 nt, synthetic construct; identical to SEQ ID NO: 1700
  source 1..103: mol_type = other RNA
  modified_base 1: mod_base = OTHER; note = 2'-O-methyl ribonucleotide
  modified_base 2: mod_base = OTHER; note = 2'-O-methyl ribonucleotide
  modified_base 3: mod_base = OTHER; note = 2'-O-methyl ribonucleotide
  modified_base 21: mod_base = OTHER; note = 2'-O-methyl ribonucleotide
  modified_base 28: mod_base = OTHER; note = 2'-O-methyl ribonucleotide
  modified_base 29: mod_base = OTHER; note = 2'-O-methyl ribonucleotide
  modified_base 30: mod_base = OTHER; note = 2'-O-methyl ribonucleotide
  modified_base 31: mod_base = OTHER; note = 2'-O-methyl ribonucleotide
  modified_base 32: mod_base = OTHER; note = 2'-O-methyl ribonucleotide
  modified_base 33: mod_base = OTHER; note = 2'-O-methyl ribonucleotide
  modified_base 34: mod_base = OTHER; note = 2'-O-methyl ribonucleotide
  modified_base 35: mod_base = OTHER; note = 2'-O-methyl ribonucleotide
  modified_base 36: mod_base = OTHER; note = 2'-O-methyl ribonucleotide
  modified_base 37: mod_base = OTHER; note = 2'-O-methyl ribonucleotide
  modified_base 38: mod_base = OTHER; note = 2'-O-methyl ribonucleotide
  modified_base 39: mod_base = OTHER; note = 2'-O-methyl ribonucleotide
  modified_base 40: mod_base = OTHER; note = 2'-O-methyl ribonucleotide
  modified_base 41: mod_base = OTHER; note = 2'-O-methyl ribonucleotide
  modified_base 42: mod_base = OTHER; note = 2'-O-methyl ribonucleotide
  modified_base 46: mod_base = OTHER; note = 2'-O-methyl ribonucleotide
  modified_base 48: mod_base = OTHER; note = 2'-O-methyl ribonucleotide
  modified_base 50: mod_base = OTHER; note = 2'-O-methyl ribonucleotide
  modified_base 52: mod_base = OTHER; note = 2'-O-methyl ribonucleotide
  modified_base 53: mod_base = OTHER; note = 2'-O-methyl ribonucleotide
  modified_base 54: mod_base = OTHER; note = 2'-O-methyl ribonucleotide
  modified_base 57: mod_base = OTHER; note = 2'-O-methyl ribonucleotide
  modified_base 61: mod_base = OTHER; note = 2'-O-methyl ribonucleotide
  modified_base 66: mod_base = OTHER; note = 2'-O-methyl ribonucleotide
  modified_base 67: mod_base = OTHER; note = 2'-O-methyl ribonucleotide
  modified_base 70: mod_base = OTHER; note = 2'-O-methyl ribonucleotide
  modified_base 71: mod_base = OTHER; note = 2'-O-methyl ribonucleotide
  modified_base 72: mod_base = OTHER; note = 2'-O-methyl ribonucleotide
  modified_base 74: mod_base = OTHER; note = 2'-O-methyl ribonucleotide
  modified_base 75: mod_base = OTHER; note = 2'-O-methyl ribonucleotide
  modified_base 76: mod_base = OTHER; note = 2'-O-methyl ribonucleotide
  modified_base 77: mod_base = OTHER; note = 2'-O-methyl ribonucleotide
  modified_base 78: mod_base = OTHER; note = 2'-O-methyl ribonucleotide
  modified_base 79: mod_base = OTHER; note = 2'-O-methyl ribonucleotide
  modified_base 80: mod_base = OTHER; note = 2'-O-methyl ribonucleotide
  modified_base 82: mod_base = OTHER; note = 2'-O-methyl ribonucleotide
  modified_base 83: mod_base = OTHER; note = 2'-O-methyl ribonucleotide
  modified_base 84: mod_base = OTHER; note = 2'-O-methyl ribonucleotide
  modified_base 85: mod_base = OTHER; note = 2'-O-methyl ribonucleotide
  modified_base 86: mod_base = OTHER; note = 2'-O-methyl ribonucleotide
  modified_base 87: mod_base = OTHER; note = 2'-O-methyl ribonucleotide
  modified_base 89: mod_base = OTHER; note = 2'-O-methyl ribonucleotide
  modified_base 92: mod_base = OTHER; note = 2'-O-methyl ribonucleotide
  modified_base 93: mod_base = OTHER; note = 2'-O-methyl ribonucleotide
  modified_base 94: mod_base = OTHER; note = 2'-O-methyl ribonucleotide
  modified_base 95: mod_base = OTHER; note = 2'-O-methyl ribonucleotide
  modified_base 96: mod_base = OTHER; note = 2'-O-methyl ribonucleotide
  modified_base 97: mod_base = OTHER; note = 2'-O-methyl ribonucleotide
  modified_base 98: mod_base = OTHER; note = 2'-O-methyl ribonucleotide
  modified_base 99: mod_base = OTHER; note = 2'-O-methyl ribonucleotide
  modified_base 100: mod_base = OTHER; note = 2'-O-methyl ribonucleotide
  modified_base 1..4: mod_base = OTHER; note = phosphorothioate linkage
  modified_base 25..26: mod_base = OTHER; note = phosphorothioate linkage
  modified_base 98..100: mod_base = OTHER; note = phosphorothioate linkage

SEQ ID NO: 2664 - RNA, 103 nt, synthetic construct; identical to SEQ ID NO: 1700
  source 1..103: mol_type = other RNA
  modified_base 1: mod_base = OTHER; note = 2'-O-methyl ribonucleotide
  modified_base 2: mod_base = OTHER; note = 2'-O-methyl ribonucleotide
  modified_base 3: mod_base = OTHER; note = 2'-O-methyl ribonucleotide
  modified_base 21: mod_base = OTHER; note = 2'-O-methyl ribonucleotide
  modified_base 28: mod_base = OTHER; note = 2'-O-methyl ribonucleotide
  modified_base 29: mod_base = OTHER; note = 2'-O-methyl ribonucleotide
  modified_base 30: mod_base = OTHER; note = 2'-O-methyl ribonucleotide
  modified_base 31: mod_base = OTHER; note = 2'-O-methyl ribonucleotide
  modified_base 32: mod_base = OTHER; note = 2'-O-methyl ribonucleotide
  modified_base 33: mod_base = OTHER; note = 2'-O-methyl ribonucleotide
  modified_base 34: mod_base = OTHER; note = 2'-O-methyl ribonucleotide
  modified_base 35: mod_base = OTHER; note = 2'-O-methyl ribonucleotide
  modified_base 36: mod_base = OTHER; note = 2'-O-methyl ribonucleotide
  modified_base 37: mod_base = OTHER; note = 2'-O-methyl ribonucleotide
  modified_base 38: mod_base = OTHER; note = 2'-O-methyl ribonucleotide
  modified_base 39: mod_base = OTHER; note = 2'-O-methyl ribonucleotide
  modified_base 40: mod_base = OTHER; note = 2'-O-methyl ribonucleotide
  modified_base 41: mod_base = OTHER; note = 2'-O-methyl ribonucleotide
  modified_base 42: mod_base = OTHER; note = 2'-O-methyl ribonucleotide
  modified_base 46: mod_base = OTHER; note = 2'-O-methyl ribonucleotide
  modified_base 48: mod_base = OTHER; note = 2'-O-methyl ribonucleotide
  modified_base 50: mod_base = OTHER; note = 2'-O-methyl ribonucleotide
  modified_base 52: mod_base = OTHER; note = 2'-O-methyl ribonucleotide
  modified_base 53: mod_base = OTHER; note = 2'-O-methyl ribonucleotide
  modified_base 54: mod_base = OTHER; note = 2'-O-methyl ribonucleotide
  modified_base 55: mod_base = OTHER; note = 2'-O-methyl ribonucleotide
  modified_base 56: mod_base = OTHER; note = 2'-O-methyl ribonucleotide
  modified_base 57: mod_base = OTHER; note = 2'-O-methyl ribonucleotide
  modified_base 60: mod_base = OTHER; note = 2'-O-methyl ribonucleotide
  modified_base 61: mod_base = OTHER; note = 2'-O-methyl ribonucleotide
  modified_base 66: mod_base = OTHER; note = 2'-O-methyl ribonucleotide
  modified_base 67: mod_base = OTHER; note = 2'-O-methyl ribonucleotide
  modified_base 70: mod_base = OTHER; note = 2'-O-methyl ribonucleotide
  modified_base 71: mod_base = OTHER; note = 2'-O-methyl ribonucleotide
  modified_base 72: mod_base = OTHER; note = 2'-O-methyl ribonucleotide
  modified_base 74: mod_base = OTHER; note = 2'-O-methyl ribonucleotide
  modified_base 75: mod_base = OTHER; note = 2'-O-methyl ribonucleotide
  modified_base 76: mod_base = OTHER; note = 2'-O-methyl ribonucleotide
  modified_base 77: mod_base = OTHER; note = 2'-O-methyl ribonucleotide
  modified_base 78: mod_base = OTHER; note = 2'-O-methyl ribonucleotide
  modified_base 79: mod_base = OTHER; note = 2'-O-methyl ribonucleotide
  modified_base 80: mod_base = OTHER; note = 2'-O-methyl ribonucleotide
  modified_base 82: mod_base = OTHER; note = 2'-O-methyl ribonucleotide
  modified_base 83: mod_base = OTHER; note = 2'-O-methyl ribonucleotide
  modified_base 84: mod_base = OTHER; note = 2'-O-methyl ribonucleotide
  modified_base 85: mod_base = OTHER; note = 2'-O-methyl ribonucleotide
  modified_base 86: mod_base = OTHER; note = 2'-O-methyl ribonucleotide
  modified_base 87: mod_base = OTHER; note = 2'-O-methyl ribonucleotide
  modified_base 89: mod_base = OTHER; note = 2'-O-methyl ribonucleotide
  modified_base 92: mod_base = OTHER; note = 2'-O-methyl ribonucleotide
  modified_base 93: mod_base = OTHER; note = 2'-O-methyl ribonucleotide
  modified_base 94: mod_base = OTHER; note = 2'-O-methyl ribonucleotide
  modified_base 95: mod_base = OTHER; note = 2'-O-methyl ribonucleotide
  modified_base 96: mod_base = OTHER; note = 2'-O-methyl ribonucleotide
  modified_base 97: mod_base = OTHER; note = 2'-O-methyl ribonucleotide
  modified_base 98: mod_base = OTHER; note = 2'-O-methyl ribonucleotide
  modified_base 99: mod_base = OTHER; note = 2'-O-methyl ribonucleotide
  modified_base 100: mod_base = OTHER; note = 2'-O-methyl ribonucleotide
  modified_base 1..4: mod_base = OTHER; note = phosphorothioate linkage
  modified_base 25..26: mod_base = OTHER; note = phosphorothioate linkage
  modified_base 98..100: mod_base = OTHER; note = phosphorothioate linkage

SEQ ID NO: 2665 - RNA, 103 nt, synthetic construct; identical to SEQ ID NO: 1700
  source 1..103: mol_type = other RNA
  modified_base 1: mod_base = OTHER; note = 2'-O-methyl ribonucleotide
  modified_base 2: mod_base = OTHER; note = 2'-O-methyl ribonucleotide
  modified_base 3: mod_base = OTHER; note = 2'-O-methyl ribonucleotide
  modified_base 21: mod_base = OTHER; note = 2'-O-methyl ribonucleotide
  modified_base 28: mod_base = OTHER; note = 2'-O-methyl ribonucleotide
  modified_base 29: mod_base = OTHER; note = 2'-O-methyl ribonucleotide
  modified_base 30: mod_base = OTHER; note = 2'-O-methyl ribonucleotide
  modified_base 31: mod_base = OTHER; note = 2'-O-methyl ribonucleotide
  modified_base 32: mod_base = OTHER; note = 2'-O-methyl ribonucleotide
  modified_base 33: mod_base = OTHER; note = 2'-O-methyl ribonucleotide
  modified_base 34: mod_base = OTHER; note = 2'-O-methyl ribonucleotide
  modified_base 35: mod_base = OTHER; note = 2'-O-methyl ribonucleotide
  modified_base 36: mod_base = OTHER; note = 2'-O-methyl ribonucleotide
  modified_base 37: mod_base = OTHER; note = 2'-O-methyl ribonucleotide
  modified_base 38: mod_base = OTHER; note = 2'-O-methyl ribonucleotide
  modified_base 39: mod_base = OTHER; note = 2'-O-methyl ribonucleotide
  modified_base 40: mod_base = OTHER; note = 2'-O-methyl ribonucleotide
  modified_base 41: mod_base = OTHER; note = 2'-O-methyl ribonucleotide
  modified_base 42: mod_base = OTHER; note = 2'-O-methyl ribonucleotide
  modified_base 46: mod_base = OTHER; note = 2'-O-methyl ribonucleotide
  modified_base 48: mod_base = OTHER; note = 2'-O-methyl ribonucleotide
  modified_base 50: mod_base = OTHER; note = 2'-O-methyl ribonucleotide
  modified_base 52: mod_base = OTHER; note = 2'-O-methyl ribonucleotide
  modified_base 53: mod_base = OTHER; note = 2'-O-methyl ribonucleotide
  modified_base 54: mod_base = OTHER; note = 2'-O-methyl ribonucleotide
  modified_base 57: mod_base = OTHER; note = 2'-O-methyl ribonucleotide
  modified_base 61: mod_base = OTHER; note = 2'-O-methyl ribonucleotide
  modified_base 66: mod_base = OTHER; note = 2'-O-methyl ribonucleotide
  modified_base 67: mod_base = OTHER; note = 2'-O-methyl ribonucleotide
  modified_base 70: mod_base = OTHER; note = 2'-O-methyl ribonucleotide
  modified_base 71: mod_base = OTHER; note = 2'-O-methyl ribonucleotide
  modified_base 72: mod_base = OTHER; note = 2'-O-methyl ribonucleotide
  modified_base 73: mod_base = OTHER; note = 2'-O-methyl ribonucleotide
  modified_base 74: mod_base = OTHER; note = 2'-O-methyl ribonucleotide
  modified_base 75: mod_base = OTHER; note = 2'-O-methyl ribonucleotide
  modified_base 76: mod_base = OTHER; note = 2'-O-methyl ribonucleotide
  modified_base 77: mod_base = OTHER; note = 2'-O-methyl ribonucleotide
  modified_base 78: mod_base = OTHER; note = 2'-O-methyl ribonucleotide
  modified_base 79: mod_base = OTHER; note = 2'-O-methyl ribonucleotide
  modified_base 80: mod_base = OTHER; note = 2'-O-methyl ribonucleotide
  modified_base 82: mod_base = OTHER; note = 2'-O-methyl ribonucleotide
  modified_base 83: mod_base = OTHER; note = 2'-O-methyl ribonucleotide
  modified_base 84: mod_base = OTHER; note = 2'-O-methyl ribonucleotide
  modified_base 85: mod_base = OTHER; note = 2'-O-methyl ribonucleotide
  modified_base 86: mod_base = OTHER; note = 2'-O-methyl ribonucleotide
  modified_base 87: mod_base = OTHER; note = 2'-O-methyl ribonucleotide
  modified_base 89: mod_base = OTHER; note = 2'-O-methyl ribonucleotide
  modified_base 92: mod_base = OTHER; note = 2'-O-methyl ribonucleotide
  modified_base 93: mod_base = OTHER; note = 2'-O-methyl ribonucleotide
  modified_base 94: mod_base = OTHER; note = 2'-O-methyl ribonucleotide
  modified_base 95: mod_base = OTHER; note = 2'-O-methyl ribonucleotide
  modified_base 96: mod_base = OTHER; note = 2'-O-methyl ribonucleotide
  modified_base 97: mod_base = OTHER; note = 2'-O-methyl ribonucleotide
  modified_base 98: mod_base = OTHER; note = 2'-O-methyl ribonucleotide
  modified_base 99: mod_base = OTHER; note = 2'-O-methyl ribonucleotide
  modified_base 100: mod_base = OTHER; note = 2'-O-methyl ribonucleotide
  modified_base 1..4: mod_base = OTHER; note = phosphorothioate linkage
  modified_base 25..26: mod_base = OTHER; note = phosphorothioate linkage
  modified_base 98..100: mod_base = OTHER; note = phosphorothioate linkage

SEQ ID NO: 2666 - RNA, 103 nt, synthetic construct; identical to SEQ ID NO: 1700
  source 1..103: mol_type = other RNA
  modified_base 1: mod_base = OTHER; note = 2'-O-methyl ribonucleotide
  modified_base 2: mod_base = OTHER; note = 2'-O-methyl ribonucleotide
  modified_base 3: mod_base = OTHER; note = 2'-O-methyl ribonucleotide
  modified_base 21: mod_base = OTHER; note = 2'-O-methyl ribonucleotide
  modified_base 28: mod_base = OTHER; note = 2'-O-methyl ribonucleotide
  modified_base 29: mod_base = OTHER; note = 2'-O-methyl ribonucleotide
  modified_base 30: mod_base = OTHER; note = 2'-O-methyl ribonucleotide
  modified_base 31: mod_base = OTHER; note = 2'-O-methyl ribonucleotide
  modified_base 32: mod_base = OTHER; note = 2'-O-methyl ribonucleotide
  modified_base 33: mod_base = OTHER; note = 2'-O-methyl ribonucleotide
  modified_base 34: mod_base = OTHER; note = 2'-O-methyl ribonucleotide
  modified_base 35: mod_base = OTHER; note = 2'-O-methyl ribonucleotide
  modified_base 36: mod_base = OTHER; note = 2'-O-methyl ribonucleotide
  modified_base 37: mod_base = OTHER; note = 2'-O-methyl ribonucleotide
  modified_base 38: mod_base = OTHER; note = 2'-O-methyl ribonucleotide
  modified_base 39: mod_base = OTHER; note = 2'-O-methyl ribonucleotide
  modified_base 40: mod_base = OTHER; note = 2'-O-methyl ribonucleotide
  modified_base 41: mod_base = OTHER; note = 2'-O-methyl ribonucleotide
  modified_base 42: mod_base = OTHER; note = 2'-O-methyl ribonucleotide
  modified_base 46: mod_base = OTHER; note = 2'-O-methyl ribonucleotide
  modified_base 48: mod_base = OTHER; note = 2'-O-methyl ribonucleotide
  modified_base 50: mod_base = OTHER; note = 2'-O-methyl ribonucleotide
  modified_base 52: mod_base = OTHER; note = 2'-O-methyl ribonucleotide
  modified_base 53: mod_base = OTHER; note = 2'-O-methyl ribonucleotide
  modified_base 54: mod_base = OTHER; note = 2'-O-methyl ribonucleotide
  modified_base 57: mod_base = OTHER; note = 2'-O-methyl ribonucleotide
  modified_base 61: mod_base = OTHER; note = 2'-O-methyl ribonucleotide
  modified_base 66: mod_base = OTHER; note = 2'-O-methyl ribonucleotide
  modified_base 67: mod_base = OTHER; note = 2'-O-methyl ribonucleotide
  modified_base 70: mod_base = OTHER; note = 2'-O-methyl ribonucleotide
  modified_base 71: mod_base = OTHER; note = 2'-O-methyl ribonucleotide
  modified_base 72: mod_base = OTHER; note = 2'-O-methyl ribonucleotide
  modified_base 73: mod_base = OTHER; note = 2'-O-methyl ribonucleotide
  modified_base 74: mod_base = OTHER; note = 2'-O-methyl ribonucleotide
  modified_base 75: mod_base = OTHER; note = 2'-O-methyl ribonucleotide
  modified_base 76: mod_base = OTHER; note = 2'-O-methyl ribonucleotide
  modified_base 77: mod_base = OTHER; note = 2'-O-methyl ribonucleotide
  modified_base 78: mod_base = OTHER; note = 2'-O-methyl ribonucleotide
  modified_base 79: mod_base = OTHER; note = 2'-O-methyl ribonucleotide
  modified_base 80: mod_base = OTHER; note = 2'-O-methyl ribonucleotide
  modified_base 82: mod_base = OTHER; note = 2'-O-methyl ribonucleotide
  modified_base 83: mod_base = OTHER; note = 2'-O-methyl ribonucleotide
  modified_base 84: mod_base = OTHER; note = 2'-O-methyl ribonucleotide
  modified_base 85: mod_base = OTHER; note = 2'-O-methyl ribonucleotide
  modified_base 86: mod_base = OTHER; note = 2'-O-methyl ribonucleotide
  modified_base 87: mod_base = OTHER; note = 2'-O-methyl ribonucleotide
  modified_base 89: mod_base = OTHER; note = 2'-O-methyl ribonucleotide
  modified_base 91: mod_base = OTHER; note = 2'-O-methyl ribonucleotide
  modified_base 92: mod_base = OTHER; note = 2'-O-methyl ribonucleotide
  modified_base 93: mod_base = OTHER; note = 2'-O-methyl ribonucleotide
  modified_base 94: mod_base = OTHER; note = 2'-O-methyl ribonucleotide
  modified_base 95: mod_base = OTHER; note = 2'-O-methyl ribonucleotide
  modified_base 96: mod_base = OTHER; note = 2'-O-methyl ribonucleotide
  modified_base 97: mod_base = OTHER; note = 2'-O-methyl ribonucleotide
  modified_base 98: mod_base = OTHER; note = 2'-O-methyl ribonucleotide
  modified_base 99: mod_base = OTHER; note = 2'-O-methyl ribonucleotide
  modified_base 100: mod_base = OTHER; note = 2'-O-methyl ribonucleotide
  modified_base 1..4: mod_base = OTHER; note = phosphorothioate linkage
  modified_base 25..26: mod_base = OTHER; note = phosphorothioate linkage
  modified_base 98..100: mod_base = OTHER; note = phosphorothioate linkage

SEQ ID NO: 2667 - RNA, 103 nt, synthetic construct; identical to SEQ ID NO: 1700
  source 1..103: mol_type = other RNA
  modified_base 1: mod_base = OTHER; note = 2'-O-methyl ribonucleotide
  modified_base 2: mod_base = OTHER; note = 2'-O-methyl ribonucleotide
  modified_base 3: mod_base = OTHER; note = 2'-O-methyl ribonucleotide
  modified_base 21: mod_base = OTHER; note = 2'-O-methyl ribonucleotide
  modified_base 28: mod_base = OTHER; note = 2'-O-methyl ribonucleotide
  modified_base 29: mod_base = OTHER; note = 2'-O-methyl ribonucleotide
  modified_base 30: mod_base = OTHER; note = 2'-O-methyl ribonucleotide
  modified_base 31: mod_base = OTHER; note = 2'-O-methyl ribonucleotide
  modified_base 32: mod_base = OTHER; note = 2'-O-methyl ribonucleotide
  modified_base 34: mod_base = OTHER; note = 2'-O-methyl ribonucleotide
  modified_base 35: mod_base = OTHER; note = 2'-O-methyl ribonucleotide
  modified_base 36: mod_base = OTHER; note = 2'-O-methyl ribonucleotide
  modified_base 37: mod_base = OTHER; note = 2'-O-methyl ribonucleotide
  modified_base 38: mod_base = OTHER; note = 2'-O-methyl ribonucleotide
  modified_base 39: mod_base = OTHER; note = 2'-O-methyl ribonucleotide
  modified_base 40: mod_base = OTHER; note = 2'-O-methyl ribonucleotide
  modified_base 41: mod_base = OTHER; note = 2'-O-methyl ribonucleotide
  modified_base 42: mod_base = OTHER; note = 2'-O-methyl ribonucleotide
  modified_base 46: mod_base = OTHER; note = 2'-O-methyl ribonucleotide
  modified_base 48: mod_base = OTHER; note = 2'-O-methyl ribonucleotide
  modified_base 50: mod_base = OTHER; note = 2'-O-methyl ribonucleotide
  modified_base 52: mod_base = OTHER; note = 2'-O-methyl ribonucleotide
  modified_base 53: mod_base = OTHER; note = 2'-O-methyl ribonucleotide
  modified_base 54: mod_base = OTHER; note = 2'-O-methyl ribonucleotide
  modified_base 57: mod_base = OTHER; note = 2'-O-methyl ribonucleotide
  modified_base 61: mod_base = OTHER; note = 2'-O-methyl ribonucleotide
  modified_base 66: mod_base = OTHER; note = 2'-O-methyl ribonucleotide
  modified_base 67: mod_base = OTHER; note = 2'-O-methyl ribonucleotide
  modified_base 70: mod_base = OTHER; note = 2'-O-methyl ribonucleotide
  modified_base 71: mod_base = OTHER; note = 2'-O-methyl ribonucleotide
  modified_base 72: mod_base = OTHER; note = 2'-O-methyl ribonucleotide
  modified_base 73: mod_base = OTHER; note = 2'-O-methyl ribonucleotide
  modified_base 74: mod_base = OTHER; note = 2'-O-methyl ribonucleotide
  modified_base 75: mod_base = OTHER; note = 2'-O-methyl ribonucleotide
  modified_base 76: mod_base = OTHER; note = 2'-O-methyl ribonucleotide
  modified_base 77: mod_base = OTHER; note = 2'-O-methyl ribonucleotide
  modified_base 78: mod_base = OTHER; note = 2'-O-methyl ribonucleotide
  modified_base 79: mod_base = OTHER; note = 2'-O-methyl ribonucleotide
  modified_base 80: mod_base = OTHER; note = 2'-O-methyl ribonucleotide
  modified_base 82: mod_base = OTHER; note = 2'-O-methyl ribonucleotide
  modified_base 83: mod_base = OTHER; note = 2'-O-methyl ribonucleotide
  modified_base 84: mod_base = OTHER; note = 2'-O-methyl ribonucleotide
  modified_base 85: mod_base = OTHER; note = 2'-O-methyl ribonucleotide
  modified_base 86: mod_base = OTHER; note = 2'-O-methyl ribonucleotide
  modified_base 87: mod_base = OTHER; note = 2'-O-methyl ribonucleotide
  modified_base 89: mod_base = OTHER; note = 2'-O-methyl ribonucleotide
  modified_base 91: mod_base = OTHER; note = 2'-O-methyl ribonucleotide
  modified_base 92: mod_base = OTHER; note = 2'-O-methyl ribonucleotide
  modified_base 93: mod_base = OTHER; note = 2'-O-methyl ribonucleotide
  modified_base 94: mod_base = OTHER; note = 2'-O-methyl ribonucleotide
  modified_base 95: mod_base = OTHER; note = 2'-O-methyl ribonucleotide
  modified_base 96: mod_base = OTHER; note = 2'-O-methyl ribonucleotide
  modified_base 97: mod_base = OTHER; note = 2'-O-methyl ribonucleotide
  modified_base 98: mod_base = OTHER; note = 2'-O-methyl ribonucleotide
  modified_base 99: mod_base = OTHER; note = 2'-O-methyl ribonucleotide
  modified_base 100: mod_base = OTHER; note = 2'-O-methyl ribonucleotide
  modified_base 1..4: mod_base = OTHER; note = phosphorothioate linkage
  modified_base 25..26: mod_base = OTHER; note = phosphorothioate linkage
  modified_base 98..100: mod_base = OTHER; note = phosphorothioate linkage

SEQ ID NO: 2668 - RNA, 103 nt, synthetic construct; identical to SEQ ID NO: 1700
  source 1..103: mol_type = other RNA
  modified_base 1: mod_base = OTHER; note = 2'-O-methyl ribonucleotide
  modified_base 2: mod_base = OTHER; note = 2'-O-methyl ribonucleotide
  modified_base 3: mod_base = OTHER; note = 2'-O-methyl ribonucleotide
  modified_base 21: mod_base = OTHER; note = 2'-O-methyl ribonucleotide
  modified_base 28: mod_base = OTHER; note = 2'-O-methyl ribonucleotide
  modified_base 29: mod_base = OTHER; note = 2'-O-methyl ribonucleotide
  modified_base 30: mod_base = OTHER; note = 2'-O-methyl ribonucleotide
  modified_base 31: mod_base = OTHER; note = 2'-O-methyl ribonucleotide
  modified_base 32: mod_base = OTHER; note = 2'-O-methyl ribonucleotide
  modified_base 34: mod_base = OTHER; note = 2'-O-methyl ribonucleotide
  modified_base 35: mod_base = OTHER; note = 2'-O-methyl ribonucleotide
  modified_base 36: mod_base = OTHER; note = 2'-O-methyl ribonucleotide
  modified_base 37: mod_base = OTHER; note = 2'-O-methyl ribonucleotide
  modified_base 38: mod_base = OTHER; note = 2'-O-methyl ribonucleotide
  modified_base 39: mod_base = OTHER; note = 2'-O-methyl ribonucleotide
  modified_base 40: mod_base = OTHER; note = 2'-O-methyl ribonucleotide
  modified_base 41: mod_base = OTHER; note = 2'-O-methyl ribonucleotide
  modified_base 42: mod_base = OTHER; note = 2'-O-methyl ribonucleotide
  modified_base 46: mod_base = OTHER; note = 2'-O-methyl ribonucleotide
  modified_base 48: mod_base = OTHER; note = 2'-O-methyl ribonucleotide
  modified_base 50: mod_base = OTHER; note = 2'-O-methyl ribonucleotide
  modified_base 52: mod_base = OTHER; note = 2'-O-methyl ribonucleotide
  modified_base 53: mod_base = OTHER; note = 2'-O-methyl ribonucleotide
  modified_base 54: mod_base = OTHER; note = 2'-O-methyl ribonucleotide
  modified_base 55: mod_base = OTHER; note = 2'-O-methyl ribonucleotide
  modified_base 56: mod_base = OTHER; note = 2'-O-methyl ribonucleotide
  modified_base 57: mod_base = OTHER; note = 2'-O-methyl ribonucleotide
  modified_base 60: mod_base = OTHER; note = 2'-O-methyl ribonucleotide
  modified_base 61: mod_base = OTHER; note = 2'-O-methyl ribonucleotide
  modified_base 66: mod_base = OTHER; note = 2'-O-methyl ribonucleotide
  modified_base 67: mod_base = OTHER; note = 2'-O-methyl ribonucleotide
  modified_base 70: mod_base = OTHER; note = 2'-O-methyl ribonucleotide
  modified_base 71: mod_base = OTHER; note = 2'-O-methyl ribonucleotide
  modified_base 72: mod_base = OTHER; note = 2'-O-methyl ribonucleotide
  modified_base 74: mod_base = OTHER; note = 2'-O-methyl ribonucleotide
  modified_base 75: mod_base = OTHER; note = 2'-O-methyl ribonucleotide
  modified_base 76: mod_base = OTHER; note = 2'-O-methyl ribonucleotide
  modified_base 77: mod_base = OTHER; note = 2'-O-methyl ribonucleotide
  modified_base 78: mod_base = OTHER; note = 2'-O-methyl ribonucleotide
  modified_base 79: mod_base = OTHER; note = 2'-O-methyl ribonucleotide
  modified_base 80: mod_base = OTHER; note = 2'-O-methyl ribonucleotide
  modified_base 82: mod_base = OTHER; note = 2'-O-methyl ribonucleotide
  modified_base 83: mod_base = OTHER; note = 2'-O-methyl ribonucleotide
  modified_base 84: mod_base = OTHER; note = 2'-O-methyl ribonucleotide
  modified_base 85: mod_base = OTHER; note = 2'-O-methyl ribonucleotide
  modified_base 86: mod_base = OTHER; note = 2'-O-methyl ribonucleotide
  modified_base 87: mod_base = OTHER; note = 2'-O-methyl ribonucleotide
  modified_base 89: mod_base = OTHER; note = 2'-O-methyl ribonucleotide
  modified_base 92: mod_base = OTHER; note = 2'-O-methyl ribonucleotide
  modified_base 93: mod_base = OTHER; note = 2'-O-methyl ribonucleotide
  modified_base 94: mod_base = OTHER; note = 2'-O-methyl ribonucleotide
  modified_base 95: mod_base = OTHER; note = 2'-O-methyl ribonucleotide
  modified_base 96: mod_base = OTHER; note = 2'-O-methyl ribonucleotide
  modified_base 97: mod_base = OTHER; note = 2'-O-methyl ribonucleotide
  modified_base 98: mod_base = OTHER; note = 2'-O-methyl ribonucleotide
  modified_base 99: mod_base = OTHER; note = 2'-O-methyl ribonucleotide
  modified_base 100: mod_base = OTHER; note = 2'-O-methyl ribonucleotide
  modified_base 1..4: mod_base = OTHER; note = phosphorothioate linkage
  modified_base 25..26: mod_base = OTHER; note = phosphorothioate linkage
  modified_base 98..100: mod_base = OTHER; note = phosphorothioate linkage

SEQ ID NO: 2669 - RNA, 103 nt, synthetic construct; identical to SEQ ID NO: 1699
  source 1..103: mol_type = other RNA
  modified_base 1: mod_base = OTHER; note = 2'-O-methyl ribonucleotide
  modified_base 2: mod_base = OTHER; note = 2'-O-methyl ribonucleotide
  modified_base 3: mod_base = OTHER; note = 2'-O-methyl ribonucleotide
  modified_base 21: mod_base = OTHER; note = 2'-O-methyl ribonucleotide
  modified_base 28: mod_base = OTHER; note = 2'-O-methyl ribonucleotide
  modified_base 29: mod_base = OTHER; note = 2'-O-methyl ribonucleotide
  modified_base 30: mod_base = OTHER; note = 2'-O-methyl ribonucleotide
  modified_base 31: mod_base = OTHER; note = 2'-O-methyl ribonucleotide
  modified_base 32: mod_base = OTHER; note = 2'-O-methyl ribonucleotide
  modified_base 33: mod_base = OTHER; note = 2'-O-methyl ribonucleotide
  modified_base 34: mod_base = OTHER; note = 2'-O-methyl ribonucleotide
  modified_base 35: mod_base = OTHER; note = 2'-O-methyl ribonucleotide
  modified_base 36: mod_base = OTHER; note = 2'-O-methyl ribonucleotide
  modified_base 37: mod_base = OTHER; note = 2'-O-methyl ribonucleotide
  modified_base 38: mod_base = OTHER; note = 2'-O-methyl ribonucleotide
  modified_base 39: mod_base = OTHER; note = 2'-O-methyl ribonucleotide
  modified_base 40: mod_base = OTHER; note = 2'-O-methyl ribonucleotide
  modified_base 41: mod_base = OTHER; note = 2'-O-methyl ribonucleotide
  modified_base 42: mod_base = OTHER; note = 2'-O-methyl ribonucleotide
  modified_base 46: mod_base = OTHER; note = 2'-O-methyl ribonucleotide
  modified_base 48: mod_base = OTHER; note = 2'-O-methyl ribonucleotide
  modified_base 50: mod_base = OTHER; note = 2'-O-methyl ribonucleotide
  modified_base 52: mod_base = OTHER; note = 2'-O-methyl ribonucleotide
  modified_base 53: mod_base = OTHER; note = 2'-O-methyl ribonucleotide
  modified_base 54: mod_base = OTHER; note = 2'-O-methyl ribonucleotide
  modified_base 55: mod_base = OTHER; note = 2'-O-methyl ribonucleotide
  modified_base 56: mod_base = OTHER; note = 2'-O-methyl ribonucleotide
  modified_base 57: mod_base = OTHER; note = 2'-O-methyl ribonucleotide
  modified_base 60: mod_base = OTHER; note = 2'-O-methyl ribonucleotide
  modified_base 61: mod_base = OTHER; note = 2'-O-methyl ribonucleotide
  modified_base 66: mod_base = OTHER; note = 2'-O-methyl ribonucleotide
  modified_base 67: mod_base = OTHER; note = 2'-O-methyl ribonucleotide
  modified_base 70: mod_base = OTHER; note = 2'-O-methyl ribonucleotide
  modified_base 71: mod_base = OTHER; note = 2'-O-methyl ribonucleotide
  modified_base 72: mod_base = OTHER; note = 2'-O-methyl ribonucleotide
  modified_base 73: mod_base = OTHER; note = 2'-O-methyl ribonucleotide
  modified_base 74: mod_base = OTHER; note = 2'-O-methyl ribonucleotide
  modified_base 75: mod_base = OTHER; note = 2'-O-methyl ribonucleotide
  modified_base 76: mod_base = OTHER; note = 2'-O-methyl ribonucleotide
  modified_base 77: mod_base = OTHER; note = 2'-O-methyl ribonucleotide
  modified_base 78: mod_base = OTHER; note = 2'-O-methyl ribonucleotide
  modified_base 79: mod_base = OTHER; note = 2'-O-methyl ribonucleotide
  modified_base 80: mod_base = OTHER; note = 2'-O-methyl ribonucleotide
  modified_base 81: mod_base = OTHER; note = 2'-O-methyl ribonucleotide
  modified_base 83: mod_base = OTHER; note = 2'-O-methyl ribonucleotide
  modified_base 84: mod_base = OTHER; note = 2'-O-methyl ribonucleotide
  modified_base 85: mod_base = OTHER; note = 2'-O-methyl ribonucleotide
  modified_base 86: mod_base = OTHER; note = 2'-O-methyl ribonucleotide
  modified_base 87: mod_base = OTHER; note = 2'-O-methyl ribonucleotide
  modified_base 88: mod_base = OTHER; note = 2'-O-methyl ribonucleotide
  modified_base 89: mod_base = OTHER; note = 2'-O-methyl ribonucleotide
  modified_base 90: mod_base = OTHER; note = 2'-O-methyl ribonucleotide
  modified_base 91: mod_base = OTHER; note = 2'-O-methyl ribonucleotide
  modified_base 92: mod_base = OTHER; note = 2'-O-methyl ribonucleotide
  modified_base 93: mod_base = OTHER; note = 2'-O-methyl ribonucleotide
  modified_base 94: mod_base = OTHER; note = 2'-O-methyl ribonucleotide
  modified_base 95: mod_base = OTHER; note = 2'-O-methyl ribonucleotide
  modified_base 96: mod_base = OTHER; note = 2'-O-methyl ribonucleotide
  modified_base 97: mod_base = OTHER; note = 2'-O-methyl ribonucleotide
  modified_base 98: mod_base = OTHER; note = 2'-O-methyl ribonucleotide
  modified_base 99: mod_base = OTHER; note = 2'-O-methyl ribonucleotide
  modified_base 100: mod_base = OTHER; note = 2'-O-methyl ribonucleotide
  modified_base 1..4: mod_base = OTHER; note = phosphorothioate linkage
  modified_base 45..46: mod_base = OTHER; note = phosphorothioate linkage
  modified_base 64..65: mod_base = OTHER; note = phosphorothioate linkage
  modified_base 98..100: mod_base = OTHER; note = phosphorothioate linkage

SEQ ID NO: 2670 - RNA, 103 nt, synthetic construct; identical to SEQ ID NO: 1699
  source 1..103: mol_type = other RNA
  modified_base 1: mod_base = OTHER; note = 2'-O-methyl ribonucleotide
  modified_base 2: mod_base = OTHER; note = 2'-O-methyl ribonucleotide
  modified_base 3: mod_base = OTHER; note = 2'-O-methyl ribonucleotide
  modified_base 21: mod_base = OTHER; note = 2'-O-methyl ribonucleotide
  modified_base 28: mod_base = OTHER; note = 2'-O-methyl ribonucleotide
  modified_base 29: mod_base = OTHER; note = 2'-O-methyl ribonucleotide
  modified_base 30: mod_base = OTHER; note = 2'-O-methyl ribonucleotide
  modified_base 31: mod_base = OTHER; note = 2'-O-methyl ribonucleotide
  modified_base 32: mod_base = OTHER; note = 2'-O-methyl ribonucleotide
  modified_base 34: mod_base = OTHER; note = 2'-O-methyl ribonucleotide
  modified_base 35: mod_base = OTHER; note = 2'-O-methyl ribonucleotide
  modified_base 36: mod_base = OTHER; note = 2'-O-methyl ribonucleotide
  modified_base 37: mod_base = OTHER; note = 2'-O-methyl ribonucleotide
  modified_base 38: mod_base = OTHER; note = 2'-O-methyl ribonucleotide
  modified_base 39: mod_base = OTHER; note = 2'-O-methyl ribonucleotide
  modified_base 40: mod_base = OTHER; note = 2'-O-methyl ribonucleotide
  modified_base 41: mod_base = OTHER; note = 2'-O-methyl ribonucleotide
  modified_base 42: mod_base = OTHER; note = 2'-O-methyl ribonucleotide
  modified_base 46: mod_base = OTHER; note = 2'-O-methyl ribonucleotide
  modified_base 48: mod_base = OTHER; note = 2'-O-methyl ribonucleotide
  modified_base 50: mod_base = OTHER; note = 2'-O-methyl ribonucleotide
  modified_base 52: mod_base = OTHER; note = 2'-O-methyl ribonucleotide
  modified_base 53: mod_base = OTHER; note = 2'-O-methyl ribonucleotide
  modified_base 54: mod_base = OTHER; note = 2'-O-methyl ribonucleotide
  modified_base 55: mod_base = OTHER; note = 2'-O-methyl ribonucleotide
  modified_base 56: mod_base = OTHER; note = 2'-O-methyl ribonucleotide
  modified_base 57: mod_base = OTHER; note = 2'-O-methyl ribonucleotide
  modified_base 60: mod_base = OTHER; note = 2'-O-methyl ribonucleotide
  modified_base 61: mod_base = OTHER; note = 2'-O-methyl ribonucleotide
  modified_base 66: mod_base = OTHER; note = 2'-O-methyl ribonucleotide
  modified_base 67: mod_base = OTHER; note = 2'-O-methyl ribonucleotide
  modified_base 70: mod_base = OTHER; note = 2'-O-methyl ribonucleotide
  modified_base 71: mod_base = OTHER; note = 2'-O-methyl ribonucleotide
  modified_base 72: mod_base = OTHER; note = 2'-O-methyl ribonucleotide
  modified_base 74: mod_base = OTHER; note = 2'-O-methyl ribonucleotide
  modified_base 75: mod_base = OTHER; note = 2'-O-methyl ribonucleotide
  modified_base 76: mod_base = OTHER; note = 2'-O-methyl ribonucleotide
  modified_base 77: mod_base = OTHER; note = 2'-O-methyl ribonucleotide
  modified_base 78: mod_base = OTHER; note = 2'-O-methyl ribonucleotide
  modified_base 79: mod_base = OTHER; note = 2'-O-methyl ribonucleotide
  modified_base 80: mod_base = OTHER; note = 2'-O-methyl ribonucleotide
  modified_base 81: mod_base = OTHER; note = 2'-O-methyl ribonucleotide
  modified_base 83: mod_base = OTHER; note = 2'-O-methyl ribonucleotide
  modified_base 84: mod_base = OTHER; note = 2'-O-methyl ribonucleotide
  modified_base 85: mod_base = OTHER; note = 2'-O-methyl ribonucleotide
  modified_base 86: mod_base = OTHER; note = 2'-O-methyl ribonucleotide
  modified_base 87: mod_base = OTHER; note = 2'-O-methyl ribonucleotide
  modified_base 88: mod_base = OTHER; note = 2'-O-methyl ribonucleotide
  modified_base 89: mod_base = OTHER; note = 2'-O-methyl ribonucleotide
  modified_base 90: mod_base = OTHER; note = 2'-O-methyl ribonucleotide
  modified_base 91: mod_base = OTHER; note = 2'-O-methyl ribonucleotide
  modified_base 92: mod_base = OTHER; note = 2'-O-methyl ribonucleotide
  modified_base 93: mod_base = OTHER; note = 2'-O-methyl ribonucleotide
  modified_base 94: mod_base = OTHER; note = 2'-O-methyl ribonucleotide
  modified_base 95: mod_base = OTHER; note = 2'-O-methyl ribonucleotide
  modified_base 96: mod_base = OTHER; note = 2'-O-methyl ribonucleotide
  modified_base 97: mod_base = OTHER; note = 2'-O-methyl ribonucleotide
  modified_base 98: mod_base = OTHER; note = 2'-O-methyl ribonucleotide
  modified_base 99: mod_base = OTHER; note = 2'-O-methyl ribonucleotide
  modified_base 100: mod_base = OTHER; note = 2'-O-methyl ribonucleotide
  modified_base 1..4: mod_base = OTHER; note = phosphorothioate linkage
  modified_base 45..46: mod_base = OTHER; note = phosphorothioate linkage
  modified_base 64..65: mod_base = OTHER; note = phosphorothioate linkage
  modified_base 98..100: mod_base = OTHER; note = phosphorothioate linkage

SEQ ID NO: 2671 - RNA, 103 nt, synthetic construct; identical to SEQ ID NO: 1700
  source 1..103: mol_type = other RNA
  modified_base 1: mod_base = OTHER; note = 2'-O-methyl ribonucleotide
  modified_base 2: mod_base = OTHER; note = 2'-O-methyl ribonucleotide
  modified_base 3: mod_base = OTHER; note = 2'-O-methyl ribonucleotide
  modified_base 21: mod_base = OTHER; note = 2'-O-methyl ribonucleotide
  modified_base 28: mod_base = OTHER; note = 2'-O-methyl ribonucleotide
  modified_base 29: mod_base = OTHER; note = 2'-O-methyl ribonucleotide
  modified_base 30: mod_base = OTHER; note = 2'-O-methyl ribonucleotide
  modified_base 31: mod_base = OTHER; note = 2'-O-methyl ribonucleotide
  modified_base 32: mod_base = OTHER; note = 2'-O-methyl ribonucleotide
  modified_base 33: mod_base = OTHER; note = 2'-O-methyl ribonucleotide
  modified_base 34: mod_base = OTHER; note = 2'-O-methyl ribonucleotide
  modified_base 35: mod_base = OTHER; note = 2'-O-methyl ribonucleotide
  modified_base 36: mod_base = OTHER; note = 2'-O-methyl ribonucleotide
  modified_base 37: mod_base = OTHER; note = 2'-O-methyl ribonucleotide
  modified_base 38: mod_base = OTHER; note = 2'-O-methyl ribonucleotide
  modified_base 39: mod_base = OTHER; note = 2'-O-methyl ribonucleotide
  modified_base 40: mod_base = OTHER; note = 2'-O-methyl ribonucleotide
  modified_base 41: mod_base = OTHER; note = 2'-O-methyl ribonucleotide
  modified_base 42: mod_base = OTHER; note = 2'-O-methyl ribonucleotide
  modified_base 46: mod_base = OTHER; note = 2'-O-methyl ribonucleotide
  modified_base 48: mod_base = OTHER; note = 2'-O-methyl ribonucleotide
  modified_base 50: mod_base = OTHER; note = 2'-O-methyl ribonucleotide
  modified_base 52: mod_base = OTHER; note = 2'-O-methyl ribonucleotide
  modified_base 53: mod_base = OTHER; note = 2'-O-methyl ribonucleotide
  modified_base 54: mod_base = OTHER; note = 2'-O-methyl ribonucleotide
  modified_base 57: mod_base = OTHER; note = 2'-O-methyl ribonucleotide
  modified_base 61: mod_base = OTHER; note = 2'-O-methyl ribonucleotide
  modified_base 66: mod_base = OTHER; note = 2'-O-methyl ribonucleotide
  modified_base 67: mod_base = OTHER; note = 2'-O-methyl ribonucleotide
  modified_base 70: mod_base = OTHER; note = 2'-O-methyl ribonucleotide
  modified_base 71: mod_base = OTHER; note = 2'-O-methyl ribonucleotide
  modified_base 72: mod_base = OTHER; note = 2'-O-methyl ribonucleotide
  modified_base 74: mod_base = OTHER; note = 2'-O-methyl ribonucleotide
  modified_base 75: mod_base = OTHER; note = 2'-O-methyl ribonucleotide
  modified_base 76: mod_base = OTHER; note = 2'-O-methyl ribonucleotide
  modified_base 77: mod_base = OTHER; note = 2'-O-methyl ribonucleotide
  modified_base 78: mod_base = OTHER; note = 2'-O-methyl ribonucleotide
  modified_base 79: mod_base = OTHER; note = 2'-O-methyl ribonucleotide
  modified_base 80: mod_base = OTHER; note = 2'-O-methyl ribonucleotide
  modified_base 82: mod_base = OTHER; note = 2'-O-methyl ribonucleotide
  modified_base 83: mod_base = OTHER; note = 2'-O-methyl ribonucleotide
  modified_base 84: mod_base = OTHER; note = 2'-O-methyl ribonucleotide
  modified_base 85: mod_base = OTHER; note = 2'-O-methyl ribonucleotide
  modified_base 86: mod_base = OTHER; note = 2'-O-methyl ribonucleotide
  modified_base 87: mod_base = OTHER; note = 2'-O-methyl ribonucleotide
  modified_base 89: mod_base = OTHER; note = 2'-O-methyl ribonucleotide
  modified_base 92: mod_base = OTHER; note = 2'-O-methyl ribonucleotide
  modified_base 93: mod_base = OTHER; note = 2'-O-methyl ribonucleotide
  modified_base 94: mod_base = OTHER; note = 2'-O-methyl ribonucleotide
  modified_base 95: mod_base = OTHER; note = 2'-O-methyl ribonucleotide
  modified_base 96: mod_base = OTHER; note = 2'-O-methyl ribonucleotide
  modified_base 97: mod_base = OTHER; note = 2'-O-methyl ribonucleotide
  modified_base 98: mod_base = OTHER; note = 2'-O-methyl ribonucleotide
  modified_base 99: mod_base = OTHER; note = 2'-O-methyl ribonucleotide
  modified_base 100: mod_base = OTHER; note = 2'-O-methyl ribonucleotide
  modified_base 1..4: mod_base = OTHER; note = phosphorothioate linkage
  modified_base 45..46: mod_base = OTHER; note = phosphorothioate linkage
  modified_base 64..65: mod_base = OTHER; note = phosphorothioate linkage
  modified_base 98..100: mod_base = OTHER; note = phosphorothioate linkage

SEQ ID NO: 2672 - RNA, 103 nt, synthetic construct; identical to SEQ ID NO: 1700
  source 1..103: mol_type = other RNA
  modified_base 1: mod_base = OTHER; note = 2'-O-methyl ribonucleotide
  modified_base 2: mod_base = OTHER; note = 2'-O-methyl ribonucleotide
  modified_base 3: mod_base = OTHER; note = 2'-O-methyl ribonucleotide
  modified_base 21: mod_base = OTHER; note = 2'-O-methyl ribonucleotide
  modified_base 28: mod_base = OTHER; note = 2'-O-methyl ribonucleotide
  modified_base 29: mod_base = OTHER; note = 2'-O-methyl ribonucleotide
  modified_base 30: mod_base = OTHER; note = 2'-O-methyl ribonucleotide
  modified_base 31: mod_base = OTHER; note = 2'-O-methyl ribonucleotide
  modified_base 32: mod_base = OTHER; note = 2'-O-methyl ribonucleotide
  modified_base 33: mod_base = OTHER; note = 2'-O-methyl ribonucleotide
  modified_base 34: mod_base = OTHER; note = 2'-O-methyl ribonucleotide
  modified_base 35: mod_base = OTHER; note = 2'-O-methyl ribonucleotide
  modified_base 36: mod_base = OTHER; note = 2'-O-methyl ribonucleotide
  modified_base 37: mod_base = OTHER; note = 2'-O-methyl ribonucleotide
  modified_base 38: mod_base = OTHER; note = 2'-O-methyl ribonucleotide
  modified_base 39: mod_base = OTHER; note = 2'-O-methyl ribonucleotide
  modified_base 40: mod_base = OTHER; note = 2'-O-methyl ribonucleotide
  modified_base 41: mod_base = OTHER; note = 2'-O-methyl ribonucleotide
  modified_base 42: mod_base = OTHER; note = 2'-O-methyl ribonucleotide
  modified_base 46: mod_base = OTHER; note = 2'-O-methyl ribonucleotide
  modified_base 48: mod_base = OTHER; note = 2'-O-methyl ribonucleotide
  modified_base 50: mod_base = OTHER; note = 2'-O-methyl ribonucleotide
  modified_base 52: mod_base = OTHER; note = 2'-O-methyl ribonucleotide
  modified_base 53: mod_base = OTHER; note = 2'-O-methyl ribonucleotide
  modified_base 54: mod_base = OTHER; note = 2'-O-methyl ribonucleotide
  modified_base 55: mod_base = OTHER; note = 2'-O-methyl ribonucleotide
  modified_base 56: mod_base = OTHER; note = 2'-O-methyl ribonucleotide
  modified_base 57: mod_base = OTHER; note = 2'-O-methyl ribonucleotide
  modified_base 60: mod_base = OTHER; note = 2'-O-methyl ribonucleotide
  modified_base 61: mod_base = OTHER; note = 2'-O-methyl ribonucleotide
  modified_base 66: mod_base = OTHER; note = 2'-O-methyl ribonucleotide
  modified_base 67: mod_base = OTHER; note = 2'-O-methyl ribonucleotide
  modified_base 70: mod_base = OTHER; note = 2'-O-methyl ribonucleotide
  modified_base 71: mod_base = OTHER; note = 2'-O-methyl ribonucleotide
  modified_base 72: mod_base = OTHER; note = 2'-O-methyl ribonucleotide
  modified_base 74: mod_base = OTHER; note = 2'-O-methyl ribonucleotide
  modified_base 75: mod_base = OTHER; note = 2'-O-methyl ribonucleotide
  modified_base 76: mod_base = OTHER; note = 2'-O-methyl ribonucleotide
  modified_base 77: mod_base = OTHER; note = 2'-O-methyl ribonucleotide
  modified_base 78: mod_base = OTHER; note = 2'-O-methyl ribonucleotide
  modified_base 79: mod_base = OTHER; note = 2'-O-methyl ribonucleotide
  modified_base 80: mod_base = OTHER; note = 2'-O-methyl ribonucleotide
  modified_base 82: mod_base = OTHER; note = 2'-O-methyl ribonucleotide
  modified_base 83: mod_base = OTHER; note = 2'-O-methyl ribonucleotide
  modified_base 84: mod_base = OTHER; note = 2'-O-methyl ribonucleotide
  modified_base 85: mod_base = OTHER; note = 2'-O-methyl ribonucleotide
  modified_base 86: mod_base = OTHER; note = 2'-O-methyl ribonucleotide
  modified_base 87: mod_base = OTHER; note = 2'-O-methyl ribonucleotide
  modified_base 89: mod_base = OTHER; note = 2'-O-methyl ribonucleotide
  modified_base 92: mod_base = OTHER; note = 2'-O-methyl ribonucleotide
  modified_base 93: mod_base = OTHER; note = 2'-O-methyl ribonucleotide
  modified_base 94: mod_base = OTHER; note = 2'-O-methyl ribonucleotide
  modified_base 95: mod_base = OTHER; note = 2'-O-methyl ribonucleotide
  modified_base 96: mod_base = OTHER; note = 2'-O-methyl ribonucleotide
  modified_base 97: mod_base = OTHER; note = 2'-O-methyl ribonucleotide
  modified_base 98: mod_base = OTHER; note = 2'-O-methyl ribonucleotide
  modified_base 99: mod_base = OTHER; note = 2'-O-methyl ribonucleotide
  modified_base 100: mod_base = OTHER; note = 2'-O-methyl ribonucleotide
  modified_base 1..4: mod_base = OTHER; note = phosphorothioate linkage
  modified_base 45..46: mod_base = OTHER; note = phosphorothioate linkage
  modified_base 64..65: mod_base = OTHER; note = phosphorothioate linkage
  modified_base 98..100: mod_base = OTHER; note = phosphorothioate linkage

SEQ ID NO: 2673 - RNA, 103 nt, synthetic construct; identical to SEQ ID NO: 1700
  source 1..103: mol_type = other RNA
  modified_base 1: mod_base = OTHER; note = 2'-O-methyl ribonucleotide
  modified_base 2: mod_base = OTHER; note = 2'-O-methyl ribonucleotide
  modified_base 3: mod_base = OTHER; note = 2'-O-methyl ribonucleotide
  modified_base 21: mod_base = OTHER; note = 2'-O-methyl ribonucleotide
  modified_base 28: mod_base = OTHER; note = 2'-O-methyl ribonucleotide
  modified_base 29: mod_base = OTHER; note = 2'-O-methyl ribonucleotide
  modified_base 30: mod_base = OTHER; note = 2'-O-methyl ribonucleotide
  modified_base 31: mod_base = OTHER; note = 2'-O-methyl ribonucleotide
  modified_base 32: mod_base = OTHER; note = 2'-O-methyl ribonucleotide
  modified_base 33: mod_base = OTHER; note = 2'-O-methyl ribonucleotide
  modified_base 34: mod_base = OTHER; note = 2'-O-methyl ribonucleotide
  modified_base 35: mod_base = OTHER; note = 2'-O-methyl ribonucleotide
  modified_base 36: mod_base = OTHER; note = 2'-O-methyl ribonucleotide
  modified_base 37: mod_base = OTHER; note = 2'-O-methyl ribonucleotide
  modified_base 38: mod_base = OTHER; note = 2'-O-methyl ribonucleotide
  modified_base 39: mod_base = OTHER; note = 2'-O-methyl ribonucleotide
  modified_base 40: mod_base = OTHER; note = 2'-O-methyl ribonucleotide
  modified_base 41: mod_base = OTHER; note = 2'-O-methyl ribonucleotide
  modified_base 42: mod_base = OTHER; note = 2'-O-methyl ribonucleotide
  modified_base 46: mod_base = OTHER; note = 2'-O-methyl ribonucleotide
  modified_base 48: mod_base = OTHER; note = 2'-O-methyl ribonucleotide
  modified_base 50: mod_base = OTHER; note = 2'-O-methyl ribonucleotide
  modified_base 52: mod_base = OTHER; note = 2'-O-methyl ribonucleotide
  modified_base 53: mod_base = OTHER; note = 2'-O-methyl ribonucleotide
  modified_base 54: mod_base = OTHER; note = 2'-O-methyl ribonucleotide
  modified_base 57: mod_base = OTHER; note = 2'-O-methyl ribonucleotide
  modified_base 61: mod_base = OTHER; note = 2'-O-methyl ribonucleotide
  modified_base 66: mod_base = OTHER; note = 2'-O-methyl ribonucleotide
  modified_base 67: mod_base = OTHER; note = 2'-O-methyl ribonucleotide
  modified_base 70: mod_base = OTHER; note = 2'-O-methyl ribonucleotide
  modified_base 71: mod_base = OTHER; note = 2'-O-methyl ribonucleotide
  modified_base 72: mod_base = OTHER; note = 2'-O-methyl ribonucleotide
  modified_base 73: mod_base = OTHER; note = 2'-O-methyl ribonucleotide
  modified_base 74: mod_base = OTHER; note = 2'-O-methyl ribonucleotide
  modified_base 75: mod_base = OTHER; note = 2'-O-methyl ribonucleotide
  modified_base 76: mod_base = OTHER; note = 2'-O-methyl ribonucleotide
  modified_base 77: mod_base = OTHER; note = 2'-O-methyl ribonucleotide
  modified_base 78: mod_base = OTHER; note = 2'-O-methyl ribonucleotide
  modified_base 79: mod_base = OTHER; note = 2'-O-methyl ribonucleotide
  modified_base 80: mod_base = OTHER; note = 2'-O-methyl ribonucleotide
  modified_base 82: mod_base = OTHER; note = 2'-O-methyl ribonucleotide
  modified_base 83: mod_base = OTHER; note = 2'-O-methyl ribonucleotide
  modified_base 84: mod_base = OTHER; note = 2'-O-methyl ribonucleotide
  modified_base 85: mod_base = OTHER; note = 2'-O-methyl ribonucleotide
  modified_base 86: mod_base = OTHER; note = 2'-O-methyl ribonucleotide
  modified_base 87: mod_base = OTHER; note = 2'-O-methyl ribonucleotide
  modified_base 89: mod_base = OTHER; note = 2'-O-methyl ribonucleotide
  modified_base 92: mod_base = OTHER; note = 2'-O-methyl ribonucleotide
  modified_base 93: mod_base = OTHER; note = 2'-O-methyl ribonucleotide
  modified_base 94: mod_base = OTHER; note = 2'-O-methyl ribonucleotide
  modified_base 95: mod_base = OTHER; note = 2'-O-methyl ribonucleotide
  modified_base 96: mod_base = OTHER; note = 2'-O-methyl ribonucleotide
  modified_base 97: mod_base = OTHER; note = 2'-O-methyl ribonucleotide
  modified_base 98: mod_base = OTHER; note = 2'-O-methyl ribonucleotide
  modified_base 99: mod_base = OTHER; note = 2'-O-methyl ribonucleotide
  modified_base 100: mod_base = OTHER; note = 2'-O-methyl ribonucleotide
  modified_base 1..4: mod_base = OTHER; note = phosphorothioate linkage
  modified_base 45..46: mod_base = OTHER; note = phosphorothioate linkage
  modified_base 64..65: mod_base = OTHER; note = phosphorothioate linkage
  modified_base 98..100: mod_base = OTHER; note = phosphorothioate linkage

SEQ ID NO: 2674 - RNA, 103 nt, synthetic construct; identical to SEQ ID NO: 1700
  source 1..103: mol_type = other RNA
  modified_base 1: mod_base = OTHER; note = 2'-O-methyl ribonucleotide
  modified_base 2: mod_base = OTHER; note = 2'-O-methyl ribonucleotide
  modified_base 3: mod_base = OTHER; note = 2'-O-methyl ribonucleotide
  modified_base 21: mod_base = OTHER; note = 2'-O-methyl ribonucleotide
  modified_base 28: mod_base = OTHER; note = 2'-O-methyl ribonucleotide
  modified_base 29: mod_base = OTHER; note = 2'-O-methyl ribonucleotide
  modified_base 30: mod_base = OTHER; note = 2'-O-methyl ribonucleotide
  modified_base 31: mod_base = OTHER; note = 2'-O-methyl ribonucleotide
  modified_base 32: mod_base = OTHER; note = 2'-O-methyl ribonucleotide
  modified_base 34: mod_base = OTHER; note = 2'-O-methyl ribonucleotide
  modified_base 35: mod_base = OTHER; note = 2'-O-methyl ribonucleotide
  modified_base 36: mod_base = OTHER; note = 2'-O-methyl ribonucleotide
  modified_base 37: mod_base = OTHER; note = 2'-O-methyl ribonucleotide
  modified_base 38: mod_base = OTHER; note = 2'-O-methyl ribonucleotide
  modified_base 39: mod_base = OTHER; note = 2'-O-methyl ribonucleotide
  modified_base 40: mod_base = OTHER; note = 2'-O-methyl ribonucleotide
  modified_base 41: mod_base = OTHER; note = 2'-O-methyl ribonucleotide
  modified_base 42: mod_base = OTHER; note = 2'-O-methyl ribonucleotide
  modified_base 46: mod_base = OTHER; note = 2'-O-methyl ribonucleotide
  modified_base 48: mod_base = OTHER; note = 2'-O-methyl ribonucleotide
  modified_base 50: mod_base = OTHER; note = 2'-O-methyl ribonucleotide
  modified_base 52: mod_base = OTHER; note = 2'-O-methyl ribonucleotide
  modified_base 53: mod_base = OTHER; note = 2'-O-methyl ribonucleotide
  modified_base 54: mod_base = OTHER; note = 2'-O-methyl ribonucleotide
  modified_base 57: mod_base = OTHER; note = 2'-O-methyl ribonucleotide
  modified_base 61: mod_base = OTHER; note = 2'-O-methyl ribonucleotide
  modified_base 66: mod_base = OTHER; note = 2'-O-methyl ribonucleotide
  modified_base 67: mod_base = OTHER; note = 2'-O-methyl ribonucleotide
  modified_base 70: mod_base = OTHER; note = 2'-O-methyl ribonucleotide
  modified_base 71: mod_base = OTHER; note = 2'-O-methyl ribonucleotide
  modified_base 72: mod_base = OTHER; note = 2'-O-methyl ribonucleotide
  modified_base 73: mod_base = OTHER; note = 2'-O-methyl ribonucleotide
  modified_base 74: mod_base = OTHER; note = 2'-O-methyl ribonucleotide
  modified_base 75: mod_base = OTHER; note = 2'-O-methyl ribonucleotide
  modified_base 76: mod_base = OTHER; note = 2'-O-methyl ribonucleotide
  modified_base 77: mod_base = OTHER; note = 2'-O-methyl ribonucleotide
  modified_base 78: mod_base = OTHER; note = 2'-O-methyl ribonucleotide
  modified_base 79: mod_base = OTHER; note = 2'-O-methyl ribonucleotide
  modified_base 80: mod_base = OTHER; note = 2'-O-methyl ribonucleotide
  modified_base 82: mod_base = OTHER; note = 2'-O-methyl ribonucleotide
  modified_base 83: mod_base = OTHER; note = 2'-O-methyl ribonucleotide
  modified_base 84: mod_base = OTHER; note = 2'-O-methyl ribonucleotide
  modified_base 85: mod_base = OTHER; note = 2'-O-methyl ribonucleotide
  modified_base 86: mod_base = OTHER; note = 2'-O-methyl ribonucleotide
  modified_base 87: mod_base = OTHER; note = 2'-O-methyl ribonucleotide
  modified_base 89: mod_base = OTHER; note = 2'-O-methyl ribonucleotide
  modified_base 91: mod_base = OTHER; note = 2'-O-methyl ribonucleotide
  modified_base 92: mod_base = OTHER; note = 2'-O-methyl ribonucleotide
  modified_base 93: mod_base = OTHER; note = 2'-O-methyl ribonucleotide
  modified_base 94: mod_base = OTHER; note = 2'-O-methyl ribonucleotide
  modified_base 95: mod_base = OTHER; note = 2'-O-methyl ribonucleotide
  modified_base 96: mod_base = OTHER; note = 2'-O-methyl ribonucleotide
  modified_base 97: mod_base = OTHER; note = 2'-O-methyl ribonucleotide
  modified_base 98: mod_base = OTHER; note = 2'-O-methyl ribonucleotide
  modified_base 99: mod_base = OTHER; note = 2'-O-methyl ribonucleotide
  modified_base 100: mod_base = OTHER; note = 2'-O-methyl ribonucleotide
  modified_base 1..4: mod_base = OTHER; note = phosphorothioate linkage
  modified_base 45..46: mod_base = OTHER; note = phosphorothioate linkage
  modified_base 64..65: mod_base = OTHER; note = phosphorothioate linkage
  modified_base 98..100: mod_base = OTHER; note = phosphorothioate linkage

SEQ ID NO: 2675 - RNA, 103 nt, synthetic construct; identical to SEQ ID NO: 1700
  source 1..103: mol_type = other RNA
  modified_base 1: mod_base = OTHER; note = 2'-O-methyl ribonucleotide
  modified_base 2: mod_base = OTHER; note = 2'-O-methyl ribonucleotide
  modified_base 3: mod_base = OTHER; note = 2'-O-methyl ribonucleotide
  modified_base 21: mod_base = OTHER; note = 2'-O-methyl ribonucleotide
  modified_base 28: mod_base = OTHER; note = 2'-O-methyl ribonucleotide
  modified_base 29: mod_base = OTHER; note = 2'-O-methyl ribonucleotide
  modified_base 30: mod_base = OTHER; note = 2'-O-methyl ribonucleotide
  modified_base 31: mod_base = OTHER; note = 2'-O-methyl ribonucleotide
  modified_base 32: mod_base = OTHER; note = 2'-O-methyl ribonucleotide
  modified_base 34: mod_base = OTHER; note = 2'-O-methyl ribonucleotide
  modified_base 35: mod_base = OTHER; note = 2'-O-methyl ribonucleotide
  modified_base 36: mod_base = OTHER; note = 2'-O-methyl ribonucleotide
  modified_base 37: mod_base = OTHER; note = 2'-O-methyl ribonucleotide
  modified_base 38: mod_base = OTHER; note = 2'-O-methyl ribonucleotide
  modified_base 39: mod_base = OTHER; note = 2'-O-methyl ribonucleotide
  modified_base 40: mod_base = OTHER; note = 2'-O-methyl ribonucleotide
  modified_base 41: mod_base = OTHER; note = 2'-O-methyl ribonucleotide
  modified_base 42: mod_base = OTHER; note = 2'-O-methyl ribonucleotide
  modified_base 46: mod_base = OTHER; note = 2'-O-methyl ribonucleotide
  modified_base 48: mod_base = OTHER; note = 2'-O-methyl ribonucleotide
  modified_base 50: mod_base = OTHER; note = 2'-O-methyl ribonucleotide
  modified_base 52: mod_base = OTHER; note = 2'-O-methyl ribonucleotide
  modified_base 53: mod_base = OTHER; note = 2'-O-methyl ribonucleotide
  modified_base 54: mod_base = OTHER; note = 2'-O-methyl ribonucleotide
  modified_base 55: mod_base = OTHER; note = 2'-O-methyl ribonucleotide
  modified_base 56: mod_base = OTHER; note = 2'-O-methyl ribonucleotide
  modified_base 57: mod_base = OTHER; note = 2'-O-methyl ribonucleotide
  modified_base 60: mod_base = OTHER; note = 2'-O-methyl ribonucleotide
  modified_base 61: mod_base = OTHER; note = 2'-O-methyl ribonucleotide
  modified_base 66: mod_base = OTHER; note = 2'-O-methyl ribonucleotide
  modified_base 67: mod_base = OTHER; note = 2'-O-methyl ribonucleotide
  modified_base 70: mod_base = OTHER; note = 2'-O-methyl ribonucleotide
  modified_base 71: mod_base = OTHER; note = 2'-O-methyl ribonucleotide
  modified_base 72: mod_base = OTHER; note = 2'-O-methyl ribonucleotide
  modified_base 74: mod_base = OTHER; note = 2'-O-methyl ribonucleotide
  modified_base 75: mod_base = OTHER; note = 2'-O-methyl ribonucleotide
  modified_base 76: mod_base = OTHER; note = 2'-O-methyl ribonucleotide
  modified_base 77: mod_base = OTHER; note = 2'-O-methyl ribonucleotide
  modified_base 78: mod_base = OTHER; note = 2'-O-methyl ribonucleotide
  modified_base 79: mod_base = OTHER; note = 2'-O-methyl ribonucleotide
  modified_base 80: mod_base = OTHER; note = 2'-O-methyl ribonucleotide
  modified_base 82: mod_base = OTHER; note = 2'-O-methyl ribonucleotide
  modified_base 83: mod_base = OTHER; note = 2'-O-methyl ribonucleotide
  modified_base 84: mod_base = OTHER; note = 2'-O-methyl ribonucleotide
  modified_base 85: mod_base = OTHER; note = 2'-O-methyl ribonucleotide
  modified_base 86: mod_base = OTHER; note = 2'-O-methyl ribonucleotide
  modified_base 87: mod_base = OTHER; note = 2'-O-methyl ribonucleotide
  modified_base 89: mod_base = OTHER; note = 2'-O-methyl ribonucleotide
  modified_base 92: mod_base = OTHER; note = 2'-O-methyl ribonucleotide
  modified_base 93: mod_base = OTHER; note = 2'-O-methyl ribonucleotide
  modified_base 94: mod_base = OTHER; note = 2'-O-methyl ribonucleotide
  modified_base 95: mod_base = OTHER; note = 2'-O-methyl ribonucleotide
  modified_base 96: mod_base = OTHER; note = 2'-O-methyl ribonucleotide
  modified_base 97: mod_base = OTHER; note = 2'-O-methyl ribonucleotide
  modified_base 98: mod_base = OTHER; note = 2'-O-methyl ribonucleotide
  modified_base 99: mod_base = OTHER; note = 2'-O-methyl ribonucleotide
  modified_base 100: mod_base = OTHER; note = 2'-O-methyl ribonucleotide
  modified_base 1..4: mod_base = OTHER; note = phosphorothioate linkage
  modified_base 45..46: mod_base = OTHER; note = phosphorothioate linkage
  modified_base 64..65: mod_base = OTHER; note = phosphorothioate linkage
  modified_base 98..100: mod_base = OTHER; note = phosphorothioate linkage

SEQ ID NO: 2676 - RNA, 103 nt, synthetic construct; identical to SEQ ID NO: 1700
  source 1..103: mol_type = other RNA
  modified_base 1: mod_base = OTHER; note = 2'-O-methyl ribonucleotide
  modified_base 2: mod_base = OTHER; note = 2'-O-methyl ribonucleotide
  modified_base 3: mod_base = OTHER; note = 2'-O-methyl ribonucleotide
  modified_base 21: mod_base = OTHER; note = 2'-O-methyl ribonucleotide
  modified_base 28: mod_base = OTHER; note = 2'-O-methyl ribonucleotide
  modified_base 29: mod_base = OTHER; note = 2'-O-methyl ribonucleotide
  modified_base 30: mod_base = OTHER; note = 2'-O-methyl ribonucleotide
  modified_base 31: mod_base = OTHER; note = 2'-O-methyl ribonucleotide
  modified_base 32: mod_base = OTHER; note = 2'-O-methyl ribonucleotide
  modified_base 34: mod_base = OTHER; note = 2'-O-methyl ribonucleotide
  modified_base 35: mod_base = OTHER; note = 2'-O-methyl ribonucleotide
  modified_base 36: mod_base = OTHER; note = 2'-O-methyl ribonucleotide
  modified_base 37: mod_base = OTHER; note = 2'-O-methyl ribonucleotide
  modified_base 38: mod_base = OTHER; note = 2'-O-methyl ribonucleotide
  modified_base 39: mod_base = OTHER; note = 2'-O-methyl ribonucleotide
  modified_base 40: mod_base = OTHER; note = 2'-O-methyl ribonucleotide
  modified_base 41: mod_base = OTHER; note = 2'-O-methyl ribonucleotide
  modified_base 42: mod_base = OTHER; note = 2'-O-methyl ribonucleotide
  modified_base 46: mod_base = OTHER; note = 2'-O-methyl ribonucleotide
  modified_base 48: mod_base = OTHER; note = 2'-O-methyl ribonucleotide
  modified_base 50: mod_base = OTHER; note = 2'-O-methyl ribonucleotide
  modified_base 52: mod_base = OTHER; note = 2'-O-methyl ribonucleotide
  modified_base 53: mod_base = OTHER; note = 2'-O-methyl ribonucleotide
  modified_base 54: mod_base = OTHER; note = 2'-O-methyl ribonucleotide
  modified_base 55: mod_base = OTHER; note = 2'-O-methyl ribonucleotide
  modified_base 56: mod_base = OTHER; note = 2'-O-methyl ribonucleotide
  modified_base 57: mod_base = OTHER; note = 2'-O-methyl ribonucleotide
  modified_base 60: mod_base = OTHER; note = 2'-O-methyl ribonucleotide
  modified_base 61: mod_base = OTHER; note = 2'-O-methyl ribonucleotide
  modified_base 66: mod_base = OTHER; note = 2'-O-methyl ribonucleotide
  modified_base 67: mod_base = OTHER; note = 2'-O-methyl ribonucleotide
  modified_base 70: mod_base = OTHER; note = 2'-O-methyl ribonucleotide
  modified_base 71: mod_base = OTHER; note = 2'-O-methyl ribonucleotide
  modified_base 72: mod_base = OTHER; note = 2'-O-methyl ribonucleotide
  modified_base 74: mod_base = OTHER; note = 2'-O-methyl ribonucleotide
  modified_base 75: mod_base = OTHER; note = 2'-O-methyl ribonucleotide
  modified_base 76: mod_base = OTHER; note = 2'-O-methyl ribonucleotide
  modified_base 77: mod_base = OTHER; note = 2'-O-methyl ribonucleotide
  modified_base 78: mod_base = OTHER; note = 2'-O-methyl ribonucleotide
  modified_base 79: mod_base = OTHER; note = 2'-O-methyl ribonucleotide
  modified_base 80: mod_base = OTHER; note = 2'-O-methyl ribonucleotide
  modified_base 81: mod_base = OTHER; note = 2'-O-methyl ribonucleotide
  modified_base 83: mod_base = OTHER; note = 2'-O-methyl ribonucleotide
  modified_base 84: mod_base = OTHER; note = 2'-O-methyl ribonucleotide
  modified_base 85: mod_base = OTHER; note = 2'-O-methyl ribonucleotide
  modified_base 86: mod_base = OTHER; note = 2'-O-methyl ribonucleotide
  modified_base 87: mod_base = OTHER; note = 2'-O-methyl ribonucleotide
  modified_base 88: mod_base = OTHER; note = 2'-O-methyl ribonucleotide
  modified_base 89: mod_base = OTHER; note = 2'-O-methyl ribonucleotide
  modified_base 90: mod_base = OTHER; note = 2'-O-methyl ribonucleotide
  modified_base 91: mod_base = OTHER; note = 2'-O-methyl ribonucleotide
  modified_base 92: mod_base = OTHER; note = 2'-O-methyl ribonucleotide
  modified_base 93: mod_base = OTHER; note = 2'-O-methyl ribonucleotide
  modified_base 94: mod_base = OTHER; note = 2'-O-methyl ribonucleotide
  modified_base 95: mod_base = OTHER; note = 2'-O-methyl ribonucleotide
  modified_base 96: mod_base = OTHER; note = 2'-O-methyl ribonucleotide
  modified_base 97: mod_base = OTHER; note = 2'-O-methyl ribonucleotide
  modified_base 98: mod_base = OTHER; note = 2'-O-methyl ribonucleotide
  modified_base 99: mod_base = OTHER; note = 2'-O-methyl ribonucleotide
  modified_base 100: mod_base = OTHER; note = 2'-O-methyl ribonucleotide
  modified_base 101: mod_base = OTHER; note = 2'-O-methyl ribonucleotide
  modified_base 102: mod_base = OTHER; note = 2'-O-methyl ribonucleotide
  modified_base 103: mod_base = OTHER; note = 2'-O-methyl ribonucleotide
  modified_base 1..4: mod_base = OTHER; note = phosphorothioate linkage
  modified_base 45..46: mod_base = OTHER; note = phosphorothioate linkage
  modified_base 64..65: mod_base = OTHER; note = phosphorothioate linkage
  modified_base 98..100: mod_base = OTHER; note = phosphorothioate linkage

SEQ ID NO: 2677 - RNA, 103 nt, synthetic construct; identical to SEQ ID NO: 1700
  source 1..103: mol_type = other RNA
  modified_base 1: mod_base = OTHER; note = 2'-O-methyl ribonucleotide
  modified_base 2: mod_base = OTHER; note = 2'-O-methyl ribonucleotide
  modified_base 3: mod_base = OTHER; note = 2'-O-methyl ribonucleotide
  modified_base 21: mod_base = OTHER; note = 2'-O-methyl ribonucleotide
  modified_base 28: mod_base = OTHER; note = 2'-O-methyl ribonucleotide
  modified_base 29: mod_base = OTHER; note = 2'-O-methyl ribonucleotide
  modified_base 30: mod_base = OTHER; note = 2'-O-methyl ribonucleotide
  modified_base 31: mod_base = OTHER; note = 2'-O-methyl ribonucleotide
  modified_base 32: mod_base = OTHER; note = 2'-O-methyl ribonucleotide
  modified_base 34: mod_base = OTHER; note = 2'-O-methyl ribonucleotide
  modified_base 35: mod_base = OTHER; note = 2'-O-methyl ribonucleotide
  modified_base 36: mod_base = OTHER; note = 2'-O-methyl ribonucleotide
  modified_base 37: mod_base = OTHER; note = 2'-O-methyl ribonucleotide
  modified_base 38: mod_base = OTHER; note = 2'-O-methyl ribonucleotide
  modified_base 39: mod_base = OTHER; note = 2'-O-methyl ribonucleotide
  modified_base 40: mod_base = OTHER; note = 2'-O-methyl ribonucleotide
  modified_base 41: mod_base = OTHER; note = 2'-O-methyl ribonucleotide
  modified_base 42: mod_base = OTHER; note = 2'-O-methyl ribonucleotide
  modified_base 46: mod_base = OTHER; note = 2'-O-methyl ribonucleotide
  modified_base 48: mod_base = OTHER; note = 2'-O-methyl ribonucleotide
  modified_base 50: mod_base = OTHER; note = 2'-O-methyl ribonucleotide
  modified_base 52: mod_base = OTHER; note = 2'-O-methyl ribonucleotide
  modified_base 53: mod_base = OTHER; note = 2'-O-methyl ribonucleotide
  modified_base 54: mod_base = OTHER; note = 2'-O-methyl ribonucleotide
  modified_base 55: mod_base = OTHER; note = 2'-O-methyl ribonucleotide
  modified_base 56: mod_base = OTHER; note = 2'-O-methyl ribonucleotide
  modified_base 57: mod_base = OTHER; note = 2'-O-methyl ribonucleotide
  modified_base 60: mod_base = OTHER; note = 2'-O-methyl ribonucleotide
  modified_base 61: mod_base = OTHER; note = 2'-O-methyl ribonucleotide
  modified_base 66: mod_base = OTHER; note = 2'-O-methyl ribonucleotide
  modified_base 67: mod_base = OTHER; note = 2'-O-methyl ribonucleotide
  modified_base 70: mod_base = OTHER; note = 2'-O-methyl ribonucleotide
  modified_base 71: mod_base = OTHER; note = 2'-O-methyl ribonucleotide
  modified_base 72: mod_base = OTHER; note = 2'-O-methyl ribonucleotide
  modified_base 74: mod_base = OTHER; note = 2'-O-methyl ribonucleotide
  modified_base 75: mod_base = OTHER; note = 2'-O-methyl ribonucleotide
  modified_base 76: mod_base = OTHER; note = 2'-O-methyl ribonucleotide
  modified_base 77: mod_base = OTHER; note = 2'-O-methyl ribonucleotide
  modified_base 78: mod_base = OTHER; note = 2'-O-methyl ribonucleotide
  modified_base 79: mod_base = OTHER; note = 2'-O-methyl ribonucleotide
  modified_base 80: mod_base = OTHER; note = 2'-O-methyl ribonucleotide
  modified_base 81: mod_base = OTHER; note = 2'-O-methyl ribonucleotide
  modified_base 83: mod_base = OTHER; note = 2'-O-methyl ribonucleotide
  modified_base 84: mod_base = OTHER; note = 2'-O-methyl ribonucleotide
  modified_base 85: mod_base = OTHER; note = 2'-O-methyl ribonucleotide
  modified_base 86: mod_base = OTHER; note = 2'-O-methyl ribonucleotide
  modified_base 87: mod_base = OTHER; note = 2'-O-methyl ribonucleotide
  modified_base 88: mod_base = OTHER; note = 2'-O-methyl ribonucleotide
  modified_base 89: mod_base = OTHER; note = 2'-O-methyl ribonucleotide
  modified_base 90: mod_base = OTHER; note = 2'-O-methyl ribonucleotide
  modified_base 91: mod_base = OTHER; note = 2'-O-methyl ribonucleotide
  modified_base 92: mod_base = OTHER; note = 2'-O-methyl ribonucleotide
  modified_base 93: mod_base = OTHER; note = 2'-O-methyl ribonucleotide
  modified_base 94: mod_base = OTHER; note = 2'-O-methyl ribonucleotide
  modified_base 95: mod_base = OTHER; note = 2'-O-methyl ribonucleotide
  modified_base 96: mod_base = OTHER; note = 2'-O-methyl ribonucleotide
  modified_base 97: mod_base = OTHER; note = 2'-O-methyl ribonucleotide
  modified_base 98: mod_base = OTHER; note = 2'-O-methyl ribonucleotide
  modified_base 99: mod_base = OTHER; note = 2'-O-methyl ribonucleotide
  modified_base 100: mod_base = OTHER; note = 2'-O-methyl ribonucleotide
  modified_base 101: mod_base = OTHER; note = 2'-O-methyl ribonucleotide
  modified_base 103: mod_base = OTHER; note = 2'-O-methyl ribonucleotide
  modified_base 1..4: mod_base = OTHER; note = phosphorothioate linkage
  modified_base 45..46: mod_base = OTHER; note = phosphorothioate linkage
  modified_base 64..65: mod_base = OTHER; note = phosphorothioate linkage
  modified_base 98..100: mod_base = OTHER; note = phosphorothioate linkage

SEQ ID NO: 2678 - RNA, 103 nt, synthetic construct; identical to SEQ ID NO: 1643
  source 1..103: mol_type = other RNA
  modified_base 1: mod_base = OTHER; note = 2'-O-methyl ribonucleotide
  modified_base 2: mod_base = OTHER; note = 2'-O-methyl ribonucleotide
  modified_base 3: mod_base = OTHER; note = 2'-O-methyl ribonucleotide
  modified_base 21: mod_base = OTHER; note = 2'-O-methyl ribonucleotide
  modified_base 28: mod_base = OTHER; note = 2'-O-methyl ribonucleotide
  modified_base 29: mod_base = OTHER; note = 2'-O-methyl ribonucleotide
  modified_base 30: mod_base = OTHER; note = 2'-O-methyl ribonucleotide
  modified_base 31: mod_base = OTHER; note = 2'-O-methyl ribonucleotide
  modified_base 32: mod_base = OTHER; note = 2'-O-methyl ribonucleotide
  modified_base 33: mod_base = OTHER; note = 2'-O-methyl ribonucleotide
  modified_base 34: mod_base = OTHER; note = 2'-O-methyl ribonucleotide
  modified_base 35: mod_base = OTHER; note = 2'-O-methyl ribonucleotide
  modified_base 36: mod_base = OTHER; note = 2'-O-methyl ribonucleotide
  modified_base 37: mod_base = OTHER; note = 2'-O-methyl ribonucleotide
  modified_base 38: mod_base = OTHER; note = 2'-O-methyl ribonucleotide
  modified_base 39: mod_base = OTHER; note = 2'-O-methyl ribonucleotide
  modified_base 40: mod_base = OTHER; note = 2'-O-methyl ribonucleotide
  modified_base 41: mod_base = OTHER; note = 2'-O-methyl ribonucleotide
  modified_base 42: mod_base = OTHER; note = 2'-O-methyl ribonucleotide
  modified_base 46: mod_base = OTHER; note = 2'-O-methyl ribonucleotide
  modified_base 48: mod_base = OTHER; note = 2'-O-methyl ribonucleotide
  modified_base 50: mod_base = OTHER; note = 2'-O-methyl ribonucleotide
  modified_base 52: mod_base = OTHER; note = 2'-O-methyl ribonucleotide
  modified_base 53: mod_base = OTHER; note = 2'-O-methyl ribonucleotide
  modified_base 54: mod_base = OTHER; note = 2'-O-methyl ribonucleotide
  modified_base 55: mod_base = OTHER; note = 2'-O-methyl ribonucleotide
  modified_base 56: mod_base = OTHER; note = 2'-O-methyl ribonucleotide
  modified_base 57: mod_base = OTHER; note = 2'-O-methyl ribonucleotide
  modified_base 60: mod_base = OTHER; note = 2'-O-methyl ribonucleotide
  modified_base 61: mod_base = OTHER; note = 2'-O-methyl ribonucleotide
  modified_base 66: mod_base = OTHER; note = 2'-O-methyl ribonucleotide
  modified_base 67: mod_base = OTHER; note = 2'-O-methyl ribonucleotide
  modified_base 70: mod_base = OTHER; note = 2'-O-methyl ribonucleotide
  modified_base 71: mod_base = OTHER; note = 2'-O-methyl ribonucleotide
  modified_base 72: mod_base = OTHER; note = 2'-O-methyl ribonucleotide
  modified_base 73: mod_base = OTHER; note = 2'-O-methyl ribonucleotide
  modified_base 74: mod_base = OTHER; note = 2'-O-methyl ribonucleotide
  modified_base 75: mod_base = OTHER; note = 2'-O-methyl ribonucleotide
  modified_base 76: mod_base = OTHER; note = 2'-O-methyl ribonucleotide
  modified_base 77: mod_base = OTHER; note = 2'-O-methyl ribonucleotide
  modified_base 78: mod_base = OTHER; note = 2'-O-methyl ribonucleotide
  modified_base 79: mod_base = OTHER; note = 2'-O-methyl ribonucleotide
  modified_base 80: mod_base = OTHER; note = 2'-O-methyl ribonucleotide
  modified_base 81: mod_base = OTHER; note = 2'-O-methyl ribonucleotide
  modified_base 83: mod_base = OTHER; note = 2'-O-methyl ribonucleotide
  modified_base 84: mod_base = OTHER; note = 2'-O-methyl ribonucleotide
  modified_base 85: mod_base = OTHER; note = 2'-O-methyl ribonucleotide
  modified_base 86: mod_base = OTHER; note = 2'-O-methyl ribonucleotide
  modified_base 87: mod_base = OTHER; note = 2'-O-methyl ribonucleotide
  modified_base 88: mod_base = OTHER; note = 2'-O-methyl ribonucleotide
  modified_base 89: mod_base = OTHER; note = 2'-O-methyl ribonucleotide
  modified_base 90: mod_base = OTHER; note = 2'-O-methyl ribonucleotide
  modified_base 91: mod_base = OTHER; note = 2'-O-methyl ribonucleotide
  modified_base 92: mod_base = OTHER; note = 2'-O-methyl ribonucleotide
  modified_base 93: mod_base = OTHER; note = 2'-O-methyl ribonucleotide
  modified_base 94: mod_base = OTHER; note = 2'-O-methyl ribonucleotide
  modified_base 95: mod_base = OTHER; note = 2'-O-methyl ribonucleotide
  modified_base 96: mod_base = OTHER; note = 2'-O-methyl ribonucleotide
  modified_base 97: mod_base = OTHER; note = 2'-O-methyl ribonucleotide
  modified_base 98: mod_base = OTHER; note = 2'-O-methyl ribonucleotide
  modified_base 99: mod_base = OTHER; note = 2'-O-methyl ribonucleotide
  modified_base 100: mod_base = OTHER; note = 2'-O-methyl ribonucleotide
  modified_base 1..4: mod_base = OTHER; note = phosphorothioate linkage
  modified_base 25..26: mod_base = OTHER; note = phosphorothioate linkage
  modified_base 45..46: mod_base = OTHER; note = phosphorothioate linkage
  modified_base 98..100: mod_base = OTHER; note = phosphorothioate linkage

SEQ ID NO: 2679 - RNA, 103 nt, synthetic construct; identical to SEQ ID NO: 1643
  source 1..103: mol_type = other RNA
  modified_base 1: mod_base = OTHER; note = 2'-O-methyl ribonucleotide
  modified_base 2: mod_base = OTHER; note = 2'-O-methyl ribonucleotide
  modified_base 3: mod_base = OTHER; note = 2'-O-methyl ribonucleotide
  modified_base 21: mod_base = OTHER; note = 2'-O-methyl ribonucleotide
  modified_base 28: mod_base = OTHER; note = 2'-O-methyl ribonucleotide
  modified_base 29: mod_base = OTHER; note = 2'-O-methyl ribonucleotide
  modified_base 30: mod_base = OTHER; note = 2'-O-methyl ribonucleotide
  modified_base 31: mod_base = OTHER; note = 2'-O-methyl ribonucleotide
  modified_base 32: mod_base = OTHER; note = 2'-O-methyl ribonucleotide
  modified_base 34: mod_base = OTHER; note = 2'-O-methyl ribonucleotide
  modified_base 35: mod_base = OTHER; note = 2'-O-methyl ribonucleotide
  modified_base 36: mod_base = OTHER; note = 2'-O-methyl ribonucleotide
  modified_base 37: mod_base = OTHER; note = 2'-O-methyl ribonucleotide
  modified_base 38: mod_base = OTHER; note = 2'-O-methyl ribonucleotide
  modified_base 39: mod_base = OTHER; note = 2'-O-methyl ribonucleotide
  modified_base 40: mod_base = OTHER; note = 2'-O-methyl ribonucleotide
  modified_base 41: mod_base = OTHER; note = 2'-O-methyl ribonucleotide
  modified_base 42: mod_base = OTHER; note = 2'-O-methyl ribonucleotide
  modified_base 46: mod_base = OTHER; note = 2'-O-methyl ribonucleotide
  modified_base 48: mod_base = OTHER; note = 2'-O-methyl ribonucleotide
  modified_base 50: mod_base = OTHER; note = 2'-O-methyl ribonucleotide
  modified_base 52: mod_base = OTHER; note = 2'-O-methyl ribonucleotide
  modified_base 53: mod_base = OTHER; note = 2'-O-methyl ribonucleotide
  modified_base 54: mod_base = OTHER; note = 2'-O-methyl ribonucleotide
  modified_base 55: mod_base = OTHER; note = 2'-O-methyl ribonucleotide
  modified_base 56: mod_base = OTHER; note = 2'-O-methyl ribonucleotide
  modified_base 57: mod_base = OTHER; note = 2'-O-methyl ribonucleotide
  modified_base 60: mod_base = OTHER; note = 2'-O-methyl ribonucleotide
  modified_base 61: mod_base = OTHER; note = 2'-O-methyl ribonucleotide
  modified_base 66: mod_base = OTHER; note = 2'-O-methyl ribonucleotide
  modified_base 67: mod_base = OTHER; note = 2'-O-methyl ribonucleotide
  modified_base 70: mod_base = OTHER; note = 2'-O-methyl ribonucleotide
  modified_base 71: mod_base = OTHER; note = 2'-O-methyl ribonucleotide
  modified_base 72: mod_base = OTHER; note = 2'-O-methyl ribonucleotide
  modified_base 74: mod_base = OTHER; note = 2'-O-methyl ribonucleotide
  modified_base 75: mod_base = OTHER; note = 2'-O-methyl ribonucleotide
  modified_base 76: mod_base = OTHER; note = 2'-O-methyl ribonucleotide
  modified_base 77: mod_base = OTHER; note = 2'-O-methyl ribonucleotide
  modified_base 78: mod_base = OTHER; note = 2'-O-methyl ribonucleotide
  modified_base 79: mod_base = OTHER; note = 2'-O-methyl ribonucleotide
  modified_base 80: mod_base = OTHER; note = 2'-O-methyl ribonucleotide
  modified_base 81: mod_base = OTHER; note = 2'-O-methyl ribonucleotide
  modified_base 83: mod_base = OTHER; note = 2'-O-methyl ribonucleotide
  modified_base 84: mod_base = OTHER; note = 2'-O-methyl ribonucleotide
  modified_base 85: mod_base = OTHER; note = 2'-O-methyl ribonucleotide
  modified_base 86: mod_base = OTHER; note = 2'-O-methyl ribonucleotide
  modified_base 87: mod_base = OTHER; note = 2'-O-methyl ribonucleotide
  modified_base 88: mod_base = OTHER; note = 2'-O-methyl ribonucleotide
  modified_base 89: mod_base = OTHER; note = 2'-O-methyl ribonucleotide
  modified_base 90: mod_base = OTHER; note = 2'-O-methyl ribonucleotide
  modified_base 91: mod_base = OTHER; note = 2'-O-methyl ribonucleotide
  modified_base 92: mod_base = OTHER; note = 2'-O-methyl ribonucleotide
  modified_base 93: mod_base = OTHER; note = 2'-O-methyl ribonucleotide
  modified_base 94: mod_base = OTHER; note = 2'-O-methyl ribonucleotide
  modified_base 95: mod_base = OTHER; note = 2'-O-methyl ribonucleotide
  modified_base 96: mod_base = OTHER; note = 2'-O-methyl ribonucleotide
  modified_base 97: mod_base = OTHER; note = 2'-O-methyl ribonucleotide
  modified_base 98: mod_base = OTHER; note = 2'-O-methyl ribonucleotide
  modified_base 99: mod_base = OTHER; note = 2'-O-methyl ribonucleotide
  modified_base 100: mod_base = OTHER; note = 2'-O-methyl ribonucleotide
  modified_base 1..4: mod_base = OTHER; note = phosphorothioate linkage
  modified_base 25..26: mod_base = OTHER; note = phosphorothioate linkage
  modified_base 45..46: mod_base = OTHER; note = phosphorothioate linkage
  modified_base 98..100: mod_base = OTHER; note = phosphorothioate linkage

SEQ ID NO: 2680 - RNA, 103 nt, synthetic construct; identical to SEQ ID NO: 1699
  source 1..103: mol_type = other RNA
  modified_base 1: mod_base = OTHER; note = 2'-O-methyl ribonucleotide
  modified_base 2: mod_base = OTHER; note = 2'-O-methyl ribonucleotide
  modified_base 3: mod_base = OTHER; note = 2'-O-methyl ribonucleotide
  modified_base 21: mod_base = OTHER; note = 2'-O-methyl ribonucleotide
  modified_base 28: mod_base = OTHER; note = 2'-O-methyl ribonucleotide
  modified_base 29: mod_base = OTHER; note = 2'-O-methyl ribonucleotide
  modified_base 30: mod_base = OTHER; note = 2'-O-methyl ribonucleotide
  modified_base 31: mod_base = OTHER; note = 2'-O-methyl ribonucleotide
  modified_base 32: mod_base = OTHER; note = 2'-O-methyl ribonucleotide
  modified_base 33: mod_base = OTHER; note = 2'-O-methyl ribonucleotide
  modified_base 34: mod_base = OTHER; note = 2'-O-methyl ribonucleotide
  modified_base 35: mod_base = OTHER; note = 2'-O-methyl ribonucleotide
  modified_base 36: mod_base = OTHER; note = 2'-O-methyl ribonucleotide
  modified_base 37: mod_base = OTHER; note = 2'-O-methyl ribonucleotide
  modified_base 38: mod_base = OTHER; note = 2'-O-methyl ribonucleotide
  modified_base 39: mod_base = OTHER; note = 2'-O-methyl ribonucleotide
  modified_base 40: mod_base = OTHER; note = 2'-O-methyl ribonucleotide
  modified_base 41: mod_base = OTHER; note = 2'-O-methyl ribonucleotide
  modified_base 42: mod_base = OTHER; note = 2'-O-methyl ribonucleotide
  modified_base 46: mod_base = OTHER; note = 2'-O-methyl ribonucleotide
  modified_base 48: mod_base = OTHER; note = 2'-O-methyl ribonucleotide
  modified_base 50: mod_base = OTHER; note = 2'-O-methyl ribonucleotide
  modified_base 52: mod_base = OTHER; note = 2'-O-methyl ribonucleotide
  modified_base 53: mod_base = OTHER; note = 2'-O-methyl ribonucleotide
  modified_base 54: mod_base = OTHER; note = 2'-O-methyl ribonucleotide
  modified_base 55: mod_base = OTHER; note = 2'-O-methyl ribonucleotide
  modified_base 56: mod_base = OTHER; note = 2'-O-methyl ribonucleotide
  modified_base 57: mod_base = OTHER; note = 2'-O-methyl ribonucleotide
  modified_base 60: mod_base = OTHER; note = 2'-O-methyl ribonucleotide
  modified_base 61: mod_base = OTHER; note = 2'-O-methyl ribonucleotide
  modified_base 66: mod_base = OTHER; note = 2'-O-methyl ribonucleotide
  modified_base 67: mod_base = OTHER; note = 2'-O-methyl ribonucleotide
  modified_base 70: mod_base = OTHER; note = 2'-O-methyl ribonucleotide
  modified_base 71: mod_base = OTHER; note = 2'-O-methyl ribonucleotide
  modified_base 72: mod_base = OTHER; note = 2'-O-methyl ribonucleotide
  modified_base 73: mod_base = OTHER; note = 2'-O-methyl ribonucleotide
  modified_base 74: mod_base = OTHER; note = 2'-O-methyl ribonucleotide
  modified_base 75: mod_base = OTHER; note = 2'-O-methyl ribonucleotide
  modified_base 76: mod_base = OTHER; note = 2'-O-methyl ribonucleotide
  modified_base 77: mod_base = OTHER; note = 2'-O-methyl ribonucleotide
  modified_base 78: mod_base = OTHER; note = 2'-O-methyl ribonucleotide
  modified_base 79: mod_base = OTHER; note = 2'-O-methyl ribonucleotide
  modified_base 80: mod_base = OTHER; note = 2'-O-methyl ribonucleotide
  modified_base 81: mod_base = OTHER; note = 2'-O-methyl ribonucleotide
  modified_base 83: mod_base = OTHER; note = 2'-O-methyl ribonucleotide
  modified_base 84: mod_base = OTHER; note = 2'-O-methyl ribonucleotide
  modified_base 85: mod_base = OTHER; note = 2'-O-methyl ribonucleotide
  modified_base 86: mod_base = OTHER; note = 2'-O-methyl ribonucleotide
  modified_base 87: mod_base = OTHER; note = 2'-O-methyl ribonucleotide
  modified_base 88: mod_base = OTHER; note = 2'-O-methyl ribonucleotide
  modified_base 89: mod_base = OTHER; note = 2'-O-methyl ribonucleotide
  modified_base 90: mod_base = OTHER; note = 2'-O-methyl ribonucleotide
  modified_base 91: mod_base = OTHER; note = 2'-O-methyl ribonucleotide
  modified_base 92: mod_base = OTHER; note = 2'-O-methyl ribonucleotide
  modified_base 93: mod_base = OTHER; note = 2'-O-methyl ribonucleotide
  modified_base 94: mod_base = OTHER; note = 2'-O-methyl ribonucleotide
  modified_base 95: mod_base = OTHER; note = 2'-O-methyl ribonucleotide
  modified_base 96: mod_base = OTHER; note = 2'-O-methyl ribonucleotide
  modified_base 97: mod_base = OTHER; note = 2'-O-methyl ribonucleotide
  modified_base 98: mod_base = OTHER; note = 2'-O-methyl ribonucleotide
  modified_base 99: mod_base = OTHER; note = 2'-O-methyl ribonucleotide
  modified_base 100: mod_base = OTHER; note = 2'-O-methyl ribonucleotide
  modified_base 1..4: mod_base = OTHER; note = phosphorothioate linkage
  modified_base 25..26: mod_base = OTHER; note = phosphorothioate linkage
  modified_base 45..46: mod_base = OTHER; note = phosphorothioate linkage
  modified_base 98..100: mod_base = OTHER; note = phosphorothioate linkage

SEQ ID NO: 2681 - RNA, 103 nt, synthetic construct; identical to SEQ ID NO: 1699
  source 1..103: mol_type = other RNA
  modified_base 1: mod_base = OTHER; note = 2'-O-methyl ribonucleotide
  modified_base 2: mod_base = OTHER; note = 2'-O-methyl ribonucleotide
  modified_base 3: mod_base = OTHER; note = 2'-O-methyl ribonucleotide
  modified_base 21: mod_base = OTHER; note = 2'-O-methyl ribonucleotide
  modified_base 28: mod_base = OTHER; note = 2'-O-methyl ribonucleotide
  modified_base 29: mod_base = OTHER; note = 2'-O-methyl ribonucleotide
  modified_base 30: mod_base = OTHER; note = 2'-O-methyl ribonucleotide
  modified_base 31: mod_base = OTHER; note = 2'-O-methyl ribonucleotide
  modified_base 32: mod_base = OTHER; note = 2'-O-methyl ribonucleotide
  modified_base 34: mod_base = OTHER; note = 2'-O-methyl ribonucleotide
  modified_base 35: mod_base = OTHER; note = 2'-O-methyl ribonucleotide
  modified_base 36: mod_base = OTHER; note = 2'-O-methyl ribonucleotide
  modified_base 37: mod_base = OTHER; note = 2'-O-methyl ribonucleotide
  modified_base 38: mod_base = OTHER; note = 2'-O-methyl ribonucleotide
  modified_base 39: mod_base = OTHER; note = 2'-O-methyl ribonucleotide
  modified_base 40: mod_base = OTHER; note = 2'-O-methyl ribonucleotide
  modified_base 41: mod_base = OTHER; note = 2'-O-methyl ribonucleotide
  modified_base 42: mod_base = OTHER; note = 2'-O-methyl ribonucleotide
  modified_base 46: mod_base = OTHER; note = 2'-O-methyl ribonucleotide
  modified_base 48: mod_base = OTHER; note = 2'-O-methyl ribonucleotide
  modified_base 50: mod_base = OTHER; note = 2'-O-methyl ribonucleotide
  modified_base 52: mod_base = OTHER; note = 2'-O-methyl ribonucleotide
  modified_base 53: mod_base = OTHER; note = 2'-O-methyl ribonucleotide
  modified_base 54: mod_base = OTHER; note = 2'-O-methyl ribonucleotide
  modified_base 55: mod_base = OTHER; note = 2'-O-methyl ribonucleotide
  modified_base 56: mod_base = OTHER; note = 2'-O-methyl ribonucleotide
  modified_base 57: mod_base = OTHER; note = 2'-O-methyl ribonucleotide
  modified_base 60: mod_base = OTHER; note = 2'-O-methyl ribonucleotide
  modified_base 61: mod_base = OTHER; note = 2'-O-methyl ribonucleotide
  modified_base 66: mod_base = OTHER; note = 2'-O-methyl ribonucleotide
  modified_base 67: mod_base = OTHER; note = 2'-O-methyl ribonucleotide
  modified_base 70: mod_base = OTHER; note = 2'-O-methyl ribonucleotide
  modified_base 71: mod_base = OTHER; note = 2'-O-methyl ribonucleotide
  modified_base 72: mod_base = OTHER; note = 2'-O-methyl ribonucleotide
  modified_base 74: mod_base = OTHER; note = 2'-O-methyl ribonucleotide
  modified_base 75: mod_base = OTHER; note = 2'-O-methyl ribonucleotide
  modified_base 76: mod_base = OTHER; note = 2'-O-methyl ribonucleotide
  modified_base 77: mod_base = OTHER; note = 2'-O-methyl ribonucleotide
  modified_base 78: mod_base = OTHER; note = 2'-O-methyl ribonucleotide
  modified_base 79: mod_base = OTHER; note = 2'-O-methyl ribonucleotide
  modified_base 80: mod_base = OTHER; note = 2'-O-methyl ribonucleotide
  modified_base 81: mod_base = OTHER; note = 2'-O-methyl ribonucleotide
  modified_base 83: mod_base = OTHER; note = 2'-O-methyl ribonucleotide
  modified_base 84: mod_base = OTHER; note = 2'-O-methyl ribonucleotide
  modified_base 85: mod_base = OTHER; note = 2'-O-methyl ribonucleotide
  modified_base 86: mod_base = OTHER; note = 2'-O-methyl ribonucleotide
  modified_base 87: mod_base = OTHER; note = 2'-O-methyl ribonucleotide
  modified_base 88: mod_base = OTHER; note = 2'-O-methyl ribonucleotide
  modified_base 89: mod_base = OTHER; note = 2'-O-methyl ribonucleotide
  modified_base 90: mod_base = OTHER; note = 2'-O-methyl ribonucleotide
  modified_base 91: mod_base = OTHER; note = 2'-O-methyl ribonucleotide
  modified_base 92: mod_base = OTHER; note = 2'-O-methyl ribonucleotide
  modified_base 93: mod_base = OTHER; note = 2'-O-methyl ribonucleotide
  modified_base 94: mod_base = OTHER; note = 2'-O-methyl ribonucleotide
  modified_base 95: mod_base = OTHER; note = 2'-O-methyl ribonucleotide
  modified_base 96: mod_base = OTHER; note = 2'-O-methyl ribonucleotide
  modified_base 97: mod_base = OTHER; note = 2'-O-methyl ribonucleotide
  modified_base 98: mod_base = OTHER; note = 2'-O-methyl ribonucleotide
  modified_base 99: mod_base = OTHER; note = 2'-O-methyl ribonucleotide
  modified_base 100: mod_base = OTHER; note = 2'-O-methyl ribonucleotide
  modified_base 1..4: mod_base = OTHER; note = phosphorothioate linkage
  modified_base 25..26: mod_base = OTHER; note = phosphorothioate linkage
  modified_base 45..46: mod_base = OTHER; note = phosphorothioate linkage
  modified_base 98..100: mod_base = OTHER; note = phosphorothioate linkage

SEQ ID NO: 2682 - RNA, 103 nt, synthetic construct; identical to SEQ ID NO: 1700
  source 1..103: mol_type = other RNA
  modified_base 1: mod_base = OTHER; note = 2'-O-methyl ribonucleotide
  modified_base 2: mod_base = OTHER; note = 2'-O-methyl ribonucleotide
  modified_base 3: mod_base = OTHER; note = 2'-O-methyl ribonucleotide
  modified_base 21: mod_base = OTHER; note = 2'-O-methyl ribonucleotide
  modified_base 28: mod_base = OTHER; note = 2'-O-methyl ribonucleotide
  modified_base 29: mod_base = OTHER; note = 2'-O-methyl ribonucleotide
  modified_base 30: mod_base = OTHER; note = 2'-O-methyl ribonucleotide
  modified_base 31: mod_base = OTHER; note = 2'-O-methyl ribonucleotide
  modified_base 32: mod_base = OTHER; note = 2'-O-methyl ribonucleotide
  modified_base 33: mod_base = OTHER; note = 2'-O-methyl ribonucleotide
  modified_base 34: mod_base = OTHER; note = 2'-O-methyl ribonucleotide
  modified_base 35: mod_base = OTHER; note = 2'-O-methyl ribonucleotide
  modified_base 36: mod_base = OTHER; note = 2'-O-methyl ribonucleotide
  modified_base 37: mod_base = OTHER; note = 2'-O-methyl ribonucleotide
  modified_base 38: mod_base = OTHER; note = 2'-O-methyl ribonucleotide
  modified_base 39: mod_base = OTHER; note = 2'-O-methyl ribonucleotide
  modified_base 40: mod_base = OTHER; note = 2'-O-methyl ribonucleotide
  modified_base 41: mod_base = OTHER; note = 2'-O-methyl ribonucleotide
  modified_base 42: mod_base = OTHER; note = 2'-O-methyl ribonucleotide
  modified_base 46: mod_base = OTHER; note = 2'-O-methyl ribonucleotide
  modified_base 48: mod_base = OTHER; note = 2'-O-methyl ribonucleotide
  modified_base 50: mod_base = OTHER; note = 2'-O-methyl ribonucleotide
  modified_base 52: mod_base = OTHER; note = 2'-O-methyl ribonucleotide
  modified_base 53: mod_base = OTHER; note = 2'-O-methyl ribonucleotide
  modified_base 54: mod_base = OTHER; note = 2'-O-methyl ribonucleotide
  modified_base 57: mod_base = OTHER; note = 2'-O-methyl ribonucleotide
  modified_base 61: mod_base = OTHER; note = 2'-O-methyl ribonucleotide
  modified_base 66: mod_base = OTHER; note = 2'-O-methyl ribonucleotide
  modified_base 67: mod_base = OTHER; note = 2'-O-methyl ribonucleotide
  modified_base 70: mod_base = OTHER; note = 2'-O-methyl ribonucleotide
  modified_base 71: mod_base = OTHER; note = 2'-O-methyl ribonucleotide
  modified_base 72: mod_base = OTHER; note = 2'-O-methyl ribonucleotide
  modified_base 74: mod_base = OTHER; note = 2'-O-methyl ribonucleotide
  modified_base 75: mod_base = OTHER; note = 2'-O-methyl ribonucleotide
  modified_base 76: mod_base = OTHER; note = 2'-O-methyl ribonucleotide
  modified_base 77: mod_base = OTHER; note = 2'-O-methyl ribonucleotide
  modified_base 78: mod_base = OTHER; note = 2'-O-methyl ribonucleotide
  modified_base 79: mod_base = OTHER; note = 2'-O-methyl ribonucleotide
  modified_base 80: mod_base = OTHER; note = 2'-O-methyl ribonucleotide
  modified_base 82: mod_base = OTHER; note = 2'-O-methyl ribonucleotide
  modified_base 83: mod_base = OTHER; note = 2'-O-methyl ribonucleotide
  modified_base 84: mod_base = OTHER; note = 2'-O-methyl ribonucleotide
  modified_base 85: mod_base = OTHER; note = 2'-O-methyl ribonucleotide
  modified_base 86: mod_base = OTHER; note = 2'-O-methyl ribonucleotide
  modified_base 87: mod_base = OTHER; note = 2'-O-methyl ribonucleotide
  modified_base 89: mod_base = OTHER; note = 2'-O-methyl ribonucleotide
  modified_base 92: mod_base = OTHER; note = 2'-O-methyl ribonucleotide
  modified_base 93: mod_base = OTHER; note = 2'-O-methyl ribonucleotide
  modified_base 94: mod_base = OTHER; note = 2'-O-methyl ribonucleotide
  modified_base 95: mod_base = OTHER; note = 2'-O-methyl ribonucleotide
  modified_base 96: mod_base = OTHER; note = 2'-O-methyl ribonucleotide
  modified_base 97: mod_base = OTHER; note = 2'-O-methyl ribonucleotide
  modified_base 98: mod_base = OTHER; note = 2'-O-methyl ribonucleotide
  modified_base 99: mod_base = OTHER; note = 2'-O-methyl ribonucleotide
  modified_base 100: mod_base = OTHER; note = 2'-O-methyl ribonucleotide
  modified_base 1..4: mod_base = OTHER; note = phosphorothioate linkage
  modified_base 25..26: mod_base = OTHER; note = phosphorothioate linkage
  modified_base 45..46: mod_base = OTHER; note = phosphorothioate linkage
  modified_base 98..100: mod_base = OTHER; note = phosphorothioate linkage

SEQ ID NO: 2683 - RNA, 103 nt, synthetic construct; identical to SEQ ID NO: 1700
  source 1..103: mol_type = other RNA
  modified_base 1: mod_base = OTHER; note = 2'-O-methyl ribonucleotide
  modified_base 2: mod_base = OTHER; note = 2'-O-methyl ribonucleotide
  modified_base 3: mod_base = OTHER; note = 2'-O-methyl ribonucleotide
  modified_base 21: mod_base = OTHER; note = 2'-O-methyl ribonucleotide
  modified_base 28: mod_base = OTHER; note = 2'-O-methyl ribonucleotide
  modified_base 29: mod_base = OTHER; note = 2'-O-methyl ribonucleotide
  modified_base 30: mod_base = OTHER; note = 2'-O-methyl ribonucleotide
  modified_base 31: mod_base = OTHER; note = 2'-O-methyl ribonucleotide
  modified_base 32: mod_base = OTHER; note = 2'-O-methyl ribonucleotide
  modified_base 33: mod_base = OTHER; note = 2'-O-methyl ribonucleotide
  modified_base 34: mod_base = OTHER; note = 2'-O-methyl ribonucleotide
  modified_base 35: mod_base = OTHER; note = 2'-O-methyl ribonucleotide
  modified_base 36: mod_base = OTHER; note = 2'-O-methyl ribonucleotide
  modified_base 37: mod_base = OTHER; note = 2'-O-methyl ribonucleotide
  modified_base 38: mod_base = OTHER; note = 2'-O-methyl ribonucleotide
  modified_base 39: mod_base = OTHER; note = 2'-O-methyl ribonucleotide
  modified_base 40: mod_base = OTHER; note = 2'-O-methyl ribonucleotide
  modified_base 41: mod_base = OTHER; note = 2'-O-methyl ribonucleotide
  modified_base 42: mod_base = OTHER; note = 2'-O-methyl ribonucleotide
  modified_base 46: mod_base = OTHER; note = 2'-O-methyl ribonucleotide
  modified_base 48: mod_base = OTHER; note = 2'-O-methyl ribonucleotide
  modified_base 50: mod_base = OTHER; note = 2'-O-methyl ribonucleotide
  modified_base 52: mod_base = OTHER; note = 2'-O-methyl ribonucleotide
  modified_base 53: mod_base = OTHER; note = 2'-O-methyl ribonucleotide
  modified_base 54: mod_base = OTHER; note = 2'-O-methyl ribonucleotide
  modified_base 55: mod_base = OTHER; note = 2'-O-methyl ribonucleotide
  modified_base 56: mod_base = OTHER; note = 2'-O-methyl ribonucleotide
  modified_base 57: mod_base = OTHER; note = 2'-O-methyl ribonucleotide
  modified_base 60: mod_base = OTHER; note = 2'-O-methyl ribonucleotide
  modified_base 61: mod_base = OTHER; note = 2'-O-methyl ribonucleotide
  modified_base 66: mod_base = OTHER; note = 2'-O-methyl ribonucleotide
  modified_base 67: mod_base = OTHER; note = 2'-O-methyl ribonucleotide
  modified_base 70: mod_base = OTHER; note = 2'-O-methyl ribonucleotide
  modified_base 71: mod_base = OTHER; note = 2'-O-methyl ribonucleotide
  modified_base 72: mod_base = OTHER; note = 2'-O-methyl ribonucleotide
  modified_base 74: mod_base = OTHER; note = 2'-O-methyl ribonucleotide
  modified_base 75: mod_base = OTHER; note = 2'-O-methyl ribonucleotide
  modified_base 76: mod_base = OTHER; note = 2'-O-methyl ribonucleotide
  modified_base 77: mod_base = OTHER; note = 2'-O-methyl ribonucleotide
  modified_base 78: mod_base = OTHER; note = 2'-O-methyl ribonucleotide
  modified_base 79: mod_base = OTHER; note = 2'-O-methyl ribonucleotide
  modified_base 80: mod_base = OTHER; note = 2'-O-methyl ribonucleotide
  modified_base 82: mod_base = OTHER; note = 2'-O-methyl ribonucleotide
  modified_base 83: mod_base = OTHER; note = 2'-O-methyl ribonucleotide
  modified_base 84: mod_base = OTHER; note = 2'-O-methyl ribonucleotide
  modified_base 85: mod_base = OTHER; note = 2'-O-methyl ribonucleotide
  modified_base 86: mod_base = OTHER; note = 2'-O-methyl ribonucleotide
  modified_base 87: mod_base = OTHER; note = 2'-O-methyl ribonucleotide
  modified_base 89: mod_base = OTHER; note = 2'-O-methyl ribonucleotide
  modified_base 92: mod_base = OTHER; note = 2'-O-methyl ribonucleotide
  modified_base 93: mod_base = OTHER; note = 2'-O-methyl ribonucleotide
  modified_base 94: mod_base = OTHER; note = 2'-O-methyl ribonucleotide
  modified_base 95: mod_base = OTHER; note = 2'-O-methyl ribonucleotide
  modified_base 96: mod_base = OTHER; note = 2'-O-methyl ribonucleotide
  modified_base 97: mod_base = OTHER; note = 2'-O-methyl ribonucleotide
  modified_base 98: mod_base = OTHER; note = 2'-O-methyl ribonucleotide
  modified_base 99: mod_base = OTHER; note = 2'-O-methyl ribonucleotide
  modified_base 100: mod_base = OTHER; note = 2'-O-methyl ribonucleotide
  modified_base 1..4: mod_base = OTHER; note = phosphorothioate linkage
  modified_base 25..26: mod_base = OTHER; note = phosphorothioate linkage
  modified_base 45..46: mod_base = OTHER; note = phosphorothioate linkage
  modified_base 98..100: mod_base = OTHER; note = phosphorothioate linkage

SEQ ID NO: 2684 - RNA, 103 nt, synthetic construct; identical to SEQ ID NO: 1700
  source 1..103: mol_type = other RNA
  modified_base 1: mod_base = OTHER; note = 2'-O-methyl ribonucleotide
  modified_base 2: mod_base = OTHER; note = 2'-O-methyl ribonucleotide
  modified_base 3: mod_base = OTHER; note = 2'-O-methyl ribonucleotide
  modified_base 21: mod_base = OTHER; note = 2'-O-methyl ribonucleotide
  modified_base 28: mod_base = OTHER; note = 2'-O-methyl ribonucleotide
  modified_base 29: mod_base = OTHER; note = 2'-O-methyl ribonucleotide
  modified_base 30: mod_base = OTHER; note = 2'-O-methyl ribonucleotide
  modified_base 31: mod_base = OTHER; note = 2'-O-methyl ribonucleotide
  modified_base 32: mod_base = OTHER; note = 2'-O-methyl ribonucleotide
  modified_base 33: mod_base = OTHER; note = 2'-O-methyl ribonucleotide
  modified_base 34: mod_base = OTHER; note = 2'-O-methyl ribonucleotide
  modified_base 35: mod_base = OTHER; note = 2'-O-methyl ribonucleotide
  modified_base 36: mod_base = OTHER; note = 2'-O-methyl ribonucleotide
  modified_base 37: mod_base = OTHER; note = 2'-O-methyl ribonucleotide
  modified_base 38: mod_base = OTHER; note = 2'-O-methyl ribonucleotide
  modified_base 39: mod_base = OTHER; note = 2'-O-methyl ribonucleotide
  modified_base 40: mod_base = OTHER; note = 2'-O-methyl ribonucleotide
  modified_base 41: mod_base = OTHER; note = 2'-O-methyl ribonucleotide
  modified_base 42: mod_base = OTHER; note = 2'-O-methyl ribonucleotide
  modified_base 46: mod_base = OTHER; note = 2'-O-methyl ribonucleotide
  modified_base 48: mod_base = OTHER; note = 2'-O-methyl ribonucleotide
  modified_base 50: mod_base = OTHER; note = 2'-O-methyl ribonucleotide
  modified_base 52: mod_base = OTHER; note = 2'-O-methyl ribonucleotide
  modified_base 53: mod_base = OTHER; note = 2'-O-methyl ribonucleotide
  modified_base 54: mod_base = OTHER; note = 2'-O-methyl ribonucleotide
  modified_base 57: mod_base = OTHER; note = 2'-O-methyl ribonucleotide
  modified_base 61: mod_base = OTHER; note = 2'-O-methyl ribonucleotide
  modified_base 66: mod_base = OTHER; note = 2'-O-methyl ribonucleotide
  modified_base 67: mod_base = OTHER; note = 2'-O-methyl ribonucleotide
  modified_base 70: mod_base = OTHER; note = 2'-O-methyl ribonucleotide
  modified_base 71: mod_base = OTHER; note = 2'-O-methyl ribonucleotide
  modified_base 72: mod_base = OTHER; note = 2'-O-methyl ribonucleotide
  modified_base 73: mod_base = OTHER; note = 2'-O-methyl ribonucleotide
  modified_base 74: mod_base = OTHER; note = 2'-O-methyl ribonucleotide
  modified_base 75: mod_base = OTHER; note = 2'-O-methyl ribonucleotide
  modified_base 76: mod_base = OTHER; note = 2'-O-methyl ribonucleotide
  modified_base 77: mod_base = OTHER; note = 2'-O-methyl ribonucleotide
  modified_base 78: mod_base = OTHER; note = 2'-O-methyl ribonucleotide
  modified_base 79: mod_base = OTHER; note = 2'-O-methyl ribonucleotide
  modified_base 80: mod_base = OTHER; note = 2'-O-methyl ribonucleotide
  modified_base 82: mod_base = OTHER; note = 2'-O-methyl ribonucleotide
  modified_base 83: mod_base = OTHER; note = 2'-O-methyl ribonucleotide
  modified_base 84: mod_base = OTHER; note = 2'-O-methyl ribonucleotide
  modified_base 85: mod_base = OTHER; note = 2'-O-methyl ribonucleotide
  modified_base 86: mod_base = OTHER; note = 2'-O-methyl ribonucleotide
  modified_base 87: mod_base = OTHER; note = 2'-O-methyl ribonucleotide
  modified_base 89: mod_base = OTHER; note = 2'-O-methyl ribonucleotide
  modified_base 92: mod_base = OTHER; note = 2'-O-methyl ribonucleotide
  modified_base 93: mod_base = OTHER; note = 2'-O-methyl ribonucleotide
  modified_base 94: mod_base = OTHER; note = 2'-O-methyl ribonucleotide
  modified_base 95: mod_base = OTHER; note = 2'-O-methyl ribonucleotide
  modified_base 96: mod_base = OTHER; note = 2'-O-methyl ribonucleotide
  modified_base 97: mod_base = OTHER; note = 2'-O-methyl ribonucleotide
  modified_base 98: mod_base = OTHER; note = 2'-O-methyl ribonucleotide
  modified_base 99: mod_base = OTHER; note = 2'-O-methyl ribonucleotide
  modified_base 100: mod_base = OTHER; note = 2'-O-methyl ribonucleotide
  modified_base 1..4: mod_base = OTHER; note = phosphorothioate linkage
  modified_base 25..26: mod_base = OTHER; note = phosphorothioate linkage
  modified_base 45..46: mod_base = OTHER; note = phosphorothioate linkage
  modified_base 98..100: mod_base = OTHER; note = phosphorothioate linkage

SEQ ID NO: 2685 - RNA, 103 nt, synthetic construct; identical to SEQ ID NO: 1700
  source 1..103: mol_type = other RNA
  modified_base 1: mod_base = OTHER; note = 2'-O-methyl ribonucleotide
  modified_base 2: mod_base = OTHER; note = 2'-O-methyl ribonucleotide
  modified_base 3: mod_base = OTHER; note = 2'-O-methyl ribonucleotide
  modified_base 21: mod_base = OTHER; note = 2'-O-methyl ribonucleotide
  modified_base 28: mod_base = OTHER; note = 2'-O-methyl ribonucleotide
  modified_base 29: mod_base = OTHER; note = 2'-O-methyl ribonucleotide
  modified_base 30: mod_base = OTHER; note = 2'-O-methyl ribonucleotide
  modified_base 31: mod_base = OTHER; note = 2'-O-methyl ribonucleotide
  modified_base 32: mod_base = OTHER; note = 2'-O-methyl ribonucleotide
  modified_base 33: mod_base = OTHER; note = 2'-O-methyl ribonucleotide
  modified_base 34: mod_base = OTHER; note = 2'-O-methyl ribonucleotide
  modified_base 35: mod_base = OTHER; note = 2'-O-methyl ribonucleotide
  modified_base 36: mod_base = OTHER; note = 2'-O-methyl ribonucleotide
  modified_base 37: mod_base = OTHER; note = 2'-O-methyl ribonucleotide
  modified_base 38: mod_base = OTHER; note = 2'-O-methyl ribonucleotide
  modified_base 39: mod_base = OTHER; note = 2'-O-methyl ribonucleotide
  modified_base 40: mod_base = OTHER; note = 2'-O-methyl ribonucleotide
  modified_base 41: mod_base = OTHER; note = 2'-O-methyl ribonucleotide
  modified_base 42: mod_base = OTHER; note = 2'-O-methyl ribonucleotide
  modified_base 46: mod_base = OTHER; note = 2'-O-methyl ribonucleotide
  modified_base 48: mod_base = OTHER; note = 2'-O-methyl ribonucleotide
  modified_base 50: mod_base = OTHER; note = 2'-O-methyl ribonucleotide
  modified_base 52: mod_base = OTHER; note = 2'-O-methyl ribonucleotide
  modified_base 53: mod_base = OTHER; note = 2'-O-methyl ribonucleotide
  modified_base 54: mod_base = OTHER; note = 2'-O-methyl ribonucleotide
  modified_base 57: mod_base = OTHER; note = 2'-O-methyl ribonucleotide
  modified_base 61: mod_base = OTHER; note = 2'-O-methyl ribonucleotide
  modified_base 66: mod_base = OTHER; note = 2'-O-methyl ribonucleotide
  modified_base 67: mod_base = OTHER; note = 2'-O-methyl ribonucleotide
  modified_base 70: mod_base = OTHER; note = 2'-O-methyl ribonucleotide
  modified_base 71: mod_base = OTHER; note = 2'-O-methyl ribonucleotide
  modified_base 72: mod_base = OTHER; note = 2'-O-methyl ribonucleotide
  modified_base 73: mod_base = OTHER; note = 2'-O-methyl ribonucleotide
  modified_base 74: mod_base = OTHER; note = 2'-O-methyl ribonucleotide
  modified_base 75: mod_base = OTHER; note = 2'-O-methyl ribonucleotide
  modified_base 76: mod_base = OTHER; note = 2'-O-methyl ribonucleotide
  modified_base 77: mod_base = OTHER; note = 2'-O-methyl ribonucleotide
  modified_base 78: mod_base = OTHER; note = 2'-O-methyl ribonucleotide
  modified_base 79: mod_base = OTHER; note = 2'-O-methyl ribonucleotide
  modified_base 80: mod_base = OTHER; note = 2'-O-methyl ribonucleotide
  modified_base 82: mod_base = OTHER; note = 2'-O-methyl ribonucleotide
  modified_base 83: mod_base = OTHER; note = 2'-O-methyl ribonucleotide
  modified_base 84: mod_base = OTHER; note = 2'-O-methyl ribonucleotide
  modified_base 85: mod_base = OTHER; note = 2'-O-methyl ribonucleotide
  modified_base 86: mod_base = OTHER; note = 2'-O-methyl ribonucleotide
  modified_base 87: mod_base = OTHER; note = 2'-O-methyl ribonucleotide
  modified_base 89: mod_base = OTHER; note = 2'-O-methyl ribonucleotide
  modified_base 91: mod_base = OTHER; note = 2'-O-methyl ribonucleotide
  modified_base 92: mod_base = OTHER; note = 2'-O-methyl ribonucleotide
  modified_base 93: mod_base = OTHER; note = 2'-O-methyl ribonucleotide
  modified_base 94: mod_base = OTHER; note = 2'-O-methyl ribonucleotide
  modified_base 95: mod_base = OTHER; note = 2'-O-methyl ribonucleotide
  modified_base 96: mod_base = OTHER; note = 2'-O-methyl ribonucleotide
  modified_base 97: mod_base = OTHER; note = 2'-O-methyl ribonucleotide
  modified_base 98: mod_base = OTHER; note = 2'-O-methyl ribonucleotide
  modified_base 99: mod_base = OTHER; note = 2'-O-methyl ribonucleotide
  modified_base 100: mod_base = OTHER; note = 2'-O-methyl ribonucleotide
  modified_base 1..4: mod_base = OTHER; note = phosphorothioate linkage
  modified_base 25..26: mod_base = OTHER; note = phosphorothioate linkage
  modified_base 45..46: mod_base = OTHER; note = phosphorothioate linkage
  modified_base 98..100: mod_base = OTHER; note = phosphorothioate linkage

SEQ ID NO: 2686 - RNA, 103 nt, synthetic construct; identical to SEQ ID NO: 1700
  source 1..103: mol_type = other RNA
  modified_base 1: mod_base = OTHER; note = 2'-O-methyl ribonucleotide
  modified_base 2: mod_base = OTHER; note = 2'-O-methyl ribonucleotide
  modified_base 3: mod_base = OTHER; note = 2'-O-methyl ribonucleotide
  modified_base 21: mod_base = OTHER; note = 2'-O-methyl ribonucleotide
  modified_base 28: mod_base = OTHER; note = 2'-O-methyl ribonucleotide
  modified_base 29: mod_base = OTHER; note = 2'-O-methyl ribonucleotide
  modified_base 30: mod_base = OTHER; note = 2'-O-methyl ribonucleotide
  modified_base 31: mod_base = OTHER; note = 2'-O-methyl ribonucleotide
  modified_base 32: mod_base = OTHER; note = 2'-O-methyl ribonucleotide
  modified_base 34: mod_base = OTHER; note = 2'-O-methyl ribonucleotide
  modified_base 35: mod_base = OTHER; note = 2'-O-methyl ribonucleotide
  modified_base 36: mod_base = OTHER; note = 2'-O-methyl ribonucleotide
  modified_base 37: mod_base = OTHER; note = 2'-O-methyl ribonucleotide
  modified_base 38: mod_base = OTHER; note = 2'-O-methyl ribonucleotide
  modified_base 39: mod_base = OTHER; note = 2'-O-methyl ribonucleotide
  modified_base 40: mod_base = OTHER; note = 2'-O-methyl ribonucleotide
  modified_base 41: mod_base = OTHER; note = 2'-O-methyl ribonucleotide
  modified_base 42: mod_base = OTHER; note = 2'-O-methyl ribonucleotide
  modified_base 46: mod_base = OTHER; note = 2'-O-methyl ribonucleotide
  modified_base 48: mod_base = OTHER; note = 2'-O-methyl ribonucleotide
  modified_base 50: mod_base = OTHER; note = 2'-O-methyl ribonucleotide
  modified_base 52: mod_base = OTHER; note = 2'-O-methyl ribonucleotide
  modified_base 53: mod_base = OTHER; note = 2'-O-methyl ribonucleotide
  modified_base 54: mod_base = OTHER; note = 2'-O-methyl ribonucleotide
  modified_base 57: mod_base = OTHER; note = 2'-O-methyl ribonucleotide
  modified_base 61: mod_base = OTHER; note = 2'-O-methyl ribonucleotide
  modified_base 66: mod_base = OTHER; note = 2'-O-methyl ribonucleotide
  modified_base 67: mod_base = OTHER; note = 2'-O-methyl ribonucleotide
  modified_base 70: mod_base = OTHER; note = 2'-O-methyl ribonucleotide
  modified_base 71: mod_base = OTHER; note = 2'-O-methyl ribonucleotide
  modified_base 72: mod_base = OTHER; note = 2'-O-methyl ribonucleotide
  modified_base 73: mod_base = OTHER; note = 2'-O-methyl ribonucleotide
  modified_base 74: mod_base = OTHER; note = 2'-O-methyl ribonucleotide
  modified_base 75: mod_base = OTHER; note = 2'-O-methyl ribonucleotide
  modified_base 76: mod_base = OTHER; note = 2'-O-methyl ribonucleotide
  modified_base 77: mod_base = OTHER; note = 2'-O-methyl ribonucleotide
  modified_base 78: mod_base = OTHER; note = 2'-O-methyl ribonucleotide
  modified_base 79: mod_base = OTHER; note = 2'-O-methyl ribonucleotide
  modified_base 80: mod_base = OTHER; note = 2'-O-methyl ribonucleotide
  modified_base 82: mod_base = OTHER; note = 2'-O-methyl ribonucleotide
  modified_base 83: mod_base = OTHER; note = 2'-O-methyl ribonucleotide
  modified_base 84: mod_base = OTHER; note = 2'-O-methyl ribonucleotide
  modified_base 85: mod_base = OTHER; note = 2'-O-methyl ribonucleotide
  modified_base 86: mod_base = OTHER; note = 2'-O-methyl ribonucleotide
  modified_base 87: mod_base = OTHER; note = 2'-O-methyl ribonucleotide
  modified_base 89: mod_base = OTHER; note = 2'-O-methyl ribonucleotide
  modified_base 92: mod_base = OTHER; note = 2'-O-methyl ribonucleotide
  modified_base 93: mod_base = OTHER; note = 2'-O-methyl ribonucleotide
  modified_base 94: mod_base = OTHER; note = 2'-O-methyl ribonucleotide
  modified_base 95: mod_base = OTHER; note = 2'-O-methyl ribonucleotide
  modified_base 96: mod_base = OTHER; note = 2'-O-methyl ribonucleotide
  modified_base 97: mod_base = OTHER; note = 2'-O-methyl ribonucleotide
  modified_base 98: mod_base = OTHER; note = 2'-O-methyl ribonucleotide
  modified_base 99: mod_base = OTHER; note = 2'-O-methyl ribonucleotide
  modified_base 100: mod_base = OTHER; note = 2'-O-methyl ribonucleotide
  modified_base 1..4: mod_base = OTHER; note = phosphorothioate linkage
  modified_base 25..26: mod_base = OTHER; note = phosphorothioate linkage
  modified_base 45..46: mod_base = OTHER; note = phosphorothioate linkage
  modified_base 98..100: mod_base = OTHER; note = phosphorothioate linkage

SEQ ID NO: 2687 - RNA, 103 nt, synthetic construct; identical to SEQ ID NO: 1700
  source 1..103: mol_type = other RNA
  modified_base 1: mod_base = OTHER; note = 2'-O-methyl ribonucleotide
  modified_base 2: mod_base = OTHER; note = 2'-O-methyl ribonucleotide
  modified_base 3: mod_base = OTHER; note = 2'-O-methyl ribonucleotide
  modified_base 21: mod_base = OTHER; note = 2'-O-methyl ribonucleotide
  modified_base 28: mod_base = OTHER; note = 2'-O-methyl ribonucleotide
  modified_base 29: mod_base = OTHER; note = 2'-O-methyl ribonucleotide
  modified_base 30: mod_base = OTHER; note = 2'-O-methyl ribonucleotide
  modified_base 31: mod_base = OTHER; note = 2'-O-methyl ribonucleotide
  modified_base 32: mod_base = OTHER; note = 2'-O-methyl ribonucleotide
  modified_base 34: mod_base = OTHER; note = 2'-O-methyl ribonucleotide
  modified_base 35: mod_base = OTHER; note = 2'-O-methyl ribonucleotide
  modified_base 36: mod_base = OTHER; note = 2'-O-methyl ribonucleotide
  modified_base 37: mod_base = OTHER; note = 2'-O-methyl ribonucleotide
  modified_base 38: mod_base = OTHER; note = 2'-O-methyl ribonucleotide
  modified_base 39: mod_base = OTHER; note = 2'-O-methyl ribonucleotide
  modified_base 40: mod_base = OTHER; note = 2'-O-methyl ribonucleotide
  modified_base 41: mod_base = OTHER; note = 2'-O-methyl ribonucleotide
  modified_base 42: mod_base = OTHER; note = 2'-O-methyl ribonucleotide
  modified_base 46: mod_base = OTHER; note = 2'-O-methyl ribonucleotide
  modified_base 48: mod_base = OTHER; note = 2'-O-methyl ribonucleotide
  modified_base 50: mod_base = OTHER; note = 2'-O-methyl ribonucleotide
  modified_base 52: mod_base = OTHER; note = 2'-O-methyl ribonucleotide
  modified_base 53: mod_base = OTHER; note = 2'-O-methyl ribonucleotide
  modified_base 54: mod_base = OTHER; note = 2'-O-methyl ribonucleotide
  modified_base 57: mod_base = OTHER; note = 2'-O-methyl ribonucleotide
  modified_base 61: mod_base = OTHER; note = 2'-O-methyl ribonucleotide
  modified_base 66: mod_base = OTHER; note = 2'-O-methyl ribonucleotide
  modified_base 67: mod_base = OTHER; note = 2'-O-methyl ribonucleotide
  modified_base 70: mod_base = OTHER; note = 2'-O-methyl ribonucleotide
  modified_base 71: mod_base = OTHER; note = 2'-O-methyl ribonucleotide
  modified_base 72: mod_base = OTHER; note = 2'-O-methyl ribonucleotide
  modified_base 73: mod_base = OTHER; note = 2'-O-methyl ribonucleotide
  modified_base 74: mod_base = OTHER; note = 2'-O-methyl ribonucleotide
  modified_base 75: mod_base = OTHER; note = 2'-O-methyl ribonucleotide
  modified_base 76: mod_base = OTHER; note = 2'-O-methyl ribonucleotide
  modified_base 77: mod_base = OTHER; note = 2'-O-methyl ribonucleotide
  modified_base 78: mod_base = OTHER; note = 2'-O-methyl ribonucleotide
  modified_base 79: mod_base = OTHER; note = 2'-O-methyl ribonucleotide
  modified_base 80: mod_base = OTHER; note = 2'-O-methyl ribonucleotide
  modified_base 82: mod_base = OTHER; note = 2'-O-methyl ribonucleotide
  modified_base 83: mod_base = OTHER; note = 2'-O-methyl ribonucleotide
  modified_base 84: mod_base = OTHER; note = 2'-O-methyl ribonucleotide
  modified_base 85: mod_base = OTHER; note = 2'-O-methyl ribonucleotide
  modified_base 86: mod_base = OTHER; note = 2'-O-methyl ribonucleotide
  modified_base 87: mod_base = OTHER; note = 2'-O-methyl ribonucleotide
  modified_base 89: mod_base = OTHER; note = 2'-O-methyl ribonucleotide
  modified_base 91: mod_base = OTHER; note = 2'-O-methyl ribonucleotide
  modified_base 92: mod_base = OTHER; note = 2'-O-methyl ribonucleotide
  modified_base 93: mod_base = OTHER; note = 2'-O-methyl ribonucleotide
  modified_base 94: mod_base = OTHER; note = 2'-O-methyl ribonucleotide
  modified_base 95: mod_base = OTHER; note = 2'-O-methyl ribonucleotide
  modified_base 96: mod_base = OTHER; note = 2'-O-methyl ribonucleotide
  modified_base 97: mod_base = OTHER; note = 2'-O-methyl ribonucleotide
  modified_base 98: mod_base = OTHER; note = 2'-O-methyl ribonucleotide
  modified_base 99: mod_base = OTHER; note = 2'-O-methyl ribonucleotide
  modified_base 100: mod_base = OTHER; note = 2'-O-methyl ribonucleotide
  modified_base 1..4: mod_base = OTHER; note = phosphorothioate linkage
  modified_base 25..26: mod_base = OTHER; note = phosphorothioate linkage
  modified_base 45..46: mod_base = OTHER; note = phosphorothioate linkage
  modified_base 98..100: mod_base = OTHER; note = phosphorothioate linkage

SEQ ID NO: 2688 - RNA, 103 nt, synthetic construct; identical to SEQ ID NO: 1700
  source 1..103: mol_type = other RNA
  modified_base 1: mod_base = OTHER; note = 2'-O-methyl ribonucleotide
  modified_base 2: mod_base = OTHER; note = 2'-O-methyl ribonucleotide
  modified_base 3: mod_base = OTHER; note = 2'-O-methyl ribonucleotide
  modified_base 21: mod_base = OTHER; note = 2'-O-methyl ribonucleotide
  modified_base 28: mod_base = OTHER; note = 2'-O-methyl ribonucleotide
  modified_base 29: mod_base = OTHER; note = 2'-O-methyl ribonucleotide
  modified_base 30: mod_base = OTHER; note = 2'-O-methyl ribonucleotide
  modified_base 31: mod_base = OTHER; note = 2'-O-methyl ribonucleotide
  modified_base 32: mod_base = OTHER; note = 2'-O-methyl ribonucleotide
  modified_base 34: mod_base = OTHER; note = 2'-O-methyl ribonucleotide
  modified_base 35: mod_base = OTHER; note = 2'-O-methyl ribonucleotide
  modified_base 36: mod_base = OTHER; note = 2'-O-methyl ribonucleotide
  modified_base 37: mod_base = OTHER; note = 2'-O-methyl ribonucleotide
  modified_base 38: mod_base = OTHER; note = 2'-O-methyl ribonucleotide
  modified_base 39: mod_base = OTHER; note = 2'-O-methyl ribonucleotide
  modified_base 40: mod_base = OTHER; note = 2'-O-methyl ribonucleotide
  modified_base 41: mod_base = OTHER; note = 2'-O-methyl ribonucleotide
  modified_base 42: mod_base = OTHER; note = 2'-O-methyl ribonucleotide
  modified_base 46: mod_base = OTHER; note = 2'-O-methyl ribonucleotide
  modified_base 48: mod_base = OTHER; note = 2'-O-methyl ribonucleotide
  modified_base 50: mod_base = OTHER; note = 2'-O-methyl ribonucleotide
  modified_base 52: mod_base = OTHER; note = 2'-O-methyl ribonucleotide
  modified_base 53: mod_base = OTHER; note = 2'-O-methyl ribonucleotide
  modified_base 54: mod_base = OTHER; note = 2'-O-methyl ribonucleotide
  modified_base 55: mod_base = OTHER; note = 2'-O-methyl ribonucleotide
  modified_base 56: mod_base = OTHER; note = 2'-O-methyl ribonucleotide
  modified_base 57: mod_base = OTHER; note = 2'-O-methyl ribonucleotide
  modified_base 60: mod_base = OTHER; note = 2'-O-methyl ribonucleotide
  modified_base 61: mod_base = OTHER; note = 2'-O-methyl ribonucleotide
  modified_base 66: mod_base = OTHER; note = 2'-O-methyl ribonucleotide
  modified_base 67: mod_base = OTHER; note = 2'-O-methyl ribonucleotide
  modified_base 70: mod_base = OTHER; note = 2'-O-methyl ribonucleotide
  modified_base 71: mod_base = OTHER; note = 2'-O-methyl ribonucleotide
  modified_base 72: mod_base = OTHER; note = 2'-O-methyl ribonucleotide
  modified_base 74: mod_base = OTHER; note = 2'-O-methyl ribonucleotide
  modified_base 75: mod_base = OTHER; note = 2'-O-methyl ribonucleotide
  modified_base 76: mod_base = OTHER; note = 2'-O-methyl ribonucleotide
  modified_base 77: mod_base = OTHER; note = 2'-O-methyl ribonucleotide
  modified_base 78: mod_base = OTHER; note = 2'-O-methyl ribonucleotide
  modified_base 79: mod_base = OTHER; note = 2'-O-methyl ribonucleotide
  modified_base 80: mod_base = OTHER; note = 2'-O-methyl ribonucleotide
  modified_base 82: mod_base = OTHER; note = 2'-O-methyl ribonucleotide
  modified_base 83: mod_base = OTHER; note = 2'-O-methyl ribonucleotide
  modified_base 84: mod_base = OTHER; note = 2'-O-methyl ribonucleotide
  modified_base 85: mod_base = OTHER; note = 2'-O-methyl ribonucleotide
  modified_base 86: mod_base = OTHER; note = 2'-O-methyl ribonucleotide
  modified_base 87: mod_base = OTHER; note = 2'-O-methyl ribonucleotide
  modified_base 89: mod_base = OTHER; note = 2'-O-methyl ribonucleotide
  modified_base 92: mod_base = OTHER; note = 2'-O-methyl ribonucleotide
  modified_base 93: mod_base = OTHER; note = 2'-O-methyl ribonucleotide
  modified_base 94: mod_base = OTHER; note = 2'-O-methyl ribonucleotide
  modified_base 95: mod_base = OTHER; note = 2'-O-methyl ribonucleotide
  modified_base 96: mod_base = OTHER; note = 2'-O-methyl ribonucleotide
  modified_base 97: mod_base = OTHER; note = 2'-O-methyl ribonucleotide
  modified_base 98: mod_base = OTHER; note = 2'-O-methyl ribonucleotide
  modified_base 99: mod_base = OTHER; note = 2'-O-methyl ribonucleotide
  modified_base 100: mod_base = OTHER; note = 2'-O-methyl ribonucleotide
  modified_base 1..4: mod_base = OTHER; note = phosphorothioate linkage
  modified_base 25..26: mod_base = OTHER; note = phosphorothioate linkage
  modified_base 45..46: mod_base = OTHER; note = phosphorothioate linkage
  modified_base 98..100: mod_base = OTHER; note = phosphorothioate linkage

SEQ ID NO: 2689 - RNA, 103 nt, synthetic construct; identical to SEQ ID NO: 1643
  source 1..103: mol_type = other RNA
  modified_base 1: mod_base = OTHER; note = 2'-O-methyl ribonucleotide
  modified_base 2: mod_base = OTHER; note = 2'-O-methyl ribonucleotide
  modified_base 3: mod_base = OTHER; note = 2'-O-methyl ribonucleotide
  modified_base 21: mod_base = OTHER; note = 2'-O-methyl ribonucleotide
  modified_base 28: mod_base = OTHER; note = 2'-O-methyl ribonucleotide
  modified_base 29: mod_base = OTHER; note = 2'-O-methyl ribonucleotide
  modified_base 30: mod_base = OTHER; note = 2'-O-methyl ribonucleotide
  modified_base 31: mod_base = OTHER; note = 2'-O-methyl ribonucleotide
  modified_base 32: mod_base = OTHER; note = 2'-O-methyl ribonucleotide
  modified_base 33: mod_base = OTHER; note = 2'-O-methyl ribonucleotide
  modified_base 34: mod_base = OTHER; note = 2'-O-methyl ribonucleotide
  modified_base 35: mod_base = OTHER; note = 2'-O-methyl ribonucleotide
  modified_base 36: mod_base = OTHER; note = 2'-O-methyl ribonucleotide
  modified_base 37: mod_base = OTHER; note = 2'-O-methyl ribonucleotide
  modified_base 38: mod_base = OTHER; note = 2'-O-methyl ribonucleotide
  modified_base 39: mod_base = OTHER; note = 2'-O-methyl ribonucleotide
  modified_base 40: mod_base = OTHER; note = 2'-O-methyl ribonucleotide
  modified_base 41: mod_base = OTHER; note = 2'-O-methyl ribonucleotide
  modified_base 42: mod_base = OTHER; note = 2'-O-methyl ribonucleotide
  modified_base 46: mod_base = OTHER; note = 2'-O-methyl ribonucleotide
  modified_base 48: mod_base = OTHER; note = 2'-O-methyl ribonucleotide
  modified_base 50: mod_base = OTHER; note = 2'-O-methyl ribonucleotide
  modified_base 52: mod_base = OTHER; note = 2'-O-methyl ribonucleotide
  modified_base 53: mod_base = OTHER; note = 2'-O-methyl ribonucleotide
  modified_base 54: mod_base = OTHER; note = 2'-O-methyl ribonucleotide
  modified_base 55: mod_base = OTHER; note = 2'-O-methyl ribonucleotide
  modified_base 56: mod_base = OTHER; note = 2'-O-methyl ribonucleotide
  modified_base 57: mod_base = OTHER; note = 2'-O-methyl ribonucleotide
  modified_base 60: mod_base = OTHER; note = 2'-O-methyl ribonucleotide
  modified_base 61: mod_base = OTHER; note = 2'-O-methyl ribonucleotide
  modified_base 66: mod_base = OTHER; note = 2'-O-methyl ribonucleotide
  modified_base 67: mod_base = OTHER; note = 2'-O-methyl ribonucleotide
  modified_base 70: mod_base = OTHER; note = 2'-O-methyl ribonucleotide
  modified_base 71: mod_base = OTHER; note = 2'-O-methyl ribonucleotide
  modified_base 72: mod_base = OTHER; note = 2'-O-methyl ribonucleotide
  modified_base 73: mod_base = OTHER; note = 2'-O-methyl ribonucleotide
  modified_base 74: mod_base = OTHER; note = 2'-O-methyl ribonucleotide
  modified_base 75: mod_base = OTHER; note = 2'-O-methyl ribonucleotide
  modified_base 76: mod_base = OTHER; note = 2'-O-methyl ribonucleotide
  modified_base 77: mod_base = OTHER; note = 2'-O-methyl ribonucleotide
  modified_base 78: mod_base = OTHER; note = 2'-O-methyl ribonucleotide
  modified_base 79: mod_base = OTHER; note = 2'-O-methyl ribonucleotide
  modified_base 80: mod_base = OTHER; note = 2'-O-methyl ribonucleotide
  modified_base 81: mod_base = OTHER; note = 2'-O-methyl ribonucleotide
  modified_base 83: mod_base = OTHER; note = 2'-O-methyl ribonucleotide
  modified_base 84: mod_base = OTHER; note = 2'-O-methyl ribonucleotide
  modified_base 85: mod_base = OTHER; note = 2'-O-methyl ribonucleotide
  modified_base 86: mod_base = OTHER; note = 2'-O-methyl ribonucleotide
  modified_base 87: mod_base = OTHER; note = 2'-O-methyl ribonucleotide
  modified_base 88: mod_base = OTHER; note = 2'-O-methyl ribonucleotide
  modified_base 89: mod_base = OTHER; note = 2'-O-methyl ribonucleotide
  modified_base 90: mod_base = OTHER; note = 2'-O-methyl ribonucleotide
  modified_base 91: mod_base = OTHER; note = 2'-O-methyl ribonucleotide
  modified_base 92: mod_base = OTHER; note = 2'-O-methyl ribonucleotide
  modified_base 93: mod_base = OTHER; note = 2'-O-methyl ribonucleotide
  modified_base 94: mod_base = OTHER; note = 2'-O-methyl ribonucleotide
  modified_base 95: mod_base = OTHER; note = 2'-O-methyl ribonucleotide
  modified_base 96: mod_base = OTHER; note = 2'-O-methyl ribonucleotide
  modified_base 97: mod_base = OTHER; note = 2'-O-methyl ribonucleotide
  modified_base 98: mod_base = OTHER; note = 2'-O-methyl ribonucleotide
  modified_base 99: mod_base = OTHER; note = 2'-O-methyl ribonucleotide
  modified_base 100: mod_base = OTHER; note = 2'-O-methyl ribonucleotide
  modified_base 1..4: mod_base = OTHER; note = phosphorothioate linkage
  modified_base 25..26: mod_base = OTHER; note = phosphorothioate linkage
  modified_base 64..65: mod_base = OTHER; note = phosphorothioate linkage
  modified_base 98..100: mod_base = OTHER; note = phosphorothioate linkage

SEQ ID NO: 2690 - RNA, 103 nt, synthetic construct; identical to SEQ ID NO: 1643
  source 1..103: mol_type = other RNA
  modified_base 1: mod_base = OTHER; note = 2'-O-methyl ribonucleotide
  modified_base 2: mod_base = OTHER; note = 2'-O-methyl ribonucleotide
  modified_base 3: mod_base = OTHER; note = 2'-O-methyl ribonucleotide
  modified_base 21: mod_base = OTHER; note = 2'-O-methyl ribonucleotide
  modified_base 28: mod_base = OTHER; note = 2'-O-methyl ribonucleotide
  modified_base 29: mod_base = OTHER; note = 2'-O-methyl ribonucleotide
  modified_base 30: mod_base = OTHER; note = 2'-O-methyl ribonucleotide
  modified_base 31: mod_base = OTHER; note = 2'-O-methyl ribonucleotide
  modified_base 32: mod_base = OTHER; note = 2'-O-methyl ribonucleotide
  modified_base 34: mod_base = OTHER; note = 2'-O-methyl ribonucleotide
  modified_base 35: mod_base = OTHER; note = 2'-O-methyl ribonucleotide
  modified_base 36: mod_base = OTHER; note = 2'-O-methyl ribonucleotide
  modified_base 37: mod_base = OTHER; note = 2'-O-methyl ribonucleotide
  modified_base 38: mod_base = OTHER; note = 2'-O-methyl ribonucleotide
  modified_base 39: mod_base = OTHER; note = 2'-O-methyl ribonucleotide
  modified_base 40: mod_base = OTHER; note = 2'-O-methyl ribonucleotide
  modified_base 41: mod_base = OTHER; note = 2'-O-methyl ribonucleotide
  modified_base 42: mod_base = OTHER; note = 2'-O-methyl ribonucleotide
  modified_base 46: mod_base = OTHER; note = 2'-O-methyl ribonucleotide
  modified_base 48: mod_base = OTHER; note = 2'-O-methyl ribonucleotide
  modified_base 50: mod_base = OTHER; note = 2'-O-methyl ribonucleotide
  modified_base 52: mod_base = OTHER; note = 2'-O-methyl ribonucleotide
  modified_base 53: mod_base = OTHER; note = 2'-O-methyl ribonucleotide
  modified_base 54: mod_base = OTHER; note = 2'-O-methyl ribonucleotide
  modified_base 55: mod_base = OTHER; note = 2'-O-methyl ribonucleotide
  modified_base 56: mod_base = OTHER; note = 2'-O-methyl ribonucleotide
  modified_base 57: mod_base = OTHER; note = 2'-O-methyl ribonucleotide
  modified_base 60: mod_base = OTHER; note = 2'-O-methyl ribonucleotide
  modified_base 61: mod_base = OTHER; note = 2'-O-methyl ribonucleotide
  modified_base 66: mod_base = OTHER; note = 2'-O-methyl ribonucleotide
  modified_base 67: mod_base = OTHER; note = 2'-O-methyl ribonucleotide
  modified_base 70: mod_base = OTHER; note = 2'-O-methyl ribonucleotide
  modified_base 71: mod_base = OTHER; note = 2'-O-methyl ribonucleotide
  modified_base 72: mod_base = OTHER; note = 2'-O-methyl ribonucleotide
  modified_base 74: mod_base = OTHER; note = 2'-O-methyl ribonucleotide
  modified_base 75: mod_base = OTHER; note = 2'-O-methyl ribonucleotide
  modified_base 76: mod_base = OTHER; note = 2'-O-methyl ribonucleotide
  modified_base 77: mod_base = OTHER; note = 2'-O-methyl ribonucleotide
  modified_base 78: mod_base = OTHER; note = 2'-O-methyl ribonucleotide
  modified_base 79: mod_base = OTHER; note = 2'-O-methyl ribonucleotide
  modified_base 80: mod_base = OTHER; note = 2'-O-methyl ribonucleotide
  modified_base 81: mod_base = OTHER; note = 2'-O-methyl ribonucleotide
  modified_base 83: mod_base = OTHER; note = 2'-O-methyl ribonucleotide
  modified_base 84: mod_base = OTHER; note = 2'-O-methyl ribonucleotide
  modified_base 85: mod_base = OTHER; note = 2'-O-methyl ribonucleotide
  modified_base 86: mod_base = OTHER; note = 2'-O-methyl ribonucleotide
  modified_base 87: mod_base = OTHER; note = 2'-O-methyl ribonucleotide
  modified_base 88: mod_base = OTHER; note = 2'-O-methyl ribonucleotide
  modified_base 89: mod_base = OTHER; note = 2'-O-methyl ribonucleotide
  modified_base 90: mod_base = OTHER; note = 2'-O-methyl ribonucleotide
  modified_base 91: mod_base = OTHER; note = 2'-O-methyl ribonucleotide
  modified_base 92: mod_base = OTHER; note = 2'-O-methyl ribonucleotide
  modified_base 93: mod_base = OTHER; note = 2'-O-methyl ribonucleotide
  modified_base 94: mod_base = OTHER; note = 2'-O-methyl ribonucleotide
  modified_base 95: mod_base = OTHER; note = 2'-O-methyl ribonucleotide
  modified_base 96: mod_base = OTHER; note = 2'-O-methyl ribonucleotide
  modified_base 97: mod_base = OTHER; note = 2'-O-methyl ribonucleotide
  modified_base 98: mod_base = OTHER; note = 2'-O-methyl ribonucleotide
  modified_base 99: mod_base = OTHER; note = 2'-O-methyl ribonucleotide
  modified_base 100: mod_base = OTHER; note = 2'-O-methyl ribonucleotide
  modified_base 1..4: mod_base = OTHER; note = phosphorothioate linkage
  modified_base 25..26: mod_base = OTHER; note = phosphorothioate linkage
  modified_base 64..65: mod_base = OTHER; note = phosphorothioate linkage
  modified_base 98..100: mod_base = OTHER; note = phosphorothioate linkage

SEQ ID NO: 2691 - RNA, 103 nt, synthetic construct; identical to SEQ ID NO: 1699
  source 1..103: mol_type = other RNA
  modified_base 1: mod_base = OTHER; note = 2'-O-methyl ribonucleotide
  modified_base 2: mod_base = OTHER; note = 2'-O-methyl ribonucleotide
  modified_base 3: mod_base = OTHER; note = 2'-O-methyl ribonucleotide
  modified_base 21: mod_base = OTHER; note = 2'-O-methyl ribonucleotide
  modified_base 28: mod_base = OTHER; note = 2'-O-methyl ribonucleotide
  modified_base 29: mod_base = OTHER; note = 2'-O-methyl ribonucleotide
  modified_base 30: mod_base = OTHER; note = 2'-O-methyl ribonucleotide
  modified_base 31: mod_base = OTHER; note = 2'-O-methyl ribonucleotide
  modified_base 32: mod_base = OTHER; note = 2'-O-methyl ribonucleotide
  modified_base 33: mod_base = OTHER; note = 2'-O-methyl ribonucleotide
  modified_base 34: mod_base = OTHER; note = 2'-O-methyl ribonucleotide
  modified_base 35: mod_base = OTHER; note = 2'-O-methyl ribonucleotide
  modified_base 36: mod_base = OTHER; note = 2'-O-methyl ribonucleotide
  modified_base 37: mod_base = OTHER; note = 2'-O-methyl ribonucleotide
  modified_base 38: mod_base = OTHER; note = 2'-O-methyl ribonucleotide
  modified_base 39: mod_base = OTHER; note = 2'-O-methyl ribonucleotide
  modified_base 40: mod_base = OTHER; note = 2'-O-methyl ribonucleotide
  modified_base 41: mod_base = OTHER; note = 2'-O-methyl ribonucleotide
  modified_base 42: mod_base = OTHER; note = 2'-O-methyl ribonucleotide
  modified_base 46: mod_base = OTHER; note = 2'-O-methyl ribonucleotide
  modified_base 48: mod_base = OTHER; note = 2'-O-methyl ribonucleotide
  modified_base 50: mod_base = OTHER; note = 2'-O-methyl ribonucleotide
  modified_base 52: mod_base = OTHER; note = 2'-O-methyl ribonucleotide
  modified_base 53: mod_base = OTHER; note = 2'-O-methyl ribonucleotide
  modified_base 54: mod_base = OTHER; note = 2'-O-methyl ribonucleotide
  modified_base 55: mod_base = OTHER; note = 2'-O-methyl ribonucleotide
  modified_base 56: mod_base = OTHER; note = 2'-O-methyl ribonucleotide
  modified_base 57: mod_base = OTHER; note = 2'-O-methyl ribonucleotide
  modified_base 60: mod_base = OTHER; note = 2'-O-methyl ribonucleotide
  modified_base 61: mod_base = OTHER; note = 2'-O-methyl ribonucleotide
  modified_base 66: mod_base = OTHER; note = 2'-O-methyl ribonucleotide
  modified_base 67: mod_base = OTHER; note = 2'-O-methyl ribonucleotide
  modified_base 70: mod_base = OTHER; note = 2'-O-methyl ribonucleotide
  modified_base 71: mod_base = OTHER; note = 2'-O-methyl ribonucleotide
  modified_base 72: mod_base = OTHER; note = 2'-O-methyl ribonucleotide
  modified_base 73: mod_base = OTHER; note = 2'-O-methyl ribonucleotide
  modified_base 74: mod_base = OTHER; note = 2'-O-methyl ribonucleotide
  modified_base 75: mod_base = OTHER; note = 2'-O-methyl ribonucleotide
  modified_base 76: mod_base = OTHER; note = 2'-O-methyl ribonucleotide
  modified_base 77: mod_base = OTHER; note = 2'-O-methyl ribonucleotide
  modified_base 78: mod_base = OTHER; note = 2'-O-methyl ribonucleotide
  modified_base 79: mod_base = OTHER; note = 2'-O-methyl ribonucleotide
  modified_base 80: mod_base = OTHER; note = 2'-O-methyl ribonucleotide
  modified_base 81: mod_base = OTHER; note = 2'-O-methyl ribonucleotide
  modified_base 83: mod_base = OTHER; note = 2'-O-methyl ribonucleotide
  modified_base 84: mod_base = OTHER; note = 2'-O-methyl ribonucleotide
  modified_base 85: mod_base = OTHER; note = 2'-O-methyl ribonucleotide
  modified_base 86: mod_base = OTHER; note = 2'-O-methyl ribonucleotide
  modified_base 87: mod_base = OTHER; note = 2'-O-methyl ribonucleotide
  modified_base 88: mod_base = OTHER; note = 2'-O-methyl ribonucleotide
  modified_base 89: mod_base = OTHER; note = 2'-O-methyl ribonucleotide
  modified_base 90: mod_base = OTHER; note = 2'-O-methyl ribonucleotide
  modified_base 91: mod_base = OTHER; note = 2'-O-methyl ribonucleotide
  modified_base 92: mod_base = OTHER; note = 2'-O-methyl ribonucleotide
  modified_base 93: mod_base = OTHER; note = 2'-O-methyl ribonucleotide
  modified_base 94: mod_base = OTHER; note = 2'-O-methyl ribonucleotide
  modified_base 95: mod_base = OTHER; note = 2'-O-methyl ribonucleotide
  modified_base 96: mod_base = OTHER; note = 2'-O-methyl ribonucleotide
  modified_base 97: mod_base = OTHER; note = 2'-O-methyl ribonucleotide
  modified_base 98: mod_base = OTHER; note = 2'-O-methyl ribonucleotide
  modified_base 99: mod_base = OTHER; note = 2'-O-methyl ribonucleotide
  modified_base 100: mod_base = OTHER; note = 2'-O-methyl ribonucleotide
  modified_base 1..4: mod_base = OTHER; note = phosphorothioate linkage
  modified_base 25..26: mod_base = OTHER; note = phosphorothioate linkage
  modified_base 64..65: mod_base = OTHER; note = phosphorothioate linkage
  modified_base 98..100: mod_base = OTHER; note = phosphorothioate linkage

SEQ ID NO: 2692 - RNA, 103 nt, synthetic construct; identical to SEQ ID NO: 1699
  source 1..103: mol_type = other RNA
  modified_base 1: mod_base = OTHER; note = 2'-O-methyl ribonucleotide
  modified_base 2: mod_base = OTHER; note = 2'-O-methyl ribonucleotide
  modified_base 3: mod_base = OTHER; note = 2'-O-methyl ribonucleotide
  modified_base 21: mod_base = OTHER; note = 2'-O-methyl ribonucleotide
  modified_base 28: mod_base = OTHER; note = 2'-O-methyl ribonucleotide
  modified_base 29: mod_base = OTHER; note = 2'-O-methyl ribonucleotide
  modified_base 30: mod_base = OTHER; note = 2'-O-methyl ribonucleotide
  modified_base 31: mod_base = OTHER; note = 2'-O-methyl ribonucleotide
  modified_base 32: mod_base = OTHER; note = 2'-O-methyl ribonucleotide
  modified_base 34: mod_base = OTHER; note = 2'-O-methyl ribonucleotide
  modified_base 35: mod_base = OTHER; note = 2'-O-methyl ribonucleotide
  modified_base 36: mod_base = OTHER; note = 2'-O-methyl ribonucleotide
  modified_base 37: mod_base = OTHER; note = 2'-O-methyl ribonucleotide
  modified_base 38: mod_base = OTHER; note = 2'-O-methyl ribonucleotide
  modified_base 39: mod_base = OTHER; note = 2'-O-methyl ribonucleotide
  modified_base 40: mod_base = OTHER; note = 2'-O-methyl ribonucleotide
  modified_base 41: mod_base = OTHER; note = 2'-O-methyl ribonucleotide
  modified_base 42: mod_base = OTHER; note = 2'-O-methyl ribonucleotide
  modified_base 46: mod_base = OTHER; note = 2'-O-methyl ribonucleotide
  modified_base 48: mod_base = OTHER; note = 2'-O-methyl ribonucleotide
  modified_base 50: mod_base = OTHER; note = 2'-O-methyl ribonucleotide
  modified_base 52: mod_base = OTHER; note = 2'-O-methyl ribonucleotide
  modified_base 53: mod_base = OTHER; note = 2'-O-methyl ribonucleotide
  modified_base 54: mod_base = OTHER; note = 2'-O-methyl ribonucleotide
  modified_base 55: mod_base = OTHER; note = 2'-O-methyl ribonucleotide
  modified_base 56: mod_base = OTHER; note = 2'-O-methyl ribonucleotide
  modified_base 57: mod_base = OTHER; note = 2'-O-methyl ribonucleotide
  modified_base 60: mod_base = OTHER; note = 2'-O-methyl ribonucleotide
  modified_base 61: mod_base = OTHER; note = 2'-O-methyl ribonucleotide
  modified_base 66: mod_base = OTHER; note = 2'-O-methyl ribonucleotide
  modified_base 67: mod_base = OTHER; note = 2'-O-methyl ribonucleotide
  modified_base 70: mod_base = OTHER; note = 2'-O-methyl ribonucleotide
  modified_base 71: mod_base = OTHER; note = 2'-O-methyl ribonucleotide
  modified_base 72: mod_base = OTHER; note = 2'-O-methyl ribonucleotide
  modified_base 74: mod_base = OTHER; note = 2'-O-methyl ribonucleotide
  modified_base 75: mod_base = OTHER; note = 2'-O-methyl ribonucleotide
  modified_base 76: mod_base = OTHER; note = 2'-O-methyl ribonucleotide
  modified_base 77: mod_base = OTHER; note = 2'-O-methyl ribonucleotide
  modified_base 78: mod_base = OTHER; note = 2'-O-methyl ribonucleotide
  modified_base 79: mod_base = OTHER; note = 2'-O-methyl ribonucleotide
  modified_base 80: mod_base = OTHER; note = 2'-O-methyl ribonucleotide
  modified_base 81: mod_base = OTHER; note = 2'-O-methyl ribonucleotide
  modified_base 83: mod_base = OTHER; note = 2'-O-methyl ribonucleotide
  modified_base 84: mod_base = OTHER; note = 2'-O-methyl ribonucleotide
  modified_base 85: mod_base = OTHER; note = 2'-O-methyl ribonucleotide
  modified_base 86: mod_base = OTHER; note = 2'-O-methyl ribonucleotide
  modified_base 87: mod_base = OTHER; note = 2'-O-methyl ribonucleotide
  modified_base 88: mod_base = OTHER; note = 2'-O-methyl ribonucleotide
  modified_base 89: mod_base = OTHER; note = 2'-O-methyl ribonucleotide
  modified_base 90: mod_base = OTHER; note = 2'-O-methyl ribonucleotide
  modified_base 91: mod_base = OTHER; note = 2'-O-methyl ribonucleotide
  modified_base 92: mod_base = OTHER; note = 2'-O-methyl ribonucleotide
  modified_base 93: mod_base = OTHER; note = 2'-O-methyl ribonucleotide
  modified_base 94: mod_base = OTHER; note = 2'-O-methyl ribonucleotide
  modified_base 95: mod_base = OTHER; note = 2'-O-methyl ribonucleotide
  modified_base 96: mod_base = OTHER; note = 2'-O-methyl ribonucleotide
  modified_base 97: mod_base = OTHER; note = 2'-O-methyl ribonucleotide
  modified_base 98: mod_base = OTHER; note = 2'-O-methyl ribonucleotide
  modified_base 99: mod_base = OTHER; note = 2'-O-methyl ribonucleotide
  modified_base 100: mod_base = OTHER; note = 2'-O-methyl ribonucleotide
  modified_base 1..4: mod_base = OTHER; note = phosphorothioate linkage
  modified_base 25..26: mod_base = OTHER; note = phosphorothioate linkage
  modified_base 64..65: mod_base = OTHER; note = phosphorothioate linkage
  modified_base 98..100: mod_base = OTHER; note = phosphorothioate linkage

SEQ ID NO: 2693 - RNA, 103 nt, synthetic construct; identical to SEQ ID NO: 1700
  source 1..103: mol_type = other RNA
  modified_base 1: mod_base = OTHER; note = 2'-O-methyl ribonucleotide
  modified_base 2: mod_base = OTHER; note = 2'-O-methyl ribonucleotide
  modified_base 3: mod_base = OTHER; note = 2'-O-methyl ribonucleotide
  modified_base 21: mod_base = OTHER; note = 2'-O-methyl ribonucleotide
  modified_base 28: mod_base = OTHER; note = 2'-O-methyl ribonucleotide
  modified_base 29: mod_base = OTHER; note = 2'-O-methyl ribonucleotide
  modified_base 30: mod_base = OTHER; note = 2'-O-methyl ribonucleotide
  modified_base 31: mod_base = OTHER; note = 2'-O-methyl ribonucleotide
  modified_base 32: mod_base = OTHER; note = 2'-O-methyl ribonucleotide
  modified_base 33: mod_base = OTHER; note = 2'-O-methyl ribonucleotide
  modified_base 34: mod_base = OTHER; note = 2'-O-methyl ribonucleotide
  modified_base 35: mod_base = OTHER; note = 2'-O-methyl ribonucleotide
  modified_base 36: mod_base = OTHER; note = 2'-O-methyl ribonucleotide
  modified_base 37: mod_base = OTHER; note = 2'-O-methyl ribonucleotide
  modified_base 38: mod_base = OTHER; note = 2'-O-methyl ribonucleotide
  modified_base 39: mod_base = OTHER; note = 2'-O-methyl ribonucleotide
  modified_base 40: mod_base = OTHER; note = 2'-O-methyl ribonucleotide
  modified_base 41: mod_base = OTHER; note = 2'-O-methyl ribonucleotide
  modified_base 42: mod_base = OTHER; note = 2'-O-methyl ribonucleotide
  modified_base 46: mod_base = OTHER; note = 2'-O-methyl ribonucleotide
  modified_base 48: mod_base = OTHER; note = 2'-O-methyl ribonucleotide
  modified_base 50: mod_base = OTHER; note = 2'-O-methyl ribonucleotide
  modified_base 52: mod_base = OTHER; note = 2'-O-methyl ribonucleotide
  modified_base 53: mod_base = OTHER; note = 2'-O-methyl ribonucleotide
  modified_base 54: mod_base = OTHER; note = 2'-O-methyl ribonucleotide
  modified_base 57: mod_base = OTHER; note = 2'-O-methyl ribonucleotide
  modified_base 61: mod_base = OTHER; note = 2'-O-methyl ribonucleotide
  modified_base 66: mod_base = OTHER; note = 2'-O-methyl ribonucleotide
  modified_base 67: mod_base = OTHER; note = 2'-O-methyl ribonucleotide
  modified_base 70: mod_base = OTHER; note = 2'-O-methyl ribonucleotide
  modified_base 71: mod_base = OTHER; note = 2'-O-methyl ribonucleotide
  modified_base 72: mod_base = OTHER; note = 2'-O-methyl ribonucleotide
  modified_base 74: mod_base = OTHER; note = 2'-O-methyl ribonucleotide
  modified_base 75: mod_base = OTHER; note = 2'-O-methyl ribonucleotide
  modified_base 76: mod_base = OTHER; note = 2'-O-methyl ribonucleotide
  modified_base 77: mod_base = OTHER; note = 2'-O-methyl ribonucleotide
  modified_base 78: mod_base = OTHER; note = 2'-O-methyl ribonucleotide
  modified_base 79: mod_base = OTHER; note = 2'-O-methyl ribonucleotide
  modified_base 80: mod_base = OTHER; note = 2'-O-methyl ribonucleotide
  modified_base 82: mod_base = OTHER; note = 2'-O-methyl ribonucleotide
  modified_base 83: mod_base = OTHER; note = 2'-O-methyl ribonucleotide
  modified_base 84: mod_base = OTHER; note = 2'-O-methyl ribonucleotide
  modified_base 85: mod_base = OTHER; note = 2'-O-methyl ribonucleotide
  modified_base 86: mod_base = OTHER; note = 2'-O-methyl ribonucleotide
  modified_base 87: mod_base = OTHER; note = 2'-O-methyl ribonucleotide
  modified_base 89: mod_base = OTHER; note = 2'-O-methyl ribonucleotide
  modified_base 92: mod_base = OTHER; note = 2'-O-methyl ribonucleotide
  modified_base 93: mod_base = OTHER; note = 2'-O-methyl ribonucleotide
  modified_base 94: mod_base = OTHER; note = 2'-O-methyl ribonucleotide
  modified_base 95: mod_base = OTHER; note = 2'-O-methyl ribonucleotide
  modified_base 96: mod_base = OTHER; note = 2'-O-methyl ribonucleotide
  modified_base 97: mod_base = OTHER; note = 2'-O-methyl ribonucleotide
  modified_base 98: mod_base = OTHER; note = 2'-O-methyl ribonucleotide
  modified_base 99: mod_base = OTHER; note = 2'-O-methyl ribonucleotide
  modified_base 100: mod_base = OTHER; note = 2'-O-methyl ribonucleotide
  modified_base 1..4: mod_base = OTHER; note = phosphorothioate linkage
  modified_base 25..26: mod_base = OTHER; note = phosphorothioate linkage
  modified_base 64..65: mod_base = OTHER; note = phosphorothioate linkage
  modified_base 98..100: mod_base = OTHER; note = phosphorothioate linkage

SEQ ID NO: 2694 - RNA, 103 nt, synthetic construct; identical to SEQ ID NO: 1700
  source 1..103: mol_type = other RNA
  modified_base 1: mod_base = OTHER; note = 2'-O-methyl ribonucleotide
  modified_base 2: mod_base = OTHER; note = 2'-O-methyl ribonucleotide
  modified_base 3: mod_base = OTHER; note = 2'-O-methyl ribonucleotide
  modified_base 21: mod_base = OTHER; note = 2'-O-methyl ribonucleotide
  modified_base 28: mod_base = OTHER; note = 2'-O-methyl ribonucleotide
  modified_base 29: mod_base = OTHER; note = 2'-O-methyl ribonucleotide
  modified_base 30: mod_base = OTHER; note = 2'-O-methyl ribonucleotide
  modified_base 31: mod_base = OTHER; note = 2'-O-methyl ribonucleotide
  modified_base 32: mod_base = OTHER; note = 2'-O-methyl ribonucleotide
  modified_base 33: mod_base = OTHER; note = 2'-O-methyl ribonucleotide
  modified_base 34: mod_base = OTHER; note = 2'-O-methyl ribonucleotide
  modified_base 35: mod_base = OTHER; note = 2'-O-methyl ribonucleotide
  modified_base 36: mod_base = OTHER; note = 2'-O-methyl ribonucleotide
  modified_base 37: mod_base = OTHER; note = 2'-O-methyl ribonucleotide
  modified_base 38: mod_base = OTHER; note = 2'-O-methyl ribonucleotide
  modified_base 39: mod_base = OTHER; note = 2'-O-methyl ribonucleotide
  modified_base 40: mod_base = OTHER; note = 2'-O-methyl ribonucleotide
  modified_base 41: mod_base = OTHER; note = 2'-O-methyl ribonucleotide
  modified_base 42: mod_base = OTHER; note = 2'-O-methyl ribonucleotide
  modified_base 46: mod_base = OTHER; note = 2'-O-methyl ribonucleotide
  modified_base 48: mod_base = OTHER; note = 2'-O-methyl ribonucleotide
  modified_base 50: mod_base = OTHER; note = 2'-O-methyl ribonucleotide
  modified_base 52: mod_base = OTHER; note = 2'-O-methyl ribonucleotide
  modified_base 53: mod_base = OTHER; note = 2'-O-methyl ribonucleotide
  modified_base 54: mod_base = OTHER; note = 2'-O-methyl ribonucleotide
  modified_base 55: mod_base = OTHER; note = 2'-O-methyl ribonucleotide
  modified_base 56: mod_base = OTHER; note = 2'-O-methyl ribonucleotide
  modified_base 57: mod_base = OTHER; note = 2'-O-methyl ribonucleotide
  modified_base 60: mod_base = OTHER; note = 2'-O-methyl ribonucleotide
  modified_base 61: mod_base = OTHER; note = 2'-O-methyl ribonucleotide
  modified_base 66: mod_base = OTHER; note = 2'-O-methyl ribonucleotide
  modified_base 67: mod_base = OTHER; note = 2'-O-methyl ribonucleotide
  modified_base 70: mod_base = OTHER; note = 2'-O-methyl ribonucleotide
  modified_base 71: mod_base = OTHER; note = 2'-O-methyl ribonucleotide
  modified_base 72: mod_base = OTHER; note = 2'-O-methyl ribonucleotide
  modified_base 74: mod_base = OTHER; note = 2'-O-methyl ribonucleotide
  modified_base 75: mod_base = OTHER; note = 2'-O-methyl ribonucleotide
  modified_base 76: mod_base = OTHER; note = 2'-O-methyl ribonucleotide
  modified_base 77: mod_base = OTHER; note = 2'-O-methyl ribonucleotide
  modified_base 78: mod_base = OTHER; note = 2'-O-methyl ribonucleotide
  modified_base 79: mod_base = OTHER; note = 2'-O-methyl ribonucleotide
  modified_base 80: mod_base = OTHER; note = 2'-O-methyl ribonucleotide
  modified_base 82: mod_base = OTHER; note = 2'-O-methyl ribonucleotide
  modified_base 83: mod_base = OTHER; note = 2'-O-methyl ribonucleotide
  modified_base 84: mod_base = OTHER; note = 2'-O-methyl ribonucleotide
  modified_base 85: mod_base = OTHER; note = 2'-O-methyl ribonucleotide
  modified_base 86: mod_base = OTHER; note = 2'-O-methyl ribonucleotide
  modified_base 87: mod_base = OTHER; note = 2'-O-methyl ribonucleotide
  modified_base 89: mod_base = OTHER; note = 2'-O-methyl ribonucleotide
  modified_base 92: mod_base = OTHER; note = 2'-O-methyl ribonucleotide
  modified_base 93: mod_base = OTHER; note = 2'-O-methyl ribonucleotide
  modified_base 94: mod_base = OTHER; note = 2'-O-methyl ribonucleotide
  modified_base 95: mod_base = OTHER; note = 2'-O-methyl ribonucleotide
  modified_base 96: mod_base = OTHER; note = 2'-O-methyl ribonucleotide
  modified_base 97: mod_base = OTHER; note = 2'-O-methyl ribonucleotide
  modified_base 98: mod_base = OTHER; note = 2'-O-methyl ribonucleotide
  modified_base 99: mod_base = OTHER; note = 2'-O-methyl ribonucleotide
  modified_base 100: mod_base = OTHER; note = 2'-O-methyl ribonucleotide
  modified_base 1..4: mod_base = OTHER; note = phosphorothioate linkage
  modified_base 25..26: mod_base = OTHER; note = phosphorothioate linkage
  modified_base 64..65: mod_base = OTHER; note = phosphorothioate linkage
  modified_base 98..100: mod_base = OTHER; note = phosphorothioate linkage

SEQ ID NO: 2695 - RNA, 103 nt, synthetic construct; identical to SEQ ID NO: 1700
  source 1..103: mol_type = other RNA
  modified_base 1: mod_base = OTHER; note = 2'-O-methyl ribonucleotide
  modified_base 2: mod_base = OTHER; note = 2'-O-methyl ribonucleotide
  modified_base 3: mod_base = OTHER; note = 2'-O-methyl ribonucleotide
  modified_base 21: mod_base = OTHER; note = 2'-O-methyl ribonucleotide
  modified_base 28: mod_base = OTHER; note = 2'-O-methyl ribonucleotide
  modified_base 29: mod_base = OTHER; note = 2'-O-methyl ribonucleotide
  modified_base 30: mod_base = OTHER; note = 2'-O-methyl ribonucleotide
  modified_base 31: mod_base = OTHER; note = 2'-O-methyl ribonucleotide
  modified_base 32: mod_base = OTHER; note = 2'-O-methyl ribonucleotide
  modified_base 33: mod_base = OTHER; note = 2'-O-methyl ribonucleotide
  modified_base 34: mod_base = OTHER; note = 2'-O-methyl ribonucleotide
  modified_base 35: mod_base = OTHER; note = 2'-O-methyl ribonucleotide
  modified_base 36: mod_base = OTHER; note = 2'-O-methyl ribonucleotide
  modified_base 37: mod_base = OTHER; note = 2'-O-methyl ribonucleotide
  modified_base 38: mod_base = OTHER; note = 2'-O-methyl ribonucleotide
  modified_base 39: mod_base = OTHER; note = 2'-O-methyl ribonucleotide
  modified_base 40: mod_base = OTHER; note = 2'-O-methyl ribonucleotide
  modified_base 41: mod_base = OTHER; note = 2'-O-methyl ribonucleotide
  modified_base 42: mod_base = OTHER; note = 2'-O-methyl ribonucleotide
  modified_base 46: mod_base = OTHER; note = 2'-O-methyl ribonucleotide
  modified_base 48: mod_base = OTHER; note = 2'-O-methyl ribonucleotide
  modified_base 50: mod_base = OTHER; note = 2'-O-methyl ribonucleotide
  modified_base 52: mod_base = OTHER; note = 2'-O-methyl ribonucleotide
  modified_base 53: mod_base = OTHER; note = 2'-O-methyl ribonucleotide
  modified_base 54: mod_base = OTHER; note = 2'-O-methyl ribonucleotide
  modified_base 57: mod_base = OTHER; note = 2'-O-methyl ribonucleotide
  modified_base 61: mod_base = OTHER; note = 2'-O-methyl ribonucleotide
  modified_base 66: mod_base = OTHER; note = 2'-O-methyl ribonucleotide
  modified_base 67: mod_base = OTHER; note = 2'-O-methyl ribonucleotide
  modified_base 70: mod_base = OTHER; note = 2'-O-methyl ribonucleotide
  modified_base 71: mod_base = OTHER; note = 2'-O-methyl ribonucleotide
  modified_base 72: mod_base = OTHER; note = 2'-O-methyl ribonucleotide
  modified_base 73: mod_base = OTHER; note = 2'-O-methyl ribonucleotide
  modified_base 74: mod_base = OTHER; note = 2'-O-methyl ribonucleotide
  modified_base 75: mod_base = OTHER; note = 2'-O-methyl ribonucleotide
  modified_base 76: mod_base = OTHER; note = 2'-O-methyl ribonucleotide
  modified_base 77: mod_base = OTHER; note = 2'-O-methyl ribonucleotide
  modified_base 78: mod_base = OTHER; note = 2'-O-methyl ribonucleotide
  modified_base 79: mod_base = OTHER; note = 2'-O-methyl ribonucleotide
  modified_base 80: mod_base = OTHER; note = 2'-O-methyl ribonucleotide
  modified_base 82: mod_base = OTHER; note = 2'-O-methyl ribonucleotide
  modified_base 83: mod_base = OTHER; note = 2'-O-methyl ribonucleotide
  modified_base 84: mod_base = OTHER; note = 2'-O-methyl ribonucleotide
  modified_base 85: mod_base = OTHER; note = 2'-O-methyl ribonucleotide
  modified_base 86: mod_base = OTHER; note = 2'-O-methyl ribonucleotide
  modified_base 87: mod_base = OTHER; note = 2'-O-methyl ribonucleotide
  modified_base 89: mod_base = OTHER; note = 2'-O-methyl ribonucleotide
  modified_base 92: mod_base = OTHER; note = 2'-O-methyl ribonucleotide
  modified_base 93: mod_base = OTHER; note = 2'-O-methyl ribonucleotide
  modified_base 94: mod_base = OTHER; note = 2'-O-methyl ribonucleotide
  modified_base 95: mod_base = OTHER; note = 2'-O-methyl ribonucleotide
  modified_base 96: mod_base = OTHER; note = 2'-O-methyl ribonucleotide
  modified_base 97: mod_base = OTHER; note = 2'-O-methyl ribonucleotide
  modified_base 98: mod_base = OTHER; note = 2'-O-methyl ribonucleotide
  modified_base 99: mod_base = OTHER; note = 2'-O-methyl ribonucleotide
  modified_base 100: mod_base = OTHER; note = 2'-O-methyl ribonucleotide
  modified_base 1..4: mod_base = OTHER; note = phosphorothioate linkage
  modified_base 25..26: mod_base = OTHER; note = phosphorothioate linkage
  modified_base 64..65: mod_base = OTHER; note = phosphorothioate linkage
  modified_base 98..100: mod_base = OTHER; note = phosphorothioate linkage

SEQ ID NO: 2696 - RNA, 103 nt, synthetic construct; identical to SEQ ID NO: 1700
  source 1..103: mol_type = other RNA
  modified_base 1: mod_base = OTHER; note = 2'-O-methyl ribonucleotide
  modified_base 2: mod_base = OTHER; note = 2'-O-methyl ribonucleotide
  modified_base 3: mod_base = OTHER; note = 2'-O-methyl ribonucleotide
  modified_base 21: mod_base = OTHER; note = 2'-O-methyl ribonucleotide
  modified_base 28: mod_base = OTHER; note = 2'-O-methyl ribonucleotide
  modified_base 29: mod_base = OTHER; note = 2'-O-methyl ribonucleotide
  modified_base 30: mod_base = OTHER; note = 2'-O-methyl ribonucleotide
  modified_base 31: mod_base = OTHER; note = 2'-O-methyl ribonucleotide
  modified_base 32: mod_base = OTHER; note = 2'-O-methyl ribonucleotide
  modified_base 33: mod_base = OTHER; note = 2'-O-methyl ribonucleotide
  modified_base 34: mod_base = OTHER; note = 2'-O-methyl ribonucleotide
  modified_base 35: mod_base = OTHER; note = 2'-O-methyl ribonucleotide
  modified_base 36: mod_base = OTHER; note = 2'-O-methyl ribonucleotide
  modified_base 37: mod_base = OTHER; note = 2'-O-methyl ribonucleotide
  modified_base 38: mod_base = OTHER; note = 2'-O-methyl ribonucleotide
  modified_base 39: mod_base = OTHER; note = 2'-O-methyl ribonucleotide
  modified_base 40: mod_base = OTHER; note = 2'-O-methyl ribonucleotide
  modified_base 41: mod_base = OTHER; note = 2'-O-methyl ribonucleotide
  modified_base 42: mod_base = OTHER; note = 2'-O-methyl ribonucleotide
  modified_base 46: mod_base = OTHER; note = 2'-O-methyl ribonucleotide
  modified_base 48: mod_base = OTHER; note = 2'-O-methyl ribonucleotide
  modified_base 50: mod_base = OTHER; note = 2'-O-methyl ribonucleotide
  modified_base 52: mod_base = OTHER; note = 2'-O-methyl ribonucleotide
  modified_base 53: mod_base = OTHER; note = 2'-O-methyl ribonucleotide
  modified_base 54: mod_base = OTHER; note = 2'-O-methyl ribonucleotide
  modified_base 57: mod_base = OTHER; note = 2'-O-methyl ribonucleotide
  modified_base 61: mod_base = OTHER; note = 2'-O-methyl ribonucleotide
  modified_base 66: mod_base = OTHER; note = 2'-O-methyl ribonucleotide
  modified_base 67: mod_base = OTHER; note = 2'-O-methyl ribonucleotide
  modified_base 70: mod_base = OTHER; note = 2'-O-methyl ribonucleotide
  modified_base 71: mod_base = OTHER; note = 2'-O-methyl ribonucleotide
  modified_base 72: mod_base = OTHER; note = 2'-O-methyl ribonucleotide
  modified_base 73: mod_base = OTHER; note = 2'-O-methyl ribonucleotide
  modified_base 74: mod_base = OTHER; note = 2'-O-methyl ribonucleotide
  modified_base 75: mod_base = OTHER; note = 2'-O-methyl ribonucleotide
  modified_base 76: mod_base = OTHER; note = 2'-O-methyl ribonucleotide
  modified_base 77: mod_base = OTHER; note = 2'-O-methyl ribonucleotide
  modified_base 78: mod_base = OTHER; note = 2'-O-methyl ribonucleotide
  modified_base 79: mod_base = OTHER; note = 2'-O-methyl ribonucleotide
  modified_base 80: mod_base = OTHER; note = 2'-O-methyl ribonucleotide
  modified_base 82: mod_base = OTHER; note = 2'-O-methyl ribonucleotide
  modified_base 83: mod_base = OTHER; note = 2'-O-methyl ribonucleotide
  modified_base 84: mod_base = OTHER; note = 2'-O-methyl ribonucleotide
  modified_base 85: mod_base = OTHER; note = 2'-O-methyl ribonucleotide
  modified_base 86: mod_base = OTHER; note = 2'-O-methyl ribonucleotide
  modified_base 87: mod_base = OTHER; note = 2'-O-methyl ribonucleotide
  modified_base 89: mod_base = OTHER; note = 2'-O-methyl ribonucleotide
  modified_base 91: mod_base = OTHER; note = 2'-O-methyl ribonucleotide
  modified_base 92: mod_base = OTHER; note = 2'-O-methyl ribonucleotide
  modified_base 93: mod_base = OTHER; note = 2'-O-methyl ribonucleotide
  modified_base 94: mod_base = OTHER; note = 2'-O-methyl ribonucleotide
  modified_base 95: mod_base = OTHER; note = 2'-O-methyl ribonucleotide
  modified_base 96: mod_base = OTHER; note = 2'-O-methyl ribonucleotide
  modified_base 97: mod_base = OTHER; note = 2'-O-methyl ribonucleotide
  modified_base 98: mod_base = OTHER; note = 2'-O-methyl ribonucleotide
  modified_base 99: mod_base = OTHER; note = 2'-O-methyl ribonucleotide
  modified_base 100: mod_base = OTHER; note = 2'-O-methyl ribonucleotide
  modified_base 1..4: mod_base = OTHER; note = phosphorothioate linkage
  modified_base 25..26: mod_base = OTHER; note = phosphorothioate linkage
  modified_base 64..65: mod_base = OTHER; note = phosphorothioate linkage
  modified_base 98..100: mod_base = OTHER; note = phosphorothioate linkage

SEQ ID NO: 2697 - RNA, 103 nt, synthetic construct; identical to SEQ ID NO: 1700
  source 1..103: mol_type = other RNA
  modified_base 1: mod_base = OTHER; note = 2'-O-methyl ribonucleotide
  modified_base 2: mod_base = OTHER; note = 2'-O-methyl ribonucleotide
  modified_base 3: mod_base = OTHER; note = 2'-O-methyl ribonucleotide
  modified_base 21: mod_base = OTHER; note = 2'-O-methyl ribonucleotide
  modified_base 28: mod_base = OTHER; note = 2'-O-methyl ribonucleotide
  modified_base 29: mod_base = OTHER; note = 2'-O-methyl ribonucleotide
  modified_base 30: mod_base = OTHER; note = 2'-O-methyl ribonucleotide
  modified_base 31: mod_base = OTHER; note = 2'-O-methyl ribonucleotide
  modified_base 32: mod_base = OTHER; note = 2'-O-methyl ribonucleotide
  modified_base 34: mod_base = OTHER; note = 2'-O-methyl ribonucleotide
  modified_base 35: mod_base = OTHER; note = 2'-O-methyl ribonucleotide
  modified_base 36: mod_base = OTHER; note = 2'-O-methyl ribonucleotide
  modified_base 37: mod_base = OTHER; note = 2'-O-methyl ribonucleotide
  modified_base 38: mod_base = OTHER; note = 2'-O-methyl ribonucleotide
  modified_base 39: mod_base = OTHER; note = 2'-O-methyl ribonucleotide
  modified_base 40: mod_base = OTHER; note = 2'-O-methyl ribonucleotide
  modified_base 41: mod_base = OTHER; note = 2'-O-methyl ribonucleotide
  modified_base 42: mod_base = OTHER; note = 2'-O-methyl ribonucleotide
  modified_base 46: mod_base = OTHER; note = 2'-O-methyl ribonucleotide
  modified_base 48: mod_base = OTHER; note = 2'-O-methyl ribonucleotide
  modified_base 50: mod_base = OTHER; note = 2'-O-methyl ribonucleotide
  modified_base 52: mod_base = OTHER; note = 2'-O-methyl ribonucleotide
  modified_base 53: mod_base = OTHER; note = 2'-O-methyl ribonucleotide
  modified_base 54: mod_base = OTHER; note = 2'-O-methyl ribonucleotide
  modified_base 57: mod_base = OTHER; note = 2'-O-methyl ribonucleotide
  modified_base 61: mod_base = OTHER; note = 2'-O-methyl ribonucleotide
  modified_base 66: mod_base = OTHER; note = 2'-O-methyl ribonucleotide
  modified_base 67: mod_base = OTHER; note = 2'-O-methyl ribonucleotide
  modified_base 70: mod_base = OTHER; note = 2'-O-methyl ribonucleotide
  modified_base 71: mod_base = OTHER; note = 2'-O-methyl ribonucleotide
  modified_base 72: mod_base = OTHER; note = 2'-O-methyl ribonucleotide
  modified_base 73: mod_base = OTHER; note = 2'-O-methyl ribonucleotide
  modified_base 74: mod_base = OTHER; note = 2'-O-methyl ribonucleotide
  modified_base 75: mod_base = OTHER; note = 2'-O-methyl ribonucleotide
  modified_base 76: mod_base = OTHER; note = 2'-O-methyl ribonucleotide
  modified_base 77: mod_base = OTHER; note = 2'-O-methyl ribonucleotide
  modified_base 78: mod_base = OTHER; note = 2'-O-methyl ribonucleotide
  modified_base 79: mod_base = OTHER; note = 2'-O-methyl ribonucleotide
  modified_base 80: mod_base = OTHER; note = 2'-O-methyl ribonucleotide
  modified_base 82: mod_base = OTHER; note = 2'-O-methyl ribonucleotide
  modified_base 83: mod_base = OTHER; note = 2'-O-methyl ribonucleotide
  modified_base 84: mod_base = OTHER; note = 2'-O-methyl ribonucleotide
  modified_base 85: mod_base = OTHER; note = 2'-O-methyl ribonucleotide
  modified_base 86: mod_base = OTHER; note = 2'-O-methyl ribonucleotide
  modified_base 87: mod_base = OTHER; note = 2'-O-methyl ribonucleotide
  modified_base 89: mod_base = OTHER; note = 2'-O-methyl ribonucleotide
  modified_base 92: mod_base = OTHER; note = 2'-O-methyl ribonucleotide
  modified_base 93: mod_base = OTHER; note = 2'-O-methyl ribonucleotide
  modified_base 94: mod_base = OTHER; note = 2'-O-methyl ribonucleotide
  modified_base 95: mod_base = OTHER; note = 2'-O-methyl ribonucleotide
  modified_base 96: mod_base = OTHER; note = 2'-O-methyl ribonucleotide
  modified_base 97: mod_base = OTHER; note = 2'-O-methyl ribonucleotide
  modified_base 98: mod_base = OTHER; note = 2'-O-methyl ribonucleotide
  modified_base 99: mod_base = OTHER; note = 2'-O-methyl ribonucleotide
  modified_base 100: mod_base = OTHER; note = 2'-O-methyl ribonucleotide
  modified_base 1..4: mod_base = OTHER; note = phosphorothioate linkage
  modified_base 25..26: mod_base = OTHER; note = phosphorothioate linkage
  modified_base 64..65: mod_base = OTHER; note = phosphorothioate linkage
  modified_base 98..100: mod_base = OTHER; note = phosphorothioate linkage

SEQ ID NO: 2698 - RNA, 103 nt, synthetic construct; identical to SEQ ID NO: 1700
  source 1..103: mol_type = other RNA
  modified_base 1: mod_base = OTHER; note = 2'-O-methyl ribonucleotide
  modified_base 2: mod_base = OTHER; note = 2'-O-methyl ribonucleotide
  modified_base 3: mod_base = OTHER; note = 2'-O-methyl ribonucleotide
  modified_base 21: mod_base = OTHER; note = 2'-O-methyl ribonucleotide
  modified_base 28: mod_base = OTHER; note = 2'-O-methyl ribonucleotide
  modified_base 29: mod_base = OTHER; note = 2'-O-methyl ribonucleotide
  modified_base 30: mod_base = OTHER; note = 2'-O-methyl ribonucleotide
  modified_base 31: mod_base = OTHER; note = 2'-O-methyl ribonucleotide
  modified_base 32: mod_base = OTHER; note = 2'-O-methyl ribonucleotide
  modified_base 34: mod_base = OTHER; note = 2'-O-methyl ribonucleotide
  modified_base 35: mod_base = OTHER; note = 2'-O-methyl ribonucleotide
  modified_base 36: mod_base = OTHER; note = 2'-O-methyl ribonucleotide
  modified_base 37: mod_base = OTHER; note = 2'-O-methyl ribonucleotide
  modified_base 38: mod_base = OTHER; note = 2'-O-methyl ribonucleotide
  modified_base 39: mod_base = OTHER; note = 2'-O-methyl ribonucleotide
  modified_base 40: mod_base = OTHER; note = 2'-O-methyl ribonucleotide
  modified_base 41: mod_base = OTHER; note = 2'-O-methyl ribonucleotide
  modified_base 42: mod_base = OTHER; note = 2'-O-methyl ribonucleotide
  modified_base 46: mod_base = OTHER; note = 2'-O-methyl ribonucleotide
  modified_base 48: mod_base = OTHER; note = 2'-O-methyl ribonucleotide
  modified_base 50: mod_base = OTHER; note = 2'-O-methyl ribonucleotide
  modified_base 52: mod_base = OTHER; note = 2'-O-methyl ribonucleotide
  modified_base 53: mod_base = OTHER; note = 2'-O-methyl ribonucleotide
  modified_base 54: mod_base = OTHER; note = 2'-O-methyl ribonucleotide
  modified_base 57: mod_base = OTHER; note = 2'-O-methyl ribonucleotide
  modified_base 61: mod_base = OTHER; note = 2'-O-methyl ribonucleotide
  modified_base 66: mod_base = OTHER; note = 2'-O-methyl ribonucleotide
  modified_base 67: mod_base = OTHER; note = 2'-O-methyl ribonucleotide
  modified_base 70: mod_base = OTHER; note = 2'-O-methyl ribonucleotide
  modified_base 71: mod_base = OTHER; note = 2'-O-methyl ribonucleotide
  modified_base 72: mod_base = OTHER; note = 2'-O-methyl ribonucleotide
  modified_base 73: mod_base = OTHER; note = 2'-O-methyl ribonucleotide
  modified_base 74: mod_base = OTHER; note = 2'-O-methyl ribonucleotide
  modified_base 75: mod_base = OTHER; note = 2'-O-methyl ribonucleotide
  modified_base 76: mod_base = OTHER; note = 2'-O-methyl ribonucleotide
  modified_base 77: mod_base = OTHER; note = 2'-O-methyl ribonucleotide
  modified_base 78: mod_base = OTHER; note = 2'-O-methyl ribonucleotide
  modified_base 79: mod_base = OTHER; note = 2'-O-methyl ribonucleotide
  modified_base 80: mod_base = OTHER; note = 2'-O-methyl ribonucleotide
  modified_base 82: mod_base = OTHER; note = 2'-O-methyl ribonucleotide
  modified_base 83: mod_base = OTHER; note = 2'-O-methyl ribonucleotide
  modified_base 84: mod_base = OTHER; note = 2'-O-methyl ribonucleotide
  modified_base 85: mod_base = OTHER; note = 2'-O-methyl ribonucleotide
  modified_base 86: mod_base = OTHER; note = 2'-O-methyl ribonucleotide
  modified_base 87: mod_base = OTHER; note = 2'-O-methyl ribonucleotide
  modified_base 89: mod_base = OTHER; note = 2'-O-methyl ribonucleotide
  modified_base 91: mod_base = OTHER; note = 2'-O-methyl ribonucleotide
  modified_base 92: mod_base = OTHER; note = 2'-O-methyl ribonucleotide
  modified_base 93: mod_base = OTHER; note = 2'-O-methyl ribonucleotide
  modified_base 94: mod_base = OTHER; note = 2'-O-methyl ribonucleotide
  modified_base 95: mod_base = OTHER; note = 2'-O-methyl ribonucleotide
  modified_base 96: mod_base = OTHER; note = 2'-O-methyl ribonucleotide
  modified_base 97: mod_base = OTHER; note = 2'-O-methyl ribonucleotide
  modified_base 98: mod_base = OTHER; note = 2'-O-methyl ribonucleotide
  modified_base 99: mod_base = OTHER; note = 2'-O-methyl ribonucleotide
  modified_base 100: mod_base = OTHER; note = 2'-O-methyl ribonucleotide
  modified_base 1..4: mod_base = OTHER; note = phosphorothioate linkage
  modified_base 25..26: mod_base = OTHER; note = phosphorothioate linkage
  modified_base 64..65: mod_base = OTHER; note = phosphorothioate linkage
  modified_base 98..100: mod_base = OTHER; note = phosphorothioate linkage

SEQ ID NO: 2699 - RNA, 103 nt, synthetic construct; identical to SEQ ID NO: 1700
  source 1..103: mol_type = other RNA
  modified_base 1: mod_base = OTHER; note = 2'-O-methyl ribonucleotide
  modified_base 2: mod_base = OTHER; note = 2'-O-methyl ribonucleotide
  modified_base 3: mod_base = OTHER; note = 2'-O-methyl ribonucleotide
  modified_base 21: mod_base = OTHER; note = 2'-O-methyl ribonucleotide
  modified_base 28: mod_base = OTHER; note = 2'-O-methyl ribonucleotide
  modified_base 29: mod_base = OTHER; note = 2'-O-methyl ribonucleotide
  modified_base 30: mod_base = OTHER; note = 2'-O-methyl ribonucleotide
  modified_base 31: mod_base = OTHER; note = 2'-O-methyl ribonucleotide
  modified_base 32: mod_base = OTHER; note = 2'-O-methyl ribonucleotide
  modified_base 34: mod_base = OTHER; note = 2'-O-methyl ribonucleotide
  modified_base 35: mod_base = OTHER; note = 2'-O-methyl ribonucleotide
  modified_base 36: mod_base = OTHER; note = 2'-O-methyl ribonucleotide
  modified_base 37: mod_base = OTHER; note = 2'-O-methyl ribonucleotide
  modified_base 38: mod_base = OTHER; note = 2'-O-methyl ribonucleotide
  modified_base 39: mod_base = OTHER; note = 2'-O-methyl ribonucleotide
  modified_base 40: mod_base = OTHER; note = 2'-O-methyl ribonucleotide
  modified_base 41: mod_base = OTHER; note = 2'-O-methyl ribonucleotide
  modified_base 42: mod_base = OTHER; note = 2'-O-methyl ribonucleotide
  modified_base 46: mod_base = OTHER; note = 2'-O-methyl ribonucleotide
  modified_base 48: mod_base = OTHER; note = 2'-O-methyl ribonucleotide
  modified_base 50: mod_base = OTHER; note = 2'-O-methyl ribonucleotide
  modified_base 52: mod_base = OTHER; note = 2'-O-methyl ribonucleotide
  modified_base 53: mod_base = OTHER; note = 2'-O-methyl ribonucleotide
  modified_base 54: mod_base = OTHER; note = 2'-O-methyl ribonucleotide
  modified_base 55: mod_base = OTHER; note = 2'-O-methyl ribonucleotide
  modified_base 56: mod_base = OTHER; note = 2'-O-methyl ribonucleotide
  modified_base 57: mod_base = OTHER; note = 2'-O-methyl ribonucleotide
  modified_base 60: mod_base = OTHER; note = 2'-O-methyl ribonucleotide
  modified_base 61: mod_base = OTHER; note = 2'-O-methyl ribonucleotide
  modified_base 66: mod_base = OTHER; note = 2'-O-methyl ribonucleotide
  modified_base 67: mod_base = OTHER; note = 2'-O-methyl ribonucleotide
  modified_base 70: mod_base = OTHER; note = 2'-O-methyl ribonucleotide
  modified_base 71: mod_base = OTHER; note = 2'-O-methyl ribonucleotide
  modified_base 72: mod_base = OTHER; note = 2'-O-methyl ribonucleotide
  modified_base 74: mod_base = OTHER; note = 2'-O-methyl ribonucleotide
  modified_base 75: mod_base = OTHER; note = 2'-O-methyl ribonucleotide
  modified_base 76: mod_base = OTHER; note = 2'-O-methyl ribonucleotide
  modified_base 77: mod_base = OTHER; note = 2'-O-methyl ribonucleotide
  modified_base 78: mod_base = OTHER; note = 2'-O-methyl ribonucleotide
  modified_base 79: mod_base = OTHER; note = 2'-O-methyl ribonucleotide
  modified_base 80: mod_base = OTHER; note = 2'-O-methyl ribonucleotide
  modified_base 82: mod_base = OTHER; note = 2'-O-methyl ribonucleotide
  modified_base 83: mod_base = OTHER; note = 2'-O-methyl ribonucleotide
  modified_base 84: mod_base = OTHER; note = 2'-O-methyl ribonucleotide
  modified_base 85: mod_base = OTHER; note = 2'-O-methyl ribonucleotide
  modified_base 86: mod_base = OTHER; note = 2'-O-methyl ribonucleotide
  modified_base 87: mod_base = OTHER; note = 2'-O-methyl ribonucleotide
  modified_base 89: mod_base = OTHER; note = 2'-O-methyl ribonucleotide
  modified_base 92: mod_base = OTHER; note = 2'-O-methyl ribonucleotide
  modified_base 93: mod_base = OTHER; note = 2'-O-methyl ribonucleotide
  modified_base 94: mod_base = OTHER; note = 2'-O-methyl ribonucleotide
  modified_base 95: mod_base = OTHER; note = 2'-O-methyl ribonucleotide
  modified_base 96: mod_base = OTHER; note = 2'-O-methyl ribonucleotide
  modified_base 97: mod_base = OTHER; note = 2'-O-methyl ribonucleotide
  modified_base 98: mod_base = OTHER; note = 2'-O-methyl ribonucleotide
  modified_base 99: mod_base = OTHER; note = 2'-O-methyl ribonucleotide
  modified_base 100: mod_base = OTHER; note = 2'-O-methyl ribonucleotide
  modified_base 1..4: mod_base = OTHER; note = phosphorothioate linkage
  modified_base 25..26: mod_base = OTHER; note = phosphorothioate linkage
  modified_base 64..65: mod_base = OTHER; note = phosphorothioate linkage
  modified_base 98..100: mod_base = OTHER; note = phosphorothioate linkage

SEQ ID NO: 2700 - RNA, 103 nt, synthetic construct; identical to SEQ ID NO: 1643
  source 1..103: mol_type = other RNA
  modified_base 1: mod_base = OTHER; note = 2'-O-methyl ribonucleotide
  modified_base 2: mod_base = OTHER; note = 2'-O-methyl ribonucleotide
  modified_base 3: mod_base = OTHER; note = 2'-O-methyl ribonucleotide
  modified_base 21: mod_base = OTHER; note = 2'-O-methyl ribonucleotide
  modified_base 28: mod_base = OTHER; note = 2'-O-methyl ribonucleotide
  modified_base 29: mod_base = OTHER; note = 2'-O-methyl ribonucleotide
  modified_base 30: mod_base = OTHER; note = 2'-O-methyl ribonucleotide
  modified_base 31: mod_base = OTHER; note = 2'-O-methyl ribonucleotide
  modified_base 32: mod_base = OTHER; note = 2'-O-methyl ribonucleotide
  modified_base 33: mod_base = OTHER; note = 2'-O-methyl ribonucleotide
  modified_base 34: mod_base = OTHER; note = 2'-O-methyl ribonucleotide
  modified_base 35: mod_base = OTHER; note = 2'-O-methyl ribonucleotide
  modified_base 36: mod_base = OTHER; note = 2'-O-methyl ribonucleotide
  modified_base 37: mod_base = OTHER; note = 2'-O-methyl ribonucleotide
  modified_base 38: mod_base = OTHER; note = 2'-O-methyl ribonucleotide
  modified_base 39: mod_base = OTHER; note = 2'-O-methyl ribonucleotide
  modified_base 40: mod_base = OTHER; note = 2'-O-methyl ribonucleotide
  modified_base 41: mod_base = OTHER; note = 2'-O-methyl ribonucleotide
  modified_base 42: mod_base = OTHER; note = 2'-O-methyl ribonucleotide
  modified_base 46: mod_base = OTHER; note = 2'-O-methyl ribonucleotide
  modified_base 48: mod_base = OTHER; note = 2'-O-methyl ribonucleotide
  modified_base 50: mod_base = OTHER; note = 2'-O-methyl ribonucleotide
  modified_base 52: mod_base = OTHER; note = 2'-O-methyl ribonucleotide
  modified_base 53: mod_base = OTHER; note = 2'-O-methyl ribonucleotide
  modified_base 54: mod_base = OTHER; note = 2'-O-methyl ribonucleotide
  modified_base 55: mod_base = OTHER; note = 2'-O-methyl ribonucleotide
  modified_base 56: mod_base = OTHER; note = 2'-O-methyl ribonucleotide
  modified_base 57: mod_base = OTHER; note = 2'-O-methyl ribonucleotide
  modified_base 60: mod_base = OTHER; note = 2'-O-methyl ribonucleotide
  modified_base 61: mod_base = OTHER; note = 2'-O-methyl ribonucleotide
  modified_base 66: mod_base = OTHER; note = 2'-O-methyl ribonucleotide
  modified_base 67: mod_base = OTHER; note = 2'-O-methyl ribonucleotide
  modified_base 70: mod_base = OTHER; note = 2'-O-methyl ribonucleotide
  modified_base 71: mod_base = OTHER; note = 2'-O-methyl ribonucleotide
  modified_base 72: mod_base = OTHER; note = 2'-O-methyl ribonucleotide
  modified_base 73: mod_base = OTHER; note = 2'-O-methyl ribonucleotide
  modified_base 74: mod_base = OTHER; note = 2'-O-methyl ribonucleotide
  modified_base 75: mod_base = OTHER; note = 2'-O-methyl ribonucleotide
  modified_base 76: mod_base = OTHER; note = 2'-O-methyl ribonucleotide
  modified_base 77: mod_base = OTHER; note = 2'-O-methyl ribonucleotide
  modified_base 78: mod_base = OTHER; note = 2'-O-methyl ribonucleotide
  modified_base 79: mod_base = OTHER; note = 2'-O-methyl ribonucleotide
  modified_base 80: mod_base = OTHER; note = 2'-O-methyl ribonucleotide
  modified_base 81: mod_base = OTHER; note = 2'-O-methyl ribonucleotide
  modified_base 83: mod_base = OTHER; note = 2'-O-methyl ribonucleotide
  modified_base 84: mod_base = OTHER; note = 2'-O-methyl ribonucleotide
  modified_base 85: mod_base = OTHER; note = 2'-O-methyl ribonucleotide
  modified_base 86: mod_base = OTHER; note = 2'-O-methyl ribonucleotide
  modified_base 87: mod_base = OTHER; note = 2'-O-methyl ribonucleotide
  modified_base 88: mod_base = OTHER; note = 2'-O-methyl ribonucleotide
  modified_base 89: mod_base = OTHER; note = 2'-O-methyl ribonucleotide
  modified_base 90: mod_base = OTHER; note = 2'-O-methyl ribonucleotide
  modified_base 91: mod_base = OTHER; note = 2'-O-methyl ribonucleotide
  modified_base 92: mod_base = OTHER; note = 2'-O-methyl ribonucleotide
  modified_base 93: mod_base = OTHER; note = 2'-O-methyl ribonucleotide
  modified_base 94: mod_base = OTHER; note = 2'-O-methyl ribonucleotide
  modified_base 95: mod_base = OTHER; note = 2'-O-methyl ribonucleotide
  modified_base 96: mod_base = OTHER; note = 2'-O-methyl ribonucleotide
  modified_base 97: mod_base = OTHER; note = 2'-O-methyl ribonucleotide
  modified_base 98: mod_base = OTHER; note = 2'-O-methyl ribonucleotide
  modified_base 99: mod_base = OTHER; note = 2'-O-methyl ribonucleotide
  modified_base 100: mod_base = OTHER; note = 2'-O-methyl ribonucleotide
  modified_base 1..4: mod_base = OTHER; note = phosphorothioate linkage
  modified_base 25..26: mod_base = OTHER; note = phosphorothioate linkage
  modified_base 45..46: mod_base = OTHER; note = phosphorothioate linkage
  modified_base 64..65: mod_base = OTHER; note = phosphorothioate linkage
  modified_base 98..100: mod_base = OTHER; note = phosphorothioate linkage

SEQ ID NO: 2701 - RNA, 103 nt, synthetic construct; identical to SEQ ID NO: 1643
  source 1..103: mol_type = other RNA
  modified_base 1: mod_base = OTHER; note = 2'-O-methyl ribonucleotide
  modified_base 2: mod_base = OTHER; note = 2'-O-methyl ribonucleotide
  modified_base 3: mod_base = OTHER; note = 2'-O-methyl ribonucleotide
  modified_base 21: mod_base = OTHER; note = 2'-O-methyl ribonucleotide
  modified_base 28: mod_base = OTHER; note = 2'-O-methyl ribonucleotide
  modified_base 29: mod_base = OTHER; note = 2'-O-methyl ribonucleotide
  modified_base 30: mod_base = OTHER; note = 2'-O-methyl ribonucleotide
  modified_base 31: mod_base = OTHER; note = 2'-O-methyl ribonucleotide
  modified_base 32: mod_base = OTHER; note = 2'-O-methyl ribonucleotide
  modified_base 34: mod_base = OTHER; note = 2'-O-methyl ribonucleotide
  modified_base 35: mod_base = OTHER; note = 2'-O-methyl ribonucleotide
  modified_base 36: mod_base = OTHER; note = 2'-O-methyl ribonucleotide
  modified_base 37: mod_base = OTHER; note = 2'-O-methyl ribonucleotide
  modified_base 38: mod_base = OTHER; note = 2'-O-methyl ribonucleotide
  modified_base 39: mod_base = OTHER; note = 2'-O-methyl ribonucleotide
  modified_base 40: mod_base = OTHER; note = 2'-O-methyl ribonucleotide
  modified_base 41: mod_base = OTHER; note = 2'-O-methyl ribonucleotide
  modified_base 42: mod_base = OTHER; note = 2'-O-methyl ribonucleotide
  modified_base 46: mod_base = OTHER; note = 2'-O-methyl ribonucleotide
  modified_base 48: mod_base = OTHER; note = 2'-O-methyl ribonucleotide
  modified_base 50: mod_base = OTHER; note = 2'-O-methyl ribonucleotide
  modified_base 52: mod_base = OTHER; note = 2'-O-methyl ribonucleotide
  modified_base 53: mod_base = OTHER; note = 2'-O-methyl ribonucleotide
  modified_base 54: mod_base = OTHER; note = 2'-O-methyl ribonucleotide
  modified_base 55: mod_base = OTHER; note = 2'-O-methyl ribonucleotide
  modified_base 56: mod_base = OTHER; note = 2'-O-methyl ribonucleotide
  modified_base 57: mod_base = OTHER; note = 2'-O-methyl ribonucleotide
  modified_base 60: mod_base = OTHER; note = 2'-O-methyl ribonucleotide
  modified_base 61: mod_base = OTHER; note = 2'-O-methyl ribonucleotide
  modified_base 66: mod_base = OTHER; note = 2'-O-methyl ribonucleotide
  modified_base 67: mod_base = OTHER; note = 2'-O-methyl ribonucleotide
  modified_base 70: mod_base = OTHER; note = 2'-O-methyl ribonucleotide
  modified_base 71: mod_base = OTHER; note = 2'-O-methyl ribonucleotide
  modified_base 72: mod_base = OTHER; note = 2'-O-methyl ribonucleotide
  modified_base 74: mod_base = OTHER; note = 2'-O-methyl ribonucleotide
  modified_base 75: mod_base = OTHER; note = 2'-O-methyl ribonucleotide
  modified_base 76: mod_base = OTHER; note = 2'-O-methyl ribonucleotide
  modified_base 77: mod_base = OTHER; note = 2'-O-methyl ribonucleotide
  modified_base 78: mod_base = OTHER; note = 2'-O-methyl ribonucleotide
  modified_base 79: mod_base = OTHER; note = 2'-O-methyl ribonucleotide
  modified_base 80: mod_base = OTHER; note = 2'-O-methyl ribonucleotide
  modified_base 81: mod_base = OTHER; note = 2'-O-methyl ribonucleotide
  modified_base 83: mod_base = OTHER; note = 2'-O-methyl ribonucleotide
  modified_base 84: mod_base = OTHER; note = 2'-O-methyl ribonucleotide
  modified_base 85: mod_base = OTHER; note = 2'-O-methyl ribonucleotide
  modified_base 86: mod_base = OTHER; note = 2'-O-methyl ribonucleotide
  modified_base 87: mod_base = OTHER; note = 2'-O-methyl ribonucleotide
  modified_base 88: mod_base = OTHER; note = 2'-O-methyl ribonucleotide
  modified_base 89: mod_base = OTHER; note = 2'-O-methyl ribonucleotide
  modified_base 90: mod_base = OTHER; note = 2'-O-methyl ribonucleotide
  modified_base 91: mod_base = OTHER; note = 2'-O-methyl ribonucleotide
  modified_base 92: mod_base = OTHER; note = 2'-O-methyl ribonucleotide
  modified_base 93: mod_base = OTHER; note = 2'-O-methyl ribonucleotide
  modified_base 94: mod_base = OTHER; note = 2'-O-methyl ribonucleotide
  modified_base 95: mod_base = OTHER; note = 2'-O-methyl ribonucleotide
  modified_base 96: mod_base = OTHER; note = 2'-O-methyl ribonucleotide
  modified_base 97: mod_base = OTHER; note = 2'-O-methyl ribonucleotide
  modified_base 98: mod_base = OTHER; note = 2'-O-methyl ribonucleotide
  modified_base 99: mod_base = OTHER; note = 2'-O-methyl ribonucleotide
  modified_base 100: mod_base = OTHER; note = 2'-O-methyl ribonucleotide
  modified_base 1..4: mod_base = OTHER; note = phosphorothioate linkage
  modified_base 25..26: mod_base = OTHER; note = phosphorothioate linkage
  modified_base 45..46: mod_base = OTHER; note = phosphorothioate linkage
  modified_base 64..65: mod_base = OTHER; note = phosphorothioate linkage
  modified_base 98..100: mod_base = OTHER; note = phosphorothioate linkage

SEQ ID NO: 2702 - RNA, 103 nt, synthetic construct; identical to SEQ ID NO: 1699
  source 1..103: mol_type = other RNA
  modified_base 1: mod_base = OTHER; note = 2'-O-methyl ribonucleotide
  modified_base 2: mod_base = OTHER; note = 2'-O-methyl ribonucleotide
  modified_base 3: mod_base = OTHER; note = 2'-O-methyl ribonucleotide
  modified_base 21: mod_base = OTHER; note = 2'-O-methyl ribonucleotide
  modified_base 28: mod_base = OTHER; note = 2'-O-methyl ribonucleotide
  modified_base 29: mod_base = OTHER; note = 2'-O-methyl ribonucleotide
  modified_base 30: mod_base = OTHER; note = 2'-O-methyl ribonucleotide
  modified_base 31: mod_base = OTHER; note = 2'-O-methyl ribonucleotide
  modified_base 32: mod_base = OTHER; note = 2'-O-methyl ribonucleotide
  modified_base 33: mod_base = OTHER; note = 2'-O-methyl ribonucleotide
  modified_base 34: mod_base = OTHER; note = 2'-O-methyl ribonucleotide
  modified_base 35: mod_base = OTHER; note = 2'-O-methyl ribonucleotide
  modified_base 36: mod_base = OTHER; note = 2'-O-methyl ribonucleotide
  modified_base 37: mod_base = OTHER; note = 2'-O-methyl ribonucleotide
  modified_base 38: mod_base = OTHER; note = 2'-O-methyl ribonucleotide
  modified_base 39: mod_base = OTHER; note = 2'-O-methyl ribonucleotide
  modified_base 40: mod_base = OTHER; note = 2'-O-methyl ribonucleotide
  modified_base 41: mod_base = OTHER; note = 2'-O-methyl ribonucleotide
  modified_base 42: mod_base = OTHER; note = 2'-O-methyl ribonucleotide
  modified_base 46: mod_base = OTHER; note = 2'-O-methyl ribonucleotide
  modified_base 48: mod_base = OTHER; note = 2'-O-methyl ribonucleotide
  modified_base 50: mod_base = OTHER; note = 2'-O-methyl ribonucleotide
  modified_base 52: mod_base = OTHER; note = 2'-O-methyl ribonucleotide
  modified_base 53: mod_base = OTHER; note = 2'-O-methyl ribonucleotide
  modified_base 54: mod_base = OTHER; note = 2'-O-methyl ribonucleotide
  modified_base 55: mod_base = OTHER; note = 2'-O-methyl ribonucleotide
  modified_base 56: mod_base = OTHER; note = 2'-O-methyl ribonucleotide
  modified_base 57: mod_base = OTHER; note = 2'-O-methyl ribonucleotide
  modified_base 60: mod_base = OTHER; note = 2'-O-methyl ribonucleotide
  modified_base 61: mod_base = OTHER; note = 2'-O-methyl ribonucleotide
  modified_base 66: mod_base = OTHER; note = 2'-O-methyl ribonucleotide
  modified_base 67: mod_base = OTHER; note = 2'-O-methyl ribonucleotide
  modified_base 70: mod_base = OTHER; note = 2'-O-methyl ribonucleotide
  modified_base 71: mod_base = OTHER; note = 2'-O-methyl ribonucleotide
  modified_base 72: mod_base = OTHER; note = 2'-O-methyl ribonucleotide
  modified_base 73: mod_base = OTHER; note = 2'-O-methyl ribonucleotide
  modified_base 74: mod_base = OTHER; note = 2'-O-methyl ribonucleotide
  modified_base 75: mod_base = OTHER; note = 2'-O-methyl ribonucleotide
  modified_base 76: mod_base = OTHER; note = 2'-O-methyl ribonucleotide
  modified_base 77: mod_base = OTHER; note = 2'-O-methyl ribonucleotide
  modified_base 78: mod_base = OTHER; note = 2'-O-methyl ribonucleotide
  modified_base 79: mod_base = OTHER; note = 2'-O-methyl ribonucleotide
  modified_base 80: mod_base = OTHER; note = 2'-O-methyl ribonucleotide
  modified_base 81: mod_base = OTHER; note = 2'-O-methyl ribonucleotide
  modified_base 83: mod_base = OTHER; note = 2'-O-methyl ribonucleotide
  modified_base 84: mod_base = OTHER; note = 2'-O-methyl ribonucleotide
  modified_base 85: mod_base = OTHER; note = 2'-O-methyl ribonucleotide
  modified_base 86: mod_base = OTHER; note = 2'-O-methyl ribonucleotide
  modified_base 87: mod_base = OTHER; note = 2'-O-methyl ribonucleotide
  modified_base 88: mod_base = OTHER; note = 2'-O-methyl ribonucleotide
  modified_base 89: mod_base = OTHER; note = 2'-O-methyl ribonucleotide
  modified_base 90: mod_base = OTHER; note = 2'-O-methyl ribonucleotide
  modified_base 91: mod_base = OTHER; note = 2'-O-methyl ribonucleotide
  modified_base 92: mod_base = OTHER; note = 2'-O-methyl ribonucleotide
  modified_base 93: mod_base = OTHER; note = 2'-O-methyl ribonucleotide
  modified_base 94: mod_base = OTHER; note = 2'-O-methyl ribonucleotide
  modified_base 95: mod_base = OTHER; note = 2'-O-methyl ribonucleotide
  modified_base 96: mod_base = OTHER; note = 2'-O-methyl ribonucleotide
  modified_base 97: mod_base = OTHER; note = 2'-O-methyl ribonucleotide
  modified_base 98: mod_base = OTHER; note = 2'-O-methyl ribonucleotide
  modified_base 99: mod_base = OTHER; note = 2'-O-methyl ribonucleotide
  modified_base 100: mod_base = OTHER; note = 2'-O-methyl ribonucleotide
  modified_base 1..4: mod_base = OTHER; note = phosphorothioate linkage
  modified_base 25..26: mod_base = OTHER; note = phosphorothioate linkage
  modified_base 45..46: mod_base = OTHER; note = phosphorothioate linkage
  modified_base 64..65: mod_base = OTHER; note = phosphorothioate linkage
  modified_base 98..100: mod_base = OTHER; note = phosphorothioate linkage

SEQ ID NO: 2703 - RNA, 103 nt, synthetic construct; identical to SEQ ID NO: 1699
  source 1..103: mol_type = other RNA
  modified_base 1: mod_base = OTHER; note = 2'-O-methyl ribonucleotide
  modified_base 2: mod_base = OTHER; note = 2'-O-methyl ribonucleotide
  modified_base 3: mod_base = OTHER; note = 2'-O-methyl ribonucleotide
  modified_base 21: mod_base = OTHER; note = 2'-O-methyl ribonucleotide
  modified_base 28: mod_base = OTHER; note = 2'-O-methyl ribonucleotide
  modified_base 29: mod_base = OTHER; note = 2'-O-methyl ribonucleotide
  modified_base 30: mod_base = OTHER; note = 2'-O-methyl ribonucleotide
  modified_base 31: mod_base = OTHER; note = 2'-O-methyl ribonucleotide
  modified_base 32: mod_base = OTHER; note = 2'-O-methyl ribonucleotide
  modified_base 34: mod_base = OTHER; note = 2'-O-methyl ribonucleotide
  modified_base 35: mod_base = OTHER; note = 2'-O-methyl ribonucleotide
  modified_base 36: mod_base = OTHER; note = 2'-O-methyl ribonucleotide
  modified_base 37: mod_base = OTHER; note = 2'-O-methyl ribonucleotide
  modified_base 38: mod_base = OTHER; note = 2'-O-methyl ribonucleotide
  modified_base 39: mod_base = OTHER; note = 2'-O-methyl ribonucleotide
  modified_base 40: mod_base = OTHER; note = 2'-O-methyl ribonucleotide
  modified_base 41: mod_base = OTHER; note = 2'-O-methyl ribonucleotide
  modified_base 42: mod_base = OTHER; note = 2'-O-methyl ribonucleotide
  modified_base 46: mod_base = OTHER; note = 2'-O-methyl ribonucleotide
  modified_base 48: mod_base = OTHER; note = 2'-O-methyl ribonucleotide
  modified_base 50: mod_base = OTHER; note = 2'-O-methyl ribonucleotide
  modified_base 52: mod_base = OTHER; note = 2'-O-methyl ribonucleotide
  modified_base 53: mod_base = OTHER; note = 2'-O-methyl ribonucleotide
  modified_base 54: mod_base = OTHER; note = 2'-O-methyl ribonucleotide
  modified_base 55: mod_base = OTHER; note = 2'-O-methyl ribonucleotide
  modified_base 56: mod_base = OTHER; note = 2'-O-methyl ribonucleotide
  modified_base 57: mod_base = OTHER; note = 2'-O-methyl ribonucleotide
  modified_base 60: mod_base = OTHER; note = 2'-O-methyl ribonucleotide
  modified_base 61: mod_base = OTHER; note = 2'-O-methyl ribonucleotide
  modified_base 66: mod_base = OTHER; note = 2'-O-methyl ribonucleotide
  modified_base 67: mod_base = OTHER; note = 2'-O-methyl ribonucleotide
  modified_base 70: mod_base = OTHER; note = 2'-O-methyl ribonucleotide
  modified_base 71: mod_base = OTHER; note = 2'-O-methyl ribonucleotide
  modified_base 72: mod_base = OTHER; note = 2'-O-methyl ribonucleotide
  modified_base 74: mod_base = OTHER; note = 2'-O-methyl ribonucleotide
  modified_base 75: mod_base = OTHER; note = 2'-O-methyl ribonucleotide
  modified_base 76: mod_base = OTHER; note = 2'-O-methyl ribonucleotide
  modified_base 77: mod_base = OTHER; note = 2'-O-methyl ribonucleotide
  modified_base 78: mod_base = OTHER; note = 2'-O-methyl ribonucleotide
  modified_base 79: mod_base = OTHER; note = 2'-O-methyl ribonucleotide
  modified_base 80: mod_base = OTHER; note = 2'-O-methyl ribonucleotide
  modified_base 81: mod_base = OTHER; note = 2'-O-methyl ribonucleotide
  modified_base 83: mod_base = OTHER; note = 2'-O-methyl ribonucleotide
  modified_base 84: mod_base = OTHER; note = 2'-O-methyl ribonucleotide
  modified_base 85: mod_base = OTHER; note = 2'-O-methyl ribonucleotide
  modified_base 86: mod_base = OTHER; note = 2'-O-methyl ribonucleotide
  modified_base 87: mod_base = OTHER; note = 2'-O-methyl ribonucleotide
  modified_base 88: mod_base = OTHER; note = 2'-O-methyl ribonucleotide
  modified_base 89: mod_base = OTHER; note = 2'-O-methyl ribonucleotide
  modified_base 90: mod_base = OTHER; note = 2'-O-methyl ribonucleotide
  modified_base 91: mod_base = OTHER; note = 2'-O-methyl ribonucleotide
  modified_base 92: mod_base = OTHER; note = 2'-O-methyl ribonucleotide
  modified_base 93: mod_base = OTHER; note = 2'-O-methyl ribonucleotide
  modified_base 94: mod_base = OTHER; note = 2'-O-methyl ribonucleotide
  modified_base 95: mod_base = OTHER; note = 2'-O-methyl ribonucleotide
  modified_base 96: mod_base = OTHER; note = 2'-O-methyl ribonucleotide
  modified_base 97: mod_base = OTHER; note = 2'-O-methyl ribonucleotide
  modified_base 98: mod_base = OTHER; note = 2'-O-methyl ribonucleotide
  modified_base 99: mod_base = OTHER; note = 2'-O-methyl ribonucleotide
  modified_base 100: mod_base = OTHER; note = 2'-O-methyl ribonucleotide
  modified_base 1..4: mod_base = OTHER; note = phosphorothioate linkage
  modified_base 25..26: mod_base = OTHER; note = phosphorothioate linkage
  modified_base 45..46: mod_base = OTHER; note = phosphorothioate linkage
  modified_base 64..65: mod_base = OTHER; note = phosphorothioate linkage
  modified_base 98..100: mod_base = OTHER; note = phosphorothioate linkage

SEQ ID NO: 2704 - RNA, 103 nt, synthetic construct; identical to SEQ ID NO: 1700
  source 1..103: mol_type = other RNA
  modified_base 1: mod_base = OTHER; note = 2'-O-methyl ribonucleotide
  modified_base 2: mod_base = OTHER; note = 2'-O-methyl ribonucleotide
  modified_base 3: mod_base = OTHER; note = 2'-O-methyl ribonucleotide
  modified_base 21: mod_base = OTHER; note = 2'-O-methyl ribonucleotide
  modified_base 28: mod_base = OTHER; note = 2'-O-methyl ribonucleotide
  modified_base 29: mod_base = OTHER; note = 2'-O-methyl ribonucleotide
  modified_base 30: mod_base = OTHER; note = 2'-O-methyl ribonucleotide
  modified_base 31: mod_base = OTHER; note = 2'-O-methyl ribonucleotide
  modified_base 32: mod_base = OTHER; note = 2'-O-methyl ribonucleotide
  modified_base 33: mod_base = OTHER; note = 2'-O-methyl ribonucleotide
  modified_base 34: mod_base = OTHER; note = 2'-O-methyl ribonucleotide
  modified_base 35: mod_base = OTHER; note = 2'-O-methyl ribonucleotide
  modified_base 36: mod_base = OTHER; note = 2'-O-methyl ribonucleotide
  modified_base 37: mod_base = OTHER; note = 2'-O-methyl ribonucleotide
  modified_base 38: mod_base = OTHER; note = 2'-O-methyl ribonucleotide
  modified_base 39: mod_base = OTHER; note = 2'-O-methyl ribonucleotide
  modified_base 40: mod_base = OTHER; note = 2'-O-methyl ribonucleotide
  modified_base 41: mod_base = OTHER; note = 2'-O-methyl ribonucleotide
  modified_base 42: mod_base = OTHER; note = 2'-O-methyl ribonucleotide
  modified_base 46: mod_base = OTHER; note = 2'-O-methyl ribonucleotide
  modified_base 48: mod_base = OTHER; note = 2'-O-methyl ribonucleotide
  modified_base 50: mod_base = OTHER; note = 2'-O-methyl ribonucleotide
  modified_base 52: mod_base = OTHER; note = 2'-O-methyl ribonucleotide
  modified_base 53: mod_base = OTHER; note = 2'-O-methyl ribonucleotide
  modified_base 54: mod_base = OTHER; note = 2'-O-methyl ribonucleotide
  modified_base 57: mod_base = OTHER; note = 2'-O-methyl ribonucleotide
  modified_base 61: mod_base = OTHER; note = 2'-O-methyl ribonucleotide
  modified_base 66: mod_base = OTHER; note = 2'-O-methyl ribonucleotide
  modified_base 67: mod_base = OTHER; note = 2'-O-methyl ribonucleotide
  modified_base 70: mod_base = OTHER; note = 2'-O-methyl ribonucleotide
  modified_base 71: mod_base = OTHER; note = 2'-O-methyl ribonucleotide
  modified_base 72: mod_base = OTHER; note = 2'-O-methyl ribonucleotide
  modified_base 74: mod_base = OTHER; note = 2'-O-methyl ribonucleotide
  modified_base 75: mod_base = OTHER; note = 2'-O-methyl ribonucleotide
  modified_base 76: mod_base = OTHER; note = 2'-O-methyl ribonucleotide
  modified_base 77: mod_base = OTHER; note = 2'-O-methyl ribonucleotide
  modified_base 78: mod_base = OTHER; note = 2'-O-methyl ribonucleotide
  modified_base 79: mod_base = OTHER; note = 2'-O-methyl ribonucleotide
  modified_base 80: mod_base = OTHER; note = 2'-O-methyl ribonucleotide
  modified_base 82: mod_base = OTHER; note = 2'-O-methyl ribonucleotide
  modified_base 83: mod_base = OTHER; note = 2'-O-methyl ribonucleotide
  modified_base 84: mod_base = OTHER; note = 2'-O-methyl ribonucleotide
  modified_base 85: mod_base = OTHER; note = 2'-O-methyl ribonucleotide
  modified_base 86: mod_base = OTHER; note = 2'-O-methyl ribonucleotide
  modified_base 87: mod_base = OTHER; note = 2'-O-methyl ribonucleotide
  modified_base 89: mod_base = OTHER; note = 2'-O-methyl ribonucleotide
  modified_base 92: mod_base = OTHER; note = 2'-O-methyl ribonucleotide
  modified_base 93: mod_base = OTHER; note = 2'-O-methyl ribonucleotide
  modified_base 94: mod_base = OTHER; note = 2'-O-methyl ribonucleotide
  modified_base 95: mod_base = OTHER; note = 2'-O-methyl ribonucleotide
  modified_base 96: mod_base = OTHER; note = 2'-O-methyl ribonucleotide
  modified_base 97: mod_base = OTHER; note = 2'-O-methyl ribonucleotide
  modified_base 98: mod_base = OTHER; note = 2'-O-methyl ribonucleotide
  modified_base 99: mod_base = OTHER; note = 2'-O-methyl ribonucleotide
  modified_base 100: mod_base = OTHER; note = 2'-O-methyl ribonucleotide
  modified_base 1..4: mod_base = OTHER; note = phosphorothioate linkage
  modified_base 25..26: mod_base = OTHER; note = phosphorothioate linkage
  modified_base 45..46: mod_base = OTHER; note = phosphorothioate linkage
  modified_base 64..65: mod_base = OTHER; note = phosphorothioate linkage
  modified_base 98..100: mod_base = OTHER; note = phosphorothioate linkage

SEQ ID NO: 2705 - RNA, 103 nt, synthetic construct; identical to SEQ ID NO: 1700
  source 1..103: mol_type = other RNA
  modified_base 1: mod_base = OTHER; note = 2'-O-methyl ribonucleotide
  modified_base 2: mod_base = OTHER; note = 2'-O-methyl ribonucleotide
  modified_base 3: mod_base = OTHER; note = 2'-O-methyl ribonucleotide
  modified_base 21: mod_base = OTHER; note = 2'-O-methyl ribonucleotide
  modified_base 28: mod_base = OTHER; note = 2'-O-methyl ribonucleotide
  modified_base 29: mod_base = OTHER; note = 2'-O-methyl ribonucleotide
  modified_base 30: mod_base = OTHER; note = 2'-O-methyl ribonucleotide
  modified_base 31: mod_base = OTHER; note = 2'-O-methyl ribonucleotide
  modified_base 32: mod_base = OTHER; note = 2'-O-methyl ribonucleotide
  modified_base 33: mod_base = OTHER; note = 2'-O-methyl ribonucleotide
  modified_base 34: mod_base = OTHER; note = 2'-O-methyl ribonucleotide
  modified_base 35: mod_base = OTHER; note = 2'-O-methyl ribonucleotide
  modified_base 36: mod_base = OTHER; note = 2'-O-methyl ribonucleotide
  modified_base 37: mod_base = OTHER; note = 2'-O-methyl ribonucleotide
  modified_base 38: mod_base = OTHER; note = 2'-O-methyl ribonucleotide
  modified_base 39: mod_base = OTHER; note = 2'-O-methyl ribonucleotide
  modified_base 40: mod_base = OTHER; note = 2'-O-methyl ribonucleotide
  modified_base 41: mod_base = OTHER; note = 2'-O-methyl ribonucleotide
  modified_base 42: mod_base = OTHER; note = 2'-O-methyl ribonucleotide
  modified_base 46: mod_base = OTHER; note = 2'-O-methyl ribonucleotide
  modified_base 48: mod_base = OTHER; note = 2'-O-methyl ribonucleotide
  modified_base 50: mod_base = OTHER; note = 2'-O-methyl ribonucleotide
  modified_base 52: mod_base = OTHER; note = 2'-O-methyl ribonucleotide
  modified_base 53: mod_base = OTHER; note = 2'-O-methyl ribonucleotide
  modified_base 54: mod_base = OTHER; note = 2'-O-methyl ribonucleotide
  modified_base 55: mod_base = OTHER; note = 2'-O-methyl ribonucleotide
  modified_base 56: mod_base = OTHER; note = 2'-O-methyl ribonucleotide
  modified_base 57: mod_base = OTHER; note = 2'-O-methyl ribonucleotide
  modified_base 60: mod_base = OTHER; note = 2'-O-methyl ribonucleotide
  modified_base 61: mod_base = OTHER; note = 2'-O-methyl ribonucleotide
  modified_base 66: mod_base = OTHER; note = 2'-O-methyl ribonucleotide
  modified_base 67: mod_base = OTHER; note = 2'-O-methyl ribonucleotide
  modified_base 70: mod_base = OTHER; note = 2'-O-methyl ribonucleotide
  modified_base 71: mod_base = OTHER; note = 2'-O-methyl ribonucleotide
  modified_base 72: mod_base = OTHER; note = 2'-O-methyl ribonucleotide
  modified_base 74: mod_base = OTHER; note = 2'-O-methyl ribonucleotide
  modified_base 75: mod_base = OTHER; note = 2'-O-methyl ribonucleotide
  modified_base 76: mod_base = OTHER; note = 2'-O-methyl ribonucleotide
  modified_base 77: mod_base = OTHER; note = 2'-O-methyl ribonucleotide
  modified_base 78: mod_base = OTHER; note = 2'-O-methyl ribonucleotide
  modified_base 79: mod_base = OTHER; note = 2'-O-methyl ribonucleotide
  modified_base 80: mod_base = OTHER; note = 2'-O-methyl ribonucleotide
  modified_base 82: mod_base = OTHER; note = 2'-O-methyl ribonucleotide
  modified_base 83: mod_base = OTHER; note = 2'-O-methyl ribonucleotide
  modified_base 84: mod_base = OTHER; note = 2'-O-methyl ribonucleotide
  modified_base 85: mod_base = OTHER; note = 2'-O-methyl ribonucleotide
  modified_base 86: mod_base = OTHER; note = 2'-O-methyl ribonucleotide
  modified_base 87: mod_base = OTHER; note = 2'-O-methyl ribonucleotide
  modified_base 89: mod_base = OTHER; note = 2'-O-methyl ribonucleotide
  modified_base 92: mod_base = OTHER; note = 2'-O-methyl ribonucleotide
  modified_base 93: mod_base = OTHER; note = 2'-O-methyl ribonucleotide
  modified_base 94: mod_base = OTHER; note = 2'-O-methyl ribonucleotide
  modified_base 95: mod_base = OTHER; note = 2'-O-methyl ribonucleotide
  modified_base 96: mod_base = OTHER; note = 2'-O-methyl ribonucleotide
  modified_base 97: mod_base = OTHER; note = 2'-O-methyl ribonucleotide
  modified_base 98: mod_base = OTHER; note = 2'-O-methyl ribonucleotide
  modified_base 99: mod_base = OTHER; note = 2'-O-methyl ribonucleotide
  modified_base 100: mod_base = OTHER; note = 2'-O-methyl ribonucleotide
  modified_base 1..4: mod_base = OTHER; note = phosphorothioate linkage
  modified_base 25..26: mod_base = OTHER; note = phosphorothioate linkage
  modified_base 45..46: mod_base = OTHER; note = phosphorothioate linkage
  modified_base 64..65: mod_base = OTHER; note = phosphorothioate linkage
  modified_base 98..100: mod_base = OTHER; note = phosphorothioate linkage

SEQ ID NO: 2706 - RNA, 103 nt, synthetic construct; identical to SEQ ID NO: 1700
  source 1..103: mol_type = other RNA
  modified_base 1: mod_base = OTHER; note = 2'-O-methyl ribonucleotide
  modified_base 2: mod_base = OTHER; note = 2'-O-methyl ribonucleotide
  modified_base 3: mod_base = OTHER; note = 2'-O-methyl ribonucleotide
  modified_base 21: mod_base = OTHER; note = 2'-O-methyl ribonucleotide
  modified_base 28: mod_base = OTHER; note = 2'-O-methyl ribonucleotide
  modified_base 29: mod_base = OTHER; note = 2'-O-methyl ribonucleotide
  modified_base 30: mod_base = OTHER; note = 2'-O-methyl ribonucleotide
  modified_base 31: mod_base = OTHER; note = 2'-O-methyl ribonucleotide
  modified_base 32: mod_base = OTHER; note = 2'-O-methyl ribonucleotide
  modified_base 33: mod_base = OTHER; note = 2'-O-methyl ribonucleotide
  modified_base 34: mod_base = OTHER; note = 2'-O-methyl ribonucleotide
  modified_base 35: mod_base = OTHER; note = 2'-O-methyl ribonucleotide
  modified_base 36: mod_base = OTHER; note = 2'-O-methyl ribonucleotide
  modified_base 37: mod_base = OTHER; note = 2'-O-methyl ribonucleotide
  modified_base 38: mod_base = OTHER; note = 2'-O-methyl ribonucleotide
  modified_base 39: mod_base = OTHER; note = 2'-O-methyl ribonucleotide
  modified_base 40: mod_base = OTHER; note = 2'-O-methyl ribonucleotide
  modified_base 41: mod_base = OTHER; note = 2'-O-methyl ribonucleotide
  modified_base 42: mod_base = OTHER; note = 2'-O-methyl ribonucleotide
  modified_base 46: mod_base = OTHER; note = 2'-O-methyl ribonucleotide
  modified_base 48: mod_base = OTHER; note = 2'-O-methyl ribonucleotide
  modified_base 50: mod_base = OTHER; note = 2'-O-methyl ribonucleotide
  modified_base 52: mod_base = OTHER; note = 2'-O-methyl ribonucleotide
  modified_base 53: mod_base = OTHER; note = 2'-O-methyl ribonucleotide
  modified_base 54: mod_base = OTHER; note = 2'-O-methyl ribonucleotide
  modified_base 57: mod_base = OTHER; note = 2'-O-methyl ribonucleotide
  modified_base 61: mod_base = OTHER; note = 2'-O-methyl ribonucleotide
  modified_base 66: mod_base = OTHER; note = 2'-O-methyl ribonucleotide
  modified_base 67: mod_base = OTHER; note = 2'-O-methyl ribonucleotide
  modified_base 70: mod_base = OTHER; note = 2'-O-methyl ribonucleotide
  modified_base 71: mod_base = OTHER; note = 2'-O-methyl ribonucleotide
  modified_base 72: mod_base = OTHER; note = 2'-O-methyl ribonucleotide
  modified_base 73: mod_base = OTHER; note = 2'-O-methyl ribonucleotide
  modified_base 74: mod_base = OTHER; note = 2'-O-methyl ribonucleotide
  modified_base 75: mod_base = OTHER; note = 2'-O-methyl ribonucleotide
  modified_base 76: mod_base = OTHER; note = 2'-O-methyl ribonucleotide
  modified_base 77: mod_base = OTHER; note = 2'-O-methyl ribonucleotide
  modified_base 78: mod_base = OTHER; note = 2'-O-methyl ribonucleotide
  modified_base 79: mod_base = OTHER; note = 2'-O-methyl ribonucleotide
  modified_base 80: mod_base = OTHER; note = 2'-O-methyl ribonucleotide
  modified_base 82: mod_base = OTHER; note = 2'-O-methyl ribonucleotide
  modified_base 83: mod_base = OTHER; note = 2'-O-methyl ribonucleotide
  modified_base 84: mod_base = OTHER; note = 2'-O-methyl ribonucleotide
  modified_base 85: mod_base = OTHER; note = 2'-O-methyl ribonucleotide
  modified_base 86: mod_base = OTHER; note = 2'-O-methyl ribonucleotide
  modified_base 87: mod_base = OTHER; note = 2'-O-methyl ribonucleotide
  modified_base 89: mod_base = OTHER; note = 2'-O-methyl ribonucleotide
  modified_base 92: mod_base = OTHER; note = 2'-O-methyl ribonucleotide
  modified_base 93: mod_base = OTHER; note = 2'-O-methyl ribonucleotide
  modified_base 94: mod_base = OTHER; note = 2'-O-methyl ribonucleotide
  modified_base 95: mod_base = OTHER; note = 2'-O-methyl ribonucleotide
  modified_base 96: mod_base = OTHER; note = 2'-O-methyl ribonucleotide
  modified_base 97: mod_base = OTHER; note = 2'-O-methyl ribonucleotide
  modified_base 98: mod_base = OTHER; note = 2'-O-methyl ribonucleotide
  modified_base 99: mod_base = OTHER; note = 2'-O-methyl ribonucleotide
  modified_base 100: mod_base = OTHER; note = 2'-O-methyl ribonucleotide
  modified_base 1..4: mod_base = OTHER; note = phosphorothioate linkage
  modified_base 25..26: mod_base = OTHER; note = phosphorothioate linkage
  modified_base 45..46: mod_base = OTHER; note = phosphorothioate linkage
  modified_base 64..65: mod_base = OTHER; note = phosphorothioate linkage
  modified_base 98..100: mod_base = OTHER; note = phosphorothioate linkage

SEQ ID NO: 2707 - RNA, 103 nt, synthetic construct; identical to SEQ ID NO: 1700
  source 1..103: mol_type = other RNA
  modified_base 1: mod_base = OTHER; note = 2'-O-methyl ribonucleotide
  modified_base 2: mod_base = OTHER; note = 2'-O-methyl ribonucleotide
  modified_base 3: mod_base = OTHER; note = 2'-O-methyl ribonucleotide
  modified_base 21: mod_base = OTHER; note = 2'-O-methyl ribonucleotide
  modified_base 28: mod_base = OTHER; note = 2'-O-methyl ribonucleotide
  modified_base 29: mod_base = OTHER; note = 2'-O-methyl ribonucleotide
  modified_base 30: mod_base = OTHER; note = 2'-O-methyl ribonucleotide
  modified_base 31: mod_base = OTHER; note = 2'-O-methyl ribonucleotide
  modified_base 32: mod_base = OTHER; note = 2'-O-methyl ribonucleotide
  modified_base 33: mod_base = OTHER; note = 2'-O-methyl ribonucleotide
  modified_base 34: mod_base = OTHER; note = 2'-O-methyl ribonucleotide
  modified_base 35: mod_base = OTHER; note = 2'-O-methyl ribonucleotide
  modified_base 36: mod_base = OTHER; note = 2'-O-methyl ribonucleotide
  modified_base 37: mod_base = OTHER; note = 2'-O-methyl ribonucleotide
  modified_base 38: mod_base = OTHER; note = 2'-O-methyl ribonucleotide
  modified_base 39: mod_base = OTHER; note = 2'-O-methyl ribonucleotide
  modified_base 40: mod_base = OTHER; note = 2'-O-methyl ribonucleotide
  modified_base 41: mod_base = OTHER; note = 2'-O-methyl ribonucleotide
  modified_base 42: mod_base = OTHER; note = 2'-O-methyl ribonucleotide
  modified_base 46: mod_base = OTHER; note = 2'-O-methyl ribonucleotide
  modified_base 48: mod_base = OTHER; note = 2'-O-methyl ribonucleotide
  modified_base 50: mod_base = OTHER; note = 2'-O-methyl ribonucleotide
  modified_base 52: mod_base = OTHER; note = 2'-O-methyl ribonucleotide
  modified_base 53: mod_base = OTHER; note = 2'-O-methyl ribonucleotide
  modified_base 54: mod_base = OTHER; note = 2'-O-methyl ribonucleotide
  modified_base 57: mod_base = OTHER; note = 2'-O-methyl ribonucleotide
  modified_base 61: mod_base = OTHER; note = 2'-O-methyl ribonucleotide
  modified_base 66: mod_base = OTHER; note = 2'-O-methyl ribonucleotide
  modified_base 67: mod_base = OTHER; note = 2'-O-methyl ribonucleotide
  modified_base 70: mod_base = OTHER; note = 2'-O-methyl ribonucleotide
  modified_base 71: mod_base = OTHER; note = 2'-O-methyl ribonucleotide
  modified_base 72: mod_base = OTHER; note = 2'-O-methyl ribonucleotide
  modified_base 73: mod_base = OTHER; note = 2'-O-methyl ribonucleotide
  modified_base 74: mod_base = OTHER; note = 2'-O-methyl ribonucleotide
  modified_base 75: mod_base = OTHER; note = 2'-O-methyl ribonucleotide
  modified_base 76: mod_base = OTHER; note = 2'-O-methyl ribonucleotide
  modified_base 77: mod_base = OTHER; note = 2'-O-methyl ribonucleotide
  modified_base 78: mod_base = OTHER; note = 2'-O-methyl ribonucleotide
  modified_base 79: mod_base = OTHER; note = 2'-O-methyl ribonucleotide
  modified_base 80: mod_base = OTHER; note = 2'-O-methyl ribonucleotide
  modified_base 82: mod_base = OTHER; note = 2'-O-methyl ribonucleotide
  modified_base 83: mod_base = OTHER; note = 2'-O-methyl ribonucleotide
  modified_base 84: mod_base = OTHER; note = 2'-O-methyl ribonucleotide
  modified_base 85: mod_base = OTHER; note = 2'-O-methyl ribonucleotide
  modified_base 86: mod_base = OTHER; note = 2'-O-methyl ribonucleotide
  modified_base 87: mod_base = OTHER; note = 2'-O-methyl ribonucleotide
  modified_base 89: mod_base = OTHER; note = 2'-O-methyl ribonucleotide
  modified_base 91: mod_base = OTHER; note = 2'-O-methyl ribonucleotide
  modified_base 92: mod_base = OTHER; note = 2'-O-methyl ribonucleotide
  modified_base 93: mod_base = OTHER; note = 2'-O-methyl ribonucleotide
  modified_base 94: mod_base = OTHER; note = 2'-O-methyl ribonucleotide
  modified_base 95: mod_base = OTHER; note = 2'-O-methyl ribonucleotide
  modified_base 96: mod_base = OTHER; note = 2'-O-methyl ribonucleotide
  modified_base 97: mod_base = OTHER; note = 2'-O-methyl ribonucleotide
  modified_base 98: mod_base = OTHER; note = 2'-O-methyl ribonucleotide
  modified_base 99: mod_base = OTHER; note = 2'-O-methyl ribonucleotide
  modified_base 100: mod_base = OTHER; note = 2'-O-methyl ribonucleotide
  modified_base 1..4: mod_base = OTHER; note = phosphorothioate linkage
  modified_base 25..26: mod_base = OTHER; note = phosphorothioate linkage
  modified_base 45..46: mod_base = OTHER; note = phosphorothioate linkage
  modified_base 64..65: mod_base = OTHER; note = phosphorothioate linkage
  modified_base 98..100: mod_base = OTHER; note = phosphorothioate linkage

SEQ ID NO: 2708 - RNA, 103 nt, synthetic construct; identical to SEQ ID NO: 1700
  source 1..103: mol_type = other RNA
  modified_base 1: mod_base = OTHER; note = 2'-O-methyl ribonucleotide
  modified_base 2: mod_base = OTHER; note = 2'-O-methyl ribonucleotide
  modified_base 3: mod_base = OTHER; note = 2'-O-methyl ribonucleotide
  modified_base 21: mod_base = OTHER; note = 2'-O-methyl ribonucleotide
  modified_base 28: mod_base = OTHER; note = 2'-O-methyl ribonucleotide
  modified_base 29: mod_base = OTHER; note = 2'-O-methyl ribonucleotide
  modified_base 30: mod_base = OTHER; note = 2'-O-methyl ribonucleotide
  modified_base 31: mod_base = OTHER; note = 2'-O-methyl ribonucleotide
  modified_base 32: mod_base = OTHER; note = 2'-O-methyl ribonucleotide
  modified_base 34: mod_base = OTHER; note = 2'-O-methyl ribonucleotide
  modified_base 35: mod_base = OTHER; note = 2'-O-methyl ribonucleotide
  modified_base 36: mod_base = OTHER; note = 2'-O-methyl ribonucleotide
  modified_base 37: mod_base = OTHER; note = 2'-O-methyl ribonucleotide
  modified_base 38: mod_base = OTHER; note = 2'-O-methyl ribonucleotide
  modified_base 39: mod_base = OTHER; note = 2'-O-methyl ribonucleotide
  modified_base 40: mod_base = OTHER; note = 2'-O-methyl ribonucleotide
  modified_base 41: mod_base = OTHER; note = 2'-O-methyl ribonucleotide
  modified_base 42: mod_base = OTHER; note = 2'-O-methyl ribonucleotide
  modified_base 46: mod_base = OTHER; note = 2'-O-methyl ribonucleotide
  modified_base 48: mod_base = OTHER; note = 2'-O-methyl ribonucleotide
  modified_base 50: mod_base = OTHER; note = 2'-O-methyl ribonucleotide
  modified_base 52: mod_base = OTHER; note = 2'-O-methyl ribonucleotide
  modified_base 53: mod_base = OTHER; note = 2'-O-methyl ribonucleotide
  modified_base 54: mod_base = OTHER; note = 2'-O-methyl ribonucleotide
  modified_base 57: mod_base = OTHER; note = 2'-O-methyl ribonucleotide
  modified_base 61: mod_base = OTHER; note = 2'-O-methyl ribonucleotide
  modified_base 66: mod_base = OTHER; note = 2'-O-methyl ribonucleotide
  modified_base 67: mod_base = OTHER; note = 2'-O-methyl ribonucleotide
  modified_base 70: mod_base = OTHER; note = 2'-O-methyl ribonucleotide
  modified_base 71: mod_base = OTHER; note = 2'-O-methyl ribonucleotide
  modified_base 72: mod_base = OTHER; note = 2'-O-methyl ribonucleotide
  modified_base 73: mod_base = OTHER; note = 2'-O-methyl ribonucleotide
  modified_base 74: mod_base = OTHER; note = 2'-O-methyl ribonucleotide
  modified_base 75: mod_base = OTHER; note = 2'-O-methyl ribonucleotide
  modified_base 76: mod_base = OTHER; note = 2'-O-methyl ribonucleotide
  modified_base 77: mod_base = OTHER; note = 2'-O-methyl ribonucleotide
  modified_base 78: mod_base = OTHER; note = 2'-O-methyl ribonucleotide
  modified_base 79: mod_base = OTHER; note = 2'-O-methyl ribonucleotide
  modified_base 80: mod_base = OTHER; note = 2'-O-methyl ribonucleotide
  modified_base 82: mod_base = OTHER; note = 2'-O-methyl ribonucleotide
  modified_base 83: mod_base = OTHER; note = 2'-O-methyl ribonucleotide
  modified_base 84: mod_base = OTHER; note = 2'-O-methyl ribonucleotide
  modified_base 85: mod_base = OTHER; note = 2'-O-methyl ribonucleotide
  modified_base 86: mod_base = OTHER; note = 2'-O-methyl ribonucleotide
  modified_base 87: mod_base = OTHER; note = 2'-O-methyl ribonucleotide
  modified_base 89: mod_base = OTHER; note = 2'-O-methyl ribonucleotide
  modified_base 92: mod_base = OTHER; note = 2'-O-methyl ribonucleotide
  modified_base 93: mod_base = OTHER; note = 2'-O-methyl ribonucleotide
  modified_base 94: mod_base = OTHER; note = 2'-O-methyl ribonucleotide
  modified_base 95: mod_base = OTHER; note = 2'-O-methyl ribonucleotide
  modified_base 96: mod_base = OTHER; note = 2'-O-methyl ribonucleotide
  modified_base 97: mod_base = OTHER; note = 2'-O-methyl ribonucleotide
  modified_base 98: mod_base = OTHER; note = 2'-O-methyl ribonucleotide
  modified_base 99: mod_base = OTHER; note = 2'-O-methyl ribonucleotide
  modified_base 100: mod_base = OTHER; note = 2'-O-methyl ribonucleotide
  modified_base 1..4: mod_base = OTHER; note = phosphorothioate linkage
  modified_base 25..26: mod_base = OTHER; note = phosphorothioate linkage
  modified_base 45..46: mod_base = OTHER; note = phosphorothioate linkage
  modified_base 64..65: mod_base = OTHER; note = phosphorothioate linkage
  modified_base 98..100: mod_base = OTHER; note = phosphorothioate linkage

SEQ ID NO: 2709 - RNA, 103 nt, synthetic construct; identical to SEQ ID NO: 1700
  source 1..103: mol_type = other RNA
  modified_base 1: mod_base = OTHER; note = 2'-O-methyl ribonucleotide
  modified_base 2: mod_base = OTHER; note = 2'-O-methyl ribonucleotide
  modified_base 3: mod_base = OTHER; note = 2'-O-methyl ribonucleotide
  modified_base 21: mod_base = OTHER; note = 2'-O-methyl ribonucleotide
  modified_base 28: mod_base = OTHER; note = 2'-O-methyl ribonucleotide
  modified_base 29: mod_base = OTHER; note = 2'-O-methyl ribonucleotide
  modified_base 30: mod_base = OTHER; note = 2'-O-methyl ribonucleotide
  modified_base 31: mod_base = OTHER; note = 2'-O-methyl ribonucleotide
  modified_base 32: mod_base = OTHER; note = 2'-O-methyl ribonucleotide
  modified_base 34: mod_base = OTHER; note = 2'-O-methyl ribonucleotide
  modified_base 35: mod_base = OTHER; note = 2'-O-methyl ribonucleotide
  modified_base 36: mod_base = OTHER; note = 2'-O-methyl ribonucleotide
  modified_base 37: mod_base = OTHER; note = 2'-O-methyl ribonucleotide
  modified_base 38: mod_base = OTHER; note = 2'-O-methyl ribonucleotide
  modified_base 39: mod_base = OTHER; note = 2'-O-methyl ribonucleotide
  modified_base 40: mod_base = OTHER; note = 2'-O-methyl ribonucleotide
  modified_base 41: mod_base = OTHER; note = 2'-O-methyl ribonucleotide
  modified_base 42: mod_base = OTHER; note = 2'-O-methyl ribonucleotide
  modified_base 46: mod_base = OTHER; note = 2'-O-methyl ribonucleotide
  modified_base 48: mod_base = OTHER; note = 2'-O-methyl ribonucleotide
  modified_base 50: mod_base = OTHER; note = 2'-O-methyl ribonucleotide
  modified_base 52: mod_base = OTHER; note = 2'-O-methyl ribonucleotide
  modified_base 53: mod_base = OTHER; note = 2'-O-methyl ribonucleotide
  modified_base 54: mod_base = OTHER; note = 2'-O-methyl ribonucleotide
  modified_base 57: mod_base = OTHER; note = 2'-O-methyl ribonucleotide
  modified_base 61: mod_base = OTHER; note = 2'-O-methyl ribonucleotide
  modified_base 66: mod_base = OTHER; note = 2'-O-methyl ribonucleotide
  modified_base 67: mod_base = OTHER; note = 2'-O-methyl ribonucleotide
  modified_base 70: mod_base = OTHER; note = 2'-O-methyl ribonucleotide
  modified_base 71: mod_base = OTHER; note = 2'-O-methyl ribonucleotide
  modified_base 72: mod_base = OTHER; note = 2'-O-methyl ribonucleotide
  modified_base 73: mod_base = OTHER; note = 2'-O-methyl ribonucleotide
  modified_base 74: mod_base = OTHER; note = 2'-O-methyl ribonucleotide
  modified_base 75: mod_base = OTHER; note = 2'-O-methyl ribonucleotide
  modified_base 76: mod_base = OTHER; note = 2'-O-methyl ribonucleotide
  modified_base 77: mod_base = OTHER; note = 2'-O-methyl ribonucleotide
  modified_base 78: mod_base = OTHER; note = 2'-O-methyl ribonucleotide
  modified_base 79: mod_base = OTHER; note = 2'-O-methyl ribonucleotide
  modified_base 80: mod_base = OTHER; note = 2'-O-methyl ribonucleotide
  modified_base 82: mod_base = OTHER; note = 2'-O-methyl ribonucleotide
  modified_base 83: mod_base = OTHER; note = 2'-O-methyl ribonucleotide
  modified_base 84: mod_base = OTHER; note = 2'-O-methyl ribonucleotide
  modified_base 85: mod_base = OTHER; note = 2'-O-methyl ribonucleotide
  modified_base 86: mod_base = OTHER; note = 2'-O-methyl ribonucleotide
  modified_base 87: mod_base = OTHER; note = 2'-O-methyl ribonucleotide
  modified_base 89: mod_base = OTHER; note = 2'-O-methyl ribonucleotide
  modified_base 91: mod_base = OTHER; note = 2'-O-methyl ribonucleotide
  modified_base 92: mod_base = OTHER; note = 2'-O-methyl ribonucleotide
  modified_base 93: mod_base = OTHER; note = 2'-O-methyl ribonucleotide
  modified_base 94: mod_base = OTHER; note = 2'-O-methyl ribonucleotide
  modified_base 95: mod_base = OTHER; note = 2'-O-methyl ribonucleotide
  modified_base 96: mod_base = OTHER; note = 2'-O-methyl ribonucleotide
  modified_base 97: mod_base = OTHER; note = 2'-O-methyl ribonucleotide
  modified_base 98: mod_base = OTHER; note = 2'-O-methyl ribonucleotide
  modified_base 99: mod_base = OTHER; note = 2'-O-methyl ribonucleotide
  modified_base 100: mod_base = OTHER; note = 2'-O-methyl ribonucleotide
  modified_base 1..4: mod_base = OTHER; note = phosphorothioate linkage
  modified_base 25..26: mod_base = OTHER; note = phosphorothioate linkage
  modified_base 45..46: mod_base = OTHER; note = phosphorothioate linkage
  modified_base 64..65: mod_base = OTHER; note = phosphorothioate linkage
  modified_base 98..100: mod_base = OTHER; note = phosphorothioate linkage

SEQ ID NO: 2710 - RNA, 103 nt, synthetic construct; identical to SEQ ID NO: 1700
  source 1..103: mol_type = other RNA
  modified_base 1: mod_base = OTHER; note = 2'-O-methyl ribonucleotide
  modified_base 2: mod_base = OTHER; note = 2'-O-methyl ribonucleotide
  modified_base 3: mod_base = OTHER; note = 2'-O-methyl ribonucleotide
  modified_base 21: mod_base = OTHER; note = 2'-O-methyl ribonucleotide
  modified_base 28: mod_base = OTHER; note = 2'-O-methyl ribonucleotide
  modified_base 29: mod_base = OTHER; note = 2'-O-methyl ribonucleotide
  modified_base 30: mod_base = OTHER; note = 2'-O-methyl ribonucleotide
  modified_base 31: mod_base = OTHER; note = 2'-O-methyl ribonucleotide
  modified_base 32: mod_base = OTHER; note = 2'-O-methyl ribonucleotide
  modified_base 34: mod_base = OTHER; note = 2'-O-methyl ribonucleotide
  modified_base 35: mod_base = OTHER; note = 2'-O-methyl ribonucleotide
  modified_base 36: mod_base = OTHER; note = 2'-O-methyl ribonucleotide
  modified_base 37: mod_base = OTHER; note = 2'-O-methyl ribonucleotide
  modified_base 38: mod_base = OTHER; note = 2'-O-methyl ribonucleotide
  modified_base 39: mod_base = OTHER; note = 2'-O-methyl ribonucleotide
  modified_base 40: mod_base = OTHER; note = 2'-O-methyl ribonucleotide
  modified_base 41: mod_base = OTHER; note = 2'-O-methyl ribonucleotide
  modified_base 42: mod_base = OTHER; note = 2'-O-methyl ribonucleotide
  modified_base 46: mod_base = OTHER; note = 2'-O-methyl ribonucleotide
  modified_base 48: mod_base = OTHER; note = 2'-O-methyl ribonucleotide
  modified_base 50: mod_base = OTHER; note = 2'-O-methyl ribonucleotide
  modified_base 52: mod_base = OTHER; note = 2'-O-methyl ribonucleotide
  modified_base 53: mod_base = OTHER; note = 2'-O-methyl ribonucleotide
  modified_base 54: mod_base = OTHER; note = 2'-O-methyl ribonucleotide
  modified_base 55: mod_base = OTHER; note = 2'-O-methyl ribonucleotide
  modified_base 56: mod_base = OTHER; note = 2'-O-methyl ribonucleotide
  modified_base 57: mod_base = OTHER; note = 2'-O-methyl ribonucleotide
  modified_base 60: mod_base = OTHER; note = 2'-O-methyl ribonucleotide
  modified_base 61: mod_base = OTHER; note = 2'-O-methyl ribonucleotide
  modified_base 66: mod_base = OTHER; note = 2'-O-methyl ribonucleotide
  modified_base 67: mod_base = OTHER; note = 2'-O-methyl ribonucleotide
  modified_base 70: mod_base = OTHER; note = 2'-O-methyl ribonucleotide
  modified_base 71: mod_base = OTHER; note = 2'-O-methyl ribonucleotide
  modified_base 72: mod_base = OTHER; note = 2'-O-methyl ribonucleotide
  modified_base 74: mod_base = OTHER; note = 2'-O-methyl ribonucleotide
  modified_base 75: mod_base = OTHER; note = 2'-O-methyl ribonucleotide
  modified_base 76: mod_base = OTHER; note = 2'-O-methyl ribonucleotide
  modified_base 77: mod_base = OTHER; note = 2'-O-methyl ribonucleotide
  modified_base 78: mod_base = OTHER; note = 2'-O-methyl ribonucleotide
  modified_base 79: mod_base = OTHER; note = 2'-O-methyl ribonucleotide
  modified_base 80: mod_base = OTHER; note = 2'-O-methyl ribonucleotide
  modified_base 82: mod_base = OTHER; note = 2'-O-methyl ribonucleotide
  modified_base 83: mod_base = OTHER; note = 2'-O-methyl ribonucleotide
  modified_base 84: mod_base = OTHER; note = 2'-O-methyl ribonucleotide
  modified_base 85: mod_base = OTHER; note = 2'-O-methyl ribonucleotide
  modified_base 86: mod_base = OTHER; note = 2'-O-methyl ribonucleotide
  modified_base 87: mod_base = OTHER; note = 2'-O-methyl ribonucleotide
  modified_base 89: mod_base = OTHER; note = 2'-O-methyl ribonucleotide
  modified_base 92: mod_base = OTHER; note = 2'-O-methyl ribonucleotide
  modified_base 93: mod_base = OTHER; note = 2'-O-methyl ribonucleotide
  modified_base 94: mod_base = OTHER; note = 2'-O-methyl ribonucleotide
  modified_base 95: mod_base = OTHER; note = 2'-O-methyl ribonucleotide
  modified_base 96: mod_base = OTHER; note = 2'-O-methyl ribonucleotide
  modified_base 97: mod_base = OTHER; note = 2'-O-methyl ribonucleotide
  modified_base 98: mod_base = OTHER; note = 2'-O-methyl ribonucleotide
  modified_base 99: mod_base = OTHER; note = 2'-O-methyl ribonucleotide
  modified_base 100: mod_base = OTHER; note = 2'-O-methyl ribonucleotide
  modified_base 1..4: mod_base = OTHER; note = phosphorothioate linkage
  modified_base 25..26: mod_base = OTHER; note = phosphorothioate linkage
  modified_base 45..46: mod_base = OTHER; note = phosphorothioate linkage
  modified_base 64..65: mod_base = OTHER; note = phosphorothioate linkage
  modified_base 98..100: mod_base = OTHER; note = phosphorothioate linkage

SEQ ID NO: 2711 - RNA, 103 nt, synthetic construct; identical to SEQ ID NO: 1700
  source 1..103: mol_type = other RNA
  modified_base 1: mod_base = OTHER; note = 2'-O-methyl ribonucleotide
  modified_base 2: mod_base = OTHER; note = 2'-O-methyl ribonucleotide
  modified_base 3: mod_base = OTHER; note = 2'-O-methyl ribonucleotide
  modified_base 21: mod_base = OTHER; note = 2'-O-methyl ribonucleotide
  modified_base 28: mod_base = OTHER; note = 2'-O-methyl ribonucleotide
  modified_base 29: mod_base = OTHER; note = 2'-O-methyl ribonucleotide
  modified_base 30: mod_base = OTHER; note = 2'-O-methyl ribonucleotide
  modified_base 31: mod_base = OTHER; note = 2'-O-methyl ribonucleotide
  modified_base 32: mod_base = OTHER; note = 2'-O-methyl ribonucleotide
  modified_base 34: mod_base = OTHER; note = 2'-O-methyl ribonucleotide
  modified_base 35: mod_base = OTHER; note = 2'-O-methyl ribonucleotide
  modified_base 36: mod_base = OTHER; note = 2'-O-methyl ribonucleotide
  modified_base 37: mod_base = OTHER; note = 2'-O-methyl ribonucleotide
  modified_base 38: mod_base = OTHER; note = 2'-O-methyl ribonucleotide
  modified_base 39: mod_base = OTHER; note = 2'-O-methyl ribonucleotide
  modified_base 40: mod_base = OTHER; note = 2'-O-methyl ribonucleotide
  modified_base 41: mod_base = OTHER; note = 2'-O-methyl ribonucleotide
  modified_base 42: mod_base = OTHER; note = 2'-O-methyl ribonucleotide
  modified_base 46: mod_base = OTHER; note = 2'-O-methyl ribonucleotide
  modified_base 48: mod_base = OTHER; note = 2'-O-methyl ribonucleotide
  modified_base 50: mod_base = OTHER; note = 2'-O-methyl ribonucleotide
  modified_base 52: mod_base = OTHER; note = 2'-O-methyl ribonucleotide
  modified_base 53: mod_base = OTHER; note = 2'-O-methyl ribonucleotide
  modified_base 54: mod_base = OTHER; note = 2'-O-methyl ribonucleotide
  modified_base 55: mod_base = OTHER; note = 2'-O-methyl ribonucleotide
  modified_base 56: mod_base = OTHER; note = 2'-O-methyl ribonucleotide
  modified_base 57: mod_base = OTHER; note = 2'-O-methyl ribonucleotide
  modified_base 60: mod_base = OTHER; note = 2'-O-methyl ribonucleotide
  modified_base 61: mod_base = OTHER; note = 2'-O-methyl ribonucleotide
  modified_base 66: mod_base = OTHER; note = 2'-O-methyl ribonucleotide
  modified_base 67: mod_base = OTHER; note = 2'-O-methyl ribonucleotide
  modified_base 70: mod_base = OTHER; note = 2'-O-methyl ribonucleotide
  modified_base 71: mod_base = OTHER; note = 2'-O-methyl ribonucleotide
  modified_base 72: mod_base = OTHER; note = 2'-O-methyl ribonucleotide
  modified_base 74: mod_base = OTHER; note = 2'-O-methyl ribonucleotide
  modified_base 75: mod_base = OTHER; note = 2'-O-methyl ribonucleotide
  modified_base 76: mod_base = OTHER; note = 2'-O-methyl ribonucleotide
  modified_base 77: mod_base = OTHER; note = 2'-O-methyl ribonucleotide
  modified_base 78: mod_base = OTHER; note = 2'-O-methyl ribonucleotide
  modified_base 79: mod_base = OTHER; note = 2'-O-methyl ribonucleotide
  modified_base 80: mod_base = OTHER; note = 2'-O-methyl ribonucleotide
  modified_base 81: mod_base = OTHER; note = 2'-O-methyl ribonucleotide
  modified_base 83: mod_base = OTHER; note = 2'-O-methyl ribonucleotide
  modified_base 84: mod_base = OTHER; note = 2'-O-methyl ribonucleotide
  modified_base 85: mod_base = OTHER; note = 2'-O-methyl ribonucleotide
  modified_base 86: mod_base = OTHER; note = 2'-O-methyl ribonucleotide
  modified_base 87: mod_base = OTHER; note = 2'-O-methyl ribonucleotide
  modified_base 88: mod_base = OTHER; note = 2'-O-methyl ribonucleotide
  modified_base 89: mod_base = OTHER; note = 2'-O-methyl ribonucleotide
  modified_base 90: mod_base = OTHER; note = 2'-O-methyl ribonucleotide
  modified_base 91: mod_base = OTHER; note = 2'-O-methyl ribonucleotide
  modified_base 92: mod_base = OTHER; note = 2'-O-methyl ribonucleotide
  modified_base 93: mod_base = OTHER; note = 2'-O-methyl ribonucleotide
  modified_base 94: mod_base = OTHER; note = 2'-O-methyl ribonucleotide
  modified_base 95: mod_base = OTHER; note = 2'-O-methyl ribonucleotide
  modified_base 96: mod_base = OTHER; note = 2'-O-methyl ribonucleotide
  modified_base 97: mod_base = OTHER; note = 2'-O-methyl ribonucleotide
  modified_base 98: mod_base = OTHER; note = 2'-O-methyl ribonucleotide
  modified_base 99: mod_base = OTHER; note = 2'-O-methyl ribonucleotide
  modified_base 100: mod_base = OTHER; note = 2'-O-methyl ribonucleotide
  modified_base 1..3: mod_base = OTHER; note = phosphorothioate linkage
  modified_base 98..100: mod_base = OTHER; note = phosphorothioate linkage

SEQ ID NO: 2712 - RNA, 103 nt, synthetic construct; identical to SEQ ID NO: 1700
  source 1..103: mol_type = other RNA
  modified_base 1: mod_base = OTHER; note = 2'-O-methyl ribonucleotide
  modified_base 2: mod_base = OTHER; note = 2'-O-methyl ribonucleotide
  modified_base 3: mod_base = OTHER; note = 2'-O-methyl ribonucleotide
  modified_base 21: mod_base = OTHER; note = 2'-O-methyl ribonucleotide
  modified_base 28: mod_base = OTHER; note = 2'-O-methyl ribonucleotide
  modified_base 29: mod_base = OTHER; note = 2'-O-methyl ribonucleotide
  modified_base 30: mod_base = OTHER; note = 2'-O-methyl ribonucleotide
  modified_base 31: mod_base = OTHER; note = 2'-O-methyl ribonucleotide
  modified_base 32: mod_base = OTHER; note = 2'-O-methyl ribonucleotide
  modified_base 33: mod_base = OTHER; note = 2'-O-methyl ribonucleotide
  modified_base 34: mod_base = OTHER; note = 2'-O-methyl ribonucleotide
  modified_base 35: mod_base = OTHER; note = 2'-O-methyl ribonucleotide
  modified_base 36: mod_base = OTHER; note = 2'-O-methyl ribonucleotide
  modified_base 37: mod_base = OTHER; note = 2'-O-methyl ribonucleotide
  modified_base 38: mod_base = OTHER; note = 2'-O-methyl ribonucleotide
  modified_base 39: mod_base = OTHER; note = 2'-O-methyl ribonucleotide
  modified_base 40: mod_base = OTHER; note = 2'-O-methyl ribonucleotide
  modified_base 41: mod_base = OTHER; note = 2'-O-methyl ribonucleotide
  modified_base 42: mod_base = OTHER; note = 2'-O-methyl ribonucleotide
  modified_base 46: mod_base = OTHER; note = 2'-O-methyl ribonucleotide
  modified_base 48: mod_base = OTHER; note = 2'-O-methyl ribonucleotide
  modified_base 50: mod_base = OTHER; note = 2'-O-methyl ribonucleotide
  modified_base 52: mod_base = OTHER; note = 2'-O-methyl ribonucleotide
  modified_base 53: mod_base = OTHER; note = 2'-O-methyl ribonucleotide
  modified_base 54: mod_base = OTHER; note = 2'-O-methyl ribonucleotide
  modified_base 57: mod_base = OTHER; note = 2'-O-methyl ribonucleotide
  modified_base 61: mod_base = OTHER; note = 2'-O-methyl ribonucleotide
  modified_base 66: mod_base = OTHER; note = 2'-O-methyl ribonucleotide
  modified_base 67: mod_base = OTHER; note = 2'-O-methyl ribonucleotide
  modified_base 70: mod_base = OTHER; note = 2'-O-methyl ribonucleotide
  modified_base 71: mod_base = OTHER; note = 2'-O-methyl ribonucleotide
  modified_base 72: mod_base = OTHER; note = 2'-O-methyl ribonucleotide
  modified_base 74: mod_base = OTHER; note = 2'-O-methyl ribonucleotide
  modified_base 75: mod_base = OTHER; note = 2'-O-methyl ribonucleotide
  modified_base 76: mod_base = OTHER; note = 2'-O-methyl ribonucleotide
  modified_base 77: mod_base = OTHER; note = 2'-O-methyl ribonucleotide
  modified_base 78: mod_base = OTHER; note = 2'-O-methyl ribonucleotide
  modified_base 79: mod_base = OTHER; note = 2'-O-methyl ribonucleotide
  modified_base 80: mod_base = OTHER; note = 2'-O-methyl ribonucleotide
  modified_base 82: mod_base = OTHER; note = 2'-O-methyl ribonucleotide
  modified_base 83: mod_base = OTHER; note = 2'-O-methyl ribonucleotide
  modified_base 84: mod_base = OTHER; note = 2'-O-methyl ribonucleotide
  modified_base 85: mod_base = OTHER; note = 2'-O-methyl ribonucleotide
  modified_base 86: mod_base = OTHER; note = 2'-O-methyl ribonucleotide
  modified_base 87: mod_base = OTHER; note = 2'-O-methyl ribonucleotide
  modified_base 89: mod_base = OTHER; note = 2'-O-methyl ribonucleotide
  modified_base 92: mod_base = OTHER; note = 2'-O-methyl ribonucleotide
  modified_base 93: mod_base = OTHER; note = 2'-O-methyl ribonucleotide
  modified_base 94: mod_base = OTHER; note = 2'-O-methyl ribonucleotide
  modified_base 95: mod_base = OTHER; note = 2'-O-methyl ribonucleotide
  modified_base 96: mod_base = OTHER; note = 2'-O-methyl ribonucleotide
  modified_base 97: mod_base = OTHER; note = 2'-O-methyl ribonucleotide
  modified_base 98: mod_base = OTHER; note = 2'-O-methyl ribonucleotide
  modified_base 99: mod_base = OTHER; note = 2'-O-methyl ribonucleotide
  modified_base 100: mod_base = OTHER; note = 2'-O-methyl ribonucleotide
  modified_base 1..3: mod_base = OTHER; note = phosphorothioate linkage
  modified_base 98..100: mod_base = OTHER; note = phosphorothioate linkage

SEQ ID NO: 2713 - RNA, 103 nt, synthetic construct; identical to SEQ ID NO: 1700
  source 1..103: mol_type = other RNA
  modified_base 1: mod_base = OTHER; note = 2'-O-methyl ribonucleotide
  modified_base 2: mod_base = OTHER; note = 2'-O-methyl ribonucleotide
  modified_base 3: mod_base = OTHER; note = 2'-O-methyl ribonucleotide
  modified_base 21: mod_base = OTHER; note = 2'-O-methyl ribonucleotide
  modified_base 28: mod_base = OTHER; note = 2'-O-methyl ribonucleotide
  modified_base 29: mod_base = OTHER; note = 2'-O-methyl ribonucleotide
  modified_base 30: mod_base = OTHER; note = 2'-O-methyl ribonucleotide
  modified_base 31: mod_base = OTHER; note = 2'-O-methyl ribonucleotide
  modified_base 32: mod_base = OTHER; note = 2'-O-methyl ribonucleotide
  modified_base 33: mod_base = OTHER; note = 2'-O-methyl ribonucleotide
  modified_base 34: mod_base = OTHER; note = 2'-O-methyl ribonucleotide
  modified_base 35: mod_base = OTHER; note = 2'-O-methyl ribonucleotide
  modified_base 36: mod_base = OTHER; note = 2'-O-methyl ribonucleotide
  modified_base 37: mod_base = OTHER; note = 2'-O-methyl ribonucleotide
  modified_base 38: mod_base = OTHER; note = 2'-O-methyl ribonucleotide
  modified_base 39: mod_base = OTHER; note = 2'-O-methyl ribonucleotide
  modified_base 40: mod_base = OTHER; note = 2'-O-methyl ribonucleotide
  modified_base 41: mod_base = OTHER; note = 2'-O-methyl ribonucleotide
  modified_base 42: mod_base = OTHER; note = 2'-O-methyl ribonucleotide
  modified_base 46: mod_base = OTHER; note = 2'-O-methyl ribonucleotide
  modified_base 48: mod_base = OTHER; note = 2'-O-methyl ribonucleotide
  modified_base 50: mod_base = OTHER; note = 2'-O-methyl ribonucleotide
  modified_base 52: mod_base = OTHER; note = 2'-O-methyl ribonucleotide
  modified_base 53: mod_base = OTHER; note = 2'-O-methyl ribonucleotide
  modified_base 54: mod_base = OTHER; note = 2'-O-methyl ribonucleotide
  modified_base 55: mod_base = OTHER; note = 2'-O-methyl ribonucleotide
  modified_base 56: mod_base = OTHER; note = 2'-O-methyl ribonucleotide
  modified_base 57: mod_base = OTHER; note = 2'-O-methyl ribonucleotide
  modified_base 60: mod_base = OTHER; note = 2'-O-methyl ribonucleotide
  modified_base 61: mod_base = OTHER; note = 2'-O-methyl ribonucleotide
  modified_base 66: mod_base = OTHER; note = 2'-O-methyl ribonucleotide
  modified_base 67: mod_base = OTHER; note = 2'-O-methyl ribonucleotide
  modified_base 70: mod_base = OTHER; note = 2'-O-methyl ribonucleotide
  modified_base 71: mod_base = OTHER; note = 2'-O-methyl ribonucleotide
  modified_base 72: mod_base = OTHER; note = 2'-O-methyl ribonucleotide
  modified_base 74: mod_base = OTHER; note = 2'-O-methyl ribonucleotide
  modified_base 75: mod_base = OTHER; note = 2'-O-methyl ribonucleotide
  modified_base 76: mod_base = OTHER; note = 2'-O-methyl ribonucleotide
  modified_base 77: mod_base = OTHER; note = 2'-O-methyl ribonucleotide
  modified_base 78: mod_base = OTHER; note = 2'-O-methyl ribonucleotide
  modified_base 79: mod_base = OTHER; note = 2'-O-methyl ribonucleotide
  modified_base 80: mod_base = OTHER; note = 2'-O-methyl ribonucleotide
  modified_base 82: mod_base = OTHER; note = 2'-O-methyl ribonucleotide
  modified_base 83: mod_base = OTHER; note = 2'-O-methyl ribonucleotide
  modified_base 84: mod_base = OTHER; note = 2'-O-methyl ribonucleotide
  modified_base 85: mod_base = OTHER; note = 2'-O-methyl ribonucleotide
  modified_base 86: mod_base = OTHER; note = 2'-O-methyl ribonucleotide
  modified_base 87: mod_base = OTHER; note = 2'-O-methyl ribonucleotide
  modified_base 89: mod_base = OTHER; note = 2'-O-methyl ribonucleotide
  modified_base 92: mod_base = OTHER; note = 2'-O-methyl ribonucleotide
  modified_base 93: mod_base = OTHER; note = 2'-O-methyl ribonucleotide
  modified_base 94: mod_base = OTHER; note = 2'-O-methyl ribonucleotide
  modified_base 95: mod_base = OTHER; note = 2'-O-methyl ribonucleotide
  modified_base 96: mod_base = OTHER; note = 2'-O-methyl ribonucleotide
  modified_base 97: mod_base = OTHER; note = 2'-O-methyl ribonucleotide
  modified_base 98: mod_base = OTHER; note = 2'-O-methyl ribonucleotide
  modified_base 99: mod_base = OTHER; note = 2'-O-methyl ribonucleotide
  modified_base 100: mod_base = OTHER; note = 2'-O-methyl ribonucleotide
  modified_base 1..3: mod_base = OTHER; note = phosphorothioate linkage
  modified_base 98..100: mod_base = OTHER; note = phosphorothioate linkage

SEQ ID NO: 2714 - RNA, 103 nt, synthetic construct; identical to SEQ ID NO: 1700
  source 1..103: mol_type = other RNA
  modified_base 1: mod_base = OTHER; note = 2'-O-methyl ribonucleotide
  modified_base 2: mod_base = OTHER; note = 2'-O-methyl ribonucleotide
  modified_base 3: mod_base = OTHER; note = 2'-O-methyl ribonucleotide
  modified_base 21: mod_base = OTHER; note = 2'-O-methyl ribonucleotide
  modified_base 28: mod_base = OTHER; note = 2'-O-methyl ribonucleotide
  modified_base 29: mod_base = OTHER; note = 2'-O-methyl ribonucleotide
  modified_base 30: mod_base = OTHER; note = 2'-O-methyl ribonucleotide
  modified_base 31: mod_base = OTHER; note = 2'-O-methyl ribonucleotide
  modified_base 32: mod_base = OTHER; note = 2'-O-methyl ribonucleotide
  modified_base 33: mod_base = OTHER; note = 2'-O-methyl ribonucleotide
  modified_base 34: mod_base = OTHER; note = 2'-O-methyl ribonucleotide
  modified_base 35: mod_base = OTHER; note = 2'-O-methyl ribonucleotide
  modified_base 36: mod_base = OTHER; note = 2'-O-methyl ribonucleotide
  modified_base 37: mod_base = OTHER; note = 2'-O-methyl ribonucleotide
  modified_base 38: mod_base = OTHER; note = 2'-O-methyl ribonucleotide
  modified_base 39: mod_base = OTHER; note = 2'-O-methyl ribonucleotide
  modified_base 40: mod_base = OTHER; note = 2'-O-methyl ribonucleotide
  modified_base 41: mod_base = OTHER; note = 2'-O-methyl ribonucleotide
  modified_base 42: mod_base = OTHER; note = 2'-O-methyl ribonucleotide
  modified_base 46: mod_base = OTHER; note = 2'-O-methyl ribonucleotide
  modified_base 48: mod_base = OTHER; note = 2'-O-methyl ribonucleotide
  modified_base 50: mod_base = OTHER; note = 2'-O-methyl ribonucleotide
  modified_base 52: mod_base = OTHER; note = 2'-O-methyl ribonucleotide
  modified_base 53: mod_base = OTHER; note = 2'-O-methyl ribonucleotide
  modified_base 54: mod_base = OTHER; note = 2'-O-methyl ribonucleotide
  modified_base 57: mod_base = OTHER; note = 2'-O-methyl ribonucleotide
  modified_base 61: mod_base = OTHER; note = 2'-O-methyl ribonucleotide
  modified_base 66: mod_base = OTHER; note = 2'-O-methyl ribonucleotide
  modified_base 67: mod_base = OTHER; note = 2'-O-methyl ribonucleotide
  modified_base 70: mod_base = OTHER; note = 2'-O-methyl ribonucleotide
  modified_base 71: mod_base = OTHER; note = 2'-O-methyl ribonucleotide
  modified_base 72: mod_base = OTHER; note = 2'-O-methyl ribonucleotide
  modified_base 73: mod_base = OTHER; note = 2'-O-methyl ribonucleotide
  modified_base 74: mod_base = OTHER; note = 2'-O-methyl ribonucleotide
  modified_base 75: mod_base = OTHER; note = 2'-O-methyl ribonucleotide
  modified_base 76: mod_base = OTHER; note = 2'-O-methyl ribonucleotide
  modified_base 77: mod_base = OTHER; note = 2'-O-methyl ribonucleotide
  modified_base 78: mod_base = OTHER; note = 2'-O-methyl ribonucleotide
  modified_base 79: mod_base = OTHER; note = 2'-O-methyl ribonucleotide
  modified_base 80: mod_base = OTHER; note = 2'-O-methyl ribonucleotide
  modified_base 82: mod_base = OTHER; note = 2'-O-methyl ribonucleotide
  modified_base 83: mod_base = OTHER; note = 2'-O-methyl ribonucleotide
  modified_base 84: mod_base = OTHER; note = 2'-O-methyl ribonucleotide
  modified_base 85: mod_base = OTHER; note = 2'-O-methyl ribonucleotide
  modified_base 86: mod_base = OTHER; note = 2'-O-methyl ribonucleotide
  modified_base 87: mod_base = OTHER; note = 2'-O-methyl ribonucleotide
  modified_base 89: mod_base = OTHER; note = 2'-O-methyl ribonucleotide
  modified_base 92: mod_base = OTHER; note = 2'-O-methyl ribonucleotide
  modified_base 93: mod_base = OTHER; note = 2'-O-methyl ribonucleotide
  modified_base 94: mod_base = OTHER; note = 2'-O-methyl ribonucleotide
  modified_base 95: mod_base = OTHER; note = 2'-O-methyl ribonucleotide
  modified_base 96: mod_base = OTHER; note = 2'-O-methyl ribonucleotide
  modified_base 97: mod_base = OTHER; note = 2'-O-methyl ribonucleotide
  modified_base 98: mod_base = OTHER; note = 2'-O-methyl ribonucleotide
  modified_base 99: mod_base = OTHER; note = 2'-O-methyl ribonucleotide
  modified_base 100: mod_base = OTHER; note = 2'-O-methyl ribonucleotide
  modified_base 1..3: mod_base = OTHER; note = phosphorothioate linkage
  modified_base 98..100: mod_base = OTHER; note = phosphorothioate linkage

SEQ ID NO: 2715 - RNA, 103 nt, synthetic construct; identical to SEQ ID NO: 1700
  source 1..103: mol_type = other RNA
  modified_base 1: mod_base = OTHER; note = 2'-O-methyl ribonucleotide
  modified_base 2: mod_base = OTHER; note = 2'-O-methyl ribonucleotide
  modified_base 3: mod_base = OTHER; note = 2'-O-methyl ribonucleotide
  modified_base 21: mod_base = OTHER; note = 2'-O-methyl ribonucleotide
  modified_base 28: mod_base = OTHER; note = 2'-O-methyl ribonucleotide
  modified_base 29: mod_base = OTHER; note = 2'-O-methyl ribonucleotide
  modified_base 30: mod_base = OTHER; note = 2'-O-methyl ribonucleotide
  modified_base 31: mod_base = OTHER; note = 2'-O-methyl ribonucleotide
  modified_base 32: mod_base = OTHER; note = 2'-O-methyl ribonucleotide
  modified_base 33: mod_base = OTHER; note = 2'-O-methyl ribonucleotide
  modified_base 34: mod_base = OTHER; note = 2'-O-methyl ribonucleotide
  modified_base 35: mod_base = OTHER; note = 2'-O-methyl ribonucleotide
  modified_base 36: mod_base = OTHER; note = 2'-O-methyl ribonucleotide
  modified_base 37: mod_base = OTHER; note = 2'-O-methyl ribonucleotide
  modified_base 38: mod_base = OTHER; note = 2'-O-methyl ribonucleotide
  modified_base 39: mod_base = OTHER; note = 2'-O-methyl ribonucleotide
  modified_base 40: mod_base = OTHER; note = 2'-O-methyl ribonucleotide
  modified_base 41: mod_base = OTHER; note = 2'-O-methyl ribonucleotide
  modified_base 42: mod_base = OTHER; note = 2'-O-methyl ribonucleotide
  modified_base 46: mod_base = OTHER; note = 2'-O-methyl ribonucleotide
  modified_base 48: mod_base = OTHER; note = 2'-O-methyl ribonucleotide
  modified_base 50: mod_base = OTHER; note = 2'-O-methyl ribonucleotide
  modified_base 52: mod_base = OTHER; note = 2'-O-methyl ribonucleotide
  modified_base 53: mod_base = OTHER; note = 2'-O-methyl ribonucleotide
  modified_base 54: mod_base = OTHER; note = 2'-O-methyl ribonucleotide
  modified_base 57: mod_base = OTHER; note = 2'-O-methyl ribonucleotide
  modified_base 61: mod_base = OTHER; note = 2'-O-methyl ribonucleotide
  modified_base 66: mod_base = OTHER; note = 2'-O-methyl ribonucleotide
  modified_base 67: mod_base = OTHER; note = 2'-O-methyl ribonucleotide
  modified_base 70: mod_base = OTHER; note = 2'-O-methyl ribonucleotide
  modified_base 71: mod_base = OTHER; note = 2'-O-methyl ribonucleotide
  modified_base 72: mod_base = OTHER; note = 2'-O-methyl ribonucleotide
  modified_base 73: mod_base = OTHER; note = 2'-O-methyl ribonucleotide
  modified_base 74: mod_base = OTHER; note = 2'-O-methyl ribonucleotide
  modified_base 75: mod_base = OTHER; note = 2'-O-methyl ribonucleotide
  modified_base 76: mod_base = OTHER; note = 2'-O-methyl ribonucleotide
  modified_base 77: mod_base = OTHER; note = 2'-O-methyl ribonucleotide
  modified_base 78: mod_base = OTHER; note = 2'-O-methyl ribonucleotide
  modified_base 79: mod_base = OTHER; note = 2'-O-methyl ribonucleotide
  modified_base 80: mod_base = OTHER; note = 2'-O-methyl ribonucleotide
  modified_base 82: mod_base = OTHER; note = 2'-O-methyl ribonucleotide
  modified_base 83: mod_base = OTHER; note = 2'-O-methyl ribonucleotide
  modified_base 84: mod_base = OTHER; note = 2'-O-methyl ribonucleotide
  modified_base 85: mod_base = OTHER; note = 2'-O-methyl ribonucleotide
  modified_base 86: mod_base = OTHER; note = 2'-O-methyl ribonucleotide
  modified_base 87: mod_base = OTHER; note = 2'-O-methyl ribonucleotide
  modified_base 89: mod_base = OTHER; note = 2'-O-methyl ribonucleotide
  modified_base 91: mod_base = OTHER; note = 2'-O-methyl ribonucleotide
  modified_base 92: mod_base = OTHER; note = 2'-O-methyl ribonucleotide
  modified_base 93: mod_base = OTHER; note = 2'-O-methyl ribonucleotide
  modified_base 94: mod_base = OTHER; note = 2'-O-methyl ribonucleotide
  modified_base 95: mod_base = OTHER; note = 2'-O-methyl ribonucleotide
  modified_base 96: mod_base = OTHER; note = 2'-O-methyl ribonucleotide
  modified_base 97: mod_base = OTHER; note = 2'-O-methyl ribonucleotide
  modified_base 98: mod_base = OTHER; note = 2'-O-methyl ribonucleotide
  modified_base 99: mod_base = OTHER; note = 2'-O-methyl ribonucleotide
  modified_base 100: mod_base = OTHER; note = 2'-O-methyl ribonucleotide
  modified_base 1..3: mod_base = OTHER; note = phosphorothioate linkage
  modified_base 98..100: mod_base = OTHER; note = phosphorothioate linkage
